United States Patent Application Publication US 2007/0020625 A1 - sequence listing, part 7

SEQ ID NO: 5834 - DNA, 5648894 bp, Photorhabdus luminescens (residues 3,765,931-5,648,894 of 5,648,894)
  misc_feature (1135941)..(1135941): n is a, c, g, or t
  misc_feature (3459194)..(3459194): n is a, c, g, or t
  misc_feature (3474971)..(3474971): n is a, c, g, or t
  misc_feature (3540963)..(3540963): n is a, c, g, or t
  misc_feature (3600417)..(3600417): n is a, c, g, or t
  misc_feature (4864869)..(4864869): n is a, c, g, or t
  misc_feature (5648878)..(5648878): n is a, c, g, or t
cctgcggtggctattgcaagttttactgtatggctgctgcgtgattttgccatttggttactgttttctgacaaatttactgctatgcgtgatctatttgcctggcagttggtgggtgatgtcttgaaggtaggcgcttatgtttttggttatctggtgattgccaaggctgcgttgcgtttttatgtgttgacggaagttagccagtttttattgcttactggttttgcccactggcttattcctgtaaatggagcgttaggtgcagcacaagcctatatggcaacttacattatttatttcaccctttgttgtggtgcatttcttatttatcgtaggcgagcatgacaacccttattcacgttttgggatctgatatcccacatcacaatcgaacagtactgcgcttttttaatgacgtcttagtacaagaaattggttttttagccaaaccgaagtttatggtggtgacgaagaatcgcgctttattggatgattgcccggcattagatatggcattcttcgacagtaaaaaatctctggctcaggcggttattgctcaagcgtgttcagatagagattgccggttcttttttcatggtcaatttaatgtgagtttgtggttggcgctgttgtcaggaaaaatcaaacgtcatcagttttggtggcatgcttggggagctgatctgtatgaagactcccagcagttaaaattccgtctattctatttcttgcgccgtttggcgcagcgtcgggtagggcatgtgtttgcggttcgtggagatctctatttttattctcaacatcatccaaacgtaccaacatcattgctctattttccaaccagaatggaacctgctttgacaattgcagaaagagtacctgttgaagatggcaagatgacaattttgttggggaattctggtgatcgatcgaaccgccatattacggcattgaaagtaattcataagcagtttggcgataaggtgcgaatcattatcccaatgggttatcctgaaaacaatcaggtttatattaatcaggtagaacaagctgctttatcattgttccggccagaaaatttgaacattattaagcaaaatatggcgtttgatgattatctggcattattgcgccgttgtgatttagggtatttcatgtttaatcgccagcaggggattggaacaatttgtctgttgatacaatttggtgtgccatttgtacttagtcgtcagaatcttttttggcgagatttaatagaacaacaggtgccggtatttttcgccggtaatcctttagatagccaactgattgcagaagcacaacggcagatgctctccttggatagaaatgtgatagctttttttagcccgaactttattgatggctggcggcaggcgttggcaaaagcggcgggagagcagcaatgactttaacgcagtttggcggattatttgttgtttatttaatatcactggttttcatcctgacgttgacttatcaggaattccggcgtgtacgctttaattttaatatattcttctcattgctttatttgctgacattctattttggttttccactgacatgtttgttggttttccaatttgatgttgaagtggtacctgtggacgccttactacacgctctactggcttcgacctgcttttatggtatttattacgtcagttataaaacacggctaagaaagccatctatgcagcctaaagcaccggtattcaccatgaaccgggtagaaactaactttacatggttactactggcatcagttgcggtggtgacagtggggctgttctttatgcaaaacggttttctactgtttaaattacagtcatacagtcaaattttttccagtcaggtttccggtgttgccctgaaacggttcttttacttctttattcctgccatgttggtggtttatttcttgaagccgacccagttacgctggctgttttttctgattagtacggttgcttttgggatactgacttatgtcgttgttggcggaacacgggctaatattatcattgcgttcgcgttgtttctgtttattggcattgtgcgtggctggataaccttgtggatgttggtaacggcgggcgcaatagggattgttggcatgttttggttggcactcaaacgctatagtttggatgtcagcggcgcagaggcgttttatacttttctctaccttacgagggatactttttccccgtgggaaaattttgcattactgctgaataactacgacaaaattgattttcaggggttggcacctattatccgtgatttctatgtctttattccaagttggctttggccaggacgtcctgatgctgtgttgaattctgcgaattattttacttgggaagtactggataaccactctggtctggcaatttctccgactctgataggctctctggttgtgatgggaggcgtgctgtttattccggttggtgcgattgttgttggattgataattaagtggtttgactggatttatgaattaggaaaacaggagactaatcgttataaggccgctatcttgcaggcattttgctttggcgcgatcttcaacatgattgtgttagctcgtgaaggcgtggattcatttgtttcccgagtggtatttttctgtattatttttggcttatgtctggtaattgctaagttgttgtattggctatttgagagtgcagggcttattagaatgtatctgactggcaaccgagtggtatcacaaaaatgtccgctgcaatgtgaggaaagaaaatggagctaaacaatattcctaaatacagtattcgtggtctgaatatttggggcttccgcgatatggcgcactttcttgaccatatttttcaacgcgaacaggtaaagacgggtactatggtggcgattaatgcggaaaaagttctgacggcagaggaagatacagctttaagtacactgctgagtgacgcagaatatctgtatgctgatggtatcagtattgtacgtgctattcgccgtaaataccctgacactgaagtttctcgtgtagcgggtgctgatttatgggaagctatcatggagcgtgccggtaaagaaggcacacctatttttctggttggaggtaaaccagagatattgaaacagactgaaagcaaactgcgggctcagtggaacgtcaatattgttggcagccagaacggttatttcacgccagaagaacgtaatgctgtttttgaacggattcatgccagcggtgcggtgattgtgacagttgcaatgggatcgcctaaacaggagatttttatgcgtgactgtcgaaaaattcattcgaatgcgttgtatatgggcgttggcggtacttatgacgtatttaccggccatgtgaaacgtgcgccaaaagcatggcagaatttggggcttgaatggctttatcgcctgttatcacaaccaagccgtattcgtcgccaatttaagttattgaaatttattggatattattacagtggtcgtctgtaaactcgctttttgcctgtcgtgtgaattttcgtcaggcgatactttcgtcaggcgatacaatgaatttattccacaatatttatctaacagtttgatcctgccagattttcactatttatagttagttattggataattttttattccactcagtggaaaaacatgttttgatccctgacctttttatggctgatcaacatcagtcttgtatgtttttattattgcacattacaacatataacaatggacagggaatttatggcagatcaacaacatagcttgcaacggggtttagaagcccgtcatatagagctgatcgcactaggcggcacaattggtgtcggtctgtttatgggctcggccagcacactgaaatgggctggtccttccgttttgctggcttacattattgccggaatttttgtttttttcattatgcgatcgatgggagaaatgctgtttcttgaacctgtcacgggttctttcgcctcttttggacataaatatctcagcccatactggggatgcctcaccgcttggggctattggtttatgtgggtggcggtagggatatcagaaataacggctattggtgtttatgctgagttctggttccctgaacttcctcagtgggtatcagcattaattgcggtggcgttggtcgctttggcgaaccttgcggcggtacgtctttatggtgagctggaattttggtttgccatgattaaggtgaccacaattattgtcatgatcctgattggcttgggattgatatttttcggtattggtaatcaatggcagcctattggattggataatctgactgtgcatggtggtttctttgcgggtgattggcaagggtttctgtttgcgctctgtattgtggttgcatcttatcagggggtggagctggttggtatcactgcgggggaagcgaagaaccctcaggtgacattgaaaaaagcgattaacaatattctctggcgtatcctgattttctacgtgggtgcgattttcattgtagtgacattatttccatggacagaagtgggtgcacagggcagcccgtttgtcatgacatttaccaaagtggggatcacctcagcggcagccgtgattaactttgtggtattgacggccgcgctttccggctgtaacagcggtatgtacagtggtgggcggatgctttatgcgctggcgcaaaaccgtcagctaccttcatcattgactaaattgtcaaagaatggggtaccggtaattggtattgctatcactatcttgtgtttgattgtgggctctagtttgaattatttgatcccaaatccgcaggcggtttttgtttatgtttacagtgccagtgtgctaccaggaatggtaccgtggtttgttattctgatgagccaattgcgttttcgtcagtatcatcaacaagcactgaaacaacatagttttaaatctatcctgttcccctatgtaaattacctgacattggcatttttatgttgtgtgttggtagggatggcaattaacccggatacccgtttttcattgctggtaggtgggggatttttgttgatagtgtcgctgatttattggttggtgaagctttttaacggtaaaaaaccaaaagcctgatataccttatggatttcaagatgcatcgcggcggcaagggagtgaatccccgggagcatagcaaactatgtgaccggggtgagcgagtgcagccaacaaagaagcaacttgaaagatgacgggtatagattgatttactgtcatggtagtagataagtaggaaagttaagagctggctttatctacgaaatgagcaaggtgtaatcaaacgcatcatttctttaaaaaagcactggacagtatatcattaaatccgtactatccccacccgaaacggcgttaagcgcccgtagctcagctggatagagcgctgccctccggaggcagaggtctcaggttcgaatcctgtcgggcgcgccattatttgcgtgcaagagctgcggtgatgtattacgctgttggtaagttaagtatttagcagtaaatagctgttatggtggctatagctcagttggtagagccctggattgtgattccagttgtcgtgggttcgagtcccattagccaccccatcttttttgtgacacgcgagggtggcggaattggtagacgcgctagcttcaggtgttagtgtccttacggacgtgggggttcaagtcccccctttcgcaccataaaaaagagaaaagaattagagatcgaagagtagaaaatttcggcgagtagcgcagcttggtagcgcaactggtttgggaccagtgggtcggaggttcgaatcctctctcgccgaccaaattccaaaagaaccctgcaatgcagggctttttacgttttatccctttttatctccttggctttttgttccctttcctaatccatataccttcaagttgtgctctgttgattcaaatttagtggattatttttttaaaataactatttgttttatatgataattttttattttttgtattttgacgacaatcgatatactagctgtctcaaataagagacttataacaaattgaattataatgagaataataaataccttatgttttgtctcaaataagagacagtgcatgagatggattttgtgatgattcgatttgttgttgtaataaatagagaaatagctgatgaagcgaggcagctttcatttgaataaaagttggcacactaaatgcattattataaacgtagatgctcatcctatttcttatgattgcatatgcttcataaacccagggatgatgcagagccgattatcggtgcctattgtccatgtcacagatgagtaagatataaccctcttttcatcgccgaccggactcaacgttgagtgaggcactatccgtctgtagacctgattgtatttgtacacctatctttatttttaaggtaggtgtttttttatttctaagagatatatttggtaggtttatatactgtttaggtattactgtctaatataaacagaactgaaaatatgataggtagttttttactgtaaaattaatttagttatttcatttctaaacttatcttaaggggaatattgatgtcaaaaatgatgggatgccctggttgtagccgaatgttacatgaatccgcacaatcgtgcccacattgtggtgcgatgataaggccgtcattccgcaccgtatttctgatttaaaaataatgtgatcttacacaggttttttgtattgatgacatcggtggggttgacggtaatcgccaattttgatctattacttttatttgccggaaagcgaatatgtccacacctatacctgccattaaacgtctcgatcatcttggccttatcgccgctttttgtcatgaagccggtttaccccgcatgattgatgccattatcccaaaatattcatcgcataccgtctctcacggcgacgcttttctggcgatgatccttaacgggctggggtttcacagccggacattgcacatgttttccggcttttttcaacataagccgattgcgcgtttaattggcgctgacattgaagctgaacaccttaatgatgatgtgctcggccgaacactggatgccttatatgaagcgggggtgtcggaagtttatcaggtgcttgctgagcaagtagttgataaattagggttaaatcccgattccgttcatttggatatcacgagttttcatgtcgatggtgactatgacagcgcgttgggagatgacacaaaacgcattgcactggtgccgggttatagccgggatcaccggcctgaactgaaccaggttgtccttgaactgatttgcgaaaatcaggcaggtatccctgtctatatgcaggctatgagcgggaatacgaatgatgccaaagcctttgcccagacgatcaaaacccatattcaatgcctgaaagcagcacaaaacagccgctactttgtggccgatgccgccctttatactgaagccgcgatcgcttcgcttcatcagcaaaaacaacgatttattacgcgtgttcccctgacgatcaaggaagctaaacagtctctcctgaacgtgacagcggagcaattcagccccatcagtgagggctattcaggctgctgggtgacgtcatcatatggcggcgttcctcagcgttggttactggtgaacagtacggcggcagaaaaacgtgaaaaccagactttccggaaaaacacactcagggaaacagaaaacgagtctaaacagttcgacaaactgggcaaaaagccctttgcctgccgggaggatgccttacaggcactgcatgattttgagtctcaatgccagtttatcggcatcgcctcgccggaaattcaggcgattaccgcgtatgcggggcgcgggaaacccggcaagcatcaaccccccaaatcggttcattatcaattagccggtcaggcttatacccggttagacaaggtgaagcaggccagattgcgggtcgggaggtttattttagcgaccaatgaacgggatgaaggacggcttgatatggcggcgttactggctaattataaggcacaacaaaaggtggagcggggttttcgcttcctgaaaagtccggaattcctgacgtctgccattttcctgaaaaaaccggagcggatagaagcgctgttaatggtgatgacatgttgtctcatggtttatgcggcgctggaacataaaattcgccatgaattgaaacaaaatgtgccgtttttccccgatatgaagaacaaaccgacacaatcccccaccgcgcgttgggtatttctggcctttgaagggatcagcacctttgaatttcaagaacataaaatggtgacaggaatgcaatcttaccaccatgagcttttgagtttattaggtgcacaatataaagcggtttattcctgaattaggtgcggaatgaaggataagggcttattcttctggtagtaaaagccgcattgttgctgcactgttggcattttttcttggttcctttggcgctcataaattttatctgagcaaaatcggtatggggattttatatctgttattttgctggacatttatccctgcacttatcgcatttattgaatttattatttatctttgcacttccgatgaagattttgccaaaaaatatggttagaaaaatgccccgtgcggggcatttttaatcatcggcatgaagacttgctaataatggatgagcgatcacgacattacagcactattactattaacgagatcactcttcacgacattactttcacgctttaaagtgagtactaatccctcgcgacgaacttgtgcggcctcttctggtttacgtagtttgtccaatgcatcggctaaccaagcataatcatgtgcatcaggacgttgggctaatgcagttttaaagtcttttactgctttttcccattctccgtggcgcaaagcaacttgtccaagtgtactgtttaacagaggggtcgaaccatgttgttttaactgatggtccaatgcgttttgtatcggctttggatcttcgctttttaagcgagggatcaataagagtaaacgttcgtcgtattgacgttttaaactttccaagatgatcttttgtgcagtttcatggtcatcacattcaattaaatgttcagatattgcaacttgtaaagccacatcatggcgaatttttcggctttgatcatgccaccaacgttttaagccttcgctgccttgttctgccatgtactgattcatcagaccgatataggcttgctggcgcaatttgtgaatttgtaactcatcatgtagatggattttttccattaccggcagtatatcaatcagtgactggtaagctcctgacttcatataggcttgttcagccaggcgtaagacttctggatggcgtgaagcttgatttagtagcttatctacaccatgacgggctgcatgaatttcaccttgagtgagttgaatacgtacacgggtaatatccacaggcaactgattattgtctgcgacttctgctgcacgttccagatactgattggtacgaaattcatctccgcgttgttgggctgcttcagccgccagtaagtagttgactacaggttgttccgcatgatcagcattacgggtcagtaattgctcaacttgtttgaaatcgccttctgccagtttgagcaacgctgcttttgtttgggcatgggcacggctgcgtttgcgtccaaggaaccagccacgggtacgtgagcctgtgcgtataactctgcggtagcaccaaccaaagaggcagagtaccagttgtaaaagaacaaatataatgaacaggccggtaacactggtttcaatgttgtaattgtcagtttgaatcagcacatatccctgatggccagcaattatcggaccgagcacaataccaacaatgagtaccacaaacagtaatagaactttcagcataacttaaccctcctgattagtttcagaagattgggaaagtaagctgcgaacccgggtttgcatcagtttttccagtaaaggctggcttgaaaggtggtctggcgcagttatggaaacaggctgctggcttaatgaatcaatttcttccaggaatgctttggtattgggatcattgatatcaaagtaagctctaacccaagttgaaactgtttctaatgattgtttaaaaacttcaccttgatgacggggtattgcttgggcggcaatcaacagacgggctcggatattttctcgtagatagatatcttgatttggtgccagtaatggctctgctgcggtatcccggcgacggatggtaatgaaattatccatgaaactcttccagcttttgctcagattctggcgccattcagataatgtaccggttaattcatcattatcttcgtccattggcgaaccatcggttgtattgtcagccagacgcaggttatctacttggttagaaagctgattaactcgcaggataatgccgtcaaaatcaatctgactaatggcagataatgtactgatgtcttgtgtaattgcacgacggatttcaatcaggcttggatcattcatttcagagagactggcatctgcatttttcagcagagcagcggcggtgactatatcttgatcattccataatttccggcctgccattttgaccagaaaatcagcttgtgctagtagccagctttttacatcagaactggataacgcagagattttggcctgtaactcttgtagactatgacccagttgctcattttgtgcggaaaaatggcttaaagtctgtgattgttctttaaacagcgcttcaatatgctgtttatcctgtgattgttgttgtttcaatgattccagttgttggcgtagctcgtggttctctgtactcagtaaatggctttgttgctgtccgtaataataaagaccgccaccgattgccagcatgattgcaatagcaattatgttttttagcgtgccagaacgttcttgcttttgaggcgcggtttcgagctgttgcgagttttcaaccgtagtttttgtttgttcaactgtctcggaggactgtttttgctccgtcatagtgggcatcccatgtcagtttattctagtgcctgaattaaggcgtcgttatctgcactttttgcaactttaacatcctgccagcccaaatttcgggcggcatgtgcaagacgttcgcttaccacaatcaggcggcaatgcaataaccacctgtttcgatcactttcgggtattaagttatataacagttgcagtatttcgccactggttacaactaaagtttgtactccatacttttgccagtgggcactgaattctgctgccgggtagtctacgggctggcggaaataacattcacaatagtcaactgtggcacctctttctgtcagcgtccgggcaataagttcacgcccgccatttcctctgagcagcaaagcttgtttattttcaacctgatgtagcgatggtagttttagcaagatttcgctggtctcaccctctgatgaccagataacattcatacctgttagttgatgaaaagccagagcggttgatctgccgatagcataataaatcagcttgtcgggccatgacagattaattttatttaactgattgtttgcataataaactgcattttttgacaatagaaataccatatcacgggtatttagagggttaagcttctcagctagctgtggcagctctgaacctgggtgaatattgattaaaggtgcgctgaaagctgtttttcccgcagcctgtaaccttctgactagttcctctccggcaggagcagggcgagtcaccagaatactcatgtggagggatttcctcgataaacttgggttagaatttcccgtgctccccgttccaacaactcttctgccaattcaacccctgcctggcaggcatcttttggtaaagctgttctctcaccgcgaataataacgctaccatcaggtgcgccaactaatgcccgtaaccagattttcccgtcctgccagatagcatagctacctattggtacttggcagcctccttccagtcgggtattcatcgcacgttcggcaagaacacaaacttctgtatcatagtggtttaatggtgctaacagagtttgtgtttgttggtcgtctaggcggcattcaattcctaccgcgccttgaccaacggcaggtaatgattgttctgccgtcaacggcgtacggatacgctcatgcagttttaaccttttcaatcctgcgacggcaaggatgattgcatcatagtgaccattatccaacttgttcaggcgggttccaacattgccccgaaggtcacggacaatcagatcaggacgtaattcacggagttgacactggcggcgtaaacttgatgtgccaacgatgctgcctgttggcaattcatccagagagtgatatttcacagagacgaaagcatcacgaggatcatcacgttcacaaatagtgaccagacctagcccctcaggaaaagagatcgggacgtctttcattgaatggacggcgatatcggctcggccttcaagtagagctaactctaactctttgacaaacagcccttttcctccgatttttgccagaggcgtgtccagaatgacatcgccctgggttaccattggaaccagttgaacttccagatctgggtgacattgttgcagtttttgctgaacatacagcgcttgccacatagctaaagggctttggcgggttgcgatacggatggttttagttgacatagctggttgtatttctcaggcttttcagccgtcaataaatgaaaaaacataacactcgttttaacacttcggctgttttttttccagttaggagctgagaagaagagatgccggttatgttaaagcataaaataaattttaattttttaaattattttgatattgatgaaagtaaattgatttaattatgaattaacttttccagtaaattatttctgtaattaaagaatcccgaatggaaaaaatcattaattaaaatatagccaacggagtcatttctgtagggttgatgataacaagatattacgcacattaacttgaaaaaatgggcagagaaaatttctttcatataatgagggtataaatggtatgggttttttgattatttctatatataacaatgtattatttgatttttcgtacgataagacatcgaattcaattgctttactgactttacggtttatcgacaaggtgttaaattgatcacgtttccggtaataaattggtaaaaatcattctaaataattccatagagctataacagccggaaacgggggatttatctgggcactggaactcaatcgggcgagacgtcttgtacctttatatcgaaacactgaagcagagactggatgcgataaaccaactcaggttagaacgcgcctctaccgccatgagtgcggaatttaaacaggtatacagtttactgccagtattattgcactatcatcattcgatgatgccaggttacattaacggtaatgttccctatggcgtatgttttttcgtgcatgatgaagcacaaaaatcttatcttaatgatttagaaaataaattagatcacttcatagaacagcctgccaatggtgaacttcctattaccggtatttactcaatgggcagtacttcatcaatcgggcagagcggttgttctgatttggatatctgggtatgtcatcagtcatggcttgataatgatgagcgccttttgctgcaacgtaagtgtacgcttattgagcagtgggcggcagcgcttggtattgaagtcaatttttttcttattgatgaaaaccgctttcgccacaatgcgagtggtagcctcggtggtgaggattgcggctctactcagcatattctgttacttgatgaattttatcgtaccgctgtacgtatggcgggtaagcgtttgttatgggaaatggtgcctgtagaagaagaacgccattatgatgaatatgttttatcgctttatgcgcaaggtgttctgacgccaaatgagtggcttgatctcggtggattgggtgagctatctgctgaagagtactttggtgctagcttatggcaactctacaaaagtatcgattccccttataaagccgtattaaaaagcttgttactggaagcgtattcttgggaatatcccaatggtaagttactggcaatggagatgaaacagcgcctacatgcaggtgaaatagtttcctttggccttgacgcatacagcatgatgcttgagcgtgttacccgttatctgattgaaattaatgatacgacccgtttagatctaatacgtcgatgtttttatttaaaagtttgtgaaaaactctctctaaatcaagatgataaaggctgcattggctggcgacgccaggttttgacccaactgatctatgagtggaagtgggatccagagcggttgaaaattttggataaccgcaacttatggaaaattgaacaggttcgtgatgcgcataatgaactgctcgataccatgatgcagagctatcgtaatcttatccgttttgcccgccgtaataatctgagtgtcagtgccagtccacaggatattggtgtgctgacgcgtaaactttatgctgcatttgaagcattgccagggaaagtaacgctggttaatccgcaaatttcgccagatctatcagagaaaaatttaacatttatttatgttcctcaagggcgtgcaaaccgtagcggttggtatctctacaatcaggctccggctattggatcgatcattggtcatcaacctctggaatataatcgttatctcaataaactggtgtcgtggacctactttaacggcttgttaacagaaaaatcgtgtatccatattcatcatggcgaaactcaatgtgatgagctgaagctgcatgaattgattaatgatatttctactcattttcctatccgcctgccatcaccgacaccgaaagcactctatagcccgtgtgaaattcgtcatttggcaataattgtcaatctggagaaagatccgaccgctgagttctccaatcaggttgtacattttgatttccgtaagcttgatgtattcagttttggtgaatcgcaacagtgtttggtggaaagcattgacttactttatcgtaattcatggaatgaagtgaggaccttacactttagtggtgggcaatctgtgctggaagcgttgaagaccatactgggcaaaatgcatcaagatgctgcgccgccagcggcggttgaagtgttctgttacagcgaacatttacgagggcttattcgaactcggatccagcaactggtatctgaatgtattgaattacgtttatccagcaatcgtcaggacccaggtcgttttaaagcattacgtattgccggccagacttgggggctgttctttgaacgtcttaacgtatctgtgcagaaattggaaaatgccgtggaattctatggggcaatctctaataacaaattgcatgggttgccggtgaaaattaataccaaagagacacatttacccgcggtggttgatggctttgccagtgagggtattattcaatttttcttcgaaaatacgcaagataatcaaagttttaatatttatattctggatgaaaccaaccgggtagaaatttattctcattgcgagggaagtaaggaagaattggtacgcgacgtcagtcggttttattcttcatctcatgatcggtttacctatggatcaagttttatcaactttaacttgccacagttttatcagattgtgcaaatgaaaggccagattcaggtgattccatttagtggatcatctttttcacatttgtgtgtggctcatgatggggaaaatgaagagcagccagaactttatcgttctgtgtcacattactgatttaccccgcgatgcggggtaggttcaattatgggaaactgaactgttcgccactttgttcggtgatggcgtatgctagcatggttaaaaaattgtccccgctgcggtcacaaatccactgaccttctttgtagtcaaaatgataaccaccgccttttgttgccagccagatttgatggaaaggttcctggcgattgataataattttgctgtcattatcaaagctcagggtcatgacaccgccattggtttcacagtcgatatcagcattgccatcataattatctaactgcccttcgatataaagtatcagttggtcagctaactggtgaaattcactgtcgttcatcttcatttcctatttgcttttcgaggtctaactgcgattatagagaatattgacgtatgaattacaggcattaatgcaatgaagaaaaaattacgtggatttctggctatcataaccttatttgtactttccggctgtggactgaaaggtcctctctattttcctccagaacaaccatcgaccgagaaggcaacaactgcatctcagattcccgcgaatactgagcagcaagggcagcaagtggatagtacctctcagaaataagcgagataagccgatagttagtcgctacggtttacggtggagcatgatatgcagttctccaaaatgcatggtctgggtaatgactttatggtcgttgatgctgtgacccaaaatgtttatttctcaccagagctgatctgtcgtttggcagataggcataccggtgtgggctttgatcaattattaattgttgaagcaccttatgatccggatatggattttcactatcgtatttttaatgctgacggcagtgaagttgcacaatgtggcaatggagcgcgttgttttgcccgttttgtccgccttaagggattaattaataagcgtgatattaaagtcagcacgcaatcgggacggatggtgttgagtatcaccaatgatgatcaggtttgcgttaatatgggggagcctgaatttgagccgcatcatgtgccatttcgtgcgttaagggcggaaaaaacctatattttacgggtagcagagagaactgttctttgtggtgttgtctctatggggaatcctcattgtgtgattcaagtgccagatgtggaaacggccgaagtagacattttggggccagctttggaaagccacgaaagatttcctgaacgggcgaatattggtttcatgcaaattttaaaccgtggtcatattcgcttacgggtttatgaacgtggtgttggggaaacccaagcttgtggcagtggtgcttgtgcagcggtagcagtaggtattcagcagcaattgctcgacaaccatgttcgggtagatttgccgggaggttcactgtttatctgttgggatgggccgggaaaaccgctctatatgacgggaccggcgatgcacgtttatgatggcacaattcatctgtaatcgattctgttttgagctgcggggcatcggagatggagaaaaaagaagagcagttaagcatcaatgacatacttgatgatcagactgttgtggattatttattggaaaaccccaatttctttatccgtaatgcatgtgtcgttgaacagatgcgggttcctcacccggtgagagaaacgatttctttggttgaatggtatatgagccgccagagaacgcgtattgcttatctggaagaagatataactctgctcatggaacaggcgagagtgaacgaacaactgtttgagcagttgcttaaattacttgttaatttggttgcggcagagagtttgcaagatatgcttagtcggttaagtttatgggctaagaatatgggactaaatagtgccagtatccgtcttttcagtgataaatggcatattggtgcaccacttgatgcgcctgatttagcgctttctcgcaatgcttttgaaccaatccgtattcagcgttttggtaataaaaaccactatctcggtatgctaaatgggccggaaattctattgttgttgccgcaagttcggcaggtcggttcggttgccgtctctctattgggaacgaggggcgaactgggtatggtgatatttaacagtcggaatcatcaacattatcaagaaggcatgggaactgacatgcttgagcatctggctaagttattgccggatatattgtctcgttggattaaacgcatatgatgcaggaaattgaccagttactggagccgattgaggcatttttgcgctacctcagggtagagcgtcgattaagtcccgtgactatcacccattatcgtcgccatcttgctacattggctgagatggttttagaaatgggtgtcagccaatggcaagatcttgatcccgcgaaagtgagaatgttggtaacacgtagtcgtcgggctggtttgcaatcagctaacttggcgttgcgtttatcttccttgcgcagttttcttgattggcaggtaattcaaggagaaatttccgttaatccgagtaaaaccgtcagcacgccgggaaccaagcgtcatttgccgaaaaatatcgatgtggatgaagtgaaccaactgctgaatatcaattttaatgatccattatcggtgcgtgaccggacgatgttggaagtgatgtatggtgctggattacgtttgtcggagttggtgggtcttgattgccagcatctggatcttgaaagtggggaagtatgggtttcaggtaaaggcagtaaagagcggaaggtgcctttgggacataccgcggttgaatggcttaatcgttggttggcgatgcgggagctattcgagccggaggataatgctgtttttgtctcaaagcgtgggcggcggatatcaacccgtaatgtacaaaaacgatttgcgcagtggggaatacgccagggaatgagcagtcatattcatcctcataaattgcgtcactcttttgccactcatattctggaatccagtggtgatttgcgcgcagttcaggaattactgggtcatgccagcctatcctccacacaaatctatactcatttagatttccagcatttgacaaaagtgtatgatgtcgcccatcccagagccaaacgggggaaatcgtaatgcgtttttaccggcctcttgcgccagtgttagcgatgacatttgatctggatgatacgctgtatgataatcatccagtcatggataaggcagaagaggaagtactgaactttgtacggcagtatgatcctaggttcagccaccttaatcatcaggatctatgtgctttccgtgaattgacacttgagcagcatcctgaaatttatcatgacatgactttatggcgctggtactcctcaaagttgatgttttgccattacggttttagccgtgaagacgctgatcggggggcagatgatgtcatggcgcatttcacactttggcgtaatcgaattgatatccctgaatcaacacataaaactctggcggcacttgctgaacaaatgccactggtagccattactaatggcaatgcagaaccagccgcctgtggtcttgccccttattttaaatttgtgctgcaagctggccctgatggacgcgcaaaaccttgcagcgatatgtactgtttggccgcggatcgtctgggtttagcgcttgggcaaatcttacatattggtgatgacttgaatactgatgtggcaggagcgctgggtagtggtatgcaagcttgctggatgaatactaagaataaaaaattattgcagacgatggaaagccgcctactgcctcacattgagatttacgatttggcttctttgacagcattgatataatcaagaaattattctgtataaaaacacagcaacctctgggtgctgtctaatcaattgatggtaactatggacgtctcctatctgctcgaaagtctgaatgacaaacaacgggaagctgtagctgctccgcggactaatatgttggtattagctggcgcggggagtggtaaaacccgggttctagtacaccgaattgcttggttgctatcggtggagaaggcttcgccattttctgttatggctgtgaccttcaccaataaagcggctgcggagatgcgtcatcggattgaaaacttgatcggtaccagtcaaggtggaatgtggattggtacgtttcacggtttggctcatcgtttattacgagcccatcatctggatgctaatttgccacaggattttcagattcttgacagtgaagatcaaaatcgcctgcttaaacgcattatcaaagcgatgaatctggatgataaacaatggccagctcgtcaaggcatgtggtacatcaatggtaaaaaagatgaaggattgcggccacagcatattgaaagttatggcaatcctgttgaggcgacatggcagaaaatttatcaggcttaccaggaggcttgtgatcgggccgggctagtggattttgctgagcttttactgcgagctcatgagttgtggctgaataaacctcagatcctgcaacattaccgtggccgctttactaatattctagtggatgagtttcaggacactaacagtattcaatatgcttggatccatctgttggcaggagaaacaggcaaagtgatgattgttggggatgatgatcaatctatttatggttggcgtggggctcaagttgagaatattcagcgtttcctgaaagattttcccggtgctgaaactatccgtttggagcagaattaccgttccaccagtaatattctgaaagttgccaatacactgattgccaataacagtgatcgtctgggtaaaaatttgtggactgatggggtagagggtgagcccatctccctttattgtgcatttaatgaactggatgaagcccgttatgtggtcagccggataaaaaactggcttgaaaatggtggtgccctgaaaaactgtgccatactttaccgcagcaacgcgcagtcccgtgtactggaagaggcgctgttacaggcatcaatgccataccgtatttatggtggtcaacgattctttgaacgtcaggaaattaaagatgcactggcttacctgcgtttgattgccaatcgtcatgatgacgcggcgtttgaacgtgtggtgaatacgcctacccgtggtattggtgacagaacgttagatattgtgcgccaggcggcgcgtgaacggcagcaaacgttgtgggattgttgtcagatattgctgcaagagaaagtgttggctgggcgtgccgctgcttccttacagcgttttattgaactaattgacgcattatcgacagaaactgaagatatgccattgcatgttcagactgacaggattatccgtgattctggcctgcgagcaatgtatcagcaggaaaaaggtgaaaaagcgcaggcgcgtattgaaaaccttgaagaacttgtcacggcgactcgccagtttagttatcaggatgaggatgaaaatttcacgccattgcaggcgtttctttcccatgctgcgctggaatcgggagaagggcaggccgatgcctatcaggattcggtgcaactgatgacattacattcggcgaagggactggaattcccacaggtatttattgttggtatggaagaaggcatgttcccaagtcagatgtcgattgaagaaggtggacgtttggaagaggagcgtcgcttggcttatgtgggtctgacacgtgcaatggaaaagctgaccatcacttatgccgaaagtcgtcgtttatatggcaaagaggtttatcatcggccatctcgttttattggggaactgccgtcagaatgtattgaagaagttcggttacgtgcgacagtatctcgtccggttagtcatagtcggttaggtacaccaattagcgccaatgatagcggttatgctcttgggcaacgtgttcgtcatcctaaatttggtgaaggaaccattgtcaatatggagggaagtggtgaacatagccgattgcaaatcgcgtttcaaggagaagggattaagtggctggttgctgcttatgccagacttgaaatggtctgaaaataatatccaggttgaatgttgacaggctttttcttctaagcgtaacattcgcgccttacgatcacgtagggagtaaaggagacttatgatacatgctgagcgcatttaagttagagaataatcgcctgctccgtcttgagtttgaagagggagaaaagttatctgattccttatgggtagatttggttgaaccggcagagcaagacagactgcaagttcaaaatgaattgggccaaattctggcaacccgaccggaactggatgacattgaggcgtcggcgcgtttttttgaagatgaagacgggatacacgtccactcatttttctactttgaagacgcggaagaccatgctggcaacgcaacagttgcatttactattcgtgatggtcgtctctatacgttgcgagagcgggagctccctgcgtttcgattgtatcgtatgcgtgctcgtaatcagacattagttgatggtaatgcttatgaagtgctgatggatctgtttgaaaccaagatcgaacagttggctgatgttatcgaaaatatttacagcgtgttggaatccctgagccgggtcattatggaagggaaacagggtgatgagtttgatattgccttgtccagtcttgctgaacaggaagatattagctggaaggttcgcttatgtcttatggatactcagcgtgcgcttaacttcttggtgcgacgggcccgtttgccgggggctcaactagagcaggcccgtgaaatcttgcgggatattgaatcgctgttgccacataatgaatctctgtttcagaaagttaatttcttgatgcaggcggcaatgggttttatcaatattgagcagagcagaattatcaaaatcttctcggttgtctctgtggtattcctgccgccaacgctggtggcttccagttatggtatgaactttgagtttatgccggagttacactggacatttggttatccgggcgcaattggtttaatgattgctgccggtcttgcaccgtatctctattttaagcggaagaattggctttaatataccctatggatttcaagatgcatcgcggcggcaagggaacgaatccccgggagcatagataacgatgtgaccggggtgagtgagtgcagccaacaaagaagcaacttgaaagatgacgggtatatatgaccgccgtaatagttttattatggcggctataatagagacataaaaacagtacattaatagtttaatcatctttttgtgcggcattaggttttattattattatttaaaatattgattattgaatggaaacaaccttgacattattataaaatgcttaaatgctagttctatatgatttatataatctatgattgaatatataacttggagtaattttcgttttaaaagaagtttttattattgttttctatctttaatataagttttaatttgtttaattgaaatattatcaaccttaattctacagttttatattaaatttgaaagcaggatgaattaaataaaaatattttttgaaaaaagtatttgattattaaagataaagtagatgtaacgagaaaggcattaatatataaaatagaattagcttattttacaggatgtacttaatcatacgaatcgctgttcctaattgagtatattcttttccaaagtgtttaaagccaagggcaatataaaacccttctgcttgcggaggattagctagcacctgcaatgagactttgccttttatacccgtcatctttcaagttgcctctttgttggctgcactcactcaccccggtcacatagttacctatgctcccggggattcgctcccttgccgccgcgatgcatcttgaaatccatagggtatatatgaagatcattcaatgtgatttgcaccaattgcttgccaataccttgatgccaaaagcccggttcaataaatattccatcaagttctgcatttccatcagatagcggtaatacaacacaaaatcccaagattacattagcttgttccgcaatataaacatatcctgctgtaatatattctatcggcagttctatcatatggggatttgctagtagtaattccctatcttcttcccacataagagatgcacgtaattgcagagcttcaagggcgagttgttcggttgtaccggctaatctgatggttattttcattgttttgctatctctgcgatctacgctgtgtatacactgcatccaatgtaaacagcactaatgcagcccagataaagccgaaagtaatcagacggtcaatgcctatttgttcaccataaaccaaagttgctagcaggaacatcagcgttgggccgacatactgaaagaaccctagtgtggataggcgcaggtgagcagcggcttctgtgtataacagcaatggtacagtagtgataatacccgcagcaatcagccatagattcagtgtcattgggttagcagttaaatcactggttgggctgttggcaaaaccaaataggtaaatggcggcaaccggcagtaaccacagtgtttcaatcgtcatgcctgtttgagcatcaacattcatcttctttcgcagcagggcatacagggcgaaagtaacagccaaacttaatccaataaccggtatagaaccaaattgccataattggattaacacgccggtgaaggccagaataaccgccgcccattgcatgcggcggaaacgctcactcaaaaacagcataccaaacaaaacattaaccagtggactaatgaaataacccaggctggcttccagcatatggccgtgatttaccgcccagatgtaaatcagccagttacaggcaacgacagtggccgtcactgccagtaatagcacttttttaggttgatgaaaaactttgactacctgtgaccagtgacgagtcaatgttagcagtagcaacataaagaaaaatgaccaaataatacgatgggtcaggatttcgtcagcaggtacttgctggatatgtttaaaataaattggtgcgattccccagataaaacaggcaccgaaggcgtacagtactcctttggtagtttgtggcttgttcatattgtcctgatgttaataaaggtggaaagagtgtcatgagtttttagcccgttaacgtgaaaataatatgtcaccgggctgaatattacgcaagcgattaaaattatattgtcatcctaccagataggtcgccgttacactggcgatatgggctctctgctcattatgtagttctgctctggcgacggaaactttgttgccattgcggataatgctactggtggcggtgaataattcaccacgaccggggcgtagataatccacccgtaaatcaatcgttcccattatggataatcgtttttctaattcttctaatgatgcgggtaccagacgggtcaaggcgttaccgatacagaccaatccaccacatacgtcaagcactgaggcaattacaccaccatgtaaaattttttgtgcgatattacctactaatttactttgattacggaattgtatttctacgtaatcttgttcaaaccgaatcagttcaagtcctaataattggttaaaaggcatattgtgaacaaaagcatgaccaatcacttgccgggcttcttccaaggttaatagcgttgtagacatttaattttattcctaaatctaaataaaggtatgtgttatcaatatgactttatatagttaatgacttgttaatgttgtgcttttattgctaatcttgccagctttaaggaatgcttggcaataatctgaataacatcagtataggtaagttgaaatggaaaataatattggtgctggaatttaatctactgaaattatgtgtatatgtaaataaagaaggcggtactgtagcagcaccgccttatataaaatagtcactatattactgatgaggcaccgttttccatgctcattgttacgaatgaccaaatttggcaattgggttaatcaggttatcagcaaactgtaaactttgagccggatcagctaaatcaagcatctgacggttattcgctatttgcagacgatttagacagcagcgtttaatctccggtgtaaacagctcataacgtacaaattgctcactcaattcaggatggttgtgctgatagcttaaaatacactctgctacagcctgccagaaaagatcctgtgaatagtcaccctgttcatccagtattgcagccagatatcggaatataccgtcaaatacatcagataagatagtgagtgttttcatatcttctggcatgtctactttgactcgactcgctttttccggtaaatcggcgtcgggattcatgaccagaatctcttccgctaaatctttcatgaagatgtgctgtggaatatggttttccaataccagaatgatgttttcgccgtgtggcataaacattagatcataagcgtacaaacagtgtaacagtggcgcaagataactctctaaatagcgacgtaaccattcctgagtaggcaggccggatgcggaaattaatgcgggcaatagggcattcccttgctgatcactgtgcagtaacgcagccatagtcatcacttgttgcccaggttcaatgagttgcagtgggttttctcgccatagtgccgccatcatttttttataaggcgtatcactactgattgcttgctcgtaatagctgtttttgaagccaacactggcgacttctcgtaaaattttaaaacgataacgttgcaggatgggatcttgtgttaccaaatcaaataaccagtcgttaatgcccggtgtcgtcgccatgtaataaggtgataaaccgcgcatgaatcccatattgagaatagacaacgccatttttacataatatcgctgagggtgactgcgattgaatagggtgcggattgactgttgtgcctgataggtatcagcaccaataccaaggtagaccaatttctgattagcaatatcaggcgcaaacaccgatgccagtttgttctgccattgccaggggtgaacaggcatcaggaagtaatcctttggattaaggttaagcgcgatcaaccgctgatcaaattcagccattgtggtggtgcctagttcttgttccagcaactgttgataattgagttgctcgatgcaagcaaagtgtgccttgctcttatgtgcggccagccatactaaatgtatagcagaggccgcttcgggactaaagttctggaaatcaccaatatcaaaaccaatccggccattgttggcgacgaaggaggggtgtccttccatcatctccccttccagcgcctgaaaatcagtattcacgagatccattgcactgataccgattctgttatgcttaaaagcactgctatagagagtactggtaatttcttccagataggtagtcattacgacatcgctgatgccaagttgttgtttgaactcaataatgaatagcaaggaatcgagtgctttttcttctccgttggcatttttctgtaacgaatcggcatcaatcagccagtgatccagtgccatacgccgtgcccgaaaagtatagctgaccagatggtcagcactattcaaacggtaactgtccaaacggtaatggtgatatccatcactatctgctttttcagttaactgttgaggcacgagtaaacattcgtgtgaaaattcagcaatagctttacacaagtgcagacgattaactttctgccagaccgctggttgcaagtgcatggcatttgtcatcaatgaacctaagtgggttggtgttgtcgcgtgatgttcccgctgtaacgcaatctgatgctgttctctggtgcaaaaggctaacttggctgttttatttggtaataccaatgccttctgataaacaaaaccggcccgcagattaagtttgtgaattttctcattacgtatatcgggctcaaccacaatacgagccacagtaggatcactaaacagaaaggccatgatggtttggaaaattccccaggtgaaatgccttatttttgcttgcggtggtgcaaccagaatatgcattcccatatcatctgggtgtgctggataatattttccaatcagatcatcttgtgcacgataacactctaatagaaaagcaggttgctcccgatagattccaataaatacactgcccgggtggcgggattctaagtcctgataaaattcccatacttgttgtttggtattatttatcattccccaataatgggcgtaatcccggttaacccagtcagttaatatgggaatatcccgttctagatccagtggacgtaatgtaaaggtacctatttcaggcaaggatttttcaaacagcgtaggattaaagacggacattagcatgctccttcggtgtcaacgctgaactgctggaaagcgatacttttctcaatcggataatgttcaataccggtaatttcataaatcaaacaagagttgcgataacaggccattcccagatccggcgtgacgaaaccgtgggtatgtaattctacgttctgtatgaaaatggtattgttctgatcgatactgtaattacgctgtacaccataacgtcctttttcatcccaatggataaggtgatgtatgccttcaataaaagtcgggatttgatactgatagccggttgccagaacgactccttcggtgtcgagagaaaatgattgctcttgctcgtgttggaataacgccaatgttaggtcgcggccattattagcatggctaacttgtcgtaattcactattggtatataagttgacgtttaacttgccatttaatcgtttggtgtacattaaatcgaaaatatcgttgattaatgaactattgatacctttataaagctgcttgtgggacaaatttaatgcatcacgcttgtcgcccgggagactatagaaataatctatatattctggtgacgtcatttctagtgtcagcttggtatattccagcgggaaaaaacgtggcgaacgggtcagccaattaagttgataatcgaatttatcaatatcactgagcaaatcgtagaaaatctctgcggcactttgtccactacccagaacagtaatagatcgtttttgttgcaaggtcgctttgttatttaaataatcaccagatgtcaccatccgttcagagaacggttggcaacactttggaatataaggtgcaggtccggtacccaataccaattttttacaaacaaattggtgttgctgcccagttaacgtatctgaacaatgtagtgtatatagcgaagcgtcttcatcatagctgatactgtcaacgcgtgtgttaaagcgtaaattagataactgttctgccgcccactgacaatattggttatattccttacgcatcaggaaaaaactttcccggatataaaaagagtatattctccctttctgcttgatgtaattaaggaagctaagtggatgagtgggagatgctaaggtcaccagatctgacataaaaggggtctgcatggtggaattttctagcatcattcccggatgccaatcaaagcccggtttttgatcaatgaacaggctatgaacatcttttaatggctgagttaaacaagccagtccgagattaaaaggacctattccaatggcaataaaatcataagggcgagttatcataatttctcctggtgaataatattaatctcattagttgttattatgtgttgccagaaaatcgtttccgtgcattacgatgctatgcacaatttcttgtagatgttgttggcttgttgccgggttgaggaaagtgaatttcagatattgtctgccattgactttggtacccgcaataacggtattaccttcacggaatagtgccttacgaatggccgcattgatggcatcaatatccgcatcaggtaatttttgtttaggaataaaacggaaaaccaaagtacttaattctggataatgaataagttcaaaatagggattctgtgccattaatcgataggcatcctgagcagtatcgaccactttatcaaaagcttgtccgagtcgttttgcacccataattcgtaatgtcagccacattttcaatgcatcaaaacgacgagttgtctggatacttttattgaccagattgggtgtaccctcttgtgaggcactgagtggatttaaatattcggcatgataagtcaaatgggataagtgcttcttatttttgacgaagaaagcactgcaactgactggctggaaaaatgacttatggtaatccaccgtgacagaatccgctaaattaatgccttccagtagataagcgcgacgaggtgaaaccagtaaaccgcatccgtatgccgcatccacatgtagccagatactatattgcttggcgatagccgcgataggatgaagtgggtcaatactgccgaaatctgtggtacccgtcgtagcaacaatggcaaaaggaatgttgccctgttcgatgcattggttaatgctttgttccaatgcttgagggtccatacggaactcactgtcgtgaggaacagatacaacagcgttgtaccccaaacccaggatagcggcggctttttgtgtactgaaatggctgactgtcgaggtaaaaatacgcagtttatgaaaatctgctggcagaccatgtagctgatttttatgttcaggattgcgctggtgacaaaaatgatcccgcgcaagtagcattgccatcagatttgattgggtgccgccactagtaaagataccatcggcatttgtacctaatgccattttatctcgtgtccagtcgagaactttttgctctattagtgtcccgccagcgctttgatcccaagtatccagtgaagaattaatcgctccaataatggtttcagccagaacggcgggtaatactaatggacaattaagatgcgccacatactttggatgatgaaaataaacagcatctttaatataaagttgctgtaactcatctaaagcttggtttaaagaggtgagtggaagatctaaattcactttagaaaatagtggggataactcattgggtaatatcccactgaaaggcttatccacctgctgtaatattttctttattctggtaatgacattataagcgtcatcaagatagtctccagcactatgcatatttaagaaatatctggaaaaatcttcgtccgttatatgactatcttgtgtgagtgaattgtctaatagcagagcgtctccgtacattatatgtccttgttatttcatatataggttgtgatttggttattgcccaacatcattgattttattatgtgtagtatttggttagattaaatatacccgttatctttcaagttgcctctttgttggctgcactcgctcaccccggtcacatagttacctatgctcccggggattcactcccttgccgtcgtgatgcatcttgaaatccgtagggtatatgctcccggggattcgctcccttgccgtcgcgatccattttgaaatccatagggtataactgttgaataatagcgcgattaaatcaaaataatatatttctacctaagcagataagaattaaaaattatagaatagaatgttagtgtttgctttctaccttagattccaaagggcaatcatggcaattaccgacgccaggtagtttatttctctgacaacaactgcgacgttgcatattgttatgccgtaaaataacagtacggtaaagggggttatctctaccattaggtaattgtggttccataaaaagaccatttataatttcttgatatgacttgctatttattcttgtgctgaactcagcaagataccaatgcataatataaccgatattattccatagaagccgtccatttatcccctgatatgattcgatcttttcacatacaggaataatatggcgatccaacagagaataatgacgatgaagtagtgataaaggtgattcatttagccaggttaaatgatagtaaacaatatctggtctgccactgtcatggaattcaagccgaaaaagattgtaatgagtatccactgcttgtggatattccagcaacattaatatcatcgggggaataaccaaaccaaaataccattgagcccataaagaatacagcgctttttggttaggttttatatcattgtcaccgtagtattcatcctgatagcgttgaattaataccggaaattctcttgtatctgaccattgaggaaaactcatgctagtagcagggatattgtctgcatttactctcatggtggcagtaaaatggctaaacgtttgttcaaataactggatgatatcttcaattaccacggtggttaaaggggtaaccgaatcgtttgtatttgacaccatcaactccctgtttacatgttcctactacctgattgtagtatcttacatatgactaatcattgtaaatataattatgataattattattattatcattgtcattatcaagtggtaaatcttttggccacctataattgcttgtcaatacagcatcataagccgctcattcacgattcagatgggattatattttggaataatcaatggcttacctgattctggatcgcaaataatacggcaagggagaccaaacacatcggcgatactctgttcgttgataatctcttctggcacaccttcggcgtaaattttgccattcttcatcataattaaatgtgaagcgtaacgtagtgccaggttaatatcgtgcagtaccagcaccaacgtttttccctgtaaatgtaaacgttggcaaagatcgagcatttcaatctgatgagtgatgtccagataagtggttggctcatctaacagtacaatgggtgtttgttgtgccaatgtcatagcaaaccaggcgcgttggcgctgaccaccggaaagttcactcactaactgttgcgacatctcctggagttcgaccgcatgtaacgcgtcgttaactgctcgttcatcttctgctgaccactgtcgtaaaaaggattgatgagcgtaacgtccacgtgaaaccaaatcgtatacggtcaacgcttcggtgatgattgccccttgtgttagcagagatagctcacgtgctaccgttttcggtttgtaatgttgaatattgttcccatcaagcagaatttcaccgtgctgtggcgttatacctcggctaatggcgcgtagtagtgtcgattttccacaaccatttgggccaatgatgacgctgaattcaccatcacgaatagaaatattcagacactcaacaatcgttttcttgccgtatgctagcgaaagtgcttgggctgttagtcgtgaggtggtggttgaggaattcacatcggatgacatgactttgttctccttaattcagcgtacagcaaatacatcaaatagacaccgcctacccctgcggtgataacgcctattggcagacgtgccgaagtaggaagtagcaaagtaattaaatcggaagcgagcagtagtaatgctcccaccagtgctgagcagaacagcgcagtgcctttggcccgtaccaagcggcgggcgatttgtggagcagaaagtgcgataaaagccactggcccgacaaccagtaccgccattgaggccagtatgaccgccagtgacaaactcataagctgaatgatacgtactggtacaccgagcgtattagcaacttcatagcccagattgacgtagtttaattgccgtcctaaccagagtagaaaggggatgaacagtgacgttccataaattaacccaacatcttgccaacctcggctggcgaggctaccgtgcagcagcgaagcgagttgctgtgcttgctcaagacgcacattcgagatagcgaaattaacaaatgccatacagagggcggcgatagcaatcccggagatgacaattctggttgtctgcatctgcccagagcgactaatgtttccggtgtataccaacagcacggcaaagctggctcctagcagcgcacctaaagggatcggcagtacgccaggccagatgatcagtgtggcgactatgccagcagcagcgccggcattaacgccgataatatcggggctaccgagtgcgttacgggttgtcagttgaaaaagtgaacctgagagtgccagtgttgcgcccgctccgatagccactaatgcgcggggtaaacgtagctgtatgagaataaattcttgataaggagttgaggttgctagccagggattatcgataccttgcttacccagtgcgagagagagataaaacagcactgagagcagtaacaatatcaataagatggctctttgggtccgttgtggaggtacaagaaagacagcagttcccaacatgaaggttcgaatttttgccggtctggataggttaatctgcgacataattaactccacgataggttttaataaccagatagagcaacggtccaccgattcctgcggtgataatccccaccatgatctccccgggggctatcaccaaccgtgccagtatatcggaagtgagcaacaggcaaggcccggcgaacaggcaatagggtagtagccagcggaaatcgctgccaactaaagcccgcatcaagtggggggccgctaagccaataaaggcaatagggcctgccatagcggtagccactgccgccagcatggtcgcagtaataagcgacaacacgcgggtgcgggcaacattggcaccaagtgaggtggcaatgtcttcaccaaacaccatcacattcagggaggagctgagtgaaagggtcaatattaaggcaaataacagatagggtatcagcgaactcgcttctgccagagacattgcgctaagcgatccaatggtccagaagcggtagctatccaatacatgggcattcattaatacaatgccttgcacaaaagcaaataggcaggcgttaatggcagcgccggtcaataccatgcgtgctggattgctattacgttgtcctccactgagcaggtagaacagcaatgtagctagacttgcgccaataaatgctgtccagaaacgtggaagttcattcagtatgggtatgaaagagaaactgacgaccaccgcagcagcgccggcgttaacgcccagtaaacccggttcggctaatggattacgtagcaatccttgagttacagcaccggaaagcgcgagtgctgcgccggccatgatgccaattaacgtacgtggtttgcgggcattgatgaccagatcgctatagctaccactgtcacctaaccaatagtgatgccatatagttgataatggtaacatttttgcgcccagactcaggctggcaataatacaaatgaaggtcagcagtatcatgagacctaagccaagtagcagtacaaaccgccgtttaggatttgtcatgatgatttaattgcctctgccagcacgggcataaattgtgataaaccccagcgtaagctgagcggtgtaccgtaagacatggcaacgaccaatgattggtcagttagtgggatataacctcccaggtgtacggcacggatagattgaaacagtggttgtgcttccactgccttacgttcttgttcattattgaaccaagttactaagatatccgcgccattaagataatcggcattttccagtcctatattagcggcgaaactgccgaagggatcggctaatgtgctgactgatggcagtagcgtcaaaccgaggtgtattaaagtatcgacacgaggatcacctctaacgtataccgatagcatgttactgctgatacccgctttgatataggcgaaagtgtagccactgatatgcgggatggtattacctgattcgcgcaatatgacattcagttcagtagcgagttgctctccttgcggctgtttatctagcgcacgagcaattaattcaatctgctgttgtggtgtcgtgagccaaggggcagatggataagcgatcactggggcgaaatatgataaatggtcataaatttcttgggtgaggcctgattgggttgccacaatcagatcaggcttaagactaataaccttctcaatgtctaattcagggtacatctctatcacagttggcaaagtctcgccacgctgttgtatcgcttgtttaaaccacggtagatagccctgttcatccccgccccaacggtgggattcgataccgacagggacgatgccaagatccagtacgatatcttccgctcctgcacccaaggcaacaacacgttggggttgatgtggaatcaccgcggtacccaaggcggtagttatttctttaggatagccgggcttatctgacggtgcattgtttgtgctggctggcttatcacagccagccaacaggctgaccaacagcatcaacggtacggcaaaccctttgcaacgcttcaatttcattgtttgctttccttcaaataaatagaaacataaggtttgccgtccgcagtgtcattatgactttaaactcagaacttataacgcaagatcgcttcaatgttgcgaggtgcgccatagtaatactgagaatattggccgaactgggtgtagtaggtcttatcaaagacgttattcaggttaaccgtcaaagagagatccggtgtgaattgataacggctcatcaggttcaccacagcaaagctgttttgttccgcttgcattgatgtttttccaggcccatcaacggtcaaccaggttttatcctgccagttaacaccaccaccaatggtcagattgctcatcgcacctggcaaggtgtaggtggtaaacagcttaaacagcctgtttggcgtattggcattgattcgcacaccattaggatctgttgcccggaattgcgtgtaaccagtataaagacgccagttatctgtcagttgaccactgatttctgcttcgaacccgcgagttttggtgccatccactgtataacgaggaatggagagatctggtagtctcggggcattgttatccactaatggcaggttatcttgacggatttcaaagactgccagtgaataatcgagactgttatcgaaggcaacaccttttaggcccacttcatagttttgtccagacactggggcaagtaatttgttattgcggtcacgttggttttccgggttgaatatttcggtataactggtgtaaaccgacaagtcttgagtaatgttgtagataagtccaccgtaaggaacaaattcgtcactgtagctggcattttgtggagtattgaaattatcaccacgtgtttgccaactggttactcgaccaccaaggatcaaggtcaatggatctgccagagaaatctgagtgactgcataacctgaggtctgttcattacggcctttcgagccataagttcgcgtattactccactctggttcaggatattgccagccaggagaggtgaagtcacctattcctggacagctatttggacgtgtaagcatacaggttgcgttgaagtaatcgttttggaaatcctgttgctgatggtttaagccgaagctgacatgatgtgtacggttaaacaaccggtagtcaccgttcacttgtagatcgtagttcttctggcgacggctgccatcgatgagtgtcatgttacctggcaccataccaatattggtgctacggttaggaaaacttgttgcccacaggactttttggtccagagcgctattatcataagtaaaggtgccttttacactccagccgttgtcaaagttatgttgcaggctggtaaaggtagagaaggtccgaacttttgaaaaagcccaatcaggtgcatagctgtcgctgcgtttatagtctgttttgctgccgtttgcaaagtagatcggcaaaccaccaaacataccgccacgggtgtgattacgttgataatccacgcctatagtcagcaaggtattttctgtcaaatccgcttcaagaacgccatagaacgggtatctttcgttgttattgcgatcaataaaagagttagccgcttgataggctgtaacgaaacgtccacgtaggttgccgctgtcatttaatgggccagagagatcaaggccagtgcgccatttatcccaagaacctgctccggcagagaattcaccacggaaatcgcgggttggacgtttacgaatcaggttaacggctgccgaaggattgcctgggccaaccatcaaaccggctgctccacgtaccacttcgatacgatcaagcaggtcagcatccaaaagattgtcaccatagttaaagcgagtgtcgtagtaggtcgcaaccccatcacgcaggatgttattgatagacatgccacgagaagtaaacccgaaacgatcactatcaaactggcgtacgttcatacccgttgtgctatcgatgacgcgattaacactgtccagattttcgtcaagcatccgttgtttggtcacgacactgacggtctgtggcgtttcacgcgccgagaggtttagaccggtggcggtgaccatcgacgtggtattgtacatgccggtgtcttcggtcaccccttcatgttctggtcgtgaagcggtgacgagtatcttgtcattttgggcagcggttttatcgctcttattctgtgcactttccgcgattgcatagctatttcccattaatactaactgtatagtcattgcaagagttgtttttttaatcatggaatccttttgcaaaaacggatacatcactttcttattattcattccatccccaaattaaatcttttggtatttatctatgttgatatttttatttattgctgttcggcttgatgaagaataaccgagtattcatggcgtaaagcgtacagcgggttaactaaggttccggcgaatttgagattcttttcgcgatcgtcgaggtcgatcatctgttgattgtttgccatttgcagacggttcagacaggtacgaataaattcccgcttaaacagatcgaactggcggaatttttcaatctgatgcagatgttgtgattggtaattatggacacagcgtgcaaccagtagccagaaacgctcttcgggtagattaagatctttttgcaacagcggaatcaggtagcggaagaaacaatcgaaaatatcaaggaagatatagttaattttcatatcgtcttcgatagtgacgtgcaggaaattaatctcttcaggcaattggagatcaccattcaaaatagcgatttcttcaccaatatctttcatcaacatgtttgttgggctgttattatccaataccaacatcagattttcgccatgtggcataaataccagatcataggtgaagaaagagcgcagtaatggcgagaggtaagcatcgagataacgtgatatccactcttctgcatctaaaccagaactctttaccaaagctgcgacgacggaatgaccttgataatcgacatgcagcaacgaagccattgtcatcaagcgttggttatcctgcaacagcgtcattgggctttcgcgccacagtgctgacaacattttcttatgtgggctgtccttcttaatggctgattcaaagtagttattgaaataaccgagagcagcacgttcccgtaatacggtaaaacccttctgttggaagaaactgtcattatggactaagttgctgagccactcattgactgatggggttgtgaccatgctgtgtggatcgagcccacgcataaagcccatgttgagcacggatagggcggtcttaacgtagttcttcttcggttgagtaatgttgaagaaagtgcggatagattgctgagcaaggtaacgatcatgcccttctccaagataaacaatatgattattggcaatatctgctgcaaagctgatcgcaatacggtgctgccactgccaagggtggagaggcatcagataataatctgacgggcataatcccaacatattaaggtggcgttcaaattgggctggcagatatttccccaattcttcttctattaattgttggtatgaaagatcggatagtgcagagaaaatagctttatccttatgtaccgcaatccagattaaagtcacggggctagcgctttcaggtgcataacgctgataatcatcggcatcaaaaccaattcggccattattggcaataaagactggatggccttcactcattgtcgtttcaacgacttgataatcggcataagctaaatcttgggctgtaagtcggttgtactgatatttaaaagcgtgaccgtagagcgtactggatatctcgtcgagataaatcggcagcattttttccgggatttccaacagcggatgcaactcaataatcagttgaatagcatcaagtggctgagattgattatccctgagtttggttacggaagcggcatcaatatcaatatgatcgagctgataagtttctgcttgaaaatggtattggtagtcacctattgtcagagaatattgctgttgtccatgataggtagggttaattaatttttcgtgacatagctcacgtaatatttttgtcaccagatggcgattggcatagagccagttctctgcgttgagatgcagagtgtgattatcggagttaatatgcagtgaactcatggtgataacaatccctattcataatcaaaaatcacatccaacatagtcgttatacactggaaacaaatcggtacgcttaattctgaaattttcgaatataagcatccttttccaggtattcattccggttctcttagacaggtgacttttggggtattcaattttgataacattaatacaaattattatcattaacaactgtgtaagtgtaaggatttactctagttttgtttaaatagcaggcaaaaatgtggtgttatggcgctgcattgggatgagtaagatgaattggggaagaatttttgagcggctataacgtttaacaaaatctgcgtttataccgagatgatgttcaatgacatgctgtaattatttcgagagtgagatagcataatgctcaggcgttttgcatggcgtctatgattttttaatatggttgaggaaaagcgtgtctaccgcagaggtcattaatacgatatcactggcagaacaggtattgcggaaaacctttggttacttgcaattccgttctggtcagcaacaagttatcgataccattcttgaagggcgtgactgtctggtcattatgccgactggtggcggtaaatcattatgttaccaaattccggcactggtacaggaaggggtaactttggttgtttccccgttgatctctttaatgaaagatcaggtggatcaactgcgggcaaatggcgttgcggcagattgcttgaattcaactcaggcccgtgaacaacagattgatgtgatccggcgttgccgtcagggcatgattaaattgctgtatatcgcccctgagcgtttgatgatggataacttccttgagcaacttctggaatggcaaccagccatgttggctgtggatgaagcccactgtatttcacaatggggccatgatttccggccggaataccgggcattggggcagctcaggcaacgctttccgacattacctgtcattgcgttgacggccaccgctgatgaaacgactcgcaatgatattgtccgactactgaatcttaataatccacttatccatatcagcagttttgaccgtcccaatatccgttataccttgatagaaaaatacaaaccattagatcaactgtggctatttattcgcggtcagaaaggtaaaagtggcattgtgtactgcaacagccgcagcagagttgaagagatatcagagcgtttacaaaaacgtggcttgagtgttgcgccataccatgccgggttggataacagtcaacgtgcgcgggtgcaggatgcatttcaacgtgatgatttacaggtggtggtggcaaccgtggcatttggtatgggaattaataaacccaatgttcggtttgtggttcattttaatattcctcgtaatatcgaatcctattatcaggagaccgggcgtgccgggcgtgatggtctgccggcggaagcggtgctgttttatgatcccgcggatatggtatggcttcgccgttgtctggaagagaaagaggtgggcacacagcaggatattgagcgacataagctcaatgcaatgggggcttttgccgaagcgcaaacttgccgccgtctggtgttattgaactattttggtgaaagcaaacaaaccccttgcggtaactgtgatatctgccttgatccaccaaaaaattatgatggcttggtggatgcccaaaaagcgctttcttctatttaccgggttgggcagcgctttggtatcggctatattgttgaagtgctcagaggtgcgaataatcagcgtatccgtgatatgagacatgatcatttgccggtttatggtattggtaaagatcaaagtcaggaacactgggtgagtgtattgcggcagcttattcatttaggctttatcagtcaaaacattgccaattattctgcattacaattaacagaagcggcacgtccgatattgcgtggtgaagtttcgctaaaactggctgttccacgaatacagaatctaaaagggcgtagtcagcaaagtaaatcgtatagtggtaattatgatcgcaaactatttgccaagctacgtaaattacggaaatctattgctgacgaagaaaatatcccgccttttgttgtatttaacgatgtcacgctgattgaaatggcagagcaatgcccggttacggagggtgaaatgttattaatcaacggggtagggcaacggaaacttgaacgttttggtaatgtctttatggccttaattcgtgaacatctagaggagtttggatagtcagagggcaacttatgacgccagaaatgttgaaagaaagttggttcaatcgtgaggtgcagttctctgtttttgccaatgggcctctgttagatttttggcaagctagggaagagtgtgaatttatcggcgtcgataatgtactgatacgttatgttcgtttttgcacaacaataaaaaatgatagagcggttgttatctttcctggccgtagtgaaagttatgtcaaatactcggaagtagcatttgatttttatcaccttggttacgacatttttattattgatcatcgtgggcaggggcgatccagcaggatacttgcagatccacaaaaagggcatgtagaaaaatttgatgattatattgatgacgttgaaatattaatagaaagagaaattcttcctcgtcattattctcattgttatgcgttagctcattcaatgggagcggcaatattagggggatttttattacgtcacagccaggtatttgatgcagcagccctttgtgctcctatgtttggtattaactttcctatgccacgttggttggcaactttcctggtaaatcgggctgaaaagcggccggatatgcgcaaccattatgcggtatttactgggaaatggcgtccgttgccttatttgataaaccttctgacacacagttatgaacgttatagccgttacctccgttattacgcggattatccggaattacatatcgggggaccgacatatcgttgggtgcgggaaagtatctggattggcgatatgctgatagaaaaagccggagaaattgagacgccattgataattttaaaagccagtgaagataaggttgttaataattgccgattacgggctttttgtgaatcacgtaataaagtgagggctttcatcaaagaacgttcacctttgattattcaaggggcgcatcatgagatcctgtttgaaaaagataaattacgtagccaggcactcaacgccatttgtgatttttttgaccagaattgattcaattataggaatgataactatgtatcacattgttgcttcagatttagatggcactttgctgtctcctgatcacaaattaacttcttacaccaaggaaactcttaatttactgaccaataaaggcattcattttatttttgctactggtcgtcatcatgtagatgttgcgcaaatccgagatgttcttggtattgatgcctacatgattacttccaatggtgcgcgggtgcacaatgctatgggagaactggttttcagtcacaatgttgatcctgagattgtgcatgacttgtgtctaatggagtttgataacgttgatattctgacgaattattattgccatgatcactggtatatgaatcgtgaatgccctgagcagaaagagttttttcaggaatcggtgtttcattatcaactttttgagcgtgacaactttaaaaccgatgacgtatgtaaagtttattttacctgccaagatcatgatctattggttgcgttggaagagaaaatcaaagcgcgttggggtgatagcgttaatgtaagtttctcgttgcgcaattgtctggaagttatggcgggtggtgtttcgaaaggtcatgcacttgagcaggtagcccaagctatgggttataaactgagtgattgtattgcttttggtgatggcatgaatgactttgaaatgctgacggtagcaggtaagggctgcattatgcaggatgctcaccagcgtttgaaagatatcttgccggatatggaagtgattggctcaaacgctgatgatgcggttccccactatttgtgcgaaatgtatcgggtttaatttattatccacggtaattgcagcgctattggcgctgtcagattattatggctttagccagtttaagtagcgtcagcttcttaaacataaaaccacccgctatgcgggtggaaatcaagggttataccaagaaaaacacctttccgttacgatatagatgttcaagctaatatacgtaactcaaataaggaaaggtgtttatgggaattaaagcacaaagctcagcacatacaaagtggctgtgcaaataccacatcgtcttttcgccgaaatacagacgaaaagtcatttttacccgtatccgttcgaggataggtgagattttacgagacctttgtcagtataaaggagtagaaatcatcgaagggcatctcatgccagatcacgtccatatactggtgagtatcccacctaaaataagtgtttcaagttttatgggatatctaaaaggtaaaagcgcattaatgatatttgataagcacgccaatttaaaatacaagtttggcaataggaagttttggtcagaaggatactacgtgagtacggtagggctaaatgaagccacaatccgaaaatacatcagagagcaagaaaagtcagatttaatgcaggataagttaagtacacgagagcatgaagaccccttcaaggggtaagccaaagaagcaaagacacttagcttgaacgaagagaaagggcgtcatttaggcgcagtcggtaatatgcccttatagggctagagcaaaccacccgctatgcgggtggttatgatttgctgtttgatgtatgttattcatagaaattttatcgctcaaagctgctcgtaaaatcttcattccaatcggtagttacttgccttggtgcgatttttttaaggcgtgcaggacggtgttaatgccaatcttgaggacacgagcggtgtcacggacacccgagccgttgaacgctatatcgacaatcttctctttgacgccaggtttgcgagcttcataggtgtaggtgagctgaaaaacatggggacaggctgggcaacgatagcgaacgtgaccggcaggggtcttaccgtggcgatatgcgcggtcggagtggcaacgaggacagtgaacggtgatggatgctatgaagtgctgagtctcaaaagcacccatcataccgcttcaaccgatcggaggcatcacccgattaaggtagaatcgccttcgttatgttcgagctgattagtatgccaatttttcaatttagcatacttttttcgggataaacgccctttcaaaaactgaccactctttgcttttaatatctaacagagagcaattgttagattgctattagaggttggcaacgaattgtttattaaattcagcattcactttatcactgagaagttcgtacttttcacttaatgcaatttgctgcgtttgtagttgagctgggtttttaacaagatcagatgcgtgaagttgacccatctcttccataaagccgctagttaactgactgaagagtgcatctttaccgataataaaactcgaaaagttctcttttacgaactcttgttcattgggacttaagctttctaaacccagacgtgcctggttagcggaagtgacatcgtcaaacgtcgcgttagctggatcagtaccaggctttaggtacgccgcgtcatttttgaagtcaccagcattttgagtcatcgcgttttctatgagtttttgagagaaacttcttacctcaaacgtagactgcactggtttgtggtcactgacattcacaaatccatcagtgatcacactggtttcatggttctgtaagttacccgttttgttggttaaaccagtattatcgagctcaccgaaatcagggcgatctcgaccttctttctgtttaatattgccagtgtgcttatcaagctgcatgtaagtatggctatcgagtggtttgaacttaaagccatgttttgctaaatgcgtatcatcgtgtgcaattgggtcgtacagcacatcagagccttcagcaacacgcttctcacgttcattgagatcgccggtgatcagaacctcttcattcggtttgatcccctccatcaacttgtttccttcgaattcacgctttacttctttgttagaatccaagtgcgcggaaatcacgtttaaagcttggccattgatctctaaagcggttttcaccccgcctttgttaccagtgatacccatgaagaatgccatgtttcgtccaccgataccgtgacgatactcagactcttttttcacgttaatatcgacgccatctttagcaaaaacagacatagaagtataactaacaccttcaccaagacctttggtcattactttcattttgttttggctaaggaggttcatgccatcgagttctaggtcgttagcaagcaatttagactcttgttcagcaaacaagaccacatcataatcacctttttggatcagattctggaagtagttcttagtctcttccggcatcttttggttagcctggttgtaggttaatgttaagaccttaacgttgccgctgttctcttttttgtgcagctgttggttcatcagattcagttttaaatcactgtttttcgatgaatctgtattgctaaagaagcggttaaaaaagctgcgattctctttttgttttaggctaacttcaccatcactgtttttagtaacgcggtattctttaccaaatacagagccaaacttaaccgtatcaccttctttcgcattggttttgatattttgaatatccgcgaagtctaaactacctctgtgctgactattaatttgaattgttgacataaattaacctcatattataaataggggtgttcgctgcagggattaaataaaaatcccgacaggtagtttttctgggatcgtttctgcgttattcgtttgttcaataaaatggtgccattgctccattttttctaacagttgctgaaagatgttttgcacataattttgaggcttatttgatagagaaataatcttataaatcgttaatctacggctatcaggcattaagccaataccaaagccacctctaaaaggttctagcgcgtgttcaccgatcgcgactgcaatcgcttctggaagaggcgttggtaattcaactggactggtcagagatatgtgtaaattaatggttgtttcattcttaaatatggttaagaaaagcgcctcaccatggtcattagtatcgaatgataactcacattgaaataatccattttcatcgaaatcggcaccgttacctaaaaatctgatactttcctgatagatatccattgtgttccttctatatattattttttgatggttattcttcttagtaagaaggattataaagacgagggaattgtatgatattaagtacaggcggatttttttattcttccatatgaaaggttaaatctatggtcaccctcgtttttgcaacactaattttgatgaattttgagcttgcttaaatctatccggcgtcactataggcaaggatgcccgcgcctcgatgagttccgcgcctgatgttcctaaaaaaccactcggctttaataagccatcttcataaacaggatctttagcggcaacctgttattttagatagaaaaaaggctttatttatgatctgataattgtcgccaaacaaaataccgagatcagagaataaagccgatgacaattatctccacaaaacctcagttaatgcaattcttcagtgacacttttcttgaaaaaacggcccgcagatgtggctttatggagcggttcagaaatattgggccacagtctctggttctcagtttgatagccgcgttgagcaaaggaaactgcacttccatcgctgacttgcaccggcagtttaacggcatgtgcctgagtgaaaaacacactgtcgcctataaacccttccataatcagttgcgtaaaagcaccttcgccgattttatgaagaaactggtgacattcgccatggttcaattgattgaaaacgttctgccgcccttacccaaaaaatttgagcagtttgacgatatcctcttgcaggatggcggctcattcaacgttcatcccgatttagcgggggtttttccctgccgcttcagcccattgaaggcagcggttgagtgccatatgaccctgtctttgttcagccaatcacccatcgccatgacggtgaccgcagacacggcatctgagcgggcttatctaccagctccccataccttacgcaataaattgctgctggcggatgccggttatgtggatttcgggtactttgaacaactttccttgtccagtggttcatttatcgtgcggggaagccaatcgcttaatcccctgattgtcagtgcccgcaatggacaggggcgacaattaccgacactggcggcaaaaaactcagggacatcagccgcaaaaataaccgcgatgaggtactggatttcacctgtcggcgtggccgattcgaatttcgggtcatccggcgttggttcgcgcaggaaaagcgcttctgtttttggctcaccaacctgccgccatccgactttaccgcagatgacatcatggcgctctatcgctgtcgctggcaggtcgaactgctgttcaaggaattaaaatcccacaccaaccggacaggctttgcgaccggtcagaaagcgatagcggaaggactcatctgggcaagtctgctggcgttgatagtccggcgcagtctggcgagacggtttttgccttcagtctcctttctcaaggcagccaaaaatgttgatgtctggttgttgccgatattgggcgcgattattcatcatgccgggtcggaaatagaacaccatctggattgggccctgaaatatctctccaaaaacgcgttgaagttgcctcaaagaaaatccaataaagacaatacgttggagggtattgtcgagaggcttaatgcttaaggttcagtgtatgaggtcgttttaatcggatagctgctttgcttgttatatttatatctctgttatcagaggtaatatttgtagatcccgcaagcagatttcaatatcattggctttattgatatgttcttgattttcaatatcaaaaatatcttttgtcgtaataatcaatgagccttttttgttatttttatcagaaatagatattatttcttccgccattggaactaaagtcggatctatttcaattggtaagtagagcatccaaccggcgtaaaccctatctggaaaaacttgtttttgttttaacgagtaacctcttgtatctactaacataaatggagagtttcgaatcgatattgaattttttaaaagctcaataatatcttgaaaattaaatttatctttatctaaattgatgcttatagatatattagttttacctaatctaacaggattaacatggattttatcttcacccatatatagaatactgttgttgttctcatctactccatcagataatgatttcacaataaatccagagttttcatcataagtttctttaaaatcttctatagcatatttagtaggtccattttcatcaaatgcattattttttaatctctcttcttgagtataaccaggtaaataccaaccactttttctagttgttaacttatttatcttgcatgtaatttgatataaatcaagtaatgcattttcaggagttaaagcctcatttaagtcatggaataattttattcttgaaaagatcattgacatttttaattctccttttgtgagaatgattaaagtttagtgttaaataccgtaatgttaggaaacatagaaaatgccgtaagaaagtattcataagatattggttctagaaagtgccaatgggattttggaatattatctaatgtctcgcacactaagttctgcctcctagcctgattaatcatactgtcatatccagacatttttccctttaactttatatttttataaaagtcattaggttctccatctttgaaaaattgatcatatttagctttggcctcaagaaataagcattgtgcaggtttccaaccatcgaaatttgtatccatgcataaccaagtttcaattatgtttaattcaggattgtatatcgtcccggcaatttttgtttggtaggcaatggttatttctgaatacgatgtggttttttcccaaaccattgtaacgttgccaattgccggacatttctcacattcggtacgggacgaagcaattgtttgtgtatccgcttttgccttgtcttgttcaccttctttatctttggcgctttccatcacaccaacggcggctaatcctgttgcacaagcagctagtgtccattcagcagcagctaaaagagcaggagccgctggcgcaagaagtggtaatggcatgtcaatttctccttttcaataaatgatccatgactcgcaaataatcacggtatttttctcggctctccattttaccggattaatgtattagcccggtacaatggagaagataagcgcagcgcgtcagtgttgccttaaataggccaaaatgattgtcgtctcattaagcgagaaaatctttctgactggcaatcagttttgcgccacaggctgtttgcataccttccaatgcaataggttttccctgatgctttaagtcattgctaccttctacaatagggaaaacctctttgcacttagggcagtttactaaatcacctttagcggcaacaggcacgccttgatacatgtaattatcaatggcggtaatgactttaccaccatgatcggttaggtcgtttaatcggattacggctctgtttgtcatatttataactctgtcatcaatggtagtatttgtaaatcccgtaaacatatttcaatatcattggctttattgatatgatcttgattttcaatatcaaaaatatcttttgtcgtaataatcaatgagccttttttgttatttttatcagaaatagatattatttcttctgccattggaactaaagtcggatctatttctattggtaaatagagcatccaacctgcacttattcggtctgggaatacttgcttttttttcaatctatatcctcgtgtttcagtcataacgattggagaattacgagtagatgctaaagctttaacaaactctataatagtttgaatcttaaatttttctttcactaagttaagatcaatggatatatttgtttttcctagtctattattgtaaattacatcactgctttgataaaaaattctatttttaagttcaatgtcacctgggatgtcaaataaagtagctataagatattttgcatctttatcataattttctgtaagctggcttatagcatattcagtaaaaccagcatcagtaaatacattattttcctctatttcctctaaactatatcctggtaaatgccaataacttgggttactactaatattatttattttctgcattatctgatatgcatcccttaacgccaattcaggtgttattggctcattaaggtcgtgaaacaattttattcttggatgtattaaactcataatcattaatcctgtttgaaattttcagcaatagttataggcttttgatcaactcattggcgtatgaaatgttttaatgttagtaaaaggaacaaacatttcagaaaaatattcataagatataggctgcaaaaaatgccaatgagactttggaatattattcaatcctatgcataccctattttgtctttctgcttgccaaattgtactttctgcccctgttttgctggtaggtgtttttctaaactcaccaaaaatccaatctggttcaccattcttaaaaaactgatcatatttagctttggcctcaagaaataagcattgtgcaggtttccaaccatcaaaatttgtatccatgcataaccaagtttcaattaggtttaattcagggttgtatattgtcccggcaatttttgtttgataagcaatagttatttctgaatacgatgtagtcttttcccaaaccatcgtaacgttgccaattgccggacatttctcacattcggtacgggacgaagcaattgtttgtgtatccgcttttgccttgtcttgttcaccttctttatctttggtgctttccatcacaccaacggcggctaatcccgctgcacaagcagccagtgtccattcagcggcagctaaaagagcgggagccgctggcgcaagaagtggtaatggcatattaatttttccttttcaataaattatccataacttgcaaataatcacggtatttttctcggctctctattttaccggattaatgtattagcccggtacaatggagaagacaagcgcagcgcgtcagtgttgccttaaataggccaaaatgattgtcgtctcattaagcgagaaaatctttctgactggcaatcagttttgcgccacaggctgtttgcataccttccaatgcaataggttttccctgatgctttaagtcattgctcccttctacaatagggaaaacccctttgcacttagggcagtttactaaatcacctttagcggcaacaggtacgccttgatacacgtaattatcaatggcggtaatgactttaccaccatgatcggttagatcgtttaatcggattacggctctgtttgtcatatttataactctgtcatcaatggtagtatttgtaaatcccgtaaacatatttcaatatcattggttttattgatatgctcctggttttcaatatcaaagatatcttttgttgtaataattaatgagccttttttgttatttttatcagaaatagatattatttcttctgccattggaactaaagccgggtctatttctattggtaaatagagcatccagccagcacttaaacgatctgggaaaacgtgttttctttttattctatatgtattgttttctgccataatgtaaggtgcattatgagtagaaatcagaaaattaataaagttgattaatcgtgatagctgaaattcattttcttcaatagatatatgaaaatctatttgggtttgtcctaaccgatctcgacgataattcatataacaaattgaacatgaatggtcatcatcttcaccatcccaaatccctttaataattataggattttcttctgtataatcttcttcaaactcttttattgcttcttttgttgctccttgctgatcaaaagcaatatgttgtaaagattcttgacgagtatctcctggtaaataccaagttttatggcgtctaaaaaatatatctacttgttgtgtgattttatataaatcggtaataactattgttggagttaatggttctttccaatctgtatataatttcatgtttaatgataatgtagtcatttattttcacctttacttagatgttaaatagtgtgaaatactttaatgttgggataaatagaaaatttctctaaataataggcatagcttataggttgcataaaatgccagtgagaatttggggttccatttaatgtagtgcatacttcttgctgtttttctacttgagtcgtcatggatctatccccgcttttacttattttccaccaacttataggcattccatctttgaaaaattgatcatatttagctttagcttcaagaaataagcattgtgcaggtttccaaccatcaaaatttgtatccatgcataaccaagtttcaattaggtttaattcaggattgtatatcgtcccggcaatttttgtttggtaggcaatggttatttctgaatacgatgtggttttttcccaagccattgtaacgttgccaattgccggacatttctcacattcggtactggacgaagcaattgtttgtgtatccgcttttgccttgtcttgttcaccttctttatctttggtgctttccatcacaccaacggcggctaatcctgttgcacaagcagccagtgtccattcagccgcagctaaaagagcgggagccgctggcgcaagaagtggtaatggcatgttaatttctccttttcaataaattatccataacccgcaaataatcacggtattgttgttccgggttatctccggcgttcaacatattttggattgctggcgagccgtgaaaatcacggttaaacgcaacgaaatataagtaagagcggatcaatgcttcatccttgaaccccatctcaaccaagtccagataagccttctttaatcgttcgtgcaggctatgttcgctttcattttcgactaatccactgtgctcagccagaatacgttgtcggatctgggtcacataagcctcatcttccgcatcaataaatttagcgacctgttccttgctgagttttatcatcgttaggccccttttacgaaatgatcattattatcaaaagaatacacccactcatgaataccgtcagtgaatgctgacaattgctctgggctgaaaatatcccggatttgatgcaagatgcggggatcgtaaaaacgcagcaatgccgtttcccccgtttccagctcaacattcaggtagttttcaaggtgacgggttagtttgtccaaagatagcgtggtgtgtagccaggacaccgaaggtgcaaccttttccagcgcagataacttttcttcccatgatttcgcataagccatatcaaacaaccacggccccgcgaacgcaattttggcatccgggtattgccggaacaggggattattcgtgccgacgatatacttaatctcctcagcaaaatgacgttcatactgtaggccgctgactaaggcataccatttcatttcgggatgcatttctctgtattcactccattttttctgtaattccggtgtcatgactgccccctgataaccattgctgtgccattctgttctgctttcagcagacaggtcagacagatttctttcaacggtgtcgtcagggctttttctacctgtacgacactcgtctgtttcagtttatccagcctatccggtagcttgccaccccaacctgagccgctgccgggtgctccactgccaaagttaatactcgcactgctggtaataccgccagcatcgattttaaggaagtgcccggcggcctgtagggtcagttcactgctggcatcaatcacgactttagcaccggaacttaggtgaatttcattgccactttgagttaacagggcgtcatctgctttgatatggagtttttgccccgtagatagggaaatgtcatttcccgtctgtacgcggtactcattatcaatgcgtaaatgggcatcatgtttaatatgatctgtccggttatgcccaatattatgggtttcatcattcagaacctgcgtattcatatcccgttgagcatgaataaacacttcttcactgccgtttgcgtcctcaaaacgtaattcgttaaagccgttacctttatgcgttttggttctgaacgtggtgcgcgtcttttccgcgggtaaattcagcggcgggcggttaaggccgttgtaagtacatccggtaataataggccggtcaatatcgccgttgagataggagataatcacttcctgacccactcgcggtgttgccagaaaaccaaatccgttgccattccacccttgtgcaacccgtacccagcaagaagcctgatcatcaggcgcatcataacggttccagtgaaagtgaacgcgaaccgcgccatctttattaacgtaaatttcttcagtgccgggcccgacaaccgttgcaatttcatcgccgtcggccaatggtttatagcggtatggcggacgccaatcgttgcggcctggaatgaactgggtgtgtgaattcagagtggtgccggttccgttatcgcctaaaacggcggggacataccctatgtgttgggaagagacgacttgccagcggtcattcatggcgtcaatcgggtggttggttagtgtaaagattctgccgggcattaatcgaatacaattactgtccgcttgccctgatttgctgtcaacacgcaaagcttccagccgatattgggtcaacggaatgccctctttgtctttctgaaaacggccgtaactttcgaaaatatgaaatggcgtgccgttctccgcttcaaaatccgtggcgttatgctgtaaagcgtaattggggttgtgataatttctgtctttttggtcggtagattccgggcgcatgtaggagccaagagaccatttgtagataacattttcttctacagcgctggtgacgtccgggttataaatcaacgtatccggcgctctcatgttcaggtagctatcactcagatagagcccgtcatcggcgaaccagaagaaaatcccctcctcagccgccaggcgggtaaagaaatcgtaggatgattcccttttcatggtgacgtattcccgcgttgagtgtgggttattcaaatgcatattggcccggagtttcttctgtttcagtatgctgtgtaaaatatcggggacactgagctggtgataaatacggctgtcctgatcgagtgtcagcagccacatttctggtctgattgtcaggtgatattgagtttgatgccggtttgtggtgccaactaccgcactttcaactaatcctttcacttcacgttgcagaatatcgtcacgggtaacggtgaacagcccggtttggagcagcagggtgtctgtatcaatatctgaacggtgtgccgctagtgttagagacagggtaaataacgatgaaagcgcttcatctaatgtaaaattaactaccgcaaaagtcatgggcggcagattgccgatggtgcaggaaaagcggagtccggttttcataatgcttccttcaattacatgatcttctgatgcccaggcatattgtaaaattcccagcattcattggtgccgttattgataacggttaatctgtgaaagctggtttcaacaaaacagagggaaaaagcggtgtgtagtgttttggcaaaagcatacatttctccttcatgttcataattttctggtgtcatgcgcagtgtgatggcttggcctctcacaggaatgcctttgtcaaaatggtagtatggctcaaggtagatagcgctgaggccatcggccatgcgctgaatatgccggctacgcggggcgtccagatgcgcgaaggtatcaagttgtttgaccagagatctgactgattcaatatgactgagaaaaaatggcccaatcgacaacaaagatagtatcggccaatgctggtgactgtttacgacggcaggaagatcttttgacgccgccacgatattcctggcctgaatatggctgggtatctgctcgctgggtatacagatttgtccgatgcccaatgtccgtgcctgcgtatgatatctgtgatattggcagtaaaattcgcgatagtggtgttctgttacgggttttgcctgatgatcataaaacgtgagattaatttgattgccaccaaatggcgattcttcccgtatatggttaaaaagtaatatgttgtcaccgggttcggcaaaatggcaggcggccagttgcgcgctattgataagaggaacactgtgagcagatccttcagatgttccatcaggatcggattggagtttaatgttatcaatactaaagatttcattcgcttctaatacataacgcgatttgcccttttcaaatgttatcggttttgttcttgccggagccaggttaataacgggtatgcaatggggaataaatgcgggtgtaatgtcctcgatgggaatattacagtcaaattctagaataatggtaaattgcttatcttctcccaaagggagctcagcgatttcttccgataaatcaaatgacataaagtcattaacatgtggcagatagaggtattcgtataacacctgcaacggccagaaatagtcatgtggtctcggcaggaccaaattttctttcaggcgtggagcgatctcaatagatagccacatttcttgctctttcagggatgttttcagataagtgttgttcagcgactgatctatgtatttggtcaataaagacgccagtttttgatcttctccgagaaaaagcgtgactggtcctgtcttccagtgggtagttgggccatgatattgaaaggtcagtgatatcaggcttttgtctccgctgtgtgtcagcgttttatggatcaaggtaataggctcaatactgatatcttgagtggttctgaatgtaatggattgattctgctgtatggcggaaatttcactgcctttggcaatgcttgtggtttcagtcatgctgcccggttgcatatctagctggacaatgctggttgaagggatcggatgtaaaggtatcggccatacttttcgtagaagagggttaatgacttctgggaagccatcatcaattttctgcttaataccggcagttgtaagcgcaaaaccttccagtaatcggagaacatcagggtcaccggattcggaggtaaatggagcaaggtgtggatgctcttgcgctgcgttgctcagatcatgctttatttgtgaaagtgcttcccgatagaaatcttcaaaatttttcatatttacctttgctctctttatgatcaaatattaatgtaaatttatattttgagctgatggatatcaaggttgataatttaaatatgtataattttttgtttcaaacagttaatgatgtaaattttttaggtgtttgattaacataattatgtaatttatttcaatgagttttatttagataagttttctttaatcaagttatggcgtcatgatagccagatgttggaagctgaaattaatatttaatcattagttaatggagggaaatatgtcacgtcccattattttggtcggtgattcgacttcgcatggcggcaaggtgttagccggtgatggaagctttgatgtgttagggaagaaagcggctcgggttggggatgctgtatcctgtccaaaatatggtggtaatcaaaccattgtggaagggacgcctagaataatcagctctaatggacaaatatgcactggagggaatgaaaacctcttgtggcgcgacattgattgcttcgcaaaacctatttcaagcataggatggcggtaaaaggccatatctgcctgaaatagggttagttgattcaagtacgggtgctccgtgcttcattatctttttacaaactacccggttgacgtggtggattacggcctgatctatttgttgtcgcactgcgaatatcccgaccaataacatcgatactcgcttgaaatggtgggaatggcagagtaatgccgtgttcgcggaatccttgcaaaataagctggtggacttcgtgacgaacaggcatgcgatgccccatttccgcggcataaatacgtaattcaaatatctgaataccatgttgaagatcaaccagataggcttcaggtgccgggttatcaaggataagagtgctgcgtttagccgcggttaacaggatttgggtaacctcttcacagctagcttctgccggtgcagggattgtcagtacaacacgagtgatggtgtcagataatgaccagttaataaactgctcggtaataaaggctttgttaggaacaatgatctcttttctgtcccagtctgacagggttgttgctcgtgtattgatcttggtgatgctaccggtcaggttgcggatagtcacggtatcaccgatacgaatgggtttttcaaacaatatcatcaggccagaaacgatgttggcgaagatttcctgtaagccaaaacctaatccaacccctaacgcagcgacaagccattgcaattttgaccattcaagaccaatcagggagaaacctactaaaccaccaatcaaagtaatggtgtatttggtgagtgtggtaatggcgaagccggtaccgggtgtaagttctaaatgctgtagtaaggctaactcaagtaatgcgggtaggttacgtaccagttgagcggtgataataatcaccaagatagcaatcaagacagaacctacggtgatgggttgaacagtttctacattgtttattgtggtggtgacatcccacagtcggatattttctagaaatgagaaagcggaatgaagttctgaccagagccaaatgagtgaaaccaaggcaagcagagttagaattgaacggaccaatcccaatgactgagcgctgatcgcatctagatcaataatgggttcctcaacttcgatggcaccttcgatactgcttgaacccgtcgagtcatcttcgcctttggctcgttgagccagaatttctgcccgccgttgttttgcccggtcaaaggcaatacggcgtcgctgaattagcatccaacgacggataatatggtaaataaccagcaggaagaaccagatagcaacggaagtttctaaacgccctagcaatgcttgtgatgtgctgaagtacccgagtatggaagctagcgctgcgactatcggtgcagagagtaaaatccaccagagagcggtattgataacattttcaccgtagccatttttatccagatagagcgggacttttgcccgtttcaagctgttagtgatcaggcttaaggagacgcacaggatgaggaagcagagcctgccgagtgtggaagcaaattctcgatcactgtaatgttcaaacgttatcaatgccatgaccaacggtacaatggcaaagatagatagctggtagaatcgtaaggcccgtttaacacgctcttccggccaacggaagtgggcaatgaataatccgtttggatgggcgaaagtggcactcagcatgaatatccatagaacgggcgtcgtagcactgacgccataaccgatagccgttgccatagggtactgccaagcgctttgtagcccatagccaattgccgaccagagcatgggcaaaggtaacgcgacaacaaccgaccagaatacggtacgtaaagtgagggaaaagtgatcatgggtaactttgccaatacggttactcgcgcgttcaaggaatgcatgataatggcgaagagaaccgatgctgaatataaccaggaatagcgtgccaaacagatatagaagcgtatcctgagtggtcagcatgactatcagggcaccgcttaattgagagaaagtatccagcgataatagacgagtcagatcctgcacaacattgatcgggtaattgagcgaaacagggttaacatccgcgacccagaaaaggtaacggtgtgtggcctctttgacttctgttagtgcatcatttagctggctggtagcgactttcaatttggtcaattcaaggatttcactgtcgtaaccagataataatgaattgagtaattctttgcgggtgcgggtaagagaatcataaatccgctcttgttcagcagttaacgcaacgttgcttttctgtacgggttttgtgtctttttgtaactgatccagcatgtcttcgtatttcagacgatcgaccctgaatttgacaatattccgatcaagttgctgtggtttagacatgtcaggcaaacgggcaagttgagtttggagcgcttctccgagcgttgtagagcctccgagccattgtgcctgttcacgaatggtattcaatgcttgccggacctgaataatatcactggcggcttggcgttgctttgagccgatgacgttcattcgttgtgcttgctgatttaattcctgagataaattccggttcagttgcaattcatcaagcagaaattttggtagttgatcactttgctccgccagcatctcggtatgttccagggctaattctgctttttgctggcgttgtgcattaagttggctacggagttgttgcagttcaagatcaagtcgatgatatcgctttttgaacagttcaacccgcatacgggaaatttcctgtcgattattcgcagaaagttgagctatttcgagttcattgactgtcgctttgtgggcattgacttcggcttgagctaaggcaaattgagcctctgctaatggggtggatggtgttcctaatgattgcaggcgagaagatgcttcagttagcaagcgtcgtgcttctgattgttgttgcggtaatagtactagagagtcactgatttcccgtcctttgtcctgctcttgctgtaattgccccccttgttctagcaaccgactgctgacctgaatgatctgttgctcaacgcttgctatgggttggttagcaggaattgggcggggagtatcactttcagtaagtaatttttgacgaagttctttagttattttaggaaaatcatcaatggcggtctgatacttttgtgttctgtcgttagctgatttagtatcggcaatccaattgagtgcaccttgcagcgcctgagcaacttctgcatcctgcgggtttttgctggattcaatttgtttcagttcttgtttgagctgattttcatcaagtggaatcgcagcagaaaccggagtaataatgagcaggctaagcaataagctgataatcaggcgcacgatagagggctctccttagcaagggattagcttatgttgtcagtgggttcttcaagcatgatagcttgggctaacagttcacccatgcgggttgttgagccactgctcaagtgcccggctaactgtatctgatttggtgcaaacaggttaatgacggtagaacccagtttgaaacgccccatttcttcacctttcttgaaagaaatcgcgccagttgtaccggcttccgggtaagtccagcgtttgataataccttcccgtggtggtgtaaccataccacaccaagccatttcgatactgccgacgatagttgcaccaaccagaatctgtatcatgggaccaaattgagtctcaaacagacagatgactctttcattacgagcgaacagatttggcacattggcggcagtcaatggattgacagagaatagatcacctgggacatagatcatctctttcagtaatccatcgcaaggcatatgtacacggtgataatctttaggtgataagtaagtcgttacaaactgcccatcacggaatatctctgccaattgatgattgccggcgagtagagcttcaagcgtgtagtggtgccctttggcttgaaggagctggtctgtccggatattgcctaactggctgatagtaccatcagcaggtagcgctaattggtgttcattactgacgactgggcgaatatcatcttttaatgagcggataaagaactcattgaatgtgatgtatgctgaaaactcaggtgatttcgcttcattcatatccactttataaacacgggcaaacgccttgattgccagttgagtcaaccagccagcttttttgttagcaaaccagcctgccagatgagttattccctgtttaggcagtaaatagtgcaacctgattttaatgttatccagcacgtcaacctcttggattctattggcaaaattagacaaaagggggttattgtacctgtcctttcatttgatgtcagttagctatcgttatctgtaaaagtcttgcgtggcttaatttgatccatgctatcgagaatacggtgataattctcaaaacgttcttgatttatttcattatcttccactgcttttcgtaacgcacatgctggatcatcccgatgtttacaatcacggaatttacaacctcctagataatcacggaattcgacaaaaccctgagtgacttgttccgatgttaaatgccataggccaaactcccgaacaccaggagaatcaataacatcaccgccatgtgggaaatgataaagacgggatgccgttgtggtgtgctggcctaaaccggaaacatctgaaacctggttgaccagaatctcttcctcatcttctggcaagagtgtattgagtaaacttgatttacccacaccagactgaccggcaaaaatagtgattcgacctgcgagcatcttcgttaattcttccataccttcgccagtgtggcttgatagtttcaatactctgtaaccaatgttgtggtacgtggacatgatttcgttgacccatgcacggctttcttcgtccaacagatcaattttattcaatacaatcaagggctcaatgcccaatgtttcacaggcaacgaggtagcgatcgataatattgagtgacagttcaggaagaatggctgacacaatcactatctgatcaatattggcggcgataggtttaataccatcataatagtcaggccgcgtaagtacggaagtccgttcgtgaacggcttcaacaataccatttacttttacatctgcttgggtttgcagcgaaggacgccataccacccgatcacccgttaccaatgaacgaattgttctgcgaatattacaacgttgtgtagaaccgtcttctgcctcgacatcagcatgttggccgaaacggctgataactagcccttcctgaggttctcctaactgattatcatccatttcaggcttattatcctgttttttcagcctgcgctgatgattttcccgtacccgccgttgctggcctttggatagtttatgcttagccaccgaacctcacttgttccaatttatcgctgttattgcttaaaagcgctatgatacaccattaataataactctctctccaatctaggatataacatgtcaaaaagtgagcacaatcttatctggatagatctagaaatgacgggcttagatccagagcgggatcgcattattgaaattgcgacaattgtcaccgatgcaaatttgaatatcctggatgaagggcctgtcattgcggttcatcagtctgatgaacaacttgctctgatggataaatggaatgtacgcacccatacgggcagtgggctggttgaacgcgttaaagcaagtaaaattgatgatcgtgaggcagagaaggcgacgattgaatttttggaaaaatgggttccggcaggtgcttctcccatttgtggtaacagtgtgagtcaggatcggcgtttcttgttccgctatatgccagaattggaagcttactttcattaccgctatctggatgtcagtacacttaaagaattagctcgtcgctggaagccggaaatccttgctgggcttaagaaacagaatactcatcaggcgctggatgatatccgtgaatcagttgctgaattagcctattatcgggaacattttattcaactgtaagccagaaagttttaactggcttgataacgcaagcacagtatgacgattaattaatctattttgatggctaaatcgtcattttgccgaaaagtttgtttttttgcattgaagggcttgcgggcgcaacgatttctcgtataatgcgcaccccataccgatgatgaatttcataaggtatggatggcatactaaaagatatgcgggaatagctcagttggtagagcacgaccttgccaaggtcggggtcgcgagttcgagtctcgtttcccgctccaaattttggtttggaatcagtatgttattcatggttattgttagccagtcagtgacgcgggaatagctcagttggtagagcacaaccttgccaaggttggggtcgcgagttcgagtctcgtttcccgctccaagtttagattcgcaattggtttcttgggattgatatattatttcaggtgatcaccagtcagtaatgcgggaatagctcagttggtagagcacgaccttgccaaggtcggggtcgcgagttcgagtctcgtttcccgctccaagtctttcttatcatgcagatacacttaacaaccggtgcgtaagcagggtttgcatatcccgccgaccatcggcaatcacaaaaattaccacctgtttacctgtgatttggtaaataacccggtaaggtttaaaaaatgtttggcggaagtcgcggatccctaacgcctgcaactccttgggataattgcctttttcaggaaagttagccagactgtctgctgttttcagtaactgatccaatacataatcagctttctctgaactgtcattttcgacaatgtaatcgtaaatgtcctctaaatctgcttcggcatttttagtcagcattacatgatatggcatcaggtggacttccctttattttttaagcgttgaaccacatcctttactggtgtgacttcacctgctttaacttgttgttgtcctaaagctaaaatctttaacaacgctatagtttcctgagtctgctcataagaggcaatatcttgaatcaccgcttttgcctcgccattttgtgtaataatcatcggtgaacgggactcagcgagtgtcgtcatcaccgtagctgcattggcttttaggtagctaatgggtttgatctgttctgaataacgcatagaatccctcacatcaaaaaggactaaataaagactataaaaagtcaatttgttgattataaaatcatcttgccaattaagcaaatgctgatgattgcctatataaatttcgttaataaacgcctatacgtcaagcatatagccactcatgcagagtatgacaaattaactaagcagtatcgggagatgaaagaatgattgcagaacctacctaagcacttgaagccacaaagctactggtagctgctgttcctttcttggggaatagcacttccgaggatgcctataatgacgctttggcaatggtggattaccttatcgaacacgatgatgaaaacccgctgattgactttctgtccgctaaaattgctgactatgaaaacagcaatgagcgctttgccgcatttaataaagctgtagatgatatgcctaccggtgttgcggcgctgcgggtgttgatggatcaacacggcctctcttactcagacctgaaagaggaaatcggttctaagtcgcttatcagccagattttctctggtacacgctcattgacgattgcgcacattaaagcactttctgagcgtttcaacgtaaggccagatctgtttctctaatgatttagaataattaatggcattatggccgcaccatgaaagtaatgcggctttttttatcgttttcattcattattattttttgacttattagaaagaggctatgaattgcatttctccgtgcccatttttgatatacaaatgcctattgaagtctcttacattcatggtttttaagttcagaaatcaggtttgccatcaggtctcattaagatcgacgcttttgttttgtaccaaagtgtcgatagggggaaatttctggcttatctcctgtaattctttgcttttgctatatgattgatcccagatttaggttctggtggaataagttttttatcggttgatctcttattgcagatcaggatgcctccgatgacgagagcaccgccgatgaacattgggaatgttaatctctcatctaatagtactgcgccgagcaataccgcagtcaaagggttaagcgcaataaatacgccagagcgagtggaaccaattctttggattccgtcgtaataccagatgtaggctaccgctgagcctactgcaccgagataaagtaagctgtagagatcagttatgggcaatgtatgtattgcagataaactcatttgccctgtgaaaatggccgttgctgtcagcatgatagcgcctgccaggatggagtatgtaacggtatgtagcgggccgatttggttcacaatattcttgcagaagacgctataagcaacccagcttaaaacacagccaaagatcaacgtatcacccaaccagttaccctctgctcccaccgtcagttgtggtgttttgctgaaaatcacgatcattgcaccaagcagacaaagaataattcccagtattttcaatggtgattgcctttctttataaaagagatatgaaaaaatcgccattactgctggattcagcgccacgataagtgaagctctggatgcggttgtatgatgtagaccataaaagaagaacaggttgtaggtgtatattccgctgaggccaagtccaatgattttcaatagttgggatagattaatcttgacgaacatttttcctgataaaacgaggaagataattagcgtcatgcccgcaagaatgaatctgagacttgctgataataaaggtggtgtctcgacagaaatatatcgacctgcaacaaatgttccgccccagatgatagccacaagagacagcttgatataggttgagtagttgttgaccgactgcgttgatgcgtggttgcttttcatgtttgtcaatatcgcgatttatagggtggaagaggctttcaaggcggcgtattccatcgtctgttctaatatttcacgttgagcacggctacctcccaataatggccatttctcatagctgagacggagtttgcttaaacactcttcgtagtgtctcgatgtgaatagtaagatcgctttaaggacgtctatccctgtggaatgtgtgtctggttcgatgccaaatccatcgctttccgcgattagcttctcgataagaaaagactgatttattgcagaaaaagcgagtgctgcatgtattttgtggaagtaagaggtggatgagctgatgctgcctgtccaaaggacggcaagacgctcccatattggttggaacttagcgtcggcagatttgagcctgagttgccataagaattctacggcgtccaaatcctgtttagcaaatggattgtcttttagtgcatataattcatcaaaagcttgcaatgccagcgtgatctcatcggatcgctcatacgcaatggcgagatgccagtatacatgcattcccattccagtgttggttatccaatgttctttgcagttggtcaggaaatggcaaagttctttccagcggcctagctcatgcaaggcatgtgcgacagcatgaatgccatagatgttgtccggcattaacttaacagatttaaaaccaacctctaaggcatcatcaaaacattgagcttcacaaaggacgaatgattttatggaaagataatatgggtagagatagtgagtgcccggaatgtgttcgtcacaataaagcagaagagatctcaggttggttgttttgccagtgcagaaatcaagcatgtgaatgaagaagagcgcgacaatatccgatgggtatgctcgaatatgttgggtcagaagcgatctcgcgttttcgtaatcaaattttacccatgcgctgaatgccttatggataagacaaagctcagggagagagagatcgtgctcgttcatttgagttaatgtgattttgaatttataaagctctttcatttcgcaagaggtgattgcatcaaatcccatcaggagttttttgtaggttcgctgagtgtcattcatgggaataaattcgtctgaaaatccacggagggataagaacgtgctgtttatctccggccatatggaagatgagccatctgaaggccattggtaactcataaaatccccttttttaattaattatgggttggaaactcggttgagcgctcggcgagcatgcctcgcctattgttttatatccgcattgcatatacttattcagatgtatgatcatgcggaaatgagtgattactcaaagggggagataatgactttaacccagctcgaaatttttgctgttgttgctgaacggaagggctttaccttagctgcggcccagctcaagatctctcagtctggggtttcccatgctatcagagtccttgagcaggagcttggcgtagagcttctgcatcggcatcagggagttgttgaactgacagatataggagaaggcttgctacaaaaagctcaggccattcttggtctggctgaaactatgaggcaagaagcagcggatgcacgagggatgaaacgaggtacgctgcgaatcggatcgtttggcccgacttcatccttgtggctgttaccaacggtactggccgattatcgcaggctttaccccggcattgaggtccatattgatgaggggccagatagacaggttgtgcaatggcttatggataggcgagtagatgtgggatttgtgaccttgccggaagagcaattcgacacttatccgattcttgaagaccaaatggtggctttgttaccggtagatcatcctttagtattgcaggatacagtgacgttgaaggatctgtgtgttggaccattcgcgttgacagaagcgggatcggctgaactggtttccaggctttttttatcggcaaggttgcaacctaatattcgttatcgaacatctcaattgttaagtaccttggctgcggttgaacgtggggatgcggtaacgattgttgctgagtcatccctgccgctgactcatgaagttcactatgtcaagaaaacgctgaatccaaaagtgaaacgacatgttgggttggctgtgtttgatgaacgtcaatcgtcaccggccgctaaagcatttatcgcattggcgactaaaaaatttcgcatggtgagttcggcaatctctccggtttccaaggagcttgttagtgaatgatctcagctttaatagcatgttacgtccttctgctagcacatattgtgcttagaacgtgaaaaaattgtctaaagtaactttcctattaatgacctgaggccatgaggcttcaggtcggattgcttaatcttaatactgataatcaactttgatcatattgtaatgggacgggtaaacggggtaagtacctccgtcgagaatcccgctaattctaaaggaacctttggcatcatggccgataaaggcatttgtagagccatttaggttaccggagacatccaggcatagcgatggggtggatgaatatcgtggggtgtaacaaacgctgaaagtctgagttgtcgcaccattactatataaaccgatattccaagatactgtcgtaatagttgctcttgtcggtaccgaagagggcgtggtaaagaaacttgagttagtgtagccggcagcataaacatttggggcacggctcgtttgtgaccacatgctggtagcggcaaaggagagctgagccgtggttaatactagaaaacctactgcaattttggtaaatcttttcattcttcaatcctcattgctagcgagttatcttactgttatttgcatgcaatagcggtgcgatatctaatatgattggcgcacatgaaaattgcttgcttattgattcctatggttgttcaaatcttccttgatcgaataaaaagaatctcactgtaataatggcggatcaagcgaaggctttggctgaatgtctgaatctgtgcgctggcttgatcgatgttgtgtgatgtttatgcctaaaggggtattgtttggttgtagattctttgtctttttcgacatcggtagccaactttgtattccgattgtactgagttcagtgggtggtatttataggggggaagaaagtattatccttataattgcaaaaatatttttttaacttctgcttgccaaactttttgaggtagtacataatgcactcctttcgtcaatgaggtctgggtaaaatctcttttgaatcaatgaattagctgatattcgaaggatttacttcccgctctaagtttcttcctcaatggttgtattcgcttactttgatttgatttttgggttatatctgcgcagtgcagatttctattttttatccacagccaggaagttggtttcccggtaaataagtttgatgctttaaaattatcacacagacttatccacaggctgttgcatttgaattttcctgactttgaatgttacaaaatgagtatttattttgtaacttattgataatttttcggaatgatcctttgttaagaaatatcacattgatcacttgcgctttttttgagcattgatcaacaaggggtttttattttattcacaggaaaattatctgaatctttttatacgctataaagatggctaataattaagcatctctgggcaagcccttggttatcgctctaataagtcgtttctgttgtgctgtttgtacactaacagtattcgttttacggcgaatgatttgctgttcaatagcccaatgaatatgttcgtctagcattgtgtttaatcctagtctctgttgcagagccagaatgatatcgtattgatagggtgcatttcctaaagcaacaataatattgcgtaaccagcgtaaatagccgatgcgacgaattgcagaaccttccgttatccgtaggaacttctcttcactccaattgaataaatccaataactttggtgtatgtaatgttacacgagggctgaaatcatcttcatctgtcaattgggaaaagcgattccagggacagataatctggcaatcatcacaaccgtaaatacggtttcccatcagtggacgaaattcctcaggaataatgccatccaattcaattgtgaggtaggaaatacaacggcgggcatcaatagtataaggggcgataattgcaccggttgggcaggttgtcatgcaggcgacacagcgtccacattgctcttcttgtggaggatctataggcagaggaagattaatcagcaactcaccgaggaaaaaccatgaaccagcttctctattaaggataagtgagtgtttaccgacccagcctaatccagccttagcggcgagtgggcgttccattacgggggctgaatcaacaaaaggtcgaaaattaaggactccctgatattcgaagtcatggcaataattttggatttgctccccgagtttcttaagacgttggcgcagcagtttgtgataatctcttcccaaggcataacggctgatataaccgagttcggcgtcatttagcgtgctggcaaaagaagcttttgcagggaggtaattcattcttacgctaataaccctcaatgtccctggcaaaagttcgtttgggcgggcacgcatcatgccgtggcgcttcatccatgccatctccccgtgatactgtttatccagccattcctgaagttttggttcttccacggataaatcggtatcgcaaatgccaacttgctggaagccaagggaatgaccccattgtttgatcttggcggccaagaggttaagattgagaggcgttgtcatggtggaaatcggcttatactgcaaggtgttgcagtatagcataatttatttcagcccaaaaatagtgggtttgataatgaaactgagcagaagatgttaaatgttgataatagaagtgtgttagggttatcgttttagctgatgaattaataaaacaacagatattattcgatgaaagaacttgttttatcacttaaagatgaagatgcgacagtttctcttggaagcgcggttgctgctgcctgtaatagtggtagtgtaatttatttatatggtgatttgggtgccggtaagactacgtttagccgtggttttttgcagtccctgggtcataaagggcatgtaaaaagcccaacttatactttggttgagccttatgctttaacaccgaggtcggtttaccatttcgatctttaccgattggcagatccggaagagctggaatttatgggaatacgtgattatttccatcaagatgccatttgtttggtggaatggcctcagcaaggagaaggtgtattaccggatgcagatattgaattacatttgagttaccagccgaaagggagacaggcacattttattgctttgtctaaatatggtgagagcctgttagataaattgaaatatttataagggatcacccgaccatgatgtgtcctttagtcgcaaaaatgataaagaaatggcagatcagttttatgataatgtgctggttgtttattatgatgagcagtttagtggtaacaaccgcagccgcggcgactttatccaatattcacgtcagtaacagcataaatgagtctaaagtgacgatggttttttccggtggtcgccctaattacagttttttcccattgcattcgccagagcgtttagtggtagatatccatcaatcagaaaaaattgttggtttacctatgaatttaccggagcaggatttagtaaggaaaatccgttccagccaggcacctgatcgacaaaaaaaacgcattgtatttgaactaaataataaagttaaagtcaactctatagtgcagcagttggatagtgaatatcgggtgatttttaccctacgggcttctggggtacctactggcaagtctgtttttagagagagttcacaagccgatacaggtaagctatcacttactaacagtaaattgcggacgacaaaacaggctgttttgcaaacaacttctaagggcggtcagcgggtagttgtcgctattgatgcaggacatggtggtcaggaccccggtgcgattgggcaacgtggattgaaagagaaaaatgtgactatcagtgtggcgcgtaagcttgaagtgttgttacgcaatgatcctatgttcaaacccgtactgacccgtaacggagactattttatttctgttgctggtcgttctgaggttgcacgtaaacatagcgcaaatatgctgatttctattcatgcggatgccgctcctaatcgtagtgcgcgtggtgcttctgtttgggtgctgtcaaacaagcgtgcaaacagtgaattgggtaattggcttgaacagcatgagaaacagtcggagttactgggtggtgcaggtaatgctctggcaaatggggctgatccttatctaagccaggcggtgctggatttgcaattcggccactcccaacgggtgggctataacgttgcagtacaggttttgagtgagttgcgcaaggtcggtttattacataaacgctcgccagaacatgccagcttaggtgtgttacgttcaccggatattccttcaattttggtggaaacaggatttatcagtaactcggcggaagaagcattactgggttctaatgattttcaggataagctagcaagtgctattcatcggggattgcgtaactattttctggcaaatccattgcaggctgcacctaaagcagccaagaagtaaaggttaaatatggctatcaagatcttacctcctcaattagcaaaccaaattgcggctggcgaagtcgtagaacgccctgcatcagtagtaaaagagttggtggagaatagccttgatgctggtgctaaccgtattgatattgaaattgagcggggtggagtaaaacttattcgtgtccgtgataatggctgtggcatcaaccatcaggagcttgcgctagcgttggctcgtcatgctaccagtaagattgctacccttgatgatttggaagccattatcagtatgggattccgtggagaggcgctggcgagtatcagttcagtttcacgtctgacattaacttcccgtaccgaagaacagcacgaagcctggcaagcttacgcggaagggcgagatatggcagtgaccgtgaagccggcagcacatccagtaggcagtactgttgaagtattggatctcttttataatactcctgcgcggcgcaagtttctgcgaacagaaaaaacggaatttggtcatattgatgaagtcgttagacgcattgcgttggcgcgtttggatgtattaatcaatttgcaccataacggtaaattggtgcgccaataccggccggcaaaagatgaatcacagtatgagcggcggttggtctccatttgtggtaccgcttttatgcaacgggcactttctctttcctggcagcacgacgatttatcgattaaaggatgggttgttgacccgatgaatactgaggcgagcggtgatattcaatattgttatgtaaacgggcgtatgatgcgtgatcgtttaattaatcatgctatccgtcaagcttatcaagatttgctccggggagaacaacagcctgcttatgttttatatttgggggttgatccacatcaagtggatgtgaatgtgcatcctgcgaagcatgaagttcgcttccatcaagctcgtttggtacatgattttatctatcagggtgtaatagccgtattaaaacagcgcggaagcggtgccgaactggatatcgcttgctgtgaacctgcgccagcctgggagccggaaaatcggccatcagcagggggaaatcatttttctcggcaaagcaatgcgacatctgtggcagcatcatcaccaaaagaggttttgtcaagtaaagggaatatggggggctctcgcggtggtgagaatcgccaatatcatggcgatcattatcagaaacgtcagggtgaggtatatcagaaactgatgcagtctgaacctgaagaaaaaagagagctgtttccggcaagaaccgctccggttatggcagaaaaggccacttctgctcctgttcaggttaaaaatagcaatcatagttttggtaaggtattgagcatatattcaccatgttatgctctgattgaatctccattgggacttgggttgttatctttgccggtagctgaacgctggttaagacaagcacagttagcaccaacagagcaagggctgaaatcacagccattgttgataccgctgaaactatctcttagtaaagaggaagctggtgctttaaaccgttatagtgacttattgggctcttttggtattgaagcatctgtatctcatggaaaagcgacactatgtgcggtatcgttaccattacgtcaacaaaatctgcctaaattaattcctgagttgctaggttatttggcacaacagccatcagcatcggcagaacaggttgtaacttggcttgctcgtcatattggcagtgagtatgaaacgtggaacgttgctcaggcggtacaattattagctgatgttgagcgtctttgcccacaactggtaaaatctccaccagatgggttattacaattaattgatttacaagcagtggtggcatctcttactcatgagtgatcagaaaactcaacatctaccaacggcaatttttgttatgggtccgacggcttcaggcaaaacagctttatctgtcgctttacgccagcatcttcctgtggaactgatcagcgttgattctgcgctaatttatcgtggaatggatattggtaccgccaaaccaacaaccgaagagcaagcgttggcacctcatcgtttaatcaatatcttggacccttctcaaccttattctgctgctgatttttgtcacgatgctttgaaggagatggcagaaattactgcttctggccgtattcctctgctggtgggaggaacgatgctctatttcaaggcgttacttgaaggtttgtcgcctttaccttctgctaatccggttattcgggcacaaatagaacagcaggcggcagagcaaggatgggatgcattgcatcagcaactacagaagattgatcctgcggcggcgttaagaattcatcctaatgatccacagagactttctcgggcactggaagtttttcttatttcaggtaaaactctcactgaactgactacattgtcaggagagtcgctgccttatcgtgttcatcaatttgctattgcaccggcaaaacgtgagctccttcatcaacgcattgaagcgcgttttcatcaaatgcttgaatcagggtttgaagaggaagttaaagcactttatgctcgtcatgatttgcatgtggatttaccttctattcgttgcgtcggttatcgtcagatgtggtcttatctttccggcgaaattgattacgatgaaatgatttatcgcggtatttgtgcgacgcgccagttggcaaagcgtcagataacttggctcagaggttggaagtcggttcattggttggatagttctcaaccagagcaagctttaagcacagttatgcaggttgttagtgcataggtttattgattgtgtacaattgatgagtaccaaagcgcaatttttgagtagttcattttttcgaacctttaggttcttagttaaaaacaacaaaataaggaaaatatagaatggctaaggggcaatctttgcaagatccgttcctgaacgcattgcggcgtgaaagggtcccggtttctatttatttggtcaacggcatcaaattgcagggtcagattgaatcttttgaccagtttgtcattttactgaaaaatacggttagccagatggtttataaacatgccatctctactgttgtaccttcccgcccagtttctcatcacagtagcaatacgagtgtaggggcgagcgtaggtaattatcattctggtggcgtttctgctccggcagcacaacaggaaagtgatggcactgaataagtttgagatcagtaatagaatgaagaaaaacataggtagggggttttacctatgttttttcctgtagttttttactcagcctgagaggtcgcacctttgtttgaacgttatgaaggcggcgaacaagccgttgtggtgcatgtttttttctcgcaggataaagacacagataatctcagtgagtttgaatcactggtaacttctgctggtgtagttcctgtgcaaattgtcacggggagcaggaaagcccctcatccgaaatattttgttggagaaggtaaggcggaagagattgctgaggcggtgcaggctagtggtgctgatgttgtgttatttaatcatgcactcagtcctgcacaggaacgcaatcttgagcggctctgtcagtgtcgagttatcgaccgcaccggcgtgattctggatatttttgcccaacgggcacggactcacgaggggaagttacaggtagagttggcgcagttacgtcatctttctacccgtcttgtccggggatggactcaccttgaacgtcagaaaggtgggattggtttgagagggccgggggaaacgcagcttgagacagaccggcgtttattgcgggataaaatccgtcagatattgaatcgtctgagccgggttgagaaacagcgtgaacaggggcgtcaagcgcgaaataaagcggatataccgacggtttcactggtgggatataccaacgccggtaaatcgagtttgtttaaccgtatgacggctgctgaggtttatgcggctgatcaattgtttgctacgctggacccaacgttgcgacggattgacgttaatgatgttggtacggtggtattggctgatacggttggttttatccgtcatttgcctcatgatctggtggcggcatttaaagcgacattgcaggaaacccggcaagcaacattgttgctgcatattgttgatgctgcggatagccgcatcgacgaaaatattgccgctgttgacagcgtactggaagaaattgaagcgcatgaaattccggtactgttggtgatgaataagattgatatgctggacagcttcacgccgcgtattgatcgcaacgaagataacttaccggttagagtttggctgtctgcgcaaactggtgaaggtatcccgttattgttacaagcgttaacggagcgtctttcgggtgaaattgcacactacgaattgcgtttgccaccggaagcaggtcgtttacgcagccgcttctatcaactgcaagcaatagagaaagagtggatagaagaggacggtaaagttggtatcgaagtgagaatgccgattgttgactggcaccgtctatgcaaacaagaacaggatttgtttgattatgttgtctgatgtgcctgtcaggtgaatatcagaaaacttatgtgattgagagtcggcttgtttataagaggctcttggcctgaaaaaccaatcataaaagaatggagctaaaacatggcgtggaatcagcccgggaacaacggacaagaccgcgacccgtggggaagcagcaataaaagcggcaattccggcgggaacaaaagtggtcgaaaccgtggggcatctgatctcgacgatctgttccgtaagctgagcagtaaactcgggggttttggtgggaacaagggcggtaatggttctgaccaaggggcaaaatttggcgggcgtattgttagccttgtcgctgctgctgtcgtcgtgatctgggccgctagcggtttttatacgattaaagagacagaacgtggtgttgttacccgtttgggtaaacttagccatattgtgcagccaggtctgaactggaaacctacattcattgatgaagttgttccagttaacgtggaatctgttcgtgaattggcaacctctggcgtgatgctgacatcagatgaaagcgttgttcgcgtggagatgaacgtgcagtatcgtgtaactgatcctgccgcttatctttatagcgtgacaagtcctgataacagcctgcgtcaggcgacagatagcgcggtacgtggtgttgttggtaaatattcgatggataaaatcttgacggcaaaccgtatgattgtccgtgatgatactcagcgtgagttggaaaagacgattcttccgtaccgcatgggaataactttgttggatgttaacttccaggctgctcgtccgccagaagaagtcaaggctgcttttgacgatgttattgctgctcgtgagaatgaacagcagtctattcgtgaagcggaggcttattcgaacgaagtcttgccacgcgcgaaaggtgatgcgcaacgtatcattgaagaggcgaaagcttataaggctcgtgtagtattggaagcgcagggggaagtggcgggctttgccaaaatgttgcctaggtataaagaggcgcctgagattacccgtgaacgtctgtacattgaaacgatggaaaaagtattgagccgtactcgcaaagttattgttaatgatcacaataacaatttgctggtattgccattagaacaaatgttacgtggcgatgtttctggtgttaaaaaagagggaacagtgcaatcagataatacggtagcttctgacctgcgggttacccgcccaactgtgccttcaaattcaggccggggagcgaattataaccgaacagataatctgcgtaatgacattatcagggtagggagataataatcatgcgtaaatcattagtcgttgttattgtcgcggtattagttgcactctatgcctctctatttattgtgcaggaaggacagcgtggtattgtactgcgttttggtaaggttctgcgtgatgcgggaaataaaccgattgtttatgagccggggttgcattttaaaataccttttgttgaaacggtgaaaacactggatgctcgtatccagactatggatattcaagccgaccgtttcttgaccagtgaaaataaggacctgatagttgattcttacctgaaatggcggattaacgatttcagccgttattatctggcgaccggcaatggtgatatttctcaggcagaagtattgttaaaacgtaaattcagtgaccgcctgcgttctgagattggccgtaaggatgttcgtggtatcgtaacggattcccgtggtcaattgaccacagatgttcgtgatgcgctgaacaaaggtacaacggataaagaaacagcgagtacaactgaagcggatgatgctattgcatcggcggcggctcgtgtagagcgagaaacggcagataaacagcttgctatcaatccaaacagtatggcggcattgggtattgaagttgttgatgtgcgtatcaaacaaatcaatttaccactggaagtttcagaagcgatttaccagcgtatgcgtgctgagcgtgaagcggtagctcgtcgtcatcgttcacaaggtttggaagaagcagaaaagctgcgtgcagcagcagataagcaagttattgaaatccgagcaaaagcggagcgtgaagcgcttacattgcgtggtgctggtgatgcagacgccgctaaactgtttgctgatgcgttcagtcaagcgccagatttctatacctttatccgtagtttacgtgcttacgagaaaagctttagtgaagacgggaaagatgttctggtattaagcccagaagctgatttcttccgctatatgaaagcacctgaaaagcgtgcaggtcagcactaatagatgctgaatctattgattaggcccgcatcaggcgggccttgtcatgtctggtggctaacaaaaataacggatgtgataaaaattactgaaaggtgtgggatgagatgttagaatccatttttaagcaaccgagtgaattttgaaatgggtaagaacgttgtcgtattgggcacccaatggggtgacgagggcaagggcaagatcgtcgacttgctgactgaacgagctaagtatgttgttcgttatcaagggggccataatgctggtcatacactggttatcaacggtgaaaaaaccgttctccacttaatcccatcagggatcctgcgtgaaaacgttatcagtattattgcaaatggcgtcgtattagcgcctgatgcgctgatgaaagagatgaacgcattagaatcccgtggtattcctgttcgcgagcgtctgctcatttcagaagcctgtccacttattcttccataccatgttgcattagataatgcccgcgagaaagcgcgtggtgcaaaagcaattggtacaaccggtcgtggtattggtcctgcgtatgaagataaagttgctcgtcgtggtctgcgggttggtgatttatttgataaggaagcattcgccgttaagctgaaagaaattatcgaatatcacaatttccaactggttaactactacaaagaaccggcggttgattaccagaagaccctagatgaaatcatggctgttgccgatattttgacggatatggtcgtcgacgtttctgatttgttgtataaagcaactcagaaaggtgaattggtcatgtttgaaggtgcacagggcacattgttggatattgaccacggtacttacccatatgtgacctcttccaacactaccgcgggtggcgttgcaacaggttccggtttaggtccgtgctatgttgattatgttttggggatcatcaaagcatactctactcgtgtcggtgctggtccattcccaactgaactgtttgatgaaactggcggttacttgcgcgaaaaaggccaagagtttggcgcgactacggggcgtagccgccgtactggttggctggatatcattgctatccgtcgtgcagtacagatcaactcactgtcaggtttctgtatgaccaagctggacgtgttggatggcttgaaagaagtaaaaatctgtactggctaccgtatgcctgatggcagtgtaattgaaacgacacctttagcagcggatgactgggaaggtattgaacctgtttatgagaccatgcctggctggaatgaaagcactttcggtgtgaaagagcatagaaaattgcctcaggcagcattgaactatatcaaacgtgtagaagagctgaccggtgttccggttgatattatttctacaggcccggatcgttcagaaactatcattctgcgtgatccgtttgatgcctgatggtacctataatcaggtgaagccgggcttttcagcccggttttttgctatttattgtggccttttttgtttaacgatgaggagatcaacatgattttggtagattcatggtatataagttgaacaaatacttattttttcagtttgttctcggatatattagtttatatcttattatccagaggttgatgtgcagttaacgagttttacagattatggcttgcgcgcgctaatttatatggcttctttaccgcaaagccggatgaccagtatttctgaagtcactgatatttatggtgtttctcgtaaccacatggtaaaaatcattaaccaattgagtcatttaggattagtggatgctgttcgtggtaaaaacggcggtatccgtttaggtaagccagcgaaggatatcagaattggcgatgtcgttcgcgctcttgagccattatcattggttaactgtagtcaggaatcttgccatatcacttctgcgtgtcgtctgaaggtcgtattaaatcaggcaatagaaaggtttttagaagaactggataagcatactttagctgatatgattgaagataatattcccctttataagctgcttctgaccgaatgaagaaatggcgcaaacagcctgctgatgacaacggaggaacagctatgtcacaagatccttttttggggcgcgaagcagaaaaatacgaatcacctattccaagccgcgagtatatcttagacattattgctaaacatactgtaccggtaagtcgccaggaactggcacaagagctgaatctgattaacgatgaggatattgaagcgttacgtcgtcgtttacgggctatggaacgtgatggtcaattggttttcactcgtcgccaatgctatgccttgccggaaagattggatttactgaaaggtactgttattgggcatagagatggttatggtttcctacgagtagaaggtcacaaagacgatttttatctctctgccgagcagttaaaaatggctattcatggtgatgttgtgctggcacaaccattatccctgaatcgcaaagggcgtaatgaagcacgtatcgttcgtgtattagtgcctaagaccagtcagattgttggccgctattttcttgattctggtatgggatttgttgtgccggatgatagccgtttaagctttgatatcttgatcccgaaagatgaaagcggtggtgctcgcatggggaatgtggtggtagtcgagttaattacacgcccggcgcgccgcacaaaggctatcggtaagattgttgaagtgttgggtgaaaaaatgggaacgaacatggcagtggaaattgccctacgtactcatgaaattcctcacagttggccgccacaggtggaaaaccaggttgcttccttgaatgagcaggtaccagaatcggcgaaaaaagaccgtgttgatctgcgtactctgccgttggtgacaatcgatggtgaagatgcccgtgattttgatgatgccgtttattgtgaaagaaagcgaagcggtggttggcgtttatgggttgccattgctgatgtcagttactatgtgcgtccacaaacggcgttagataccgaagcacgtaaccggagtaactcggtttacttcccatctcaggttgtccccatgttgccggaggtgctttctaatggactctgttctctgaacccgcaggttgatcgcctttgtatggtgtgtgagatgacgatttcagcgcaggggcgattatcatcctataaattttacgaagccatcatgaattctcacgcccgtctgacatataccaaagtatggcgtatgttgcagggtgatgaagagctgcgtgagcactacaagccactggttcagcatattgagcatttacatgaattgtatcaggcactagaaaatgcccgtgagcaacgtggtgcaatctcgtttgagtcagaagaggcgaagtttatctttaatgctgaacgtcgtatcgagcgaattgaaccgattgttcgcaatgatgctcataagttgattgaagagtgcatgattctggcgaatattgctgcggcgcgcttcgtggaaaaaaatggggagccggtgctttaccgtattcatgatcggccaagagaagaaagtattgttaacttgcgctcggttttcggcgaattgggattgacgctgcccggtggcatgcaaccaacaccaaaggattatgcgcaactgatgcatcaagtggctgaacgcccggatcatgagctactgcaaaccctattactgcgttcaatgaaacaggcagtttatgatccggaaaaccggggtcacttcggtctgtcattaaattcttatgcgcattttacctcacctatccgccgttacccggatctggtgttgcatcgggcgattaaatatctgctagcgaaacagcaaggcattgttgagcaatgtggaacaccgaccgggggatggcacagtgatatggaacagatgttgcaactgggccaacactgctccatgacagagcgccgcgcagatgaagcgacgagagacgttgctgattggcttaagtgtgattttatgcaggatcaagtgggcaatacttttactgggatcatcacgagtgtgacaggttttggtttctttgttcgcttgaatgagctgtttattgacggtctggtacatgtttccacgttgagtaatgattattatcatttcgataatatcggtcagcgtttagtgggtgaatactcgggtaaaactttccggttaggggatgaagttgaaattcgtgtggaagcggttcatatggatgagcgtaatattgactttaagctgctttctaccgcccgcaaagcccggaatgtaggtaaaacagtgcgcgatagagagagaaaagtagaacttggccgcgaaagcagtaagaaaaaagggcgtggttatcgcaaagaagctcattttgagcctgatggtgctgttcgtaaagagcgatctgcggataagcctaaaggggataagaaaaagggtaagacgctttctaccaaaactcagaaaattgtcgctaaattcaaagccaaacgggctaagaaaagcgcagataaataatcaaagggctatcctgttgcaggatagcctgaatattttaatctccccctgagtacgtgaagcttatcgaataggcttacagtattcgtcagtgctgtatatgtataacagtaaaaataagaagattatgagtgaaattatctacggtattcatgccgttaaagctttactggagcgtgatcctcagcgttttatcgaagtttatgtcctgaaaggacgtgaagatcgccgcctgacaccattgattcatgcgctggaaagcatcgggatgactatccaactggcaaatcgtcagtggctggataatcaaacggaaggtgcggtgcatcagggaattattgccaaagtgaagccagggcgtcagtaccaagaaaatgacctaccagatttactggcacaagtagaaaccccgttcttgttggtgcttgatggcgtgacagatccccataatctgggcgcttgcttgcgtagtgctgatgcagcaggtgtacatgctgttattattccacgtgatcgttctgctcagcttaatgccacggcgaagaaagtggcatgtggtgctgcggaaagcgtaccacttattcgtgtcaccaaccttgcgcgtaccttacgtttattgcaagagtacaatatttgggtggtgggtacagcaggagaagctgaccatacgctgtatcagagcaaactgactggtcctatggcactggtgatgggagcggagggggaaggtatgcgtcgtctgactcgtgaacactgtgatgaattgattagcatcccaatggtgggctctgtctcgtcgttgaatgtgtctgttgccacgggagtttgcctgtttgaggcggtgcgtcagcgtagctcgtgacaatccacctcccatatataccctatggattgcgagatgcatcgcggcggcaagggagtgaatccccgggagcatagataactatgtgactggggtgagcgagtgcagccaacaaagaggcaacttgaaagataacgggtatatgaacaaaagtatttttgcattgttcattccttgagttttttatgtagggtaggtatagttacgcgtcaatttttcagccgcacttaaacaagttccttgcctccacgggccgcggttgaccctgacaggaggctgaataatccgtaaggagcaattctaatgcgtcattacgaaatcgtttttatggtccatcctgaccaaagcgaacaggttccgggcatgattgagcgttacagtgcgactatcactaacgcgcaaggtcagattcaccgtctggaagactggggccgccgtcaactggcttacccaattaacaaactgcacaaagctcactatgttctgatgaacgttgaagcaccgcaggaagtgattgatgagctggaaactaacttccgcttcaacgatgccgttatccgcagcatgattatgcgcgttaagcacgcggtaactgaagcatctccaatggttaaagccaaagatgaacgtcgcagccgtgactactctctggaagacgccaatatggatgctgaagaagctggggattctgaagagtaataactgtgacaactaatcgtttggtgctttctggcacagtgtgcaaggtccccattcgaaaagtcagtcctgccggcattcctcattgtcaatttgtgcttgagcaccgttcacagcaacaggaagccggtttgagcaggcaagcatggtgcagaatgcccgttattgccagcggacaattgttacaagttttaactcacagtataacggtcggcagtcgattaaccgtttcaggattcattagttgccatcaaggtcgcaatggtcttaacaaactggttcttcatgccgagcagattgaattgatagattctggagactagccaaatggcacgttatttccgtcgtcgcaagttctgccgtttcacagcggaaggcgttcaagagattgattataaagacatcgctacgctgaaaaactacatcaccgagagcggtaaaattgtaccaagccgtatcactggcacccgtgcaaaataccagcgtcagctcgctcgtgctatcaagcgcgcgcgctacctgtctttgttgccttacactgatcgtcatcagtaatcggcacagtccattaacgactctgagaggataaggtaatgcaaattattctgcttgataaagtagcaaacctgggtagcctgggtgatcaagttaacgttaaaccgggttatgcccgtaattacttagtaccgcagggcaaagctgttcctgcgactaagaaaaacatcgaatttttcgaagctcgccgtgctgaactggaagctaacttggctaacgttctggcaacagcagaagctcgcgctgagaaaatcaatgcactgggttccgttactatcgcttctaaagcaggtgacgaaggtaaactgttcggttctgtcggtactcgtgatatcgctgatgcagttaccgccgcaggcgttgaagtctctaagagcgaagtgcgtctgcctaatggcgttctgcgtactattggtgaacacgaagttaacttccaggtacacagcgatgtattcgctaaattgaacgttaacattgttgctgaagcttaatctctgattaactgatgctaacaagtaaaaaacgctggcaatgccggcgttttttattgcctcaacttactgttctcttggtagtcgataaggcttttgccggtaatgcccagtaactgagcattaatctgatttatacccgttatctttcaagttgcctctttgttggctgcactcactcgccctggtcacatagttaacccgaattctggataagaaattgacgagaagcctgttccaggagcaaagttttggtgtgcaccaaaaacagctccgaggggggaacaggctatggacaacttagttgaaattttctgtgatgtcgatgatttttgccgttttttcatccctcaatgggaacaattttgtctcgatagcgggcatcgtttacgccgccgacaaggtcatatgtatcccagtgaaatcatgaccattttgatcctttttcatatgtcgcattaccgtgattttaaacatttttatctagaacatatttggaaatatcaccataaggattttccaaccttgcttagctatcctcgttttgtcagtgtggctccttccgttttggtgccattatgcagctatctgactcaattaaaagggaaacccacaggcattgcttttattgattccacccgtttgagtgtctgccataacattcgcatccctcgacataaggtctttgcggggatagcaaagcgcggaaaaaattcaatgggctggttttacggtttcaaattacacctggttgtcaatcatcagggtgaaattctcgcgcttaaagtgactccgggtaatgtggatgatcgggaacctgttcgtgaattatcaaaagaattaacgggttctctttacggtgacaaaggttacctcagccaggaattggcggacgatttagctaaaaccgatgtcactttcatcacgaaaaaacggcgtaacatgaaagcgagtatgcaagctgagtgggataagataatgttaaaaaagcgttttatcattgaaacgattaatgggcaattaaaaactctttctcaaatagagcattcccgccaccgaagtataaaaggctttctgttgtgcgttttaggtggattgattgcttactgccttaaattgaagaagccatcactgaaagttttctactcagaagacgatttttcaatgacggattaagcagaattcgggttagttatctatgctcccgggggttcgctcccttgccgtcgcgatccatcttgaaatccattgggtatattttacatttactaccttatttgccgtttatagaatcatagtttctcttgtctattcttctgtaatgttgtcttttggctggtttttattattattgattttgcgtttttatattgaaaatattattcattattagattattatctataaataatctaattcatattttttattattagataatatcaacattgttaattctgttgtgatgtgggaattttttatcgaatattttgatatatctacgtctaaatctggttaattacacgagtgattatttcataataattaaaaatatattattatataattttggttatttgtctttataatgataatttattttatatgatttcacataagaatgtttaataatatcaatatatatccttattattaaataataatatcaaaaatttatatgggattttattgatataactgtcagagttgacagtagacttttaagtgtaattttataattataatttttgttaattaacccttgtgtgagaacacaaatgaatgcgcttattgttaataggtatgagtttattctccatagttattggtaaattgaatggtttcattaataaattaataggtatattagatgtttaattgatttatttatttgttaataaaaataccttgtcatcattatatgttcttcatattaacctagacataagggataaagctggtatgaatcttagtaaaaacatattacaaactataggtaatactccagtagttatgttgaatggtagatatactaaaggtattaatgtctttctcaaaatggagaatattaaccccggtgggagtattaaagatcgtattgcagttgctatgttggaaagggctgaggctcagggagaattaagaccgggaatggtggtgattgaaccatcatcggggaatacggcaattggtctggcaatggcgtgtgctgttaaaggttatcgatttattgcggttttagatcgcatggtgccggcagcaaaacgcgataaaataaaagcatttggtgcggaaattattttcctaccagaatttgaagcgggaaaagatactgtcaaatatcgcattgatttaactaaagagattataaaagtctatccgaatgcgtttagccctatgcaatttgaaaatcaggttaatcctgatgagcattatcgttccacggggcgtgagttgtatgaaatctttggcaataatttgacagcttgttttgcgacagcaggaagttgtggaacactgactggaatttcccgttatttgaaagagaaagatccacaggtgcgaatttatggtgttgaacccgtggggtcaattattttcggtggtgaaccaggaaaatatctggtacaaggtgcaggattagcgtttataccttctattttggatcgtaccaatatcgatattaccttgaaagttgcagatattgatgcattccgagtagcaagaaagttagccagaaatgaaggtattttaattggtggaacgggaggttgtgcggtaagcgcagcattaaatcgcctggatgattttaaacctggcgataatattgttgtcattattcctgatagtggagaacgttatatcgacacaatttataatgatgcttggttatttgaaaataatttctcagaattaattgaggaaagtaaaacagaacctcaattagaagaaattattacaaacatggggtgcgtattaaatgagttctgatcgcgttttggtgatttactataatcgcctctataatcctcttatcataagaagtcttaaatctgaatatagagaggtaattgctctttatattgatgaagggcaggtaagagatattgaagatattgaattagaatgcatggttgcaggtgctgataaatttatctataaagattatcgagcgcaatatgctgaacacttccttacaaaagcgataaaagcgaatgctatttatcaaaatggttattttctcagtgctgcactttcccggcctgcgattgctgaggcagcagttgaagttgccaatgagctcaatattgattatattgctcatcaattcagaggtaatgatcaagtcagaatggatatgaatatagaaattctgaataaaatacctattgcttcgttgagagattttaaatacgacgaaaatattgtaaatagttatgcgatgaaatatggtattcctcaagaatttggttgtaataacccttattctactagtgaaaatatatggggattaagtgtcgaatgtggaccgttggcagaaccggaagcattaattccggaagatgccagagagaaattatttgaacatgcactatcagctactgagccaatatttttgtcattaggttttgagaatggtataccgatatcgattgacggcgaaaagaaatcattatatgaaattattgaaatattaaatgagattggtaaaaaattatcaattggtatttttgatattgttgaagatggcattgtcggtttgaaaacacgcgcaatttatcaatcacctgccgcacatatcttaattaccgcacatcgtgatttagaatgttattgtagtaatcgtcacgaaaattggtttaaagagatagttgataaaaaatgggttgaattagtttattctgggctttggtatgatcccttattaactcatttaaaccactttattgatagcatgaatcaacatgtcaatggtgagattaagcttgaattaggttataaatatgccaatgtttgttcccgtatttcaaagacaactatctatgatgataatttagcaatatataattgtgggcatttatatagtcaaaacgatgcagagggatttgcaaaaatatttaatattcatactaagcaaagtgctaaatctaagatgaggcaaaagttatgattaaagagttattaatgtgtaaaccggatttttataatattgaatacgttattaatgattggatggaccctaataatagcgtcaataaagaattggcacagcaacaatgggattttctttatgaacggttgactgaacgtggtatcactattcgcactatcgagcctgttaatggtttgcctgatatgactttctcaggtgattgtggcatggtgcataataataaattccttgcgagtaatttccgacacgctgaacgccagggggaaagccagcactatatcgattatctggaaaatctaggttatgagatacatcgtgttgatgaagatatctattttgaagggcttggagatgttatctattgggataatgacatcatatttggttatggtcctcgctcagataaagaagcaataaatacaattcagaaagtttatccagaacttgaagttaaaggtgaactgcatattcaggataagactttctttcatgtggctctggcattctcgtttattgacaaagatacagttatttactacccagaagcatttactaaagagagccagaattatattgctgaaacatttgaacgccgaatctcaatatcagaacatgatgctaaggaattatttgtctgtaataatatcccaataggtaaagatattctcatgcatgattgttctatagaggttgaacgtcaattaaataattatggttataatgtcattaaatgcgatatgagtgaattcttaaagagtggtggtagtctgcgttgcttagtattaaaagttaaataattataatgggaggataataagtcatgtatattttaggtataaattcagtttaccatgaatcagcagtttgcttattaaaagatggagaaactatttttgccattgaagaagagcgtctcaatagaagaaaacacggaaaaccagcaaatgttgataatcctgatgaactgccattggcttccattgaagttgcattagactttgcgggtattcgcttggaagatgtgagtcatattgggttttctattgatccgatagagcgaagaaaatcagtctttattgatgaagtcaccagtgaaggcaattggggaagtgtatcgggtgagtccattttttatcgtaaaaccacttcagtaccagaaattttacaatcaatgggattccgtggtcaatttcattgggttcctcatcacacagctcatgcggcatctgcttattttgtttcgccatttgataaagcgttaactttatcacttgatggtgtgggagaggataataccgcaggggtatatctgggcgatggcaatagtctgaaaaaaattaaaactattgaataccctaattcaatcggttttatgtgggagaaattggcagaattcctgggcttctctgtatacgatgcctgtaaggtgatgggaatgtctgcttatggtaagcctgaaggttttatgccggcgttccaacaacttgtcaaaatttatgagaaaggtgagtttactatcgataacaccattctcaatttccgcagccaagacttttctaaattagaatctttgtttggtattgagaaaagagttcccggtggagaggtagcgcaggaatattatgatattgctgcttctctccagcaaataactgatgaaatagtgttaaatatggctcatcattatttgcaggaaacagcaacgaataaactctgccttgcaggtggtgttgcattgaattgcataacgaataaacgattatatgaagagttggatatcgaagatatctttgttcagcctgctgcacatgatgccgggactgccacaggtgccgccctatttatttggcatcatattcttgaaaataatcagcgctatcctctgactcatacctattggggtctggaatatagtgaagatgattaccagcgtagtttgaaggcccacggtttggactggacatatgaagagaatattcatgaagttgtcgcaggcttgctggctgaaaataatgtcgttggctggttccaggggaggatggaatttgggccgcgggcattaggtaatcgtagtttgttggctgatccaagaaataaagatattcgcgatttaatgaatcgtaaagttaaacatcgtgaaatgtttaggccatttgcgcctagtgtattgcgtcaacatgttgctgattggttccatgttcggaaggaattaccggaagctgcaaaatatatgttgttagcgatggatgctaaagtggataaagcatcgaaaattccggcagtggttcacgaagatggtactgccagagttcaggtggtagatagtgcatcaaatccagattatgcccagttgattgaggcattttatcggaaaaccggtgtgcctttgttgctgaacacctcttataatgatagcgaaccgattgtttgttcaccggaagatgctattaaaacttttatgaaaactaatattgattatttagttttggggaattatttgattaaatcgattcattaattattgcagagtaaacgtctatcccagtaggtgtaattgatgaaatcaatttgggcattgctcagtttcaaattgataaatacaatagtttaatgggatagatataccctttatggatttcaagatggatcgcgacggcaagggagtgaatccccgggagcatagataacgatgtgaccggggtgagcgagtgcagccaacaaagaggcaacttgaaagataacgggtataataaggttgaggtaatattaatgatacataagatcatactggctcgatttttttctgttttttcagaggcatttgttatgttcgctgtgcctgtattagtatatacctcaactaatagtgcttcactttcatcttttgcttttgggcttgaacggctattcagagtgatttctctccctatttctggttggatgggggacaggatgcatactttggttatgttattcctgagtgatattcttcgatcattagtttgcttatttctttttatcctttcatttatatattctgataatagcatcgtatatatcattatttctctctcatgtgttttatccttttttagcggggcgggatatgtcaaccttgaaggttttgtctctaaaaacatgagtgcaatagaattaccttcggttaactctcgtttacaatttgttgaacagtttacctatattgcagccccggcggttgtcggcgtgctggtttataaattcagtgtttatgcggtatttgcatttgcattttttcctttcctgattagtagcttgatatggtttcagctacaaaggaaaaacaggattgaagaacgcgctaatagagaagggtataatctgccggccatttttaagttcttgatggaaaatccacccttgttacgcgtcattagcctgacattcctgatgaatgtgatgcaaggtgctattttgtcaacggcagtttatgttatcaccagtgttttttcacagccgaaagggagttatgctcagcttttggcttatgcggggctggtgaattgttgtgttttttttattgcgccaaaattgtgccggatttttgatgtacgtatcgttggtgtaacggcttttctgattgcgttatgtggtctgacactgtttgctactgggccgttatttgtggtttacacattaggtttcttactggttattggttcggaaggttgttttaatcttttttcccgctcttatcgagcaagtcttattccgaagcagcgtttttctcagtatcttggtgtggtgctggttttgaatcagttagcgacacctttaaccagttttatttgtgctaatttactgaactatttttcctacaatagtatttatctgatattctctgcatttgttttattgatgtttattattattaacccttatcgttcgcttaaatttaatctgcataatagtcaataatggaggaaatatgagttcgaaaaaatatttgttagtgcttgattatcttccggcaaggctgaatgaaatcgtcaatattcgtgactatattcgatataattactcccttgagttggtgattattagcgatatgttgtccggtgaggaaaaaaatgttacaccatttgtctatcatattcctgtacgaacagaaaattatgttgatgacaattatgttgatcgtgtgatgaccgttcttgctgaacttaatatgacatgtgctggtattcttccttttatggatgcggtatctgggtatgcggctgttatcgcgaagaaattaaacgtttatggtgatgatcccaaattaagtttcgcaggtattgagaaatatcaatttcgccaacaagaaactcgaatattaccgttgcttgcggcacaacatattaaaacgcctcgatatactttcattaatgagattaaagagctagaagagttttatgattctgttccgtatggtgtgattattaagcctaattgtggtcgggcaaatgtaggcgtggtagcggttaaagatagaagtaaaatcccaacggcttttgctcaatctgttgagcaatctggtggtaatcaaattcttgcagaagaacttattattttcgatacagaatattcgtacgatggtattggttgtatggcatttttaacgcaaaaagtttcccagaaaggggaatttcctgttgaaatagggcaaatagttccggcgcaatgtgatggcagaaatacgattgcattacataaagcagggcaggcaatgaatctgatttcagggcagacttttggcgcattccataatgagattaagcaagatagtaaaacgggagaaacttttctggttgaaactaatcgtagacccgcgggtatgcgtatttgggatatggctaaccgggtatatggtataagcttgcaggaaatttgggttgaccatttagtcaaaggatttagtgatcgaatgatattgccagaagcaaagggaagagcatttttgattaatttactggcaggtaaagacggcaaaattaatgataaattcgatcaaacagaaattaatgaagtgttattagcatctgttgataatattttgagtaaattatattacgaaattattgcaataaaaattaatttagataagaattcaccggtttatgaaacaccaaaaagcaataatgatttctgtggttatgtttgtgtgcatattaatgatgagcacgtcaaatgtgaatccctgatgaatgaaattaatgatgcatggagggatatattgtctaattatattttataatttcgtgtggttagagccttatttgggctctaattgttatatgattagattatatgctattgctttagcaactgctgcaactttattgggaaccactaatttctccataacattgttaatgtggaaattaactgttcttgttgaaatatccagtatatcggctatttcagcagaagtttttccctcacaagtccatcttatgacttcaacttctctggtagagagtgttggaataatgattttatcctttttattttttaggttattaaatgtttttatgcattcatttgccaatatgcctaatactcctgctttattaagtatttcattatgagaaatagtgccttcttttctggcaactgaaaaaatcgacctttctccatgataacctttaattttgattgaaagactatttttgacttcatttttatttgaatttgatttttcaatcgtaaaatcagtgttttttgatattttatcattacaaactgacggaatagagaaagtgtaatcaccattcattaattggtcgctgtcatgattattatcttgattataattacttgcagtttctatatttaggttggttattagaacatatttttttgtcgtgaatggatatttttcttcctgataaattgagtagaattcaaaacccagatagtttatcgcgtttaatagcctcttttctaattcaggcatggttttggactttttaatttctgataaaatttcattaaatgatgtgttcataagattttcctcatcatataatatttgcaataaaattaattttatataaaaaatattttattcatataatcaattataagtaaaaaatttaaaaaattgaatttttatattgtaacctttaagaaataaatatgctacttagaattatatcgattattagcgcttatatattggggcgacatgtattttcctggtgacatcttcggtttaccctgctgcatcgcgctgttatgcttacaggtctaatttaatttgatcacaggtattttcatggcaaaactttcttttgactctatcgaagcacaagcaagttatggggttggcttgcaagttggtcagcaattactggagtctggcctgcaaggtctggaacctgaagcgttgttagcggggttatgcgatgcgctggaaaatcattctccagcggtgccggtcgatatattgcatcgtgccttacgtgaaatgcatgaacgtgcagatggtgtgcgtcgtgaacgtcagcaagttatggcagaagagggacagaaatttctggcagaaaatgctcagcgtgacggtataagcacgacagaatctggtttacagttctctgtactaaagcagggtgatggtgcaattcctgcccatactgaccacgtgcgtgtccattacacggggcgtctgattgatggcaccgtgtttgacagctcagtacagcgtggtgaacctgctgaatttcctgtgaatggggtgattgctggatggattgaagcattgacgttgatgcctgtcggttctaaatgggaactttatatcccttataatttggcttatggcgagcgtggtgccggtgcatcgattcccccatatagcactctgattttcgaggtggaattgttggatattctgtaagttttatccacaagtaggtttaaaaaaatagccggtatattcgtctcagactactgacaaacccatttaaaaaatggggggtattttcaaaccatcgaaaatttcagctaggatgttgccgatgaactggctttccctcaatttcctaattatttctttaaataagatctttggcccactatcttcctagctattctgtgtcattgccaccagcatttggattctctctaatcttaaccgtgttcataatgccgttttgcattggcaagattaggtttcactgtctcctttagcttgttagcacttatttactttacctttggctgagtttcagtctttcgagcattttttattttttaataactttagtgacaaataaacaatattttgtttgtttttattataaaaacaatattgatttattaaatatacccaagaaacttcaagatgcagtttttagcacctgaaaatggtcgttaattctagacatcagcgagtccgctatatccggtagcgttgtggtgaaaaatttgaagacgttgtctcgaaattcatgtttatccgcaaaataacggttatttcgaacctgttcattcatgaccttccataatcgctctattgggtttaaatttgggctatagggaggaaggtaatgtaactcaatattgctaacataagcccactccttaacaagatgagctttgttgtaacccgccccatccacaataagatgaattttttgatgatagtcaggataagactttcttatttcattgaaaaaacagcaaatattgtagtcattgatggtttgatattcctggaacaccgtacgaccaatggcattcaggttgagcgcgcccaatatattcaggcgagtccggcttcctgttgttttgactgtttttttctcgccttttcgcatccagccataaccgagtttggtgccttgagtcgggtgaacagcatcaagaaaaaggatgggttcgtctttcgctgtgactttaagattctcataatattcaataaattgtcgctgtttttctgcgtcgaatttatgagggacgccacaaggttttttataagaaaaaccctgacggtgtagccatttattcatgccgggaatgctaaaggtaatattccagagctgagcaacataggccacgatttcatgggtgtgatggaaaagatgttgagataagtgattgattaaaaaatcagtttgttcttgagaaagcaaactatcagaccccccattatcagatttaagtttaccttgattaaggtaatcgctgatatgacggttaacggtcatttcatgaagacgcagggcctgagcgatcatcactgaactccagccttcagaggccagcaggaccgctttgatgcgatcacactccctcttatcacggcaggtgtgatggagatgttcaagttcggctttttgttcatcggtaatgaatattttcatagcgaggataatgatctccatttcggataaaatcaagcatcttcaatgattacgggtatatatttaagaatggcatggatactttattgtatcaacgattatgaaaggtctggcggattaataagccaggaagttatcttgatataaaggaaatgaatacaattgaaatatcattattaataccctatttttctcaccgtatttaccaaccgatgtcttggtgattaaatcgatggaaagtttccatctgataagctcgttacgttatctaattgagaatgaaactgcccgaaaataaattttgaattctcctgatgttaggaatatggtccagaaaaacgcttttattgccaaaagtctggcggaaatgaatgcatctcttcttgagctatcactgaaatgctcccgaatacggcgctgggtgtgatggatgaaccgtgcgaatgtctgattgatcacaatgcggtcaaatatcttgaaggtttaatgcttgcttagatgaattgttggtggtacagcgggttggatgacggcatcatattgggcaaaagtgtttggtgagaacatgaagatcacagtgattgcatcagattgtcaataacttgagcaggtatatccggctgtttttattttaggagtggtaataaaattcttaccgttccaataaaaagatcaattggtaatatagtctataccctatggatttcaagatgcatcgcggcggcaagggagtgaatccccgggagcatagcaaactatgtgaccgggagtgagcgagtgcagccaacaaagaggcaatttgaaagataacgggtataaaatgataacagatgactaaccgcagaggtgtgtgatgctagaacaaatctgccaactggctcaggaagctggtgcggctattatgacaatttatcaggatgaacatcccctgaaagttgatcataagcaagatgattcaccggttactatggctgatattgtggctcataaaataattaaagccggattatcccgtatcgccccagaaattccactgttgtcggaagaagagcttcctacttgggaagagaggcgtgattggaagcgctattggttagttgatcctctggatggtaccaaggaatttattaatcgtaacggtgaatttacggttaatatcgccttgattgatgagggcgttcctgtgatgggcgttatatatgctcctgtgcaggatacgctttattccgggcaagggcggcaggcatggaaaaaagcctgtggaggtcaatgtttgccgattaagattcgtgatgctaatccaccaatggtcgttgttagccgctctcatatggatacagaattagaagattatctcaatcaattaggtgaacatcagacggtttctgtagggtcttcactaaagttctgtttggtggcggaaggaaaagcgcaactttatcctcgctttgggcccactcatatctgggatactgcggcgggtcacgctatagccattgctgctggtgctcacgtgacgaactggaaaggtcagacgctagattatacgcctcgtgaatcattcctgaatccgggatttagagtaacgattttttaatcatggctgttttttagcggagctgtggtgataagggcaaacgaaaacatacctgcaagtcgttatcaccacggatgtttttactgtagttccttacgaactaattcaatgacctgtttgatttcactactgtttaatgcaccttctttggtaaacttcgctgcgccatttttgtccaggacaataatggcagaacttttagcttccaactgccaagcttttttggccacaccgttgctgtcagcgataaactgagaccacggaaactctcttttgctatcttcaatactgctgcggacaaagggtccagtaccgaatatggcatcattgatattgatgatggtggttgtttggtatttttcttttgaaaaatcagcgcgttttatttcttctatcagtggagcattcatctctttagctgcactacgacctgcaatatgttgtatgactctcactttaccaatcagttttccactatcccaattttggtagctaaacttgttattgttgagtaacaactcacctttatcagaaacactgatcgcaggaacctgttgttccagagtgatgttgtgggcgaatgctaaagcaggagaacaaagtagcgcagcatatagcataaagttctttatcataatttttcctttgtaggttagtgtgacaatgcatggatctctagcatagcgggtattaactgatttatctctttaaagaagatcaaatttttaacattaagtaagagataaagttacatagttatgtatatctaaatatctgtcattttatgtaaattcagtgcataaaactaaaaatggagggaacaaaatcggataaattcagtctattattctacataacggtatggtgtgtggagttggctcaccaaacgtaaccgtaagaagtcgctaggaggaaaaaagcagagatgaaaatttttcaccgatataacccactgaaaattgctctctacgttaaaactttattccgtggacgtttatacattaaagacatgggggcttttgaatttgactgcggcaaaattttaccgccgaaggtgagagataagcgccattttagtgtaatgagcgaagtcaatcagcaagtgctacgtttgcaggccgaaataggatagataacgaaaaagaatcgggttgcatactggtgtaatctgcgccacaaaataacaataagtggcgcttaacatgagaatactaaacggccttagctcaagaataggccgtttttatttatcatcactgataggctggttttgcgtgggtgccgtggtgagagtatcagtaatttttgtgactaatagctgatcgattttgtagttatcaatatcgacaacttcaaatttgtaaccagcaaacttaactgaatcagtacgctttggaattttacgcaaccgaaacatcatgaaacctgcaatggtttcatagttacttgaatcaggaaaatcatcaatatccagtacacgctgtacatcatcaataggtgttcctccttctactaaccatgaattttcgtcacggatgatgatctgctcttcttgtccttggtcgactaaatcacccatcagtgtggtcataacatcattaagggtaatcacacccattaccaatgcatattcattcagaataatagcgaaatcttcacctgccgctttaaaactttccagtgcatctgaaagtgtcaaggtatctggaatgatcagcgcgttgcggatctggacacctttattgaagcttaggctttgaccacttaggacacggttaagcagatctttggaatccacataaccgataacgtgatcaatatctctatcacatatcaggtacttggaatgtggctggctagaaacccgctgcttgatactttcctcactttcatccttatcgaagtaaatgatactttcccttgaggtcatggcagaaggcactgtgcgggattcgagctcgaacacgttttcaatcagttcatgctcttgtttacgcagcacacccgcaacagcccctgcttccacaaccgcaaaaatatcatcggatgtgatatcttcattacgtgctgtcggaattttaaagagcttaaagataagatcagacaggccattaaatagccaaactagtggacgaaaaacggtcagacagaaacgcattgggttaacgattttcacggcgactgcttcaggcttaatcatgccgatacgttttggtgtcaagtcagcgagcaaaataaatatactggtcacaatgataaatgagcagataaagcccaactggtctgcccattcggggcgcataaatttcatgaaaaacgttttcaatgaaggagagaatgcggattcaccgacaacacctgccaaaattgctactgcatttaggccgatttgcaccacggtaaaaaacattcccggcgtttcttgtaatttgaggacatgagctgcgttgatattaccttcatctgccatcagttttagtttgattctcctagaggcagcaagagagatttcagataacgaaaaaaaggcgcttatcgcgcacaatagaaatactattaagagactatttagcataaggaatccatgttctacctccggtggtagggtaggttgtcattagaaaagcaccggaggaaacaataaaaatcatataaaataaaaagtgacgacaaacacttagaaagctattgattagcgtagtaattataacattaattaaatgtagcgactagttttcgttcattttgggtaggcaaacaccaataccgcctagcccgcaatacccctcaggattcttaaatagatactgttggtgatagtcttcagcaaaatagaatggccccgcttctgtgatctccgttgtaatagggcgattgtcgctttgttgttgcattgctttttggaaatgttcacggctggctaatgccagttcatgttgctgaggtgacacggtataaatcgcggagcgatattgagaaccaatatccccgccctggcgcatcccttgagcaggatcgtggttttcccagaagagttttaataagttttcgtagctgttttttgctggatcgtaaacaattctaacaacctcagcatgtccggtcaggccgctacaaatttcttcgtaagttggattggctgttgtaccgccgctataacctgcggaggtggtgtaaatatcaggttgttgccagaataggcgttctacgccccagaagcatcccataccaaaataggccacttccatattttctggaacaggttctatcgtatgatcagtaacagcatggttaggtgaaaccttaagtggctcagttctgcctggtaatgcactatgaggatcaatagataggcttttattagctgaagttggcacaattcactcccgtaattattaagttttcagatattgatagattgtatatattgtaaactttactcaagataaattgattatagttaaattattccgatcaggttaggagttcgcgtgtcgagataccccgttttatgctttctttgtgtgtctatcgtaactcccattgctcatagtgctaatcttcgtctgaaaatagaaggattaacaggtaagttggaaaaaaatgcccgaattcatctctccactattagtactgatgaagttgcgccagatggccgttttcgatctcgtgtagataaagcgattcgtgaaggcttgcgcccgcttggttattatgaacccattatcgaatttacctatcaggaaaatagaccgccagctcgctcggtattaacggcaaaagttactgtaggcgaaccggtgagaattgccgatgttaatgttgttttggaaggtggggctaagacagatggagattatgccaaacttgttaaaagcaaaagcccaaagaaaggaacgattcttaatcatgatgaatatgaaaaccttaaaggttctttgaccgggctcgctattaggaaaggttattttgacgcggttatgaaaaagagccaattaggtgttgccaaagaacgacatgaggcattctgggactttgtttttaatagcggtgagcgttatcactttggtcaggtgcgttatcgtggttcacagatccgcgaagattatttgaatcatctagttccattcagcgaaggggatttttatacctctgaacaattagccgaattgaatcggcggttagcagaaactggctggtttaattcagcagtagtctcaccggattttaattccgctagaaaaaatggtgacggaatgcttcctcttgaagcggtattaacgccacgttccaaaaactatgttgaactgggtgggggttatggatctgatgtagggccacgggtaaaggcgaaatggacaaaaccgtggcttaattcccgtggacacagccttagcgccagtatcaacctttctgcacctgaacaggttattgatgctacctataaaatgccgctgaaggtgaatccgttagagcaatattacgcattgcagacgggttataagcgtaaagatatcaacgataccgtatcagataccgcgacagtaaatttttcccgtaattgggatctttcaacgggttggcagtatgggatcaatatgcgttggagtctcagccactttactcaggctaatgttaccaatacggcaatgttattgtacccaggggcgaacgtcagccgtatccgccagcgtggaggaacgatgccttattggggcgatagccagcgctattctattgatatctctgataccctttggggctctgatgttgatttcttggtgttacaggcgcaaaacgtttggatcagaacttattgggataatcaccgttttgttgctcggggtaatttgggttggatagaaaccaatgcattcgagaaggttccacccgacctacgttttttcgctggtggtgatcacagtgttcgtggttacagatatcagaaaatctcgcctaaagataataaaggaaaattgaccggtgcatccgcattggttgtgggttcgcttgagtatcaatataacgtaacaggtaattggtggagtgctgtttttgttgataccggtgaagccattaatgacgttagaaagagcaattttaaaaccggcgtaggtattggtgtgcgttgggcttctccggtcggacctattaagtttgaccttgccagaccaataggggattcagaatcccgtaacatccagttttacatcgggttaggatctgaattatgagatggatgaaaaaggtcagcattgcttttctgctgatagtgactttgttggttattgctgttgctggattggtaggaacgcaatctggcctgcattttatgattaacagtgctgcccgttgggtaccggggctggatataaccagcgtcagcggcggttggcgtgatttgaccctgaaaggcgttaagtaccaaatgcccggtgttaatgtcaatgtggatcaactccacctttcattgcgtctttcctgtctgaaaaagagtcaattatgtgtgaatgcattgacaacggaaggcgtaaaagttgcgattaatactaaacaattgcctcctgcgggagaaccgtcgccaaagtcagaacctttcaccgaactgaggacaccgtatccagtctcacttgatttgctatccgttaaaaatgtcactgtcaccgtaaatgatacgatatttgcccttgatgaatttaggaccgctgctcactggcagcaaaaagcattaacgcttaaaccaacgaaaattaatggattgctggtggaactgccaaaaacgccgcctgaacggctgaaaatagcggaagcagaggggaaagcgaaacgagggagtgaaccggaaaaatcgttggcagaaattctgaaaaaattattctctcaaccgctattggcaacattaccagaagtgcctattccactggatatcactgttgcagggataagtggtaagcaattacggctgacgggtgataccaatatcacaatcaatcagtttttattgcaacttagcaatcaggggcagcagattcagctcaataaattgaatgttaaaatgccggaaggttctctcgccattaatggttccgcaactctggcacagcaatggccgataaaactggtaataaaaggtgagctaaatcgacaagagatccaaggacaaaaggttaatgtaaagcttaatggcgctttacaggagcaactcagcttagggctaaatttgtctggtcctgtcagtgctaaacttgatgctcaagcggaactggctaaggtaggtttacccgtgcgggtgacgcttgaaagccaacaactaagttggcctttaacggggaagccagaatatcagctagatggcgtaaaaatgcgccttaatggtaaggccagtggttatgatttgtcattgcgttccggtattaacggtagtgaaatcccgccagcattacttgtattagatgccaaaggtaatgaagaacagtttaagttgacccgtttacgcctgtctgctttgcagggaaagagtgaactggtaggtgtggcagattggagtaaggcggtaagttggaatgcggtgctgacactctccgggatcaataccgctaaacagtggccggaatggcctgctaaaatcgatgggaaaatagtgactcgggggagtttacacggtggtagttggcagcttcagatcccggaaattacgctggacggtaacgtaaaacagaacttaataaaagccaaaggtaagatttctggtaacgcggcgggtcagtggaatattcctcaattcgagctggctttagggcgcaataaaatgaatctccagggacaattgtccaaacagtggaaactggatggcgatatccgtgcaccgaagttggatggtatatttccggggcttggcggtgtcgtgaatgggacgctgaaactgcgcggtaatatacaagcgcctcagcttttggttgatctcaatgctaacgggttgaaatggcaggatttgcgtgttgatcgagtgaatgtgaaaggggatgtacgttctgctgaacagatccaagggaatcttgctgctaaagtcagtgagttgaaacaagcggatttgattgtccgtaattttacgttggatgctaagggcaatgagaaacagcacgacttgcaattgaagattgacggcaaaccgattgcgggtcaacttgcattgcatggtagttttgatcgtaagcaacagcgatggaaaggtagcattaacaatacccgttttgacaccccggttggagaatggcgcttaactaaagcgataactcttgattatcttaatcagcagcagaaagttactgtgggccctcactgttggctaaatccacatgcgcagttctgcgtacctaaatccattgaagctggtgtcagcggtagtgcatccatcgttcttgaacgtttggatcttgctttgattcagccattactggcacctgaaacacatttgaaaggtatattcagtggcaatgccgacgttaaatggagtgcggaaagcggattgcctcaggccaacgttaatttgcgtggtgatggggtgcatgttaagcagatggttgatggcactgcattaccggtagatttccagaccctgacactcaatgcaggcttgaagaatggcacagcagagttgaattggttatttaagattatgggaaatggccgattcaacggtggcgtacaagttgctgatcttgctgggagccgtaagctgtcgggtaatgtagatattcaggatatttcactggcgttaatcaagccgattcttgggaaaggtgataaagctgaaggtcatttgaatgctaacctgcgtctgggaggcaatgtcagaaatccattattgtttggccggttagacttgagtgcactgcaagcttcgggccattggatcccatttgatattgttcaagggcaaatgggtgtgaattttgatggaatacgttccgttcttgatggtgttattaaaacgccgaaggggcagcttaacctaaatggtgacgcggactggcgtaatgtggatgcatggcatgcacgagtaacggctaacggtgacaagttaagagtcgtttttccaccaatggtgaaaattgatgttagccctgctctggtgtttgaggcttctcctcagttgctgaaattggatggtagcgttggcattccttgggcgcgtattaccgtgaaggagctaccagaatcgacagttgagacttcatcggatgaagtcatattgaatgaaaatcttcagccattacaacagaaaaaagcatctatcccgattcaaagtaacttgacgattcatataggagatgatgttcgtcttagtgctttcggtcttaaagcacaacttaaaggcgatctgatggttgttcaagataaacaaggcatgggtttgaatggtcaagttgatattcttgatggccgtttccgtacttatgggcaggatctgatcgttcgtaaagggctgattatgttctcaggtccacctgatcagccattactcaacattgaggctatccgtaatccagattctaccgatgggcaggttattgcaggggtaagggtgactggtttggcggatcagccaaaagtagaaattttttcagagcctgttagatcacaattggaagcactttcttatctgttgcgtggtgagggtttagagaatagtaactcggacaactcacagatgacggcaatattaataggtttgggggttgcacagagtggtcagttggtgggtaagatcggtgaaatatttggtgtttccgacttagcactggatactcagggggttggtgataaatcacaggtagttgttagcgggaaaattacaaaagatctgcaagttaagtatggtgttggtatatttgattcactggcaacattaaccttacgctatagattaatgcctagattgtatctggaagcggtatctggtattgatcagacattggatttgctctatcagtttgagttttaaaaatgcgaattattgtttatggcagcttacggcgcaaacagggcaatcatcattggatgaccgatgctcaatggttaggtgatcatcggctggaaggctatgagctatatgaccttgggcattatcctgcggttatccgtggtgacggaagtattgaatgtgaggtatatcgaatcaattctactatactgacagaattagatgatttgaaagataattcgcgggagtatgtaagggaattgattcagacaccgtatggcaatgcatggatatatctttatcagtttccaataaccggtttacggcggataaaaagcggtgattggttgaagcgccatgtggaagagtaaataaaaacccttttttgtcataaaaagggagtatggtattaaaaaacctctgccggtgatgttccccagaggttttttaattatttaaatagagaaaagttatttcttagcagcacgttcgaaagaggagataatttctgctttagcagcttcgacattatcccaaccatcaactttaacccatttacctttttccagatctttatagtgctcaaagaagtgagtgatctgagcgcgtagtagttctggtagatcattcacatctttaatgtgatcatactctttggttagtttgctatgtggaactgcaaccagtttcgcgtcttcacctgattcatcagtcattttcagaacgccaactggacggcaacggatcacagagccgggttgtagtgggtatggtgtgggaaccagaacatcaaccgggtcaccatccagagataaggtgttgttgatgtaaccatagttgcatggatagaacatcgtggtagacataaaacggtctacaaacagtgcaccggattctttatcaatttcatatttaatcggatctgcatttgcagggatctcaataatgacatagatatcttcaggcagttcttttcctgctggtactaagttcaggctcatgaaagtttcctttatttcaaaccagaatagagtgtggggtattatagccaaaacattttttaaagtactctccatttttctgtgttggtaaatgctgtctctgagtttgatgattgctccgtggtgtagttactaaccgataatacaggttgtcacttagctctcgataaggtccgattttcccggctatttgggctggtatattaatttgttggatatactgaaattttcagaataatttttttcaaaagtgtaatttatagtctattgggatggagcttttaataaagctgtagtggtctaataaagccgtagaacctccaactggagatgagcgaatttttcgtatctgacagaagtggtgactactccttgagcctgcgcacgattttgtgtagtcaccattttgttgaaggtgatctgctaggtggccaccaatcagtaataaaataactcatcactaatacgtcaatcacacagtggtatagtttacttcttcgaggtggcttgggttacccgttggtgaccataaattttaaagaatcatctaacgaacatagttaaaattaaaaaagcgacgaaaaatcccgccgcttatccgtaattaaccgatgaaattactcatcagggaactcagccataaaactctctgccttttccaccatcgatttactacccacaaagaaaggtacgcgttggtgcagtttggatggagtgatatccagaatgcggttggcaccatcactggctttaccacccgcttgttcggccaggaatgccattgggttacattcatacagtaggcgtaattttcctgatgggtggctggcggtacttgggtaaatgtagataccacctttcagtaaattgcggtggaaatcagcaaccagcgaaccaatataacgggtggtataagggcgctgagttgcttcatcttgttcctggcaatatttgatgtatttctttacccccatagggaatttgatgtaattcccttcgttgatggaatacatattgccattgggtgggaactgaactttctcatgggaaagacaaaatactcccaaagaaggatcgtaagtaaaggcgtgtaccccacagccggtggtgtagaccagcatagttgaagaaccataaacaacatagccggcggcgacttgacgatgacctggttgcaggaaatctttttcagttactggctgaccaatgggggtaatacggcggtagatagagaagatagtaccgacggaaacgtttacatcaatatttgaagagccatctaatgggtccatcaaaacaacatattttgcgttttcagcgcggtcgccttcgaaaataacgatatcatcttcttcttcagaagcgattcctgcaacttcaccgcgtgctttcagtgctgctttgagtttttcattagcatacagatccagtttcatctgtacttcgccttggacattggacacaccgctggttcctaaaatatccactaaaccggctttgttgatatcacggtgaatgatttttgctccgagcttaatagcagaaagcaatgcagtgagttcacctgtagcgtgagaaaaatcttgctgcttttcgacgatgaattcgcctaatgttttcatgacgaaagtcctgaatgtgatttgatagtggttttagagtgtccattgcactcttacgcgggcagtttagccaaagaaagggatgattcataggctattccatttcttatcttgcttttgatggttagaatagtggctaacttcatgctatggaataggaaatcaatgcgtattcatattcttggtatctgcggcacttttatgggaggactggcaattttggctcgttctcttggtcatgaagtgactggttctgatgccaatgtttatccaccaatgagtaccttactggaaaaacatgggattaatctgattcagggatatgacccggcacagttggattctgtgccagatatggtcatcatcggtaatattatgagccgtgggaatccttgtgtagaagctgtgttggagcgtgggctcccttatacttctggcccacaatggctgcatgattatgttttgccagaacgttgggtgctggcggttgcagggacgcatggcaagacaacaactgcgggtatgttagcttggattttggaagcctgtggttataaaccaggtttcttaatcggtggtgttccggggaattttgaaacatcagctcagatcggggaaagcccgtttttcgtaatagaagctgatgaatatgacagtgctttttttgataaacgatctaagtttgtgcattacagtccacgtacgctgatcatgaacaatctggaattcgatcatggcgatatttttggcgatctggctgctattcagagacagttccaccatcttgtcaggatcgttccgggtagtggtaagatctgtgtcccggataacgatgttaacctgaaacaggttttgtctatgggctgttggagtgagttggaactagtgggtgaaacgggtaactggcaggcaaaaaagatcagtacagacagtcgtcattatcaggtgttttatggtggtaaagttgtcggagaagtgaacgggtcgctggtgggtgaacataatatgcgcaatgggttgattgcaattgctgctgcacatcatgttggtgtccagcccgcagatgcctgttgtgctttaagtgaatttattaatgcccgtcgtcgtcttgaactacgtggtgaggaaaacggcgttactgtttatgatgattttgctcatcacccgacagcaattctggcaacactcgaagccctgcgtagtaaggttggaggaacagcccgtattattaccgtactggaaccgcgttcaaatacgatgaaaatgggtgtgagtaagaatgagatcgcaccagcattggggcgtgctgatgaagtatttttattccagccagctaatattaaatggcacgtatcagaaattgcagatcactgtgttcagcctgcgtattggagcgctgatatagattcactggtgcatatgattgttgataaagcacagcagggggatcatattctggttatgagtaatggaggatttggtgatattcatgaaaaattactctctaagttgaataaaaaagcttatcaatcctgagaatagctgcgggaaaatgaatcgcgccatgttggcgcgttcatttaaagctcttgttcgaacaacccaaggatggctccacgcagctgttctgttgtggaatctctggtgagtgtaacgaaaatggtgtcatcacctgcgatactgccgagtataccttctgatttaccaagagaatctagcagacgagcaataagttgagcagcaccagggcttgtgcgaatcacaactataggatggttgtaatcaacgtctaatactagattttttagtgggctagtggcagtaggaacaccaagctcagcaggcaggcagtaaaccatctccattttagcattacgggtgcgaacagcaccaaatttagtcagcattctagagactttggattggttaatgttctcaaaaccttcttccagtaaagcagtaacaatttcaccttgagagctaaatttttcttctttcaataacgctttgaaagcttttactaagtcttcctgtttagagggagtgcgcatatttcaccatattcaatcagctatgaagcttgtattatgcatataaatgaatttttatgcaataataatgattttatagccaatttgaaccgcgcaaaattggtcttatgttatatagaaattcataaaatatgaatatggaaatttgcttttttagccggttatcaagtaaatatattgttaatcaaatgatgttgtttggcgttgttgttgggtgtaaggtatttagccaattgtttcgtaaaatcataaggaaattctcaaaatagtgtccgttatctcattaacagataagcattttgcctagaatacggcgacttttgcgtcccacgattagagcgtaagtccacaatttggttgttaaccgattgttttcaaaaaagtagtaatctatggttcttaactagatgaattcacagcattttaaagtataaacgatttaaggagtatcaggatgaaagttgcagttctcggtgcagccggtggtattggtcaggctcttgctcttctactcaaaacccagcttccttcaggttcagaactttctttatatgatatcgctccagtaacacctggggtggctgttgatctgagccacattccaacggaagtgaaaattaaaggctttgctggtgaagatgcaactccagcgttggaaggagcaaatgttgtattgatttctgctggggttgcccgtaaaccaggcatggatcgttcagatctgtttaatattaatgcggggatcgttcgtaacctggtagaacaagtggctaaaacttgcccgaaatcactgattgggattattactaacccagtcaacacaacggtggctattgcagccgaagtgctgaaaaaagcgggtgtatatgacaaaaaccgcctgtttggtgttacaacgttggatgttattcgttctaatacttttgttgctgaattgaaaggtaaaaaaccacaggaaatcgaagtacccgttatcggtggtcattctggtgtgacaatcttacctctgttgtctcagatccctggtgtgaactttactgatggagagttggctgctttaactaagcgtattcagaatgctggtactgaagttgttgaggctaaggcaggtggaggatctgcaactctgtctatggggcaagctgcggctcgtctgggcctctctttggtccgtggcttacaaggcgaaagtgatgttgtagaatgcgcttatgttgaaggtgatggtaaatatgctcgcttcttcgctcagccagttcgtttgggtaaaaatggcgtagaagagcgtttgaacattggtgagttgagtgattttgaacagaaagcactggaaggcatgctagatgtattgagaaaagatatagaattaggcgaaaaatttattaataactaattaatatattttataaataaaaaatatatatctatgaaacgataaaaccgctggtatagcgaattaccggcggtttttgttcaactaatatatacccgtcatctttcaagttgcctctttagttagctgcactcactcaccctggtcacatcgttatctatgctcccggggattcgctcccttgctgccgcgatgcatcgtgagatccattagggtataattcgttagctaattatttgtttgttcgcgtactttcctttctaataattctccagtatttggatcaaaataacgacttggccaaatttctgaagggtgtatttccagataattcgcaattatccattctccctttggccacggacgagatagtgcattcgccagggttgatgagctgagccctgccctgcgtgatacctcagctaaggttgttccccgcttgcgtaaagctgcaattatatcggcaggatgccaatcagatttccttgaaatcatttttaatcctttttttattaaatttgatgctatgttagtggtataaataacaggtatgcatgagagcaataacgaacttaaacctgttattgagaaataaaatagcattatttttctaaaagtatttccaaattttttcttaaaaacttcttttttgaacttggttacaaaaatagagaaacgtgatgaaaaaagagtggtattcggccaaggagttaatcggcgtgggtgagttacctggatcaccacaaggagttaatgccagagcaaaacgagaggagtggttacgtcagaaaagacaaggtgtacaaggtaaagcagtcgagtatcactactcctgtttcccggaaacgaccattgtagcattggagcttcatgaatcatcttctgagtatcaggtacagaagcaagatcctttgtcgatttgggttggtgcttttcatcagttatcagaatctgagaaacaggctgtgatagccatgattttacgggatggtatcagaagttttttagaaaaactttctgttatttaacccatttttggaaattggaaatgccaactaacttggattcttcttcattatcccggtgcaaagtgagaagaaaagtatgaaaaaagaatggtactcagctaaagagctggttggtattgccggacttccttcttcgccacagggaataaatctgatggcaaggcgggaaggatgggaatatagacgtaaacggggtgttcagggcaaggctcttgaatatcatataaatagtttgcctgaagatgtacttaatgtgctatccgtaggggaaagcactattgattatacaaacaaacgacaagacccattcttaatttggattgaggcttactatcaattaactaaagttgagcgggaaaaaattgtgaaatttattcttcgggaggggctcgcaaaacttattggttatattgatgtaggtgttgaagacgcagagaaaaacctggagtcagattaaccccaggtttcgttctatcgattaagaaaggcgttgtacggcgatatgggctaaccccacgagtgcttgcttgtatggggagttttccagcgcctgcaaagcagctattgctttatctgcttcttcctctgctcgtttacgggtatattccagtgaaccgcactgtttcatggttgtcagtacggtttcgagtaaatgacggccattacccttttcaattgcttcacggataagtgctgattgttctggagtgccatgattcatagcgtgtagcaagggcaatgtcggtttaccttcgttaagatcatcaccagtgtttttgcctaatgtatcgctatcagcattataatccagcaaatcatcaattaactggaatgcagtgcctaaataacgtccgtaattttgtaaagccatttcttgctctggggtggcgttagaaagaattgcggaagagtgcgcggcgacttcaaacagccgggctgttttactgtaaatcacccgcatataatcatcttcagaaatatttggatcattgcagttcatcaactgtaaaacttcgccttcagcgataacattggttgcctctgacattaatttaagcactcgcatggagttaagcgctgtcatcatctggaaagagcgtgtgtatataaagtcaccaaccagcacgcttgctgcattaccaaacatggcattggcagtcgctttgccacgtcgcatgtctgattcatctactacatcatcatgtaacagagtcgctgtgtggataaattcaattaatgcagcaacagtaatatgcttatcaccctgataacccaatactctgctagccaggatggcaatgattgggcgaatgcgttttccaccaccactgattatgtagtagcccaactgattgataagagtaacgtcagaattcaactgactaagaatggtttcatttaccgctgccatatcatcagcggttagcttgataatggtttctaaattcatattttttcggctatgggttttaatgcagagctgtgttcatattaacattaaaatagttattgctgtgtcttgattgtactcgaaaaacagtctaaataaatgacaattcagcaactatgtttttttatcatctgctctaattctgctcttgtcttcttaggcttttttgcgtagaattcgcgccctattatgaatatttatagcgcgctctggaatgatatttaagggggcgtgcggaaagcggagtttatatgtacgcggttttccaaagtggtggtaaacaacaccgagtcagcgaaggtcaaacaattcgcctggaaaagctggacatcgcaacgggtgaaactgttgagtttgaccaggttctgatggtcgctaatggtgatgacatcaaaatcggcgctcctgtcgttgaaggcgttaaaatcaaagctgaagtggttgcccacggtcgtggcgagaaaattaaaatcgttaagtttcgtcgtcgtaaacacagccgtaagcagcaaggccaccgtcagtggttcaccgatgttaaaatcactggcatcgcttaagatttaggagagcagattaatggcacacaaaaaggctggcggctcaactcgtaatggccgcgattctgaaagcaaacgtctgggtgtaaaacgttttggtggcgagtctgtattagcaggcagcatcattgttcgtcaacgtggcactaaattccatgctggcaataacgttggttgtggtcgtgaccacaccctgttcgcattagctgacgggaaagttaaattcgaagttaaaggcccgaaaaaccgcaaatttatcagcatcgaagctgaataagtttttcgagttataaaccctatggatttcaagatgcatcgcgacggcaagggagcgaatccccgggagcatagataactatgtgactgaggtgagtgagtgcagccaacaaagaggcaacttgaaagataacgggtataaaccgaatcagaagccctgcatgtgttgcggggctttttatattctaaaatacgccatctctgggtaacacggccgtccagcactgtaatggctatcatacggagaaaaaatatgaaatttgtagatgaagccaggatactggttgttgcgggggatggtggcaatggttgtgtcagcttccgccgtgaaaaatatattccgaaaggtgggccagacggtggggatggtggggatggtggggatgtttatctgctagcagatgaaaatctcaatacactgattgactatcgttttgaaaaatcctttcgggcagaacgtggacaaaatggtcaaagccgtgattgtacaggcaggcgtggtcaggataccacgattaaagtccctgttgggacgcgtgtccgtgatgcagtaaccggtgaggttctaggcgatatgattcgtcatgaacagcgtttaatggtagcgaaaggtggattccacgggcttggtaatactcgttttaaatcttcggtcaaccgggctcctcgccaaagaacgatggggacctcaggtgaaacccgtgaattgatgctggaactgatgctgttggcggatgttggtatgctagggatgccaaatgcgggcaaatccacctttatccgtgctgtttctgccgctaaaccaaaagttgcagattatccatttaccactctggtaccaagcttgggtgtagtaaggatggataacgaacaaagtttcgttgttgctgatatcccagggctcattaaaggtgcttccgatggtgctggcttgggtattcgcttcttgaaacatttggaacgttgtcgggtattgctgcacttaatcgatatttgtcctgttgatggatcagatcctgttgaaaatgcccggattattgtcaacgagctacagcaatacagtgaaaaattggcagaaaaaccacgcaggttggtgttcaataaagttgatctgttggagccagaagaagctagacagcgtgcccaagctattgctgatgaattgggttgggaaggcgacttttatatgatctcagcgataaatcgtcagggtgttaaagcgctttgctgggatattatggagtttatgaaaactcagcctcgtaatatgagcagaacagaaggtgaaactcagcctgagaaagttgaattcatgtgggatgactaccataagaagcaattggaacaggtttcggaagtagacgatgactgggatgacgattgggacgaagatgacgatgaaggcattgaagttatttacaaacgctgattttttcactttctcatcatactttctcatcataattaagggcgccatctttgtggcgccaattttatcagttgtgttggtataaatctttgtatagcctgctttcgaatcgaatcaaaggggcccgacggttgcgatgctcttttggcggtacggcgtaagcagaaataaattgcacgaaagcaacttgttgaccgctagcagtggttataaagccagctaggttataaactccttgcagggcaccggttttagccgaaacttttccgtttactcctgcttcatccagccctccccggtatcttaatgtgccatcatgacccgctaatggcagcatggaaataaaatctaattcttgatcatgctgagcaataaactgtaatacttccatcatggttgctggagtaattagattatggcgggataatcctgagccatctaccatcacggtatttcctagatcgatacctgctttttgttttaatacttgccttaccgcatcagaacctgaacgccaggttcctggtatatcaaagtgttgtcggcctattgtccgaaatacggtatcagcaatcatattgtcagatttttttagcatgacttttagcagatcatgtaatggtgctgattgattttgagccagaacttttcccggttcagttggtaaactttggcgtttaagattacctgtgatttcaattcctgcaatttgcaattcatttttgagaattgcacccgcatagctggtaccattttgaatcgcgaaagccagtggcaacggttcactgcgttgagtaaggcatccggtaagagtaaaacggttcagctctccgggaacgacgtccagttcgcagtactggctttcaggagagccttttgccaacgttttaacttcgctgaacatatttacgggataaaaggatgctacgcggataaatgcagtatcaccggggtgttcagcactatatagcgaaactgaaaaacaatttcgatctacaattgcagcagcagggggagcgctgaaacattgggtcatgtcattccatacccaaccgggagctttatcgtggctggcaaaggcggaaacatctatcaaaagatcaccgtcaattttttccacgccagattgtttcagaactgtgaccatattgcgaagttgttgacgggtcagtgtcggatctccgacaaaacgagcaatcaaattccctctcaggatgccgtttgaaatttttccgtgactttccagtgtggtgataaagcgataatctttacccagttgtaacaatgctgcaagagctgtgacaactttcagcgtactggctggtagagccatttgctgcccgtgataatcaattaacggggtactgctgcccgctttttgagcgattaacgccagattagtaccatcaggcagatattgcgtatattcctcaacaggtgtggcgtttgcgttgggtatagttaaatacagagcggtaacgcaaattaatctgccggcaattttaaagaaggacataaatttcgcatatggatgtagacataccacaatactaaggcgcaaagtggggaaaagtaaacgatgacccatcaccaagtctacgttagaatgatatattaatatgtaaaatatgattgtgaactctgggtagtcctatggtttgcactattgtttattgtctgtaagcccgcccgacaaggtgtgctcattgtgctgttatctgaaaacatcaggatgatgttggttttttgctcaggaaagatttagaggattaataaatgaaacagattccaatgacggtacgtggcgcggataagttgcgcgaagagctagattatctaaagaacgtacgtcgtccaaaaattatttcagacattgctgaagcgcgtgaacatggtgatctgaaagaaaacgctgagtatcatgctgctcgtgaacaacaaggtttctgcgaaggccgtattcaggaaatcgaagctaagctttctaatgcacaagtgattgatgtcacaaaaatgcccaagggtggacgtgttatttttgggactacagttacggttttgaatgttaatactgatgaagagcagacttaccggattgtgggtgatgatgaggctgatattaaagaaaatttaatctcagtgaattcaccaattgcccgcggtttgataggtaaagaagttgatgacgttgttattatcaaaacaccaggcggtgaagttgaatatgagatcctgaaagttgaatatatttaacttcgggattgtcctgttgctattgatttacgttaggtaaagttgcataaggatcgtggaaaagtaaaaaaggccgaatatggccttttttatcataatatgcgcaccgcattttatataaatgtggtttgattatttaggtaaaataattttgcgttcttccgattggcggtaaagaactagagttttaccgataacttgcacattatatgcaccggtctcgcggacaattgcatcggcgatcaaatttttggtttcacgatcttcgcctgcgattttgactttgataagctcatggtgtgacagcgtttgttcaatttcggccaacacaccctcggtcaggccgttattaccaatcatgacaacaggttttagcgggtgagcgagacttttcaggtgttgtacttgttttttgttaagggccattgtttttttgcttagttaggattgaaaacgagacattctaccgccatctcatctctatcaccataaatagtgtgttgtggttttgatgtacggagcaatagatatctggctctttattcgttgtatagttggaaaggacaatggccaataaaaaacgttcggcaagctccagtcgctggttacaagaacactttagtgataaatatgttctacaagcacagaaaaaagggcttcgttctcgcgcttggtttaaacttgatgaaattcaacaaagtgacaaaatttttaagcctggcatgaccgttgtcgatttaggcgcagctcctggtggatggtctcagtacgcagtgagtcaaattagtgataatgggcgagtgattgcctgtgatcttttaccgatggatcccattgttggcgtcgatttccttcagggtgattttcgtgatgaacttgtattgaaaacattgcttgagcgagttggtgataacaaagtccaggtcgtcatgtcggatatggcacccaatatgagcggaacacctgcggtcgatattcctcgatccatgtatctggttgaattggcgttagatatgtgtcgtgatgtgctggcccccgaggggagttttattgtcaaagtgtttcagggagagggctttgatgaatacctgagggaaattcgctccctatttacgaacgtgaaaattcgtaagccagacgcttcgcgggcccgatcgcgtgaagtatacattgtagcgacagggcggaaactatagtaccctgaatgctatttgttaacacagttgtaatatgaggttaatcccttgagtgacatggcgaaaaacctgattctctggttagttatcgcagttgtgctgatgtcgttattccagagttttggtcccagcgattccaatagtcgtagggtggattattctaccttcatcaatgaattagcccaggatcaggtgcgcgaagttcgtatcacaggtcgtgaaattaacgttagtaggaaagataacagcagatacaccacttacctaccagtacaggatgaaaaactgctagatacgttactgaataaaaacgtaaaagtggttggtgaacccccagaggaaccaagtctgctaacttctattttcatttcctggttcccgatgttgctgcttattggggtctggattttctttatgcgtcagatgcagggtggtggcggtaaaggggcaatgtcttttggtaaaagcaaggcccgtatgctgacagaagatcagattaaaaccacttttgctgatgttgctggttgcgacgaagcgaaagaagaagttggtgaactggtggaatatctgcgcgagccaggccgcttccagaagttgggtggaaaaattccgaaaggtattctgatggttgggcctccgggtacgggtaagactttactggcaaaagcaattgctggtgaagcgaaagtgccgttctttactatctctggttctgattttgttgaaatgtttgttggtgttggtgcatcccgtgttcgtgatatgttcgagcaggcgaagaaagcagcaccttgtatcatctttattgatgaaattgatgcggtgggccgtcagcgtggcgctggtttgggtggcggtcacgatgaacgtgagcagactctaaaccagatgttggttgagatggatggttttgaaggcaacgaaggtattatcgttattgccgcgactaaccgtcccgacgtacttgatcctgcgttgttgcgtccaggtcgttttgaccgtcaggttgttgttggtttgccagacgtacgtggccgcgagcagattctgaaagttcatatgcgccgggttcctctggatacagatgttgatgcttctgtcattgctcgcggtactccgggattctctggtgctgatttggctaacttggtgaatgaagctgctttgtttgctgcccgtggtaacagacgcgtagtttctatggttgaattcgaaaaagcgaaagacaaaatcatgatgggcgctgaacgccgctctatggtgatgacggaagagcagaaagaatcaactgcttatcatgaagcaggccatgctattattggccgtctggttcctgagcatgatcctgttcataaagttaccattattccgcgtggtcgcgctttgggggtgacttttttcctaccggaaggcgatcagatcagcgctagtcgccagaagttggaaagccagatttcaaccttatatggaggtcgtctggcggaagagattatttatggcccagacagtgtttctactggtgcatctaatgatatcaaagtggcgacatcaattgcccgtaacatggtaacgcagtggggtttctcggaaaaacttggcccattactctatgcagaggaagaaggggaagtgttccttggccgttcagttgctaaagctaagcacatgtctgatgaaactgctcgtcttattgatcaggaagttaaggcaattatcgatcataactatcaacgtgctcgtcagattctgatggacaaccttgatgttctgcattcgatgaaagatgcattgatgaagtacgaaactattgatgctccccagattgatgacttaatgaatcgtacaaatgttcgtccaccagcaggatgggaaagtgataacggcagcagtaataacagtcgcccaacaggtaatacacctcctccacaagctgcaaaaccaactgatgatatcaatacattggcgcaaggtggtgagcaagtagggcagtcaggaaataaagatcagtaattgttctatggtttcgtagtctgattgatattcatgaaaccccaggtaagccctggggttttgacattgaaggtagcctaacatgaaactcagagccagagacaatgttctcgatctttcccgtccacaagtaatgggtattttgaatgtgactccagattcattttctgatggtggggctcataataccctgaatatggccttacaacatgctgagaagatgattaatgaaggcgctgcgatcattgatatcggtggggaatctacccgtccgggagctgatgaagttagtgagcaggaagaagtggatcgtgttgttccggttgttgaggctttagctcaacgatttaatatctggatttctgttgatacttcgaaagcattggtgatgagtgagtcagcaaaagctggtgcccatttgattaacgatattcgtgcattacaagagcctggtgctttggaaagcgtagctaaatctggcttatccgtttgcttgatgcatatgaaaggccaaccacgtactatgcaggatgctccacattatgaaaatttgttaatagaagtgaaccaattttttactgagcaaattgaacgttgtgcgatggcagggataacaaaagataaacttgttcttgatcctggcttcggttttggcaagaacttgaagcataactatcagttactggcgcatttaaatcaatttcatcaatttggtttacctgtgctagcaggaatgtcacgtaaatctatgataggtcagttgcttcatgtgccgccacaagaaagggttatcggtagtgtagcttgcgcagttatcgctgctatgcaaggagcgcaaattattcgggtacatgatgtcaaagaaaccgtgcaggcaatgcacattgtcggagcaacactttcagcaaaggaagaaaagaaattatgagtaaccgcaaatactttggtaccgatggtatccgtggcaaagtgggagatagcccaattacgccagattttgtgttaaagcttggttgggctgcgggtaaggtactggctcgtcatggttctcgtaagatcattatcggtaaagatacccgtatttctggctatatgctggaatcttctttagaagcaggtttagctgcggctggtttatctgcttcgttcactggtcctatgccaacacctgctgttgcttatctgacccgaactttccgtgctgaagctggaattgttatctctgcttctcataatccttattatgataacggtattaaatttttctctattgatggtacgaaactgccggatgatgtggaagaagcgattgaagctgaaatggaaaagccactgacttgtgtggaatccgcagagttggggcgtgcaaatcgtattgttgatgctgctggtcgttatatcgaattctgtaaaggtacatttccaagtgagcaaagtcttaatggattgaaaattgtacttgattgcgctaacggtgcgacttaccacattgctccaaatgtactcagagaactaggggctgatgttgtgacgattggctgtgaaccaaacggtatcaatattaatgaaaagtgtggtgctaccgatgttcgtttgttgcagcaacgtgttgtagaagagaaagcagatgttggtttggcatttgatggtgatggtgatcgcgttattatggttgaccatttgggacagaaagttgatggcgaccagatcctttatattattgcccgtgaagcattgagacaaggacaactgcgtggtggcgttgttggtacgctgatgagtaatatgggattggagttagcattgaagcagcttggtatcccatttttgcgtgctaaagtgggtgaccgttatgtgctggaaaaattgcaggaagaaggctggcgtttaggggccgaaaactctggtcatgttatcttactggataaaacaactacaggtgacggcattgttgctggccttcagattctgagtgctatggtacgtaaccatatgagtttgcacgatctgtgtagtggtatgaaacttttgccacaggtactggtaaatgttcgtttctccggttcacacgatccacttaaatcggaaaatgtaattaatattactaaatctgttgaaactgaattaaatggtcgtggacgggtattattacgtaaatctggtactgagccattgattcgtgtcatggtagaaggtgaagatgatgtgcaagtcacggccttggctcatcgtattgctgatgcggtgaaacatgcgggctaatttgttgtttttttcctcaagtgattctgattattgaaattaaccttgcgtatcagatgtggtttggttagtattcagacccactcggtcaggtgattagcctgtttgagtgggtgatgcggtataaggtagccacgtaaaccgtggtaaaccccacgaggacataggtacgacatatgtatggagctcttttagttgttttcttgctagttgctatcgggctaattgccttggttatgctacagcagggtaaaggtgctgatatgggtgcttcctttggtgcgggtgcctctgcgacgctgtttggttcatcgggctctggtaactttatgactcgtatgaccgcacttttcgccactctgtttttcattattagtttggtgcttggcaatatgaccagtaaccagactggtgcaagcagtaagtgggaaaacattggcgagcctgctaaagtcgagaagtcaacggagattccgacggcaccagcagcaccaaatagtgatattcctcagtagtcgtcacaggaaagaattaagatgaggctgtttaatcagtgatagcttcatgtagtgccgaggtggtgaaattggtagacacgctaccttgaggtggtagtgcccacactagggcttacgggttcaagtcccgtcctcggtaccattattcggatagcttgcgtttttgcagctatcggcgtaatatttgccacgttttcgaacgcgggatggagcagcatggtagctcgtcgggctcataacccgaaggtcgtcggttcaaatccggctcccgcaaccacttcttaaattgagatgcacctttttgaacgaaataattcagcaatatttgaaatattgattctgatttaaaggggcatgaagtgagtggttgaagccactggcagcaaatagggtccagttgcataaagccccgaatttcggggttttttgttatttgacaacagaactactgggctaattagccctttttttatgtcttgggggtgggcttgtccacattagagcaaaaattaacagcgatgatttcagcaccagttgaagctttaggctttgagttagtcggcttggagtttattcgtgcacgtgtttctacactgcggatttatattgatagtgagaatggtatcactgttgatgattgtgctgatgttagccaccaggtcagtgcggtattggatgtcgaagatcctatctcagtgctttataacctggaaatttcttcacctggcttagaacgcccattgttcacgactgaacattaccagcgttttattggtgaggaagtcagtctggttttacgtatagcaatgcaaaaccgtcggaaatggctgggcattattaaaactgtcgacggcgaaatgatcacggttacggtggatggaaaagatgaagtgttcgcactgagcaacatccagaaagcgaacctggtaccccacttttaaagttcggatgaggcaactaggatgaataaagaaattctggctgttgtggaagcggtttccaacgaaaaatcccttccacgcgaaaagatcttcgaggcgctggaaacagcattggccacagccaccaagaaaaaatatgaacaagatatcgatgttcgtgtcagcattgaccgtaaatctggtgattttgacactttccgtcgttggttagttgttgaagaagtgactcagccgactcgtgaaattacgctagaagcggctagatttgaagagcctgaaatcgatttgggtagctataccgaagatcaaattgaatcagtaacgtttgatcgtattacaacgcaaaccgctaaacaggttattgtacaaaaagtacgtgaggctgagcgcgctatggttgttgatcagttccgcgaacagcaaggtgagatcatcaccagtgtggttaagaaagtcaatcgtgagaatatcactcttgatttaggcaataatgctgaggccgttatccttcgcgaagatatgttaccaagggaaaattttcgcccaggtgaccgcgtgcgtggtgtactgtatgatgttcgccctgaagcacgaggtgcgcaactgtttgtcagtcgttcccgcccggaaatgctggttgaactgttccgtattgaggttccggaaattggtgaggagctgattgaaattaaagctgctgcccgcgatccgggatctcgcgctaagattgcagtaaaaacgaatgacaagcgtatcgatccggtaggtgcttgcgttggcatgcgtggcgcgcgagtacaggctgtttccagtgaactgggcggcgaacgaatcgatatcgtactgtgggatgataatcctgctcagtttgtcattaatgctatggctccggctgatgttgcatctattgttgtcgacgaagacaagtgtacgatggatgttgccgttgaaagcaacaacttagcgcaggctatcggccgtaatggtcaaaatgtgcgcctggctgcgcagttgttgaaaaaacatcgtggtgatgacaaatgggaattaaatgtcatgactgctgaagagttacaagcaaaacatcaggcagaagctcatgcttctattgatacattcactaagcatctcgatattgatgaagaatttgctactgttctagtcgaagaagggttctcaactctggaagaattggcctatgtaccaattaaggaacttctagaaattgaaggccttgatgaggaaactatcgaagtcctgcgtgaacgtgcgaaagctgctttaactactctggaactggctcagaaagaaagcctcagtgataaacaaccaactgaagagttgttaaatctgactggtatgaatcgtactctggcatttgacctagctgcccgtggcatctgtacgctggaagatcttgccgagcagggtatcgacgacctatctgatattgaaggtttgaatgatgagaaaacaggcgagctcatcatggctgcccgaaatatctgttggtttggcgatgatgcgtaataaaccgtagcaggaaggaacagcatgacagatgtaaccgtaaaatcactggcagaagagatacagacttcggttgatcgcttggtacagcaatttgctgatgcagggattaaaaaaaccgaaactgattttgtctcccagaaagaaaaagaagctttactggcgcatttgaaccgcgagcaaggtggttcagctggtaaacccgataaattgacattgcagcgtaagacacgtagtacgctgaatgtttcaggcaccgatggtaaaagcaaaccggtagccgttgaggtccgcaaaaagcgtacatatgtgaaccgtgatgcagttgaacaggctaaagcggaagagcaggcgaagcgtgaagcggaagagcaagcacggcgcgaagcagaagaaaaagcgcaacgcgaagccgaagcagcagcgaagaaactcgttgaagagcaggctaaacgtgaggcagaagaaaaggccaaacgtgaagcagctgaaaaagctaagcgccaggcagcggaaagtgaaaaagtgaccaatcaacataccgaacataaacagaaaccagcacagactgataaaacaattcaaagtgaaaaagcacgccgtgaagcagaagctgccgatcttaagcgtaaagcagaagaagagatgcgtcgtaaggtagaggaagaagctaaacgcgttgctgaggaagctcgtcgtatggctgaagagaatcaggataagtggtcaagtgattcagattccattgatagcgacgattatcatgtcactacctcccgtcatgcccgtgcagcagaagacgaaaatgatgctaaagttgaaggtgatcgtcgtgcccgcggtcgtagtggtaaggctactcgccagaagaaaaataataaacattctgaatctaaagcagatcgtgaagaagcccgtgcagttggtcgtacaaaaggcaagcaacgtaaaaccagtacattgcaacaaagtttcaataagcctgtagctgctgttaaccgtgatgttgtgataggtgaaactattactgttgctgaattggcgaataaaatggctgtcaaaggttctcaggtcatcaaagccatgatgaaaatgggtgcaatggcaaccattaatcaggtgatcgatcaggaaactgcacagctggttgctgaagaaatgggccataaagttatcctgcgtcgtgagaatgagctggaagaagcgctgatgagcgaccgcgatacaggtgaagctgttgctgaaccgcgtgcgccggttgtgaccatcatgggtcacgttgaccacggtaaaacttctctgctggattatattcgttctacgaaagttgcttctggtgaggcgggtggtattacccagcatatcggtgcttaccatgttgaaactgacagtggcatgattactttcttggataccccagggcatgcggcatttacttcaatgcgtgcacgcggtgcaaaagctaccgacatcgtagtcctggttgttgctgctgatgatggtgtgatgcctcagactatcgaagctattcagcatgcaaaagcagcgagtgtgcctgtagttgttgcggttaacaagatcgacaaaccagaagctgatccggatcgcgtgaagagtgagctttctcagcacggtgttcagcctgaagagtggggtggtgaaactcagtttatcaatgtatccgctaaagcgggtattggtattgatgaattgctggacgcaatcttacttcaagctgaagttcttgaactaaaagcagtccgttctggtatggcaagcggcgttgttatcgaatcattcttggataaaggccgtggcccggttgcgacagtgctggttcaggaaggtactttgaacaaaggtgatatagtactttgtggctttgaatatggacgagttcgtgcaatgcgtgacgagctaggtcgtgaagtgttctccgcggggccatctattccagtggaaatccttggcctatccaacgtacctgcggctggtgatgaagcaactgttgtacgtgatgagaagaaagctcgtgaagttgctctgtatcgtcagggtaaattccgtgaggtcaaactggctcgccagcagaaatctaaactggaaaacatgtttgctaacatggaagaaggtgaagtttctgaattgaatattgttctgaaatctgacgttcagggatcatgtgaagcgatccgcgaagcattggaacaattgtctactgatgaagtgaaagtgaaaatcatcggctctggcgtaggtggtattactgaaactgatgcaacactggctgctgcttctaatgcaattattctgggcttcaatgttcgcgccgatgcttctgcacgccgggttgttgaaaatgaaagtttggatctgcgttattactctgttatctatagcctgattgatgaggttaaacaggcaatgagtggtatgctggcacctgaatataaacagcagatcatgggactagcagaagttcgcgatgtgtttaaatcaccgaaatttggtgcgattgcgggttgtatggtgaccgaaggtactattaaacgtaataatccaattcgcgtgttgcgtgataacgtagtgatttatgaaggtgaattggaatcccttcgccgctttaaagatgacgttaacgaagtccgtaatggcatggaatgtggtatcggtgttaagaactacaacgatgttcgtgttggtgacatgatcgaagtatttgaaattattgaagttaaacgatctatcgcttaattcctaccactggttaatttcattattggggggcttttgccccccaaatgtcaggagatatgacaatggcaagagaattcagccgtactcagcgcgttgcacaggaaatgcaaaaagagattgccatcattttacagcgagaagtgaaagatccccgaattggtatggcaactgtttctggcgttgaagtttctcgtgatttggcttatgccaaagtattcgtcacctttctgaatgtgttgactgaagaacatgattctgatgtggtaaagaatggtattaaggcattgaatgaagcttctggttttattcgctctctgctaggtaaagcaatgcgtttgcgtgtcgtaccggaactgactttctcctacgataattccttggtagaggggatgaggatgtccaatctggttactaatgttgtaaagaatgatgaacagcgccgggcttctacggatcacaaagaggagaagtaatggggcgtcatcgtcgcggtcgtgatatacatggtgtgttgttactggataagccgcaggatatttcttctaatgatgcgttacaaaaagtaaaacgtattttcaacgctagcaaagctggtcacactggcgcgttggatccactggcaaccggtatgctaccggtttgccttggtgaagcgacgaagttttcccagttcttacttgattctgacaagcgttatcgagtgatagctcgtcttggtcagcgaactgacacatcagattcacacgggcaaatcatcagtgaaagggcaatccagctaagtcaggttcaacttgatgcagctttggataaattccgtggtgataccatgcaaattccttccatgtattctgcactgaaatatcagggaaaaccattgtatgagtatgctcgtcagggtattgaggtagaacgcgaagcacgaccaattacagtctatgaattacagtttatccgttgggaaaatgatgaactggaattggaaatacactgttcgaaaggcacttatattcgcactattattgatgacttaggtgaattattaggctgtggtgctcacgttatttatttaagacgtttacaggtagcgaattatccaaatgatcgcatggtgacacttgagcaattatatgaattacaaaagcaggccaaagatcaagaaatacctgtgggcgaattaattgattcattactattaccaatggatagtgcaattgctcatttcccagaggttaatttgattccagtagttgcggcttattttaaacaaggtcaggcggtgcgcagtgccaaatccccagctttagttgaaagtatggtacgtgtgactgaaggtgatgaacggaaattcattggcattgctgttatcaatgatgatgggcttgttgctccccgccgtttagttgtcgaaagccgggattagggtattttgggttatcttgcgcttaacttatttgcagcgtagaatggcgcagttatatgttgggtggctgaattagagatcggcacctgtaattttattttatatgtttttggagttgtaatatgtctctaagtactgaagcaaaagcgcaaattattgctgaatttggtcgtgatgtgaatgacagtggctctagtgaagtacagattgctttgctaactgcacagattaaccacttgcaaggccatttttcagagcacaaaaaagatcaccacagccgtcgtggtctgctgcgcatggtttctcagcgtcgtaaacttctggactatctgaagcgtaaaaatgtaacaagttacactgcgctgattgggcgtcttggcctgcgtcgctaatcaagcaagtttcagtggaaaggggccatatagggccccttttcttctgagaagccatcatagataacagcacaaaaatgctggtggtggtttttgtttaggctcttcagttacagaggttcgcgcggctaatgagagtgcttaagggagtaagacctgtcgttagtcgcgaggatgtggcatggagagatcattcattgttgtctgctgaatataaaaggcaatgttaacgaaaggatattattttgcttaatccgattgttcgtaaatttcaatatggccaacataccgttgctatcgaaacaggtatgatggcacgccaggccacagctgctgtcatggtcaatatggatgacacggctgtatttgtcactgttgttggtcaaaagaaagtaaaagaaggtcaggatttctttcctctgactgttaactatcaggagcgtacttatgctgctggtcgtgttcctggcagtttctttcgtcgtgaaggtcgtccaggtgaaggagaaacgttagtcgctcgtttgattgatcgtcctctgcgtcctctgttcccggacggtttcctgaacgaggtgcagattgtagcaacagttgtttctgttaacccgcaagttaatccagatattgttgcaatgatcggtgcttctgctgtgctggcactatctggtatcccgttcaatggtccaattggtgctgctcgcgttggttatattaatgatcagtatgtgctgaacccaaccagtgatgagctaaaaaatagccgtttagatctggtggtttcaggtactgctggtgctgttctgatggttgagtctgaagcagacattctaactgaagagcaaatgttaggtgcggtagtattcggtcatgaacaacaacaggtggttattgataacattaatgcgttggctgcggaagcaggcaaagaaaaatggaattgggtgccagaatctgttaatcaagcgttgcatgaccgtgtagctggattggcagaagaccgtttgggtgatgcttatcgtatcactgaaaaacaggagcgttatgctcaggttgatgctatcaaagaggaagttacggcagcactgctggaacaggatgaagctttagaggaagctgaaatccatgaaattctgggtagcttagagaaaaaagttgttcgtagccgcgtcttgcgtggtgaaccacgtattgatggtcgtgaaaaagatatggtgcgtgcattggatgtacgtactggtgttctgcctcgaactcatggctctgcgctgtttacccgtggtgaaactcaggctttggttactgcgactttgggtacagaacgtgatgcacagatcattgacgagttgatgggagagcgcacagatcgtttcctactgcactacaacttcccgccatattctgttggtgaaacaggtatgatgggttcaccaaaacgtcgtgaaattggtcatggtcgtttggccaaacgtggtgtggcggcagttatgccaaaagctaacgaattcccatataccgttcgggtcgtttctgaaatcacggaatcaaacggctcgtcttcaatggcatctgtttgtggtgcatctcttgcgttgatggatgcaggtgtgccgattaaagctgctgttgctggtattgcaatgggattagtgaaagaagacgataattttgttgttctgtctgacatcttgggtgatgaagatcatttgggagacatggactttaaagtagcgggtagctgtgaaggtatcagcgcgctgcaaatggacatcaaaattgaaggcattacccgtgaaattatgcaaattgctctgaatcaggcaaaaggtgcgcgtttgcatatcctgagtgtaatggaacaggcaattaatagcccacgtaatgatatttctgaatttgcaccacgtattcacactattaagatcaatcctgataagatcaaagatgttatcggtaaaggtggttcagttatccgtgcactgacagaagaaaccggtaccaccattgaaattgaagatgatggcacagtgaaaattgctgcaactgatggtgaaaaagcaaaacatgccatcagtcgcattgaagaaataactgctgagatcgaagtagctcgcatttacactggtaaagtaacccgtatcgttgattttggcgcgtttgttgctatcggtggtggtaaagaaggtctggtacatatttctcagattgctgataagcgtgttgagaaagtggctgactatttgcaggttggtcaggaagtctcagttaaagttctggaaattgatcgccagggtcgtgttcgtctgagtattaaagaagcgacagtcggagtaattgtcgaggatacaccagtggcaccacaatcagcagaataaatttgatgtatataccctatggatttcaagatgcatcgcgacggtaagggagtgagtcctctggagcatagataactatgtgaccggggtgagcgagtacagccaacaaagaggcaacttgaaagataacgggtataaacggcgtttgtaaaaaagcgccgtttatagactcagggcaggaggcccaataaatgcaatatgggtgatagggcattcttaatcaatgtctgactttcgggagtaggaaatgaatctttttctgcgctggtgttatgctgtagcaatacttcttttggcaggatgcagcagcaaggattggcgtaaaaacgaagtttttgctattccgttacaaccttcattgcaacaagaagtcattctggctcgcatggaacagattcttgcgagtcggtcattgacagaagatgagtacgcgcagcttttatatgagagaggtgtgctgtatgatagtctcgggctgagggctttggcacggaatgatttttctgttgccttatctattcggcctaatattccagagatttttaattatctgggaatttacttcacacaggctagcaattttgatgctgcctatgaagcgtttgattctgtattagagcttgatccaacttacaattacgcgcgtcttaaccgtggcatcgcgttgtattacggtggtcggtataagttagcgcaggatgatctgcaggcgttttatcaagacgatccaaatgatcctttccgttcgttgtggttgtacctggtggaaaaagaattttatcctaaaggagcgatgttgaacttgtcgcaacactacgaaaaagcgaaccgggggcaatggggctggaatatagttgaattctatttaggcaaaattagtgaatatacattgatgaatcgcttgaaagagaatgcaacggataacacttcgctcgctgagcatctcagtgaaactgacttctatttaggtaaacattacctaagtctgggggacaaggatagcgcatctgcgttattcaagctgacggtagctaacaacgcacataactttgttgagcaccgctatgcattgttggaattggcgctgttaggccaggaacaagatgacctatcagaatcggaccagcaatagctgacgaacatttcgagatcgattaacaaagtccatcatcttgaccgatgagggcttatttgttcgtttaattaaataatttgagccagttcacattttaaatgaaaatgaccgaaatttttttcgatgcgttatgtagactggccgccataactaatgaggcaccattacatgaccactgagactgaaatctcttttgctgatctgggtttatcagcacctatcctttctgcgctggaagatcttggctatgaaaagccatctccaattcagcaacaatgtattccccatttattaaatggccgtgacgtactgggtatggcacagacggggagtggtaaaacagcggcattcagtctgcctttactacataatatcaatgctgagttgaaagctccgcagatccttgtgttggcaccgacccgtgaactggcggtacaggtagccgaagcgtgcgcagatttttctaaacatatgcgtaacgtgaatgttgttgcactgtatggtgggcaacgttatgacgttcagttacgcgctttacgtcaagggccacaaattgttgtgggtacaccagggcgtcttctggaccatctgaagcgtggtacgttggatctgtctaacctgagcggtttagttttggatgaagcagacgaaatgctgcgtatgggctttatcgaagatgttgaaaacatcatgagccagattcctgctgaacatcagactgcactgttctctgcaactatgccagaagctatccgtcgcattactcgtcgttttatgaacgatccgcaagaagtgcgtatccaagcgagtgtaacgactcgtcctgacatcagccagagctactggtctgtttacggtatgcgtaaaaatgaagctttggtgcgtttccttgaagctgaggattttgatgctgcgattatttttgtgcgtaccaaaaatgcaacgttggaagtagcagaagcactggagcgtaatggctacaacagtgcggcgctaaacggtgatatgaaccaggcactgcgtgagcagacattggaacgtctgaaagatggccgtttggatattttgattgcaactgatgttgcagcgcgtggcttggatgttgagcgcatcagtctggttgttaactatgacattccaatggatgcggaatcttatgttcaccgtattggccgtactggccgtgcaggtcgtgcaggtcgtgcattgttgtttgtagaaaaccgtgaacgtcgcttgttacgtaacgttgaacgtacaatgaagctgactatcccggaagttgaactgccaaatgctgaattattgagtcagcgtcgtctggaaagatttgccgctaatgtacagcagcaattggaaagtagcgatctagatcagtaccgtactctgttgtctaaactgcaacctgcggaagatctggatatagaaacgctggcggctgcattattgaaaatggcacagggtgagcgcccgttgattctgcctccggacccggttcgtcgtcctcgccgcgaattcaacgaacgtgatgatcgtcgtcgtaatggttttgatgatcgtggcgaacgtagtgatcgtcctcgtcgtgaacgccgtgatgttggtgaaatggagttgtaccgtattgaagtgggccgcgatgatggtgttgaagttcgtcatatcgttggtgcgattgctaatgaaggtgatatcagcagccgttatattggcaacatcaaattgtttgcaacgcattccacgattgaattgccaaaaggcatgccaggtgatttgttatcccactttacccgtacccgcattctgaataagccaatgaatatgcagttaatgggtgatgcacagccatttgagcgccgtgaacgtcgtggtggtgggcgtaacggcaatggtaacggtaatagtagtggtagtggccctcgccgtgatcgtgagaatttcaatggtggtggccgtcgcttcaatggtgaacgccgcggtggagaaggtcgtggtgaaggtcagagccgtagcaatttccgtggtcgtggtgatgatcatggttcatctgctccacgccgtcgttataacaatagtaacgcacagtaatcatctgaactgatatttaaataataaagcggctctttttacaggagccgtttttgttatcagttaattgatttaatatttttataataaaaaagctgttctttatacaaaaggcagcttttgatatgcagaaagagatcagttagttagtacttcaactgaattacttgtactgcggacacgccacagtttcagccattgaataatggaagagaccataatcacaatgccgaggataaccatcacaatggagattgttccgttgaagatattgaaaccttttgttgcggagttgaagtaaacattcttcaccatccagtaagctgcgtagttcacagtaacgtacaggtaagcgagtggtatcaggcaggtcagcatataccagcgtttttcagacagacgtaggataattgttgcaccaatcatcaggccgatggaggccatcagttgattggataccccgaatagtgcccagactgaattgatatcgccggaattcagtaggtagccccacagtaaacaggcaacgatactgcaaccaatggaacccggtaaccagtcgatacgtttcagaggtgcccatatatcgcccaggaaatcttgcagtaggtagcgggcaacacgcgtaccggaatcaactgctgtcaggataaatacggcttcaaacatgacgacgaactggaaaaagtaggatgctagctggctgaaccaagggatgcgggtgaagatatctgccataccaaccgccaatgtgactgcaccaccggtacggccatacagatccaaaccaatttcctgactcagttttggtagatggataacatccatacccaatgtagcaaagacctctggggaggagttaatagcgaaatagtcagcaggatatagggaagtggcagcgatcaacgccatgacaccaacgacacattctgccagcattgcaccgaaacccactggcagaatatcactccacttatcgatctgttttggtgttgtgccagagccgataaatgcatgaaaaccagaaatagcaccacacgcaatggtgatggagataaaaggccacaccggaccagccagtacagggccattgccatgaataaattcagtgactgccgggaactggatctccgggttaataaagatgactcccacaactagcgcgccgaatacgccgattttcataaaactagaaagataaccacggggagtcagtagcatccatactggcagagcggttgcaaaaaatgcatagattggcagtgccaagctgacagttgatgtacgcaggctcagccattcaccgaaggcggatgcttgaatgtaagggccgacaatcacacaagccataatggtaataatacctacccatgttgctccgcgcatattacctgtgaagcgctcccatagaccgacaccgattgcgactggaatggtcataaatactgcaaatgtcccccaagggttacgctctagcgcgtgaacaaccaccatggacagacctgccatagtaatagtaatgatgaacagcattgcaaggccggtgcaccaaccagcaattgggccaagttctgttttggcaacttctgacagggacttaccgctatgtttcattgaggcgaataaaacaaccgtatcatgcacggccccgccgataacacagccgattaataaccataacatacttggcaaataaccgtattgggctgctaacacagggccaaccagcggtcctgcggctgcgattgcggcgaagtggctaccaaaattgacccattttttcgtgggtacataatctttaccgtcttccaataaatgggaaggtgtaacctcgctgtcatctgctttcagtacctttttaacaaagaatacgccgtacaagcggtagcagataaccagaatacacaacgttgcaatgacaaatgtgagagcgtgttgcatttctcttctcctgagagttataaatttttactcgtatcttgtcataggtaaaggaagctataagggagtgtctgagtgagtggttgtatggcgggttaagtggtcagattcagcaggtgagcggtgagtaagaactgactaacctgctaaaaaggtgatgaatatcacggttacttcaatcctaatgcttctttcaatggtttcaaataacggcggctgacaggaatagtttcaccattacgtaggatcagttcggcctgtccgtgatcaccaaatagaatttcgcgcagatgggtcatattgaccaaatattgacgatgatttctcatcaatggtgtgcgggtttccagtgtacggagtgtcagttcagtaaatccttcctgcccattggtacacataacataaactccacttggacgggaggtgacataaagtatttcatccagttgcacaagccagattcggctgtggccggtgcatgggatatatttcagtggttcttctgttttcaggatagaaatatcttgtttttgatgcccttgccgtaatcgttgtaacgttttggttagacgatttttttctagtggttttaataaatagtcaaatgcgtgttcttcaaacgcttgtattgcatattcatcaaatgcggtcagaaaaacaatgtagggacgatgttctggatcgagcataccaaccatttctaatccagtgatacgtggcatttggatatccaaaaatacaacatcgggttttagatgatatatggcaccaatggcttcaacggcattggcgcattcgccaataatttgaatatcatgttcttcttctagcaaacaacgtaggttttctcgtgcgagcggttcgtcatcaacaattaatatattcatattcacacagttttattagcctctttaatgagtggcaagtgtaaaattacgcgggtaaatttttctggctggcaatctatttgcacaccataattttcaccatagcgaagtcgtagtcgtttatctaccagactcattcctaatccatcccccatagaggccgatttataaagaccggcattatcttccacttccagtattaacaattgattctgctgatgagcacgaatagtaaccctaccggtttctaataactgtgatgtgccgtgtttgatcgcattttctactactggttggagagaaaaagcgggtaatttggtgtgaagcagagattccggtagttcaatgtttatttgcagatgctcacggaaacgcgccttctcaatttgtaagtaagcattcacatgctctatttcatcagacagcgtgacaatctcttctgaccgtttcaagtttttacggaaaaaggttgagagatattgtactaattgacttgcttgatcgctgtcctgtcggatcactgcttgcagggtatttaaggcattaaataaaaagtgaggattcacttgcgcatgaagcagcttaatctctgattggagcagtgattgtttgttacgttcatattgtcctgtgaggatttgggcagataacaggctggcaataccttcccctagggggcggttgattgagctgaacagacggtttttggcttcataaagtttgattgcgccaataacttgctgattttctccctgtagcggaataactaaggtggaacccaatttgcagattgggttgattgaacaacggtaaggtatttcattgccatcagcataaaccacttcattattttcaattgctcgacgggattgttccgaagaaataggtgttccaggaaggtgatgatctgaaccgataccaataaatgccaagagtttttctctgtctgtaatagcaactgcgccgatttccagttgttgataaataacttttgctactcgcatactgttattttcattaaatccttttcgcagaataccctccgtatagacagcgattttcagtgcctgagcagaaaatgcactagggtgtgtcccgcaataggctgagatagaataatctatgtggctctgactttcggaaaaaacatgttatggctcgttacgaccttcctgatgaagcatgggagttactgctccccttattgccccctgaacattctcaacgggcgggacatccttatgttgaacaccgccgggttatcaacggcatgttttggatactctgttccggtgccccctggcgggatttacccgaacgttatggttcctggaaaaccgtctataatcgctttaatcggtgggcaaaatcggggctcattaacctcattttcaataagttattgtcaatactggatgaacaaggtttagttgattggtcagctatatctctggatggcagtaacattcgtgcggcacattgtgcggcgggcgccaaaaaaaacatcccgatgtcaccgaaaatcatggcctgggtcgctctcagggtggttatggctccaaaatccatctggcggtcgatggaaaaggctatccactgaatgtggtactcagtgcaggtcaatgtcatgaaagtcaatatgcagtgcgcctgctggatggtctgggtattcagcgtaaaaacggttttatgaaacgtcgttcaaaagcggtgattgctgataaaggttatgccagccacgcattacgtaaccggttaaaaagtcagggaataaaagtgataattccctataaatcaaatgaaaaagcgcggtcagatggacgggttaaattcgaccatgaaacgtatcgaagaagaaatgttgtagaaagatgttttggtcgactcaaagagcatcgtcgcatcgccacccgttatgaaaagacagcaagaaattatatcgctatggtgaaattaggttgtatccgcttatttcttaaggccataatttaattgagggacataacctagtatatttttcaaatatcgctcgccgatcaagtaggatacgtataaacattgctgagccgatactattggtgacgatcataggggctgcaatatttttgaccaatgctaatgcttcactgtatggacgggcgagcagtagtaaaatgcccatctgtattatttcagcgcaaaacgtgacgatagcggctgtccagggattaatcagtcggtttatctgaccacgttttgtcagatagctgtggataatgccaccgattaaaccttcaataatggtcgatatcatgcaactaaaagcggtcatcccaccaagggagtagcggtgcagtccaccggttaatcccaccagcgcaccgacacctggcccacctagaaggccgccaaggaccgctccaatagcacgagtattggcaatggaatcacctacatgcagaccaaaataggttcccataatacagaaaatggaaaaagcgacataacacagcagcttatgaggtaaacgcacagtgacttgtaacagcggaataaatagtggtgttttacttagtagccaggcgataaccaaataaacacacatctgttgtagtaataacaacacaagattaaattcgtacatagactttccgggaggatttgtgaatgttattagtttacagaaacagctaataatattattaaaagtttagtttaagtaggttaatatttgacaagaatcataaaccactacactattatgaagcgttttcctttctgtcagtgattatacgcacaaacatataagaaattttccgtagaacaatgagaagctatagcgttagtttcgggtcgggtaattttggatgtgtaagacatcatgaaaaaaagaacactttttacgattttactggtgattttgcttacagcaatggctgtgttatttcgttcccataaccaatatttgttgttgcaaggtgaagttgatgcaccggaagtgattgtggcatctaaagctaagggacgagtgatcaaacgtcatgttgaacggggagatgatgttaaggcaggacagttgctgattacactcgaaagcccggaattgctggcccaggttgcttcactagaagctgctcgtgatcaagccaaagcgcagttggagcaatctctgcatggaacacgcgaagaaagtattcggaatctggaagcgggtttggcacaagctcaggccgaatatgataatgcggtacgtgaatatgatcgtattcagagcgtagcgtctaaaggttatgtttcacgcaacgatctagataatgcccatagaagtagggatgttgcctatcagaaaatgcagagtgcaaaagcggcattggatgaaggtatgcatggtgacaggattgagcttcgccagaaatatgcagcagctttgcgtcaggctgaacagcaactgattgagttacaaactcagagtcatgatttgcaggtcaaagcacctgtcgcgggggaagttgggccgattccggcagaagttggtgagttatttaatgctaatagtcctttggtgacattaatccgtgtaccagaagcttattttatttataacctgcgggaagacattctggcaaaggtgcaaaaaggggataaagtcaaacttcgtcttcctgcgctaggtgacaaagagatcgaagccgaaattcgttatatctctccgatgggtaattatgcgactaaacgtgcaactcgtgccaccggtgatttcgatttaagaacctttgaagtgcgcttgtatcctttacaggctattgaaggtttacgtcctggtatgagtgccttgtggcgttgggatgagtaggtgactgatgcggagcaaggttgcatggcgtggtttcgaacgcgcttttagccaagaaatccgggctgtgattcgtagtccggtttttcactggttaggctggttatttcctttgatgctatttgtgctgatcagcgctaatttttcagaagggacattactcaatctgccagtatcggtggttgataatgatcagagcccgctgtcacgtcatctaatacgtaacttggacgcggcttctcatgcgcagattaaatcttatgatggcggattgcaggaatctcttgaacggcttggcagtgctaaggattactccttactttatatcccgcatgattttgaagctaatgcactcaaaggagaccagccaaccgtgcgtatgtattacaacgcgttattttatggtgccggaagttattctattcaagatctcagtggattaatggcagagattaatgcgaagtaccgttctatattggcgacagaaatgggtcatcagttacctccattagccaatgttacgctcgtttatgacagcctttttaatgccagcggtagttatatctattatcagcagtttgcggccacaatccatttgttacagctttttgttgtaacctgcacgatttatagcatggcacgcagcaagacactgatgacaatgaaaccgtttactttcgctctgttgggaaaattggcaccttataccctgttttttactctgttgttgattgtcgaattggctgctctgattggtgtatttgatgcaaaagtgaatggtaacccaatatatatggtgatagtgggtttcttctacgtcattgccgctcaaagtattggcctgttgctgtttactttcactaatagtgcactgacggcttacagtttaatcggagtgctagtcagtattgcgacgactttttcaggtatgtcggtgccagaattatcaatgatattgccagcgcggataattgccaatattgagcctttaacacatgctttaaatgcgatgtttgatatttttttgcgtgaggtttctttactgggtattttatctgtttgtgctttattacttatttatccagtcgtttgctttctgttagtacgaaaccggttatttaaacggcttggcttgccacagggtaatgaataatgcagatgtattggcaaacttttcgccgggtattaatgggaatgttggaaaagcccatgtggatgttgatgctggtttccttgtgtatgatgagtttggtatatgtccggccaacagtatgggatctaccggttgctgtgatcgaccaggatcacagctctgctagtcgagctttgatacgccagcttaattctacggctaaaattgctgtccatagctatgataatttggctgatgctcgtcacgatctactgctacgtgaaatctttgcgattattattatccctgcggacttggagaaaaatatccttaatggaaaaaatatcaccttgccgatttatggcgatgcaaccagtcgtcttgccaatggacaaattcagcaagagttgacctctgctcaccggcaattgctaaacgaatataacagcaaattattattaaaatatggttttagccctgagcagacagaattattactgatgccgattcgtagtgaaactattggattatttaaccctggtgtcagttttgccgcaattgtttttcccggtttgttggtgatgttattacaacactcgttattgatatcttgtgtacgggtcagtattacaatacgtggtacaccgaaaggtaaacccccattacctgtctatttgggagcgttgtcggcgttattaccgatttggctttttctctccatcatcttttttgtactttggccgtgggtattgggataccggcaggaggcgtctattccgttgttattaatgctgacgttcctatttatgttggcagtactcggattagggaaattggtaacggaatgtatgcgaagtgtagaaatgatctatttaacgatcgccttgcttaccacgcctgtgttctatatttccggcacagtctggccggtgcaggcaatgcctgattgggtgagagcaatttcttctgctttaccgtctacttggggcaccaaaagcgattgcccggtgttaaccagatgggattgcccgtacagattgtatttgggagatatcgctatgatgctggttcttggtgtgatttatactctgctaggaattttgataggtatggtgcgtaatggtgaattcaggaaaataacctattatttgcgtagggtgtttaagtgatgatttatgtttctatatagtctaagtcaattctatcaatgtatcgctgaattgtgttttgtcgatggtttctttcttttaggttgcgaggttacattttctaggtttttataaatatttcaccattaacttattgatttaatcccttctgagataagtatctattcattatcttttttcacaagggaagcaggtttacattttacgatgctttgtgaagaaaacagataaaacaccaccatctgaaatagagttagcactgaaacgattggaggatatgacatatggctaaagtaactcctatctcacattcagaagtgagaaagcgacttcttaatacaccggaagctatacaagcctatgttgaggctacagaagaatatgagctgctggaacaactcactgagtggcgggaaaaggcgggtctaaagaaaatagatatagctaaacggatgggaattaatccgtctgcggttacccgtattgagaagaatgtaacgaaagctagttggcacacacttaaacgttatgctgctgcatgtggtgttgagttatctttaactgcgaagtaatactacagaatgtgtgttctgttggtggtgatacttaagatctacttgttctaagaggcttccgttaaaggaagccattttcctgcaatatttctatctgatttcctcgcttaaaatctcgtttttttcagcgaaaataaaaacaatatatttttaacaacgaaggcgctgattaaaaaacagaggaaaacgaaaaatgcatcgatgtaagtcagattaagataaataaaataggctattgtgacgccaatagcggaatcaagttgatcgaataaaataaacagtcgcttattttgttccgggtgttgccccggtggtgcgccgagtctcctttttagccaagagtttggtaattcgaaaaggacatagcctaagcccgccagaaaaccggcaaataagcaggaggaaatcgtctgcggaataaccgtgtcctgtgttccggtgctgggaactaaccataatagtgaaaatagcgcggtaataatgggtacaacaataaaaccgcgccaggtcttgttgcgaccaaaataacgttgatgtactggaatagcccagcgggaaaaatagtttttcgtcacaatcaccatatgtaaacaaccaccaaggatgacggggatcattaaaatccatccgtgataaaaactattgagcataaagactccagaaatgaagaccagtaaataagacgaaccctgcaagtgttgtactgataatagtattgagactcttgaatttataaaacgggcggtcccatagcatggcgatactgaatgtaaggagcgctaatgtcagtaagagatggcttaaccacggctcggctaccaagcttaccaaagcgtaaccactgataataaataagctccagaatacgggcataccaagataggagagctggttttcattctgaatattcccaacttcattaaatacggataatcgcagacagccgctaatgatcattaaaatgataaacagggaataccaagattgataaccggaaaggtagaggataatggccggagagatcaagtaaataagttgatccataaatccatcaagatagcggccaaacgggcggacaatatttaaatttctggctagaataccatcaagtgcgtcgccaagcatggcaagatacaaaaatgcaatcgctaagtaatgccaatgttgtaacgcggcagccacggcaagagcgctaaataccgccccaacgatagtaatatagtctgctctgtttagatgaatgatgaaatgattattattcataatttttccttgtatggaacggaggacaattggcctttcctaagcatattgatcagcgcaatgcggtttattttgctgttgtggcgaatgtcaacagggataggattagcacaataaatacgagtaaccagcgtgagatccagctcgtctaaaatagcgggtaaatctgtcggtagtgtagcgctttccagtatcagggcggctccgcctaaaggatgtaacacgaatgcgctttgagtgaccccaggcagttcattgatccttttttccagtacgtagggatggatgatacgaccatcatctaacaccactttgtcttttacccgcccaagtagccagagctgtcctgtcgtgtccagatagccgacgtcaccggtacagtgccaaatacctccttgtttacgtgggagtttgttttctttcgttgcttgagggttatcaatatagtctttgagcacatggggcccggcaactaagatttcaccgacattaccggtggcgagtggagtaatttgttgggggttagccgttatttcccggatacatatttctgcttgtgtaacgggttttccgactagataaccatcatgagttgcccagtggtttaattgagtcgtcatttcaacggtactgatcggttcaacctcggtggaaccatagactactaaatgccgagcatgtggaaagactgtcaggcagttttcaagcagagccttattggcaggcgcaccacctacgatgactgttcgcacgttagggaatgacaaccctttgttcttagcataatcggtgattttgctcatataggcgggagcgccgctgaggcatgtaataccttcgccttgcacttgcttgacgatctgctgtggatcgacggttgcgggatgggaaaagtcaaaatcaggcaaaatactgctgttgccgcagcataatgagtgcagcaccataacggggaaactgtgtagatctatctcattcttcccctcggcaaaaagtgctgttatggcataaagttgtgctagtaagctgtcatgagtgcggtttgcgcctttgggggtgccggtagaacccgaggtaaaggtaattaacccagttgtatccggcggtaaatcccggcagataaagctactcaatggtaaatgttgattgggtgtttctagtactttcatgcccaagatacgttgcccgatgacaaaacgtcgcagtcgccagagttcagggagcagaaaccagaattttcctaacgtaggttgagtgatcaccgccgataattgactgtggcgcagtatctccctcagttgctttttggcaagcccgcgttcaagcataacgggaactagccctagccccagaatggcaataagcaatggataaagtactaagcctggttggataatcactaacaagcgatcgccagcgacgaacccagcttgagttaactgatgctggaaatgggaggcatgagaaaaaaacgtctgaaagcttaaaccgctactatgatcccgtgaatgtggcgcttgcagggctaaatgctcaggatatttttgggctgcatcgacaattggctgacaaatatttgtcatgcgatcctcctgtaataaagcgcatattgatgcttggtggcagcaggtgtattgaaaagccgtttggcagttttgagcgatgtattatcttcacgcatcatggcccctcctagacgagggtgaatacgtctggcactctgttcaaatgagtggtacagcatgttgtacagccggctgccccggtattgcggtgcgactgccacggttttcagcaacccaatggtgggctgaccgttttgcaggactgacagactcaaaattatcccggcaatttcgccactaggagttttagccagaaatgacgcagggtaatggcaaaaaggtttgataaactcctcaccgcaatgctgctgaaatgcgggccaagatggcgtggcataagcgaaattctcaccaaacaccgagtcgataaaagaatagagtttaacctgttcttgcatccataattctggcgttagcggcaataatgtcgcttgaacctcaggaagtctttgcgcacgttgatgagcctgctgaaagttgtcttctgttgcttgggtatcgtcgaatattgaggtatagcgatagcggatatcaaatcctaactcttttaacaaaagggggtagtaaggagggttataaggctcatgctcaaagggaggcacatcaaaatgatcaagtcgaacgcggtagtgtccgaaagttgaaaaattaatcggcccgtagagattgcacgcaccattttccttggcccattgttctagagcgctaaacaacatggtgttgcttgctatgtcattatcagtttcccaaaagccgaaaaatgcggcagattggccatcaacgctatgaggtactaaaaagccgacaagacgggctttccctggaatgcagccaatccaggctttactgtgatcaaaccaagaattcttcgggctaaactgctgttgtactttttcccggtcttcaccaggccatagcggccaatcgcgataaatactgggtggaaggtcaagaaaaccttcaggtagtggattggccggagaccattctcccatgaaaatattaggcatgttcactccttgatgtcagctcttctacagtggtgtcgtgcaagcggacaacagtcccagttgctccatccatgcgtacccgatcgccatcttttaaaatttgtgtgacggcgggaatgccgacaatggcggggatccccagttcacgagcaacaacggcggaatgtgaaagtgtggaaccgcgctcaatgagtaatccgcctgctgtagggaataatggtgcccaaccgggatcggtacgtacggtacacaggatttgccctgctagtgacatttcatcctgtgggtttttaattaatcggatagttgtttcaacttgccctgggtagcaacctataccctgtagcatgctgctatcggttggggcttgttgttcctgatagggatagctgtaatcttgctgttgatacagtgagcctctaatgaaaaagtgatgagctggttcatcctctgtttcgtagttggcatattcttgcttgcgcatagcaactaaaggctcaagttgggtctgtattgctgttccttcgtagccgctgtagatctcctctaacgtgagataaaaaatatcgcggggttcagcgagtattccttctaatgcatatgcctgaccaagttgtaggaagatatctcgatacagcccaaacatacgagttcgggtaaaacgcatattttcccggtgacgtatcgcttggcgtaatttctgcaaattctttttaaaggtgttcatccgcttggagccaagtcgctgctgtatttgctgaaatgcggtattttcggcctgagtacgcaactttctttcccggctggataacgtctctggtgtgagggtatcgatagcaaggtagttttttagtatcagaaataaaaaactgggatcttgttttagtgtgatggtttccagcttcaattcacccatcgtgcgatcgccatattttttaatataatcaatgcactgctggtggaatgattcatcgagtgggcgtacttgggtcagcagggtacgcgcatcaccgagggtcaacaggttgcacaactcagggtgctggcgtgcatattggcacatctttaacagcactttggtcggttgggtactttcaatatcttcatctccggagaggagatcgcctaatagtgcagatgaattctcaataccggcagcaaccagccctcgatgtacccggccattaaacatcatcacgtaaaagtcgttcaggatcggcgtcgtccagcgtcgtagcagatgttcatccagatattttaatttttcgatcagttggccactgttgcaagtatgcaactctgattgttttatggcggcggcatgccatttaaactgctctaagaatagttctacccgttgatccatagtcctaaaggcatatagcaagcgcaggagtgcccaccccatttttggcaatttctttattttatcgcccagtgaaagtgttttatcctcaataaaatcaaccggatcttccagccccatcattctttccatatcttttttattggtttggaaagagggaagtaatagtagtcctttgtaccaattgttgatgttgtaatagatcctacctttaactaagccgagcatattttccagcatggaacgatgctgattaacttgtttatctgagcaacctaaagcacgtattgtctgttcataaacggtggcataacctgcccgggcaaaagagaaagtcagtggtgttgttattccacaataagattcctgaatattggaattatcgaaaataatatgatgttcgcttttatcatccagacgtggcaatcgggttattggccgggtctgtagaataaagatttggtggttttgaatcgtccattcgatatcttgtggacacccccgtgctgccgcaatttctttgccaatatctcgtagtgcatagattttattatcgagtaaggtcggttccgactgtttttctttcgcgacgggtatggttactgtaccgctgccgttggtagtattgaaaacagttgctgtctctttttgtgtgatatgacgttcgatctcaggtgaggtgagatgaactgaaaattcatcggtatcgcattcgccggaaactacaccttctccggtgccccaggcggatgagattaggcaatgttgcctgctacccgtaacagggtgtgcagtaaacatgacaccagaaacttcaccggcaaccatgttctgaatgatgacagcactactgatattgcccatcggtagccgtttgtgtaggcgatattgtaatgcacgcgtgttaaaagctgaggccatcacggcacgtaagctattggcaagcgctgatttaccccgctgaaataggtagctgtccatctgcccggcgaaagaagcattggcggcatcttcaccaatggctgatgagcgaacagcgaaaaattcatctgggtgattctctgacaagagagctaattcttcttctaatttagcaggcaatggaatcgactgtagccactgacgcaatggcgcagcaatagcatcgagtttttcctggctaatatcatgtggtacggtagccaactgctctatgatgttgcttgcaaacgtatcgttgatgagtaggttattaagcacctcgctgctgatgacccaataattaggtacaggaaaaccgttttgcgtaagccataataaattagccgcttttccacctaaggaatgttccgccaattcaatagcgttatcttgcgtgtagagatatttcatattgttccaccaatgcagcaatagtatatcttgcttacatcatgctcttatttgcacgtaatatttttggcgtgaatagatcaataagatatgaatatattacaagctattgctgcacccttattttagaggaagagtcaattaaatagtttatttggttgattattaattccgtgttaatgaaataagccagcggagcgttttcattgtgcgctccataaatgggtagccaacaacattatgtgccatcatataaaacggaattcttctcatccataaatcatgcagcgctaattcatagccacgacgccaaattatggggtcgagggagagccccgatttttgctcaagttcaacccggtgtagttcaatataataagccaccttatctgcatcactttgtgggtctaagctaaaggccagaagttctgccaggtcgcgctgggggagatgcaaagtagacaattcccaatcccaagcacataaatgcaagccggtttcctgttgccggaaggcaatattgcgtgggttgaaatcaccgtggatcaatgtcctgggcatctgttcgatctctttccaccaagtggcggcattatccacccagtgctggaaatcttcatgttgttcggcagtgaacaactcaggaaacgtttggtggataaaattgcccagtttttgccacaggggattcatctgtgaaactgtatcggcattcggaatttgcagttgcgagaatttccacgtgagctcttcttcccgtcccaaccagatagagtgaatatcggctactccccggatggcggcttcaaggtggtgctgctcccaaggtgtttccaggttaatattgttcattaacaccatatcgtggagcaattcttcaatcagggcataagttccagttgcttcgttttcaatcacaccatagataacgggaatatagcgcatcaaccgtggatcttgctgattcataatagccagctcacggctatggctttggttaaattcaagctgatgttcaaaatcctggaaaacggcaaacaactcagaagagcagtgtttagcgatatccagtaccatattcacgacctcactccccagaggcttcaatttcagcatcacggataaattgttctgtgcggatgtcgtcatagaaaaaggaaataagccaattaaacgttccgcataatttgaacttagatgtgtcagcatgctgtacccatcatcacccgaaaatttaggtttgattgtcgttaaatgggccccttgtaacacagggttaaaatttgcttgctggaagaagggcaaatcaagctcttgtggggtgtgcgcagtgatattgttagtggtgacagggcgatagcggccaagtttttcatgtgattgcgcaaattcatccgcagcaaccgctgacagtgttgaaatatcaagagccaggcaataactagcgatgatttcggccagacgagcggtgccgttttcatcagtgcagcccaacatgttcaggcattcacgttggtgtggtaaattggttccgccaccaatggtaccgacaattagagagggcagtgtgatactgcaatagacacggttatcggcagtcaatgtcatgtgtaaatgcgcgacggaagattcatgtacacaggcgatgtcctgccctaaggcggtaaacatcccggcgataacattcgcggcattaatatttatgccgaccatccctgaggcgatagcgccctcgcagacatggtgataagccgtgacgagttgctgtggagtgacccgtaatatttgctgacaggattcagcttctagataaacttcagctactacacgtgttccacgtccttcgatgaaagattgataagagacttttttatcgcccgaagtattaccatcgattataaagtgacgcagtggtataaacgccattttggctaactgttgttggatccactgacatgcataccaggtgcagatggtggtcatattttgacctgccgctgcggctgtattatagatgaattgcagatggacgctgcgcccgatgatttgtggctttacttccaccaattgtgcatgcttagaatggcgtccaatttcataccgtagttcgctgatatgttcgttgatccaatcactgaacataatgctgtgcgaaacgctgcaaaattcaaaacgaggggcacgtatcattcgttgtccaagtacacgcgcagttgtaccccctgattgcataatggctgaggagccacgggatattgacgcaattaaagcgccttctgtggtggcaagtggcgcataatataccccttgagcatattgcccctttatcaagatagggccagcaattcccacagggatttctattgaaccgataaacccttcaatggtttttgttaattgcgttgcatccagatgggtatctgctacatgtttcaatgtatgtccggtatgttttgctaaataatccagacgtttttgccgggctttctctgtataagtatagaggtggcggcgtggcagtaattctacttgggttgcttcttggtgtttaaggctaaatgtatcgtgtgataattctagaatagaacttcgcgcacagttttctgtgtgtgcagtggtattatctgaaacatcacatacatatgattggagatttttttgcaacataactgtatttcctttaatgcctaagcaaacccaagctttattaaaatgctagcagtgcaaactgaataacctagcaccatgaatattcccacgatagcttcatcgcgtttgcgattttggatggtagggttatggaggaatttgcctaattgccatagacacaatgcataacaaacgaccaaggtaattaacgcccataacgctataccatcagtggtgatacggattagccaaatctgtaatatcagcattacagtgagcaatgccgcgataatagcgacagctccttttctgccgaaaatagatgaataggtcggtatttcaagacgttcttcatctgggcctttacacttgcgtgtaatttcaaaactgaatccagagaaaaagcacaatcccatcaaaacccatattgggaaattgagtgtgaggttaggactggcgatattgcttaaccaccagataatgagtggcattaccagcatatgggaaatggcataccaagtaaggtgttgatttagccattcaccgataaagaattctttccccataagacaggtccagataaagaccaacagccaggcaaaagtaactgagccaattccccgatctagaaatagacttccacctaattgtaatgcgatacaacagataccaagtacccgtagatttttcagcgtaataataccgcgctgtaaaattcgctgtggatgatgttcacaatccagttggtaatctttatgctcatcgaatatccgtaatagtaaaaaataggagaaggacatcaggcaaccgagcaggatctcccatgacaaaatgggcttttcccctattgaataaaaagctacggaatagctaatgatataaaagataaagaaaagcggcgcattttgtagcgggaaacgctcatccatccatagctttatcctcttaccaatgaattttgaataaatatcttggctttccatacactgttcctatttattgtataaggattaaactatatacatttgtgacaattcagcccaaggataatcaataaagaagcaaatcttaataaatcctatgcgtactttttcgcattatctctctcaataatttaagaaatacatatggactgatgccatacattaagccaaaaatttgcaatcggctataatcagtatgtgtaaattttaatttcagcatgcaacttatgtttacatttttttctataactgtatgtttatgagatgcttttgtttccatttggattaaagaatcatgggctttaatatcatatttcagacagatatagataagttcttcttcgttatcgacgacaactgtgtcacgtaaataaattttttgtggggcaaagttactccatataaaataccggaataaagtaataaatgattagtaattgtaattgaattagtggtgggatgttttgatttagcgcagtttatagtcagatattaccctaataattaaaaggtaaaatttacagttaggtctgtattggattcttgatgtaggatcgggcgaatgccgatatattttggctaaatagctacgttactttatcaagtaaggagtctgagctgtgttaggaaaaatccacaatcttactctgcactggtttattactgttcgtgatagtcatttagttatcaaccagtataagcaggaagaggttagtttcagcgacgaagccaattatctgattctaatggttattcgtacagaattagggttgtgtgttaaaaatttggtagatacgttagcaaaaaagttcatgcttgctgttctttgtgcgggtttggtcccaattggcttaagtgtataaaagcgagtttgccggagggcgcggaacagcacgatcttgcgcaattatcatgttgatcagagtagaaattccagtagatgcagcgggaatagatcaattattacggaaatcttttgataccccggcagaagcggaattggtccaacaattgcgggaagatggattattgacgttaggtgtggttgctacagatgacgaaggccaggtaatcggttatgtggcttttagtccggtggatattaatggtgaagatcaccaatgggttggtttggcaccgttagcggttgctgaagaatatcgtcggcaggggattggtgaaaagctggtgtatgaaggtttggatagcctgaatgaatttggctatggcgtcgtcgttgttttgggtgatccacactactattgccggtttggttttacgcttgccagtgagcatcagttgcattgccagtggtcaacgtgtgaatcttattttcaggtatatgaattagctgatagttccttggctgaccataaggggttggttacttactcctcacactttgaccgtttctaattgatgctaaatattctgctatacagacgggctggcaaataaccagcctctctttttgctgtttacttaattgttttacttgatattccagttgtgaggcattggagcggtctccggcataactactgaaaactagctgtaacggccctttccccctcagtgatttggctcctttcccgttttcatgttgtgcaaaacggcggtgaatatttgttgttatcccggtataaagcatgcctgattttgttttcagtaagtaaagaacccattgattttcagccatataatttttttctgaattttctatttttgatatttatattttactcgaacgtttttctatatcatttttctgaataatttagtttaagttattacaatataacagttttataaaacctgttacatatcaatttgctatacgtcgcattatttattcaaaaaaattgaaataaaatagcaataattgctaatttttattccggcctttagagcatactatgatccacatcacagagagtaactcattccactaaaaattgatcaaggatcatagtatgaaaaacgtaaaatatatcgctgttgctttagctttaagtgctatctcttttggtagtatagcggcaacagaagttcaaacttcttcttcccctaaaattggtgtagtttctgtaacgggggctgatactttggaaaccctaagtgccgaattatccaaaaaagctgacaaagcaggtgcatcttctttccgtattatctctgccagcggtaagaatcaattatcaggtgttgctgagatctataactaatttatagtagagcatactgaaccctgtccctgtcaggagatatcagaacacgccgtaggatgatgtttatcccggcgtggttctgggcttcgaggcagatacaatcctgctattggagagagagtgaacgcgactgaaaactttcagattatccacagatacctcgcaagacagcatgtcctaacgctttgtacagcaaccggtgatgatgtttggtgcgcaaattgtttctatgttttcaatgccgatgaaatagccttttggtttatgactgaacttcatactcgccacggtgaaatgatgcaggtaaatccacaagttgcaggtaccattgccgggcagattcgtcatattgcacagataaaaggtattcagttcaaaggagaagtcattcgtcttgagggtgaaaaagataaagtggccagagcacgttattgccgccgttttcctgtgtcaattgctgttaaaacacctatttggcaactgaatctcaatgaaataaagatgactgataatacgcttggatttggtaaaaaaatctgctggcagcgataaaattatcttaatctataaataatctggttgtagctaccacgccatagtaaaccgggctcataaagctcttgtataaacttgccatccactagcacattaatatagctgacaatttcctgttgaatttcgctaagttcctttagccgataacctgtccaaagccaaatgtccttgtctgggcactctgttttaacccgttttaccaattgcaggattgcggatgtgttgtgtggatgtaggggatctccgccagataaagatagcccttgtcgtttaatacgtttgtcctgtaaatcaaaaattacacggtcttccatttcctgcgtaaatggttggccggagttcacccgccaggtacttttgttataacaaccggggcattgatgttcgcaccccgcgacaaatagtgtgcagcgggttccggggccgttgaccacatcaacagagtagtattggtggtaattcacgttatcagcctgccttaaattagcctaattgcccatttgtcagatgctttactctgcgtttcacctcttcttgtttacctgcattgaatgggcgggcatcagggcttcccagataaccacagacgcggcggatgactgatactctggaaggttcatgattgccacagcgtgggcaggtaaaccctttactggtacaggagaattcaccggtgaatccacattcatagcattcgtcgatgggggtattggtaccgtaataagggacacgtgagtagctgtaatcccagacatcttccagtgcttttagattatgttgcagattaggatattcgccgtaacagataaagccaccatttgttagtgatggataaggcgcttcaaaatccaatttgtcataaggattgaccttcttttcaacgtcaagatggaaactgttggtgtaataacctttgtctgtcactccttcaatcacgccaaactcagcggtgtcaaggcggcagaaacggtcacatagattttcacttggtgtgctgtacaaactgaaaccataacctgtctcttttttccattgatcagtggcttttcgcagatgatcaacaattgagagtgcttttacacgtaattgttgatcatcaaatagatgaacttgattgccatacaatgcattaatggtctcatgaataccaatatagcctagggagatagaggcccggccatgcttaaagatttcagcgatattatcatcggctttcaagcgaaccccgcaggcaccttccatataaaggatgggtgcaactcgtgctttgacactttccaagcgggtaatacgggtcattagtgcttgctttgccagtgccagacgtttgtttagtaattgccagaaatgtttttcatctcctttggcttcgatagctatccgaggcaggttcaaactgataacccctaagttattgcgtccttcatgaatttgttcccccctttcctcataaacaccgaggaaactgcgacaacccattggggttttaaaggagcctgtgaccttaaccacttgatcatagttaagaatatctgggtacatgcgcttactggcacatttgagagccagttgcttgatatcatagttaggatcaccgagtttgtgattcaggccatcacggatagcaaataccagtttggggaacaccgctgttttgtggttcttacccaaaccagcaatgcggttacgcagaatagattgttggattagacgggattcttttgatgtacccagaccaaagccaaaagtgacaaaaggagtctgcccattggcggtatgcagtgtattaacttcatattccagtgattgaaaagcgtcataacactctttttctgttcgtacttcggcataagattttttatcagtgatatcccactcttcggcaatcgccaaatgtttttcatagctggctttaacgaagggggccaatgcttcatctatacgattgatggtggtaccgccataaatatggctggcaacctgagcgataatttgagccgttaccgccgttgcggttgaaatggattttggtggttctatttcagcattacccattttgaacccatgagttagcatgcctttcagatcgatcaacatacaattaaacattgggaaaaagggggaataatcgagatcatgatagtggatttcgcctttttcgtgggctaataccacattacgcggcagaatatattgtttggcataatttttagcaacaatcccggccagcagatcccgttgagttggaatcactttgctgtctttattggcgttctcattgagtagggaaacgttactctgttcaactaagccacggatttcttgattaagtcggctgtgtaattctcggacagtatccctatcgtgacgatattgaatatagcggtggacaaggtgatcatgcttgtttgctatcaattgatgttctactgcgttctgaatatcttgtacatcaacttgcctgtagtcagccattgattgcgttactgcggatgcaacttggatacaatactcatcatccgtcatgccaacggcagaagtggcccgttttacggcatctctgatacgtgtttcatcaaatggtacctggcgaccatcccgttttatcacaacagttttcacaatatgactccttgagaatgttatccgaagggcaaactattctcgttttgatatccagtttgaagatagatgttgctatatatagtcttatttttatatttaaacacaatatatagtaattttgagtgggataatcacgatctcatttgatctgaaacaaagaatggagacttaatattttaaggttcagtgaaaagtacaaccccttggtcagtaactaaccaaggggttgtagaaaacagggcagggattatttacgaatcgcgatagcttcgatttcgattttaacgtcttttggcagacgggctacttcaacacaagaacgggctgggaaagatgcattgtgttctttgaagaatgcttcataagttgcgttaacggtaccgaagtcattcaggtctttaacgaagacagttgttttaacaatgtcacctacagtgagacctgctctttcaacgatagctttaacattttccagtgattgacgagcttgagcggcgatatcttctgcgacatcacctgtttctggattgactgggatctggccggaagtgatgaccatattgcctagatcaaccccctgaacatatggaccaattgccgctggggctttattggtattaatctcgtatgacataggttctcctgttaatgtgataactgaataaatatttcatcaagggtactattatagtgcccgcttctgcctcagcaactgacatataccctatggatttcaagatgcatcgcgacggcaagggagcgagtccccgggagcatagcgaactatgtgaccggggtgagcgagtgcagccaacaaagaggcaacttgaaagataacgggtatagatcgttcaatcgttgagaatcaccacattgcggtcaaattctttctcgcagtatttgcaggttagcaccacatcttccactgtcactttgactcgaaaactgctttctacgggttcattgtggctgatgcagttgctgttagggcagactaatacgttatcgatacacttaggcaagttaatgggaagtttcttcacaacttcatagttttcaatacagttcaccgtagcattcggtgcatacatagcaagttggttagcttgctgctctgtcaggaatgtattttcgattttgatgagatcttttttacctagtcgattggaaggtaaattcaggccgatggtaatgcgttgatcggtttcagttagcttaaacagagagagtagtttgaagccgacctgagccgggatatggtcaatcaccgtaccgcatctaatagcttcgacttgtagtttatgatcttgggtcatagtgttttgtatgaatacattttagtgacaactttctgtattcatcctccagaatattgttaagaatcgacacgtcttccattttaggcggtggtacctcgtttatccagataaagcgccggtgattcagtactacaaattgttcccaatctcctcctgacaggacaatctaccaaggaatatcagaaagccatatcaccgcagagagtgtgagttagcacagaatagtgaaatttcattttgaagtacagaaaggcagctgtatgtcccatgaaagccggctagttggtcgagaaatacttattttaaattaggaattaggtgcggaatgacggttaataattaaaaatattaattttctgtaaatatattaaaagttaataataaattggcataattaataaaatgaaaaataaatacttgaaattaaaaaagcaaattcatataaaaacagtattaattttttttgaaatgatttaaaatgaaggcatgttttttaatatataaaaaaatctacttatgaacacgccattttctataaatgggtgctatttcaaaaagaaaatcgatttacccatgatattatttttaaatggagagcatggtgagttcagtatttaatcttataatgtggatccaagggagattaaagaatgctctaattgagttatataaaattcaagagtttttaaaaagtactaagaaacgtatctaaggctcatggtatcagtcatgaaaatattcattaccgatgaacaaaaagccgaacttgaacacttccatcacacctgccgtgataagagggaatgtgatcgtatcaaagcgatcctgctggcctctgagggctggagttcagtgatgatcgctcaggctctgcgtcttcatgaaacgaccgttaattgtcatatcagcgattaccttaatcaccgcaaactcaagcccgacaatggcgattctcagggctatctcagcgaaacacagactcaggaacttatcgcttatctgaccgcgaatcttctgcccaccacacaggctgttatccgtcttgtcgaagcgtggtgggatatcaattacaccgttcccggcatgagcaccacacaatggatttagttataaaaaaccgaccggcgtaccacacaagttcaatgcggaacagcaacgggcctttatggaataagtgggtatatatgaataataaatacgaaacggttattgtcttaggggctggcccaataggtctattttctgcttttaaaatattagaaaataattttgcggaaaatgtattgatcttagataagcgatttatttctgcttacacctttaaaggctgggcggaaagatcaatggttgtacaatttcatcgaaagcttttttctctctcttatcttccaaaaatagtgaaaaagtgtccttatggagtacttaaagaagattatgaagataatcggaagaagtatagtgatttagatcacatgagtataaaaaacatacaatccactattctagaaaatatggaaaaattttataaaaatcgttttttcatggtaggattaaaagatatgtcctttgacaaggatattgtttcaatttctatttttacagagcactttgatgataatagtattttaaaaaatttaaacccggaattaattgtagatgcaactggataccattccatcttaatgaataaaacaataggcattcaattcgaaagtgagcatgaatacggttcagctctaaaaatgacctggccagaacatgaaatgtctcatgttgaaaataaaaaaactgaatttcatgactgtcatgaaaatacaatcttttttagcgaaggaaactcatctgtagctgaattctcatatccgtctgataaatttagtgaattttttgaagaatgtgggtattctataaatcacaggagtaccaaattaccatttctaaaatttgatacaacacctttttcaataaaattaccaccattcttagaaaaaataacatctcttaagaaagatcattttctatataaaagagcagttgacttattcaatatgattagaagaaataaactttctggtattaatggattagaattcattaatcacttgcaaggtttcaattggtcagaggcagacagtcttgctttagtcgttcgtaggataataaataaaagagtaactatagaaaacacatatgctaatcttgaagaaaactttttagatttaatgaaaattagagttatttttataccatctagagccgagagatggttatcaacaaataaagtaacaacaaaaattaatcttatcttttcgaatgataataattcattacataatcaaatttcttcagtaacagcttgcgctgtcggagatagtttagctagcacagactttagacatggtcttggtataaatcgaggatttcacactgcaactaggttatttcaagataaaacagatccagaattagtaaggcttgaattgatacaaaatagctattctatgctagatgttataaatgataattcaatatttagtagagctatttcgtgcagagattggcttatcctatagtaaaaatctgccttcatagaaggtggaattgatttcgctacagaagggtgtaatcaaatctctaaaatcaagacgctgcaacttctgctgcgtggcgatatttccaaatgtgttctagataaaaatttttaaaatcacggtaatgtgacagaaaaaggatcaaaatggtcatgatttcactgggatacatgtgatcttgtcggaggcgtaaacgatgcccgctatcgagataaaattgttctcatcgagagatgaaaaaatggaaaaaaatcatcgacatcacagaaaatttcaactaagttgtccatagcccattccacctcggagctgtttttggtgtgtaccaaaactttgctcttggaacaggtttttcgtcaatttcttatccagaattcgggttaatgtaaggtgcgtgtatgtatatagatatattaattataatatctgcatttgctggaagtatactatctgggctttttggtgggggagcgggtttgatttttactcctacaatttatttatttttatcttatgctaacccaaattctagttatatcatgcaaactagcatcacaacgatgatagcttctctaatgatatctggtctagttgctattgttaaacatcacaaatacaaccatattgattggaatgttctaaaatggtctgctccactaattataattggttcaatactaggttgttttaccatgactgttgtttcaagccgatcggttatatatgtcttctctttagcaacactaattttggcgattaggtcaacacaaaaattaatttctaatacccaacaaaataatacaaatagagatcttggctggtcatttcgttatattggctgttttttactaggattaatatcaactttgtccggggcagcttcatttgttgttccttattatgagagcattggcttagatattaaaaaatcaatagggacaacaactgttgtagtctggttgtattctgtatttgtactaatatttatgatatcactcggcctaaataaaaataacttaccacctggaaatataggttttttaaattataattatctatggttattcataataccaacaataccaggagcattgttaggagcaaaattagccaatactcttccagaaagaaaactaagaattgcctttacagtactattgtattttattggatcaagtatgttattttcataacacatctacttttgataacctatatcttgcgcaggtaatgctgatcgtactctgccaatgcacccggcatatccataaacgggttacagaaatcggtttattcaggttattgcctttcatataagcaaggtaggcgtgatataaggtactagcgtaagctttaggcttccccgttgtggcctgtctcttgatcagatctccaaatcaactgatttagccagcaaatagccgtctatcagggtttgcagccgaaaccagccttcccaaagtcgttcccatccgactcgacccgtgcgtttggaatcgtaccagccggccagttttcccagattgatgaaggcccaatgcaaactcggggcttttttcggcacacggcgtttttcttgttttgaccacagtaatttccacgccagggggcttaatactgtctcacagctctctttctctgcctcttctttgttcagacccataaaacgcagctggtgtattcgtaccgcaataaaggccagcagcactatcatgcgctccagattatctttgctttgcatacgcagcgcttctacctgcgtgccgcccgttttccacgctttgtgaaattcttctatcagccagcggcgctcgtaataactgaatattttatgggcgtcttcctgactgttgacgggttcggaggtcagaagatgccagcaaagcccatcctccggacctttttcgtagcaaccgacataaaatatccgcaccgcctcaccgctttttccttcggggattttcaacgtcacttcggcataactgatatcacaatgcgcgacacgcgcctgacgcccgcctttctgtctgacctgaactaatcgttctccagcactctgtaaccggctaataaagtcataaagtttatcctgactttcctctatacgccggttttgcatcgaacggatgacgaaacgttgtttttggctcgttttataacgcagatattcgatgatatcggcttcacggtcacagacagaaatcacgttggccatctgctcccctaaccggctgtcgacggcttgtgaggcccgttcccacttataactctctttcccttcataagggcgtgtatcgcgttgtcggcttttgccataatcactgacatctcgacaccagcgctgttgctctatcaaccccacgacctgttgttcttcaggcgcaaataacaacaccgagtgtgcctgcatgccccgggatttttcctttgaggtggtatagccgagttcatcggcgaccgacgcatgggaaaatgacagggttgtcgtgtcttccagcgctaacaggcaatgataacgttgagcgtgagcgacggtggcggtaaatccggcttcggcgatggcctgaggcgcaatggcggaatttcgggtcagtcggtaggccgcttcaacatcggcaggagagtcaagagattgcacgagcgattgtcctatatggttagccaacgaacaggccactttcaccaggcggttggtacggcgtttatcacctaattccgcatgttgaaacgtgtcatttgcccattgttcggcgctggttgaaaacataaagattacctcaagtcgtgttttttattgagatcaatctatgagggaaaagttcaataacgcgggggcgggttaaaatatttgtgtaggaaagacaggttgtggcagaggattgatagataatgcctgcactcgtatcggtattaaagaaacggatggcatctttgttgtgaacaatttccattaatctttcatgagaaaggaccggcagatccaacagagtggcgctttcaggacttagaccagcgtaaagttctctgtaaggcgatgaatttgcttgtgctagtgcaacaatttgtttcaatgtccaaatagtcatcatgtttcctctactggtagaattgtaacttcgggtttagtgtctgttgtgtctggctggaggtatttatgacagactgctctgactttattgcagaaatgaggcagaaacattggcatagggtatattgttaatgttgaaatttaagttaggttaaatggttggtagagggttttcagcagctatttacacttcatacttttttgtttttttagtgtaattattgggggattgtaaaataggtaatagagtaagtatctgttttatatttaaaattaatggataatataggatttaaaattgtcatttaaagtttaataaattatttaatgcctaaaggattaattattaaaattgaactgatttataaacaattaaatccaagattaatatttattttcaatattaataagtatagggtattttatagttaaaagaatatctatatccgtcatctttcaagttgcctctttgttggctgcactcactcaccccggtcacatagttatctatgctcccggggattcgctcccttgccgctgcgatgcatcttgaaatccatagggtataatcttaattatagaattaaatattcaatggatataaataacttttcataattatgatacctcttattttattgttttctgttattcctatggaaaattgtttattatctttatttaaagactgaatttaaattatttttcaggttaaaagataattatttaacgaattttaattttatcttgcccgttaatgggcaagaagtattttggattaacttaaatataaaattaacatggtcaattatattctcgttactttaatcattcatttaaaactaaagatagtagagcctgacgagcataaataccattctctgcctgttggaaataataagcatagggcgttttatcgacatcggcagtgatttcatcaatacgtggcaatggatgcagaactttgaggttctctttcgctccgatcagatcggaagcacgcagaacaaattgtgcttttacgttggcatattcggatggatcaaggcgctctttctgtacgcgggtcatataaagaatatctagctccggtaatacttcttcaatattagcgtgttggctgtaggtcgcacctttttcattcagcatatgaagaatatggtttggcattgccaatgcttccggggcgataaaataaaagtgattgccattaaatttcgccagtgcttgtgatagcgaatggaccgtgcggccatatttcagatcaccaaccatcgcgatattcagactatccagccgttgctgagtttcctgaatagtgaatagatccagcaaggtttgagtcggatgttggttagcaccatcaccggcattgataatcggagtgtcaccggaaaattcagaagccagacgtggagcaccttcctgtggatgacgtatcacgatggcgtcaacatattggctgataacggaaatagtatcggctagcgtttcacctttcttacccagagaggtgttactgctgtctgagaaaccgacaactgaagcgccaaggcggtggattgctgtttcaaaagagaggcgagtacgggtggaggcttcgaagaaacaactggcgataaccttgggtttcagcaattcaggttgtggtctggctttcagtgtagcagcagtctgcaacaccaattccagatcttcgcggctcagatcatttattgagatgatatgtttgcgatataacggattagccatttttcactctcctctaatgctgacatccggggtggcgatcatgaattgattaccgggcaaaaaaaagcccctcattgaggggcgttaaatgattggtttagcaacgggaaaacaatgacggctagctgccttctttcaggcagttgtgcttgatgacaaaaataagcgctgtctttcatgatttctcccggcaaattgtggcgcattatactcgcgaaaaatcttacagcaaacatttgaccgaagaaaaataatattggcaggagcatatctttaaagacataatcctgccgatattccaactaattaaattttaagatcatttgctaatgttgcgaccattaccgctttaatggtatgcaggcgattttctccttgatcaaacacaatgctgtgctctgattcaaaaacttcattggtaacttccagtcctccatacatattaaattcagcagcgagttgtttgcctaatgccgtttcttcatcatgaaatgctggcaggcagtgcaggaatttgacttgtggattgcctgtcatactcaccacatccatattgacttgataaggtttcaagaggtgaactcgttgttgccaaacatcttttggctcgcccatagaaacccagacatcggtataaagaaaatcggtatttttaaccccttcggtgatattttccgtcagagtaattttacctcctgttttttcagccagtttctggcattcagtcaccagtgcggcattgggccagtatttttcaggggcaatcaaccgaacatccatacccgttagtgccgcggcttctagcatggtattacccatattgttacgggcatcccccaagtaggcgaatttgatttctgacaatggtttttctggttgatgttcctgaatagttagtagatctgccagtagctgagtagggtgaaattcatctgttagcccattccataccggaacacctgcatattttgccagcgattcaacgattgtttgggcatagccgcgatattgaataccgtcatacatacggccaagtatacgagcggtatctttgatcgattctttatgtccaatctggttgccactgggaccgagataggtgatatttgctccttgatcgtaagctgccacttcaaatgaacagcgggtacgggtggaatctttttcaaaaatcagcacgatgtttttgcctgttaacagggctttttctgtaccagattttttagtcgattttaattcagcagctagctttagcaaggcatgaatttctgctgaggaaaaatcaagtaaccttagaaaatgacgctgatggaacggattcattgtttggtgtctccgtatttattgtttgcatttaaattcaatctatatctataaaaatgcaatttcaactccgtattagatttctttgatgtaaacagtggttagcccgcctatggtgtgggagaatgagtattgggacggccaactgcttgaggatattaggtatggcaaatcagagagacttagaagaacaacgcgaagaaacgcggcttattattgaagaattactggaagatggtagtgatccagatgcactttatgccattgagcatcacttttctgctgaggattttagtctgttggaaaaggctgcggttgaagcctttaaactgggttatgaagtgactgatgcggaagaattggaagtcgaagatgggactattctgatgtgttgtgatgttatcagtgagtgtggattgaatgcagaactgattgatgcccaggttgaacagttggtgaatctagctgaaaaaattggcattaattatgacggttggggcacttacttcgaagatcctgatgagcaagatgaagatgatttgccggagcagggtgagagtagacttcattagtatgatcagtatgttaagaatcttgtgttaattctggtcgtgattgatacatatgattcaaaacaaaatagtccttatctgcttcggcgaataaggactattgcatttaatagactattttatcaaaccgtgttctctaacttttgcgagaatggttccccgcctaatttggtttgcctcggtgacctccctttttaattcttgtcctagctcattagaaaccagatccttatgtttttctgcgagctcgcttaattcttctgcggtgtgaacaatgccggtaactttccatgccaatgacagacctttgagtgccactttggctaccgggtgtggcacgaccgcggcggcggtatccagtgtggctccgactgtcgcacctagcgatgccccggtaattagcgtatctgttgcgacctcttttaaatcatcagttgctttttgcagctcttccaatttttctgggctgacggtagcactagccgcgcctgccttaaataccttttttataccgtccaaggtgagactaaaattattaattgcgtcggtgccggcggcttttgttagcgtggttttgtttagttcaccgacattgccagccgcagcaaattctccggcagccgcgactaagcttgccccttcttttattgcttgagcgccagggacttgaccctgtgcgagatgttctgcggcttctttacgccccgttatgttatgggccatctgcttcatcgggtcatagtttgcttttaaagcactcgctttttgggtgattttgctgacttgttgatcaccgtaggattcagagacaggagatggcatctgaggcttttcaacttgttgatttttatatttgtaaagctcgtatgccataccgccaatgcctaatgcacctgttgctacggttttaaacatacgcccatcttcatctatgccggtcattggattatttcttaccatacggtacaaattcagaccatctacggttccagccgggtcagcgcttaaccatctaccggcccacggttgataatagcggtagccgtaatagtacagtcccgttgcatcacgttctttacctgaataacgaatggttttgtaaccagcttcaatctgatttcttgctgcccatactgcggtgccaccataggggtaatactcttcccaactgatcatttctccgtgcatatccagttctaattcgctgctgtgtgtaagattatcgtagctatatctgacttgatcgttatttatgccggtgggttggcctttttcccagtgtagtacgcgtacttgtgcttttcctgcttgcctgacagtaataacttgtaagtcttcggtgatattggtgccgctttgtgtggtgtgtaattccaaccctggcagataagtgactcgttgctgctgcgtggtattggatgtttgctgttcgtttattttcagtagccgcatgccgtcactgtcatagtggtaccactcacgcgcggtattaccactttggttcacttgttgtagttctccccgtggtgtccagtttaaggattgccctgagaacagactggtttgatgaccacctgcatcaaagaatgtatcaacgagattggggtcgttggtgagggtactgaggacaccgcggttattacggtttgaaatggtgatatttgtggtgtagttattgttacttgccggagcactgtgctggatttgtgtcaggttgccgctatcgtcgtaggtataagtacgaatatagttagtataagtattgtcatcggtaggaagaggggtaattaaaggagggagctggcttccttgctgaccaatgttagccatttcgcggccggttgcttggatgagttggtacagagaatcataggaatatgcattttccggtactattttctgattacgccagaatcgggttgcttctgcatcattacgaatattgatcacattgccaacgggatcatattcataacgtaaatcttgtagtggttttgtactatctctagttcggcgggttgtaatgttaattaatcgttgggtctctggttcataggtatattccgtaataacgccattaccgtgctcttctcgtaatttttgtccggctgctgaccaggtaatagactgtacaataactttttcggcttggccttttagtgttaaccagctacctttcagttggcccgcgacatcataggccagccgttgcatatttcccttggcgtcgatttgagttagcagagcaccaatggcatcagttttatgttgagtcgtgaatatgttgccattcagttttgtacgccagctattttcatcatcaccgcgccaatcagcttcctgatcgtcggctattaattgacgagactgtgataaaaccgatcctgttaaggacaaactttccagttgtaccagccccgcaggatcataatggcgtatacattgcccggcgagattctggtttttctctgcatctgtattgttgccccaaataaggcgctccgtggttttctcgttcttttgtattaactcggtgacagccagcaagcggccgggcaaggtattaccttcatagtgatgggtctgacgagcgccgattgcattgatagtcagtactgggcgtccttcgatatcgttcaaggtaatcgttcggccagcatcgatactttcttcacgcagtgtattcccagcgagactaaagatacgagtgaagtttgaaccactctggtttttatatctacgtgggtctgtgctttttacttgaagtccgtgagtattaaattgatagcgagtgatcaattcgttgctattggtttcatcagcttgagtccgcagatattccagcgtatgtatatttaaccctcgattatctcgtacgctgacagatggggtatttcggttaattgcagaattgtaacgaatcatattgcagtcccttatgttgttttaatctgttagtcggcttaatagtaacgacctgagactttactacggaatgaataaaatttttaacagaatagcgtgataatttttgagattgacagtatgagaattaatatcccaatagatagggatagaatacgaaaggggaaataaatattttaattattcgattgtgattaagaaaaaattaattaataactgacttgaatatatatttaaagtaatcgttaacgagaaaatattaatttaataatgattgaaattttttgaatgtaaaaagagagataattaattgataaatagataaccacctcttgtaagaagaggtgattattttcttatttagaaacatcggtgccgaaatattgagtggaaatgcgtaaataggtgccatcggctttgatatcggctagtgccttatcgatagcggcttgtaattctggctcgcctttacgaattagcaccccgactagatcaccattgggttcggacgcgacaacttttaccggtgcattgggtttgtgtttcctaaaatcgagataggacagattatcgttgatagtggcatcggctctgcctgtagcaaccaaatcgatggcctgattaaatccttcggtggggacgatttccgcaccgaaatgttttgctaactgggcataattgctggttaagctatggcttgaggttttacctttcaggtcgctgaacgtttttatactgtcattatttttccgggtgataagtacggctttagatatgatatatgggccggaaaagtcatatttctttttgcgttctggtgtgatagcgacttgattgagtaccgcgtcatagcgtttggcatcaagcccggcaataagcccatcccacttgccttcggtaaactcggctttaacattcagacgtcgtgcgatttcgcggccaatatcaatatcaaatccagttaaagctcctgagacatcgtgataggtaaatggcgggtaagttccttcggtagcgattttgaatacgcctgctgatttaatgttatcaaggccagattctgcatgcgcagaatatgcaatgccgaattgaatgacacccgctaataatgcggtaagcaacattttcattttctttctccaaactgttaaaagatttatttgattgttatcaactgattctcagatcaattacggcaaagttattttaacggtgggctatatttcccaatccggtaaggtattggttaaggttgaaacaaattccacagtacgttgtttaagggcaccggtgaaaatcgttttcgacgttcccgattcgacgatttccccggattctaaaaatatgacgttgtgggcaagattagctgccaaacgcagatcatgggtagccattaacatcgtggttccttctttagccaactgctttaatacggcaacaacttcttgcgataactctggatcaagtgcggaagttggttcgtcgcataataatactttgggtgagggtgccagtgctctggcaattgctacgcgctgttgctgaccaccggagagtgtggctggaaagacatcggccttgtgtgacatgtcaaccttttccagtagttcaagcgctcgctgtttagcctgttcacgtgaccatttctgaacccagattaacccttccatgatgttttcaatgacggtgaggtgagggaaaagctgaaagttttgaaacaccatgccggtttgttggcggatccgttgtatatccttgtgagcaatccgccctttgccggtgaaggttatgttttcattgtcgatttggagcttcccggcttggggaatttctaataagttgatgcagcgtaatagcgtgcttttgccacttccggatgggccaattagtgcggtcaggctgccttcctcaatggtaagttcgatttttttcaggaccttttgcccgtcaaaacttttttcaatgccggagagttgaatcatcttttaattcctgtatgtcactcttttgcgaaaacttcttttccagacgggtttgtagtgatgacaatactgaactgattatcagataaagtattgccgcctcagtataaagaatgagaggttgataagtcaccgctgcaatacgttgtgcagcaaggaaaagctccggtacggtaatgactgaagccagtgaagtatctttcaccagtgaaataaatgtgtttgagagtggtggaatggcgattcttgcggcttgaggtagaatgatccgacgcaatgattgtgtccagctcatgccgatagaataagctgcttcccactgcccttttggtacagacaataaagtggcgcgaattatctcagaggtataggcaccaatatttaatgtgaaaccaatcactgccgaggtaaatgcacctaacgtaatgccgacgctaggtaaggcataaaaaataagaaacagttgtaccagcaacggtgtgccacggatcagccagacgtagaatttggcgacagcaataagtggttttggcccgtaaagccggatgagcgcaacaataaaacccagtatgataccgagagtaaaagtaataagagttagtggaatagtaaaagcaaagcccgcataaagcataggccaaaaagaatcgagtactagattgaaccaagagggttccatatattttccctattgtgtgtaatataactatacccgttatctttcaagttgcctctttgttggctgcactcgctcaccccggtcacatagttttctatgctcccggggattcgctcccttgccgtcgcgatgcatcttgaaatccatagggtatatatatttatagtgatttttttaaatatcatatggcaagctgtcaacttacatatataagatatagttatatcatatggttattttagatatataaaaaatttatataaattaatatatataatatttaactaaaatattttctgattactcaattcaacacggttgatgataaagttccctggtcagagtttgtattcaacttttagggaactgtctatctgaataagataatctttcacttattcgggaagattatcgccaaaatagtgagtccagatacgttggtaagtgccatcggttttgatgtcagttattgcttgatcaatagcaacttttagttctggctcgcccttgcggagcaacactgctgtttgacccgcattgggggttgctgcaacaatttttactggtgcgtttggcttatgtttcttatagtccagataagataggctatcattaatagtggcatcggctctgccggtactaaccagctcgatttcttgactaaatccattagtgccgataatttctgcaccattatctctggctatttgggcaaaattattggttagagtatgtgctgaggttttgccttttaaatcgctgaattttctaatgttattattatttttattaatgataagtaccgcttgcgatgtgatataggggatggagaagtcatattttttcttgcgctcaggtgtaattgcaatttgattaattactgcatcagaacgtccggcatccagcccggcaataagtccgtcccattttccttcaataaatgttggtttgacatgcaatcggtgtgcaatttcacggccaatgtcgacatcgaagccagttaaagtacccgaggcgtcgcgataagtaaatggtggataagctccttccgttgctattctgagtgtgccggtggatttaatcttatcaagggttggttctgcattagctgaatatacgagaccgaattggatagtatttgccaataatagggtaataagtgttttcattttgtttctccgggtagtaataaattagtgaattaatttattactaccttaataatttccgctgaaataaattattcataacaataaataattggatatttaattgggctagaattgcattattagtttcctttttacttgtaataatatatttatatgattttactctctgtataatatgctaaatataatggtttatatataaaataaaattatatcatattgtcatttaagatatgtaaatttaaaaatgaataaaataaatattcacttatgttaaggagataggtattgttattttcaatatttttgattatgtttatatagaatgagttgaatttatattttattattaattttatcgtttactatttaaattaaaaagccactgcaattcattgtcagtggcttggtgagaatttactttttgaaaatattacagcgcggcaatggtttctttctgagccagcagcttttctttggatgtattgcagtttgccagacgttcacgctctttggttacaacagcttcgggtgcacggctaacgaagccttcatttgatagcttaccttcaatggcaccaatctctttatccagcttctcaatctctttatttaagcggcttagttcagcttctttatcgactaagccagccattgggattaatacttctgcgccattaatcaatttagtgacagaaatcggtgcttcttcgtccgtagacagaagagtcacagaagataagcggcccattgcctgaataaaattcaggttttctgctacacggcgttgggcaccagcatcagcattacgcagcagaacttccagtggcttacccggtgcgatattcatttcagcacggatattacgtactgcaataatcgcttccttaatccattccagatcggtcagtgccagttcatcagttttttcttgagcaaattctgggaacggttgcagcataatggtatctgcctcaattcccttcactattttcactctctgccagatggtttcggtgataaatggaataatcgggtgagccaggcgcaataatccttccagaacttcaattagcgtatgacgggcaccacgaacttccgcctctgaacctttgttaatcgccggtttagagagctccagataccagtcacagaactggttccaagtgaactcataaagaatattggccgccatatcaaaacgatatgtgtccagggcttcacggtaggcttttactgtctggttaaattcagccagaatccaacgatcagccaacgatagcgccatttcgccaccatgttggccgcaatcctgaccttctgtattcatcagaacaaagcggctggcgttccataatttgttgcagaaattacggtaaccttgcaggcgtttcatatcccagttgatatcacgacctgttgaggccagcgcggctaacgtaaagcgcagggcatcggtaccatgcgtttcaatacctgccgggaattgcttctcggtacgtttgcggattttttcagccaactggggctgcatcatattgccggtgcgtttttccagcagttcttccagagaaataccgtcaaccatgtccagcgggtcaataacattccctttggatttggacatcttctgaccttcttcatcccggataagaccggtcatgtagacagtcttaaatggaacctgaggtttgccattttcatctttgatgaaatgcatggtcatcatgatcatacgggcaatccagaaaaagatgatatcaaagccactcactaacacatcggttgggtggaaagttttcagcgcgtcagtttgttcaggccaaccaagggtagagaaagtccataaaccggaagagaaccaggtatccagtacatcttcatcttggtttaaagagatatctgtgcccagattattttcacgacggacttcttcttcactgcgaccaacatagacattaccgttggtgtcataccatgccggaatacggtggccccaccataattggcgagagatacaccaatcctgaatatcgcgcatccaggagtaatacatattttcatactgcttaggtacaaactggatatcgccattttcaacggcttcgatagccactttcgccagaggcgcggtacggacataccattgatcagtcagcataggttcaataactacaccgccgcgatcgccatagggaacggttagatcatgagctttaatttcaaccagcaggcccagtctttcgaactccgccacgatagttttacgggcagcgaaacgctctatgccttgatattcagccggaatatcagagctgtaactgtcagaaatctcaccatgagtatcgaaaacttctgctttatgacggatgttgccatcaaaagtcatgatattgatcatcggtagggcatgtcgcttaccgacttcatagtcattaaagtcatgggctggtgtgatttttacgcaaccagtacctttttccatatccgcatgttcatcaccgataataggaatgcggcggttaattaatggcagaataatttctttgccgattaaatccttatagcgcggatcttccgggttaactgctacgccggtatcgcctagcatagtttcaggccgggtagttgcaacgatcaggtaatctttcccttctgcggttgtgacaccatcggccaatggataacgtagatgccacatagaacctttaacttcacggttctcaacttccagatcggaaattgcagtgtgcaatttcgggtcccagttaaccaaacgtttaccgcgataaatgagattttcttgatacaaacggacaaaggcttcttttacggcattggatagaccttcatccatagtgaaacgctcgcgctcccaatcaacagagttacccagacgacgcatctgattggtaatcgtgccgccggattctgctttccactgccagatcttatcgataaacgcctcacggccataatcgtgacgggttttgccttcttctgctgcgatcttgcgctcaaccaccatttgagtagcaatacctgcgtggtcagtaccggactgccacaaagtatttttaccctgcattcgctgataacggatcatggtatccataatggtttgctgaaatgcatggcccatatgcaggctaccggtcacgtttggtggtgggataacaatacaaaaactctcacggctagtatcgccgttaggcttgaagtaaccacttttctcccaatggttataaagaggttgttcaatttctttaggattgtacgttttatcgagagatggctcggcttgcgtttgagttgcgggtgttttttccattttatcttgatacttagtatgttggcggcgttgccatggtcaaattaaagccgacgctgcgataggatttatatcgttcacgcgccaactgtttcaaattttcatctataggaacgaagtctatcacttcatggaaagcggtggcaaagtctgcaaattgcggcaacagatttattaggatatcacggggagcatttccccgtttttgtggccaacataactcaaccggtgcgccataccttggcccttcacccgcaagattatgtggaacgaactgatgaggttcccgttgccataaggcttcatctaacttttctgcctgctgctggttttcacaggcgattagcacccgtttccctgctcgccattggtcagccgcaaactggcatgccagccattcgtgagcttgcaaatctgcttgaggtgatggctgttccagtaaataaaacgtggcacttttcataatgtctctgttacggagaaagggcattgtcaaatgcccttttaaactaagagaggaatcagatcaatcgtcgttattgataccggcacttcctgcccgatttaacaggaattgtgacagtagcgcaaccgggcggcctgttgcgccttttgttttacctgaacgccaggccgtacccgcgatatccagatgcgcccagtgatactttgttgcgaaacgggacaggaagcaggctgcggtaattgcaccaccgccactgccgccggtattcgccagatcggcaaagttagaatcgatttgctcgaaaaactcatcagtcattggcagacgccatgcgcgatcaccggattgttccgaagcattgagtaactcatgggccagtggattatggttggataacaacccactgtaatgattaccaagagctgttatacacgcaccggtcagtgtggcgatatcaatgaccaattctggatcaaaacgttcaacgtaagttaacgcatcgcacagaaccagacgaccttcggcatcggtattgagtacttcgacagtctgaccagatagggtggttaaaatatccccgggacggtaagcgcgccctcctggcatattctcacagcctgccatgacaccgatgacattgagcggtaattgtagctcagaaaccacacgcatcacgccataaaccgttgcagccccacacatatcgtatttcatctcatccatgccacccgcagatttgattgaaataccgccggagtcaaaagtcagccccttgccaaccaagatgataggtttggcatgtttatctgaactgcctttatattccatgactgacatcagagattcattctgagaaccttgaccaacagccaggtaggcattcatgcctagctctttcatctgctcttcaccaatcacttttgttgtaatatggctattggcagaatctgcgagctggcgtgcctgagaagccagataagcggcattacagatattgggtggcatattactaagatctttggccgctttgataccggcagcaatagcaaggccatgttggattgcacgttcaccgctggttagctcccgacgggtcggaacattgaaaaccattttacgcagtgggcggcgcaactcatttttattactttttagctggttgaaagcatagagagattcttttgctgtttctaccgcttggcgcactttccaataattattgcggcctttaacatgcaattctgttaagaagcaaacagcttccattgaacctgtttcattgagggtattgatagttttctgaataatctgtttatactggcgttcatccaattcgcgctctttaccacagccgataagcaggatacgttcagatagcacattgggaacatgatgcagcaacagtgattgaccaactttgccttctagttcaccgcggcgcagtaatgcactgatgtaaccgtcacttattttatcaagttgttcagcgatagaggaaaggcgacgaggttcgaaaacgccgacaatgatacatgcactacgttgtttttccgggctaccgctttttacactaaactccatgcgttctcctgaatcttaaagacaaagacggatgctatcgctaaaatatagcgttccgcattaatctaccccatagaaaattaactatttatgttaagctaaacgcactatttgttattatttagctaacttataagtatgttctgactgggaacctgaatatggaatgcttcgatatcattttagcagtgaggaagccaaactgatgcacataataaatggtatatatacaatgaagttagcgattttcctgcaaaaagacaagttttcacaggcgtaataagcgtgatcatcattagatatctggtacgggaaaccctgaaaagccaagttgcgatactctttatccttttactgatctttttctgtcagagattagtcgaaattttgggtgccgcagtggaaggaaacgtcccggcaaatttagttttatccttgttaggattaggtgtgcctgaaatggcgcagttgattttgcccctgagtctgtttcttggggtattgatgactttcagtaaactctatactgaaagtgaaattactgttatgcatgcgtgtggtttgggcaagcgtgtgctggtggtttcggcgcttattctggcgttgttaacttccgcgctagcggcagtgaatgtcatttgggtcatgccgtggtcctcgaaatatcaagaacaggtggtggctgatgctaaagctaacccaagcttggcagcgatcatggaagggaggtttaaaccttccgaggatggtaatctggtgctctatattggcaacgtgcacggcaataagtttgaaaacgtattccttgctcaacttcgccccgttgataaccagcgtccttccgtggtgatctctaatggcggtcatatggtggagcgacctgacggcaaacaggtggtcgtccttaatcatggtacgcgttatgaaggcactgcaatgctgcgtgattttaggatcactgagttccgtgattatcaagcgattattgggcatcagacttcaatcgtagataataataaagttgaacagaaatctattatccagttatggcaggataatgataaggactcccgtgctgagttccattggcgtttgactttggtgctctcggtactgattatggctatgatggttgtaccgttaagtgtggtgaacccacgtcaagggcgggtattaagcatgttgcccgcaatgttgctttatctgattttcttcttattgcaaagctccctgcgttctaacggtagtaaaggcaaattggacccgatgatttggatgtggctgactaatgggacttatctgatgttggcgctggttctcaatatttgggatacgttgccggtgcgtaggatccgggctcgtttcaacggcagaggagtagcctgatgtttggtgtattggatcgttatatcgggcggactattctacagactattctgatgacgctgtttatgctggtatcactctccggtattattaagtttgtcgagcagttaagaaaagtggggcagggggaatatactactatttctgctggtctttatgttttgttaagtgtgccgaaagatattcagatattcttcccgatggcagctttgcttggtgccttactggggcttggtacgctggcaacccgtagtgaattggtggttatgcaagcttctggatttacccgtatgcagattgctggctcagtgatgaaaacggctattccgttggtgatcctgactatggttatcggagagtgggtcgcgccacaaggtgaacagatggcgcgtaattaccgggctcagaagatgcttggtggttctctggtttcaacaaataaaggtatgtggacgatagatggggacgattttatctacatccagcggattgtgagtgataccgagattaaaggcgtcaatatctatcattttaatgatgataaaaaactactctctgtaaaatatgcagccagtgcggtttatgataaggataacgacctatggaagctttctcaggtggaagaatctgatctgacagacagcaaaaaaatcaccggatcacaacgtatttctgctgactggaaaattctcctgacgccagaacagttgaatgtagtcgcacttgagcctgaagcgctttccatcagtggcttatatcagtacatcaaataccttaagcagagtgaacaggaatcaggccgttatcaactgaatatgtggaaaaaaatatttgcgccgctttcagttgcagtgatgatgttgatggcactctcttttatcttcggaccactgcgcagtgtgccgatgggagtgaggatagtaacagggattagctttggcttcctattttatgtacttaatgagatctttggtccactgagcttggtgtacagcgtgccagcggttttggcggcactattaccaagcctattgttccttactgtgagtatttatttactccttaagagaagacagtagcttttagaaatagtggtactagtatggagccagatattagagggtccatagggatagggtttttggctaagaaaccctatcctggatatctcgattttacgacgtaaaagattcaagcttgatggtgatttttcgacaatgcagttactagttgattaacccccgttgttacgctactgaacaggctgtgttgtttacgagtgatcaccacaaacaccccgatattttgttcggggatcattgccatatacgtattgaaccctccaccaccgccggttttctgataaatacccggtacatcgccgcgggcgttcatgtaaacccaaccaaggccaacgccatctgcctgaccggcaacatccatccctttaattgaagccagagcggaacgcttaaaataaataccttgttcgcgactcgcggtttgtttacgtaactgactgtctgatgataaaaattgctgcatccagtgctgcatatcttttggcgttgaatagattccaccactgcctgccgcagcaacagtgttaagacacggacttggcttataactttccatcaaacgagcacactgagaacggtttggtgtcagtgtcgtgtctttcatgcaataagggccggtgatcttatcgtataacaaacgggtatatggcttacccgtagccttagagagcgcatctgccaataaatcgtaagccagattggaataagatgctgtagtgcctggtgcggagtctaattgagctgtttttaaccaggtccagcgattggcttgtgtaggccaaacaaaaacaggacgcccccatctacctcccggctgctcacgaggtaagccactggtatggcttgccaagtggaataaccggatgggttgaagagggctgtattggggcactttcacgccataataactatagtcttgcaacggatcggtggaacgcagaacctcatcctcttcgagcttgatcataatctcactggtcatcaacttagttagcgaggcaatacggatgattgaatcgggctttggacggatgccgtttcccggacgggtttcaccgaaactgcggtaaaccgtctgattattatcaatcaccaccatcgccatgccttgtgcattactgctgttgaaaatatcctgtgcatactgatcaaccaactgtgaagctagctttttagttctcgcatttccttcgaacacttcccatttcaatggttgtttcttcggttgcagaaactttgccgaatatattttgtttgaagaagagcaggctgcgagagccaacatcatggcagaaatggagaagatcttaaaaaactgtttattcattttgaattgaccaatcaggcatatttccagtgaattcacaaacaggataaagatagcaaaagcggctatttattctttttaaacagcatcatcaacgcgccaatgacaatgcccaaaaagatcccagcaccaatccagctaataatcgtcataaccatttacctcatagcgaattatcatgctgagattatataaggtgattataggttgtctatcagcgtcaggtggtttgactaactatgactgtaaaaattgttgtggggagagttgttttttctctggtattgcagaggaggagctatttcaggtagaaaagatattgctaggtgtacttatttagggttttgatgttcagtaattgaacgcacatttgtgttgaaagatgggtttgatctttttttcaacacttaaaccaaagtgagaaggataacagttgctaacagatcgctgacaggtataatagccctcgttttccgcatactacttcagtgccgaagtggcgaaatcggtagacgcagttgattcaaaatcaaccgccttcgggtgtgccggttcgagtccggccttcggcaccattgtggaaaaatcagtcaccttcgggtggctttttttatgtccataatcttccatttatgtccatatttcattgttaaataagtaatttttacttatctacccattctctgatttatctgttttatccacgttggtcttttttcgtccattgacatccagatgatttgggggtcaagatgagggtcaattcacttcgattaggagttgacccccaattatggccctgacagacgttgtagcccgcaccgctaagcctcgcgagcaagcttacaaactcgcagatgcacatggcctgtacctgatgataagccctggcggctctaagcgctggtatctcaagtatcgtttcgaaggtaaggaaagccggattgcttttggcgcttatccgctgatctcactggcgaaagccagagaaaagcgcgatgaggtacggttgttgctagccgatggtatcaacccggcggaaaaacggggggagggaaaaaaagaggctcaggacgcgctgataacctttgagaaagtggcaagagactggcatcgaaatatcagccaaaaccgctggtcagaaacccatgccggacgggtatggcgcgatatggaacgcaatattttgccagcgataggtcatcgccacatagcggatctgaagactaaagacttgcttgagccgctgaaagccgtggagcaaaacggccatctcgatttagcgtcacgactacgccagcgagtgaccgatattatgcgctatgcggtgcagaatgatttgatagagcgtaatcctgctcaggatctctccggggcgatagcgccgccgaaggcaacccatcgcccggcgttgaaactggataagctaccggattttctggcaaggattgaaaactataaagggcggacattaaccaccctggccttaaagttcacactgtgcgtctttatccgttccagtgaactacgctttgcccgctggaccgagatcgattttaaacgtgctatgtggactataccggctgaacgtgaagcgataccgggtgtaaaacactctcagcgtggggcaaaaatgcgcactgagcatttagtaccgttatcccgccaggctttggcgttgctgaaagaaattcaggctatcagcggcggtcacgaactgatattcccgggcgatcgtcgcccgactaaaccgatgagtgaaaacaccgtcaataatgcattgcgggtcatgggatatgacaccactactgaactatgcgggcatggtttccgcacgatggcctgtagcgcactggttgagtcagggcagtggtcacgagatgcggtcgagcggcagatgagtcaccaggaacgcgatagcgtgcgggcggcttatattcataaggctgagcatattgaagaacgaaggctaatgctgcaatggtgggcggattatctggatgcgaatcgggaagggtatgtggtgccgtatgagtttatgggggcatgatttttatgtgctcataattcaacctgcaattattttatggataaaataccatgctattcaagaagataaagacgtattttctttatataattctatcaatgtttttaattactaatacttttcttgttaggcacgaattcatttttaagaaaacatttattgtattgtttctttttttgacgatagttatttgtttctatcaaaaggatgcattcaaaaaaataatatattattttatttactttaataatgacaagatcgtcaaaaagatttcaggaggactatcattactagcctggttgttctttgtatcatctttgttcttactaaatattggcttggtgtggcttgcgagatggtttattcttgtatttattatatttgttgttatcagcggagtatttaccttctatgacctggagcgtgaaaataatattatctttagcaagctgaaaattgtatttgtcagtagcgtatccttattatatttcattacaagtacatatgcagctagttattttatgcaaatgagtaatatggatataagtgattccccgttgcttgagtttgggtggaaacttgctttttttgctatttatttctttatgctcttacaaccagtttcatacggtatttttctattagtatcaaataaattaaaagggcatcagttgatgactttttttggcatcataatgttaacatcattactgctgtttgctttacctcgctgggcggagaattttatagtagttgtgcttgattgggctactagcagtgaatggcatacttccgcaacgtgcggttccttgaatattagtgattcaacagatcactattttggatttaatacaaataaatacacagtctatttttctaatcgtgatggaaaatggggatttgaggaaatcaactgtattaaagatgataaaaaccaagattcattaaaacgtgttcctgtaactgaatcaagtatgcctaaatggtttaaagaataaagagtcttacagatagttaaggaatattatccatccattatctgcgcatctacctctatactgctccagccccatttctcggggggctggagctaatacgtcttatagggttgatttttcctgcgagtctgaatatccaagaatcatttccgccagatcgtcttccacggcataaaaatagcaagctggaacgtgtagcaccgatgccaaccgacaggccagctcaaagtctggcgtgtgtatcccgcgctcatattgattcatacgggcactggccgtcgcttcatctatcccggcaagaatccctaaccgttcctgcgacaggccagcctttaaacgtgcggcttttaagcgatgaggtagcatgagaatcctgattacttgtgtggcttgtcgcgattctcatctgtgtgtcttgaaaatatactaagtaatccttagtatttggtgtgtggttacttgggatcttaatggagaaaggtatgacatcacatcatgactggcatcaggcagatatcatcgccgccttacgtaagaaaggtacaacactggccgcgctatcgcgttctgcgggacttagttcttcaacactcgccaatgtgctttctcgtccgtggccaaaaggggaatggattgtggccacggcgctggacgttcatcctgcgaagatctggcccagccgttattttgatagttctggtacgctactggacagaaaaatgcgcataaggaaaaaattgaatgaagaaggtaaacagtctgctatttgatcaatcgccagtcgttgtttatttctcagatgaatgcctacacgttcaggttaaagggaaagcactgctaaatattccactccaaaacttccctcgcctcgaacgcgctacggtagaacagagaaagcgcttcacccttaatgcaggcgggggaatccattgggaggaaattgatgaggatatcaatattgaggcgctttatgcgggggcaatcagggatatgactaatcgtaaatgatgatatgcggtatgggttcaaatatcggttagatcccggactgacgagtattcgcatattccagtattatctccgccagatcgtcctccaccacataaaaatagcaggcaggaatccccatgaccgacgctaaccggcaggccagtgcaaaatcaggtgtatgtataccgcgctcatactgattcatacgggtgctggctgtcgcctcatctatccctgcaagaatccctagccgttcctgtgacaaaccagccttcaagcgtgcagcttttaaacgatgaggtagcatgagggtcccagatgactaacttgtcctggctcgattctcatctgtgcttgatgaaaatatactaagtaatacttagtttctgggtcggtttgagatcaaaaaggaagaaaagctgttgtggcaaaaaagttactttccaggaggatggaacggtaaagcctgtgcagttcttccactttttagacttgactgttcggtgctcacttcgttgcgctccgcctcagtcaggtctaaaaagcgttactggttggcggtaagataaccagaggtaaggcggatttaatgctttgtagttgatatctttcgtgaagttgacgcgagaacaaggtctgtaatggtcacacaatcccccattttattcccacttaatgataaatttttattcccccaccagatttttggtctttctgaaaaaaacaataattattatagggttaagttattcccccaccttgcgtatatatacatggcggaagtgggggaatatgttgaatttggtagctaacagagtcagattccccccacttcccccggttaatccctcgttttatctctttgcgacaacggcgtaatgcgttccccatctaaagcaatcagaccatccttttccagtttatccagccagcgggtaaactttttggatacatcaaatcccatcgctttcatatcgtccctgactaatgcgcgggtgcagctatcgccgctggccgtgcgcgaacgaatggcctgccatagggcaaaatgattttccgtcagccgcgaaatgccgatcaaatcagggtcgctggtaacatcattttccctggcttcacggccttcatcgttcagcaccagcgaggtgatccgatcgccatcatcatccacgtataaatcgacggaatgcaggtcataagcgcgacgtggcggctcttcggcatctttcatcttggtgcaactgagtatcaatgcaccaccatcaccttcacggcgcacgttaaactccacgtccagtgcggcccggaatgcgctggagccgcgcgcgcctttatcctgatctttgccggaatggtgaatgatcagcaccgtagcctgtgtggccgctttgatatagtcgcatccctgaataaatgcacccatgtctttagcggcgttctcgtctgagccaccgaagcagcgggcgagggtatccagaatgatcaggcggatcggcatactggttgcggccttaacatctttggcggcctgtatcacctgttgtacactctccgggctggcaggaaagaccgggcaatcgatgcgataaagcgcatcaatcgggctgccgccgttaagtgtctgttcccatgcccggatacggcgaggaacgccgatcccaccttcaccgacgacatagatgaccgctccttgtgtgaccggtttccctgcccacggtttgccagtggcgatatggcatccccatgataccgccaggaaggatttgtaagatccgctggcaccgtaagcgttggcaacggatgaggctggcaaatatcccttaatcagatagtcctgttgggtgtcaaagccatcagaacctttgcgcagaggaagcgaggttttaaattctgcttcggtatcggttacggatttactcatcgtttcgcttccccgcttgctgtattccctcgcgtttgctgatacgcccagcaatccagtcattcacttcgctttccagccatgccacggagcgggaaccaattttgactgccggaggaaaatcgccctggctaatcagaagataaatccatgatttcctgaagccggttctttccattacttctgataagcgcaacagcttgaagtttgtcatcgtcagtcctccttcctggtgtaaacacgctcaacgtaacggccccgaccatcgccgtgaccgagatccattgacgtcagcgccctggcttcactgcgggagaatccttgtgacaggtaataacgaatggcatcctgcgcccatgcgtagcgcaggctgtgcggggaataatggccggttagccctaaccgtgtggtatgagaacgccagaagttcatggcagtttttaaatctggcttgtcgattagcttgccattatgtgttttagtaaccagcagagcctcttttaccgcctgctgaacagcatgacggtcgatgatccgcgtttcacgtggcctgccgcctttagtgccaaaaacaatggtgagcgttgattgattgcgttcaagctgtttttcccatgttttcagcgaactggcgcattgcactgcttcctgtgaacgtaatcccagcaaccgggcaagttgaagggcgcaagtcagtccccggtcatgctgctgtgcgctgcgcaatacggcctgaaatcgctcatccgggatcgcgaatttcgtgcctgcacgacttgctccgcttaatcccaacgttttattcgctaaacgtattgatgtaacgagcttttccctgccggccaaccgaaacaccgacatgtcgttatgcagagtacgagcagagatacctgttgcctggcgatcggcaatatagctttcgatatgtttagctttcagatgctgaacatcccggacctggatattgagtgcaatcaggtgccgacaaaatcggtcaataatgcgggtgcgatcatgaacagttttaaagctgccgccgacttgtttcgccagcatcttcatttcacggcttaatttactcatagctaacttttctcaatttcaacgagctgcatttctctggcgcgtgggctaaatggcagaaacaatcgacattgacctgccctgaacgatacctgtgcgccagagcgggcagcagttgaggtattgcggggcatcggtaatgcactctgtgcagcctcctgcgattgcaggttatcccctcaggctgttggcctgcctcggtatcggttcaaatctcctgtaaaaagtggtcagttcggctcccgaacttgtgcgtcagattcatggctcgttgagtgaagttgcctgcctcaaaggctgaggctggttcgtgctgtggcgtcactttcatgcgttaacacgcaaaaagtgacgccacgtattagcgcgcagcaaggcaggcgcatgcagatacctgacggcatagcaaggcgcagccagcggcgtttaatacgtgccagaaaagaggtacagaaaacccgtcagtacgggatgtacctgtcgttaagcgggtgatgatactgctgtcatcgcaggcaaaagctgtagccttgcttgcagcaactcattcactgaggagaagaccgaatacagcattctttacaaataatgccgatcggcgaggaaacgctcgttattagccgtctcttaagtttaaggaacctttatcgtcacgtcataggtgcgtttttgttgacgatacctgctttcaaaggtgggcaggtttaccgcatccagcgttgtctttcaggttacgacaactttctttgtggtcgcccgaaggcgtcagtctcagaccacactccattccatatgactttggctcgtgaccacccgaaggcgtttctcacaggtcactcgtatcatcctgatactggaaacattggctggctgtcgttgacagcgggtatgcgtggttaaaaatacggcaaaattatgttggcttcaagcactttgcatcagtgaaaaaagagagtaacctagcaccaggtgctatagttaaggtaacaggatgtcagcctgatgcgcgtatttaaaactaaatggttcagcaaggcggctaaatcgcacgcaattaaagatagtgagttatgccaggctattgaggcggcgatgcaaggtaaggctgacgacctcggcgggggagtttacaagaagcggctgaaccagaatcgcgatcgcgccattatcctggcgaaaggtggggaacactggttttacacgttcctgtatgccaaacaggatatggcaaacattgataatcgcgaactggccggattccgtgagttagcaaagcactacgctgcccttgctgatgaaaagattacggcactgattaagaataaagaactggtggagatttgccatggctgcaaaaagtaaattcaagagtcctgcatttgaggccatccacagcgcggcttctggattattcagcgtcgatgctatcccgcaggaaacgatgcgccactttgataaagcgtgccttaataacgtggacgacctgcaacctgttgagattaaggcgctgcgcgagaagctgaacgtcagccagccagtttttgccagttatctgaataccagtgtgtcaacggtgcagaaatgggaaagcggcgtaaaacgccctggtggattggcgctgaaactgcttaccgtggtgcagaagcatgggttgaaggtgttggtttgattatgtctggcagacttagaaaccatctcaattgccatttcgaacttgcgttgtgttcaaaatccttatgtattttgctccggattttgcacgctgttcgtgccaaactggctgcaccaataatacctactgggagaggttctatgttgtatggattgacgataaggcaggtatttcttgattgatataataagggtctggctgatttctcaatcatggttttggcgattcagggctagaattgcaaaaattagttttctctttgagaacagcacgtacaaacgccgcacgtatgtttctaaggcgaaggctaatgttcgcattcttggatctttcacgtgggttggcttaaatagtctattttgggttgtattgacgctatctattctaggtttcgttgaggattatcttcgtagtaaaactgttttactcaagccgcttagtgcagacgacaaaaaattttatattgatcaactaagattatatgcacaactgcttactgcgatattttcaatatatttcgcgactattggcatcatattgagtactggctataccagactcagacgggatataatacaattactcactaccgagcaggttggtagtatttattcgcgggttttggtgctttcagctgttttttgtcttggtgcaactactctccagttggttggatttgaacccggtctcttcattactgcgatagggacattcttaacgcttataagctctctggccttgtttccattaggtcaaaggttattcaatttttttaaccttaaccagttggcgcgtagcgaaatactcccaaggattgcgcaccatattgaaggtgcagctaatcccaataattcaatatctctggccaaccatcattcaaaagtcgcacgctcagcttttgagcagctctgctatattgatgaccgtatgaaaggagaaaaagtagggcttggcgataatttacctgcattgagtgatgattatatggtattgcttctacactacattcatcaaaaacacagaatcgaccatcagagctactggtttcctaggcgacaaaagcacaaccaatggtttttggcaggggatctagcgactacaactgctctgcaaacaaatagccaattatctatcgaagaagaagcaaaccatcaatggctagaaaatgtaattattgaaaggttggctggtcacattgagcttgcgtttgagatgggtgatttcaaactaggattgaaacttattagccgattctcatcgcgaatatcaacttatgctgagcagttccagttcgacattgggatgcgagagcttcagcgtatgaaggaactcattgaagaagcctttgtttcgtcagatatcattccagggaatgaagaagtcactctgcggataggaattgcagattcgtgggccgcattaggtagtaatctttgccttgaaacgttgcggcgtatgataacgtttgagaaggaactgagacaattctttaataacgacatttggacggaaaagtctctacagacgttacctccttttcttgcaggttgaattagcttttattattgagcgcattaactttgaacaagagattgaaggacagaaattatctaaaccaaaatatgttcaacaattagccgttcaaaagttgttgcagcaatatgcaaagatattgccaatcatatctgatttttacggaggtatggtgccgggttttattagctcattgacaaaaatgaatatgtcagaagctgcaactcaagtgattctcgcaagtttgcataactattggaagttgcctaactggtttgatgaaatttctcaacatcttagaaagatgtggggagtataatcactaccccgaaaagcactacgagttaccgaatatcaatatagccgatatgatcgctcgtcttacatatgggcgagatgaagctatcgcgatgcttggtagagcagacattgttgggcatatttttgcgggcgaacataacgacgaattgccagaccattttggacagatatacttcgagctggctgaggcctgtattcaataccttgaacagaatgatgaaaaaaaattcagtaaagttttcccaatgtttatgtccttggcattgctggcgatagactccaaatttgttgatccagcactcaatgtgaatgacgagtttcgcctacatctcatttcatcggtgatcaacgacttggcgtcagtcctcggcttcgctatcctttacagtaattattttgacaatatgaaattgtctgaagccgcacttgataaatttaaactacttattgataaaacggcaaacaaacaacagtacctgacgagaatggtacgcctgtcaaactcatatagtttcagtttgagtgcttcgcccagaaatatgattaggtcaaagtggaaaatggcatttgagcatcgagcaagacacgacggattcagtgatcaaatggggatgagtggaggaaaatctcataagaacaaaattgttagagcgtttctttattccgattcagatgcgtctcacctgtttttcgccattgaggctcttccccaacttttttctccaactgactttgagattgattatcatatcacttctctcgccaggtttttagatgaggaatgtgacgagggttcagaatgaaaattgtcaggacctccccatttgatcgctattactttgctgatgttaatctcagtttcattgataggctttttatcaaactcaagagtgagcggcctacgtttaaccgaagcatgtttgatcaggattttgcgagaattttttgttctggctccagacaaagtagcaacctttttagtatcgagtctaatgacgatgagcttacaaaaacattatttaggtatattaagacaagacatagatctcacaacattgataaaaaaatgcgtgagttagttgaggaaatagctcgatcattggtttcgttcggtacggcatactactttcttcatgattttcctgaagaggaaaatatctgcatcgcgtctttcagtggaatcggcgttttcagttttttaaatatatattttcagttagtgccacaacgatgtgaaaagaactggaatagtgaggacagggaatatcccagagaattacgtatcttggatagagctaaattgatgcactttagtatgccaagatcaattaaacggatgctgtctgaacagaatcggactttagcggtcttggatggacaccaatatgacggcactggattctttcctaaggcgacacatgaaaatccaaacccaaagaacgactttgatttttgtgtttggagggatacgcaagagcgagcattgtaccgtgctacccgtgaaactggttggaatggtagaaagtatgattcgtcaaaacgttcagactttttcgtttgtcatcgtctgattcggtttcggcgaaaccagctgattttgcgtgattatatactagagttgctgggtaacgagtttacgagaataggtcgtcagtacaatgcggagtttcacgtcgcgatttcacctacaaatgctctgcctaaagttgataaacttgacgatctagaagcacgattactgaaggaggaagccagttttagcgaggtgttcgatttctgctatgaacgataaatggattcagtatgaattataacaatcttgttataattaagagattatcagttttgtgtatgtggtaaaatcttggcgagagcagattgacctcacgtctgcaataaatgtccaattacaaattttgtcaatgttcgttcctcgttattaatggctgtcagatttgttcatctcatttgattaaaggggggaatattccccctcatatctgccgtaaagattgcccaaaatagcgttgtataaaaaattcagggggtcaaaatggtggtcaatacaatatttaatttatgaaatacattaaaaatcaatagactgtattttttgacgagtccggccttcgaccatgactatgttcatagcagttcaccaaagtccacttatctaagaaaactccttataaatcaaataaaatagtctatcaaggtctattatcgtccgttacaatccacatatctgtgggggcatcttccgattcgattaataatgtgcccccaacatgaaactcaatgccaggcaaatagaggcagcaaagccaaaagataaagcctataaactcgctgatggtggcgggttgtatctggaaattactccgcgaggttcaaaatactggcgtatgaaataccgccgacctactgataaaaaagaagacaggttagcatttggggtttacccggtaatttctcttgctgatgccagagctaaacgtaatgaggctaaaaaactgatagctaatggtatagatcccaaagcaacacagaaagagacacaagctgaggcatcaggcgaattcaattttgaaactattgctaggaaatggcactccagtaataagcggtggggtgactataaccgggcgcgtgtactgcgcagccttgaacaatacatctttcctcatattggtaaaattgatatccgtcagttaaagacccgtgagctacttgtacctataaaagccgttgatgatgctgataaggtcgatgttgctaaacgtctacagcaatgtgttaccgctattatgcgctacgctgtgcaatgtggaattattgaaagcaatcccgctttagatatggcgggggcactttctacaacgaaaaccgaacatcatcctgctttaccgcctagccggttacctgaattactcgaaaggactgctttgtttaaagggcgtgaagtgacacgtatcgctattgaatttggtttattgacctttgttagagccagtaagctacgtttcgttaggtgggatgaattcgactttgataatgcgatatgggaaatacccggtaagcgcgaagccatagaaaacgttaagttttcagaacgcgggatgaagatgaaaacaccgcacatagtaccgttgagcagtcaagctatggcactactcgaaaagcttaaagaatatagcggtgataatcgatgtttattccccggtgatagagaccccaataaggtcatgagcgaaaacacggtgaataaagcacttcgagttatgggctacgacattaagacagaaatttgttaccacggatttagaacaatggcgcggggcgctatgggagagtctgggatttgggctgatgatgttatagagaggcaactgagccacttggaaagaaataatgttaaagcggcttacctacacacatcacatcatttagatgaatgtcgccttatgttgcaatggtgggcggattacctagatgctaataggcaaggatttatttcaccctatgactacgcccaatcaacaggcaggggataacatctccaccactgaaatgtagttatctactcttttagataatttaggattttaaaaacttatatataagtgttcatagtgttcatttttatataaatatagtaattaattatttgataatattaataagttttagagtgaacactttggctataagtattcacttctaaaagctggcgggtgatagataaccctgcctgaaaaccaccacctcaatttgcaaaatactacacccttaaaactcaactctgcttatccagtataattaatataaatcaattagttatgtgcgattcgttttatctcttttctttgataaaatgtatcaactggtacagaaaaacccagatcactttatagctttcactatagaaaactataggttctaactacagaaaactgcgcgtgtaaaaatgcaaagagatattcagaagatacttttacattggggtggttgggttgttcatgggcgctctggccttggctggtcatctgttaccgctggatttaaaggcttggtgagccgaacgagcattactaagctttcatgctgtgacgaggatggactgatcattgatgggtgtattgcgaaattgcgtaacgtccagatggaacaagaatgcgattttatcgaatgtcactatgctaaaggcatgtcgaaacgttctataggccgtaaatataagttaaatgaaagtgaagtccgtaaacgcatggcaatagctgaaagctttatcttaggctgcttaaccgcatcggatgaaactttagaactggatttactttatggttttccttgccaccagcaacccgtaccgcctcaaaatgtcgctgcttataggtaaatctgcctgagtagatagtgtgacttttgaaccatgctaaaaattatctaatagcctcgtatggttgtgacgaggctatattaatgagattcgttacgaacgaatcggtatagacgtttgaggctgtataggcactaaaattttattataagctcgtaatatgtcattatataaatcttgatgttttgcggcctttacagtaatgattagtgcatattgaattttgtctgctttatttcccggaacacttcccccggactctctagcattataatgtatgtcgaatactggactttttagagtggaacctagcatatttttagatgcatgaaggacggtttcccattttcccatatcagaacgttgctcgctttcagtggcaaattttttaagttcgaaaaaacctgcggtttcagcgttctttttaccgtctttaattctagagtcattcggcctaaaagatacttctaacccggcttttgtatatgatgctgagtcttgtggatctgtagccgttgcgtaacagaaagtagcggttaaatttatttttcctgttaagcctgagattggtaacggaacaggggctcttaaatatttaccgggttttaattccccttgatatacgatgcgtgctacaccattagggctaacaataatatcatttaaatcttcaggtattttcccccacccaacttcaatgcttggatgatctttattttttgatgagtgaatcaatagtgctttaattgctaataagttgagattgttacctaaaatagctcttatgcctacagcatttcttagtgcatatggagcagcaaagctagtgccacgctcaggagtaatattaggcttagagccttccgtgagaacatgaaaatattcagatgtttcacccccaaaagctacaatatcaggtttcattacaccgggacttcttcccggtccaattgcactatacgaagctttttgccagttatcatcattagttgaatcagatgcaccaattgctaaagcgtttacacaatcagcggggatttgaattctggcatttcctgattctttatccatatctccattgtttccaacagcgacggtcattaaagtttcgccatcacttagaagatcgtcaataacggatgtccaagcgtgaacctcagtatcttcaatcggtaaatcagggcctaaacttaaatttaagaattgatattgcctagagagtaaaacctcttcgattaaacctaaagttcggtataactctaacgggtcttcttcatatgctttattatctagaactcttaaattatcaatatacgcgtacgggatagggggcttaacattgctttttatcggtccaaataaaaatgcagacgaaacgcctaaaccatgttctaaagcatcgggattgtcattcgcatgctcgtctaacacccgatatgattttaaccacggttttattggatgcttatcaggcaacccaccatcaagtattgcaactcttatatcatttgatagcggggcttcttcggggagtgtacacggtattgcggtaccggatgttcttcttaaaggccttaaacctcttaatttaggaacaggccttattaccctaacgaaggtaaactgagctagtttttttatagcggatatattaccttgcacgggtaaaaaccataaagagccggccgtaaaggttagatcagagtatacggttatatccaatgactttgcataatcgataaatttacgctggacaaaatcctcatcatcattttgaagaagatgaattcctacttcgaaatgtgtttcttgtatattttcaggaataataaaacgttcttccggtagatatgcttcaaacgcttctattctggcgaaatcaattgattcagcagagttattttctaattcactgatccactcagataaatttctaaatgctgaacgttttccggctacaaatagctgagtagttgggtgctcaataacatctatttttcttttccatttttcaggtacaatttttacagttttgctacccacagattttaaatctgtatttctcaacatagccgtagggaaataagaccttgcaatatagctagggttcattgttaatttggctactgcataatcatgcgggcaggagtgtgctggtagctttttaaatatatcgttagttgtttgtatttgaggtgttaaacgtttttttgcttctgttagtgtataaacctcagatttatccattcttcttttaggcgatgggatatcatgtgttaatagttcgccacgaccgatcaaaaaattagtattagccatataatttccttactaaagcccgttaagcagcactgtattttctaatggtgtctctactaacacctgttaaatctgatattgcatgctgagatagtttagagtttttacttaaattaatagcgacatttcttttttctgttttatcaagctttgataagctatctttaatgaaatcttcaattagtacctcatcagatgcgatacctaaagctattgaacgacgaaatttgttaattgaacgttcaatattgctgaaagactcatttttaaacaggattacaagaatatcgatccatcgagcaaaaatggcataatctgaacctagaaagcgttgtatagcttctttgattgtttcgctatcaggtttttcaaaatgaagtacaaggtcaaatcttctccacaatgcgggatcgataagctcttcatagtttgtcgcagcaagtaacacgctagacgaaggccattgatcgacttcttgaagaatcactgtaactaaacgtttaagttcgccaacatccgaatcgtcacttctttttttagctattgaatcgatttcatctagtaataaaacacatggacctcttttggcaaaatctaaggctgctctaaggttattaccacttttgcctaaataactactcattactgctgttaggtcaagtacatagaaaggcacgcctaatttttgggctagccagcttgccgttaatgttttacctaccccgggaggaccaacaaagatagctgaacgggtcggttgtaatccgattttttctagtttattaatgtttttacgttcaagaattagctggtctaacgcatcttcaatccctgtatttaataatggctttggtatcgcatctgtcgttggtgatgtttttaatagcgttagtcttgaatcttcatctactggtaaggcttctgaaattatattaggtggtgtagttgccttacgtaagctttgagttttcttgaagggcttactacgtaaatacaagtcaagctgtgctgatagctccggcgtgttctctcgatacttacgtactagccgtgctacatatagcctaacatcatcgtactgctcgttaataaccaatcttactaaccgggctaaatctgcctgaattccaattaattcgcccatttttttaaaacctcttatttattagtatgttgaaataattttatctggactattttaatagtatctcactttttttgttttatgaatagtaaaacctatatatatttacagttgtgagctgagcagagttatcggagattacatatttttaaagtaaggagatgaagctgcaatttttataacgtcgacttagtgaatgcatgtaaagagagcctaggattacctatataggattcatccgttatggattctatgtttatatgggttaactaccatcgggcaaggggattgatttggggttatgctaaaaattgcaaatgaggtgattaacggagtttcattttatggccatgtttgagtatgcaataagtaatgaaacaaagcggctacttcatgtggacgatgctaagaatgggcgaaagtgtaattgtgtttgccccggctgtgacgatcagatgatcgctaagcaaggtaaaatcaaagagcatcatttcgcgcatgcaacatctgagaaaaaatcatgttatatgacaatgcttcatcgatttttccaagagtatttttctgaacaggaaattttagatataccagaagttaaattatcggttttgggaagagaagtagatatacctcgcagaaaagttaaaatattgaatgctcaactcgaagcaacaataggtagtcaccgtgcagatgttttgttgctcactaatatatacccgcttaacttgaagatgcaggattcagaacctggaagttgtcattaatacggcccgacaggttcctggcaagttccggtaatatttccgtaaaaaaacgatgtattgcctgtctgaacaagaccgtcgaggcgaaataaggggtattcctgacctgttcattcatcaccttccacagcctttctatcgggttcagattcgggctgtatggcggcaagtaatgaagagcaatattcatcacataagcccagtctttcaccagtctgcttcggtggtaaccggctccgtcaaggataatatgaaccttctgactgaccggataagtctcacggatggcaatgaagaactcggcgatgtgataactgtcgatacggtcatactcacgtactaccgttttgctgatatcagccagattcagggcccccatcaggttcagacgggtacggcttcctgtggttttcactgcggttttctgccctttgcgcatccagccataagcgagtttggtcccctgcgtgggatggacgccatcaatgaacaggatgggttcatggtctccggcttcctgcttgagtttcccgtaggtttccataaaggcccgttgctgctccgcgttgaacttgtgcggcacgccggtcggtcttttataactaaatccattatggtgcagccatttattcatgccgggaacagtgtaactgatatcccatgtttctttgacaaggcggataaccgcttgtgtggtgggcagaagattcgcggtcagataagcgataagttcctgagtctgtgtttcgctgagatggctctgagagccgccattttcgggcttgattttgcggtgattaaggtaatcactgatatgacgattaatggtcgtttcatgaagacgcagggcctgagcgatcatcactgaactctagccctcagaggccagcaggaccgctttgatgcgatcacactctctcttatcccggcaggtgtgatggaggtgttcaagttcagctttttgttcatcggtaatgaatattttcatgactgataccatgaacctcatttgggcgaaaatcaagcagtttcaatgagcacgggtatatagccccggtaactctaaataagtcgttaagcaccgcgattgggcggtgtttctcatcttgcagcaacgcatctcagacgggcgctccgcatacgcatcatcactacacgacacacatgtcagcatatacgaaacacaacagcgccattacgacgcgctggggtggttttgttgcatggatgtgctcaggctgtgctgggactggcgcgggcaggggattgcaaggaaggaaaacgcatgtaaagccatgcaccttatgcatgcatggttttttaggaaaaatagcgggattttcggggattttacacaggctcctgcctgaccagttcagccttacggagtgcataaatcaggttctgcacgggtgtatatttttcctgattatctgccagcgaagccatgtgaggccggaatccgatggctgttaaaatatctctgtcctgcgctgaatatttaatttctacaccggcggctaaccacactgagagggcttcacgcaggtattcagacgagtggtcaagggcgcaattttttatcagcgctggctggtcacttaactccgtaattatgcatttaacagacatggaagcttgtgcggcaaagtctcgtgaaaaagaatacaaacttactgatgtataaggtttgtctcttctcatcaaacccagttgttcaaaatggtggtatctgaaatatcggtttgcgggtagggaaagctagggagcaacacgatagtattaagataatgatctgtaatggcatcaatctcagtaaaaaaaggaggtagaaaaacaagaaaatgtcaggctggggctgaattattagccccttaataacctcaagtattatttgatattggcaaaggtgcacagcaatttagctgcacactaatacagtgccaggcgcaacgcctctttctccgctagctataaagcactaagtcaaagctcggtttgtactggttaataaccagaggatcgcaattttagctatttgacatatagtgaagttatcaggtcagcgtttctgaacctacccttaagcttagcgtgaatcatattccttatctaaccgttcatacatgctcatagcagattccatccaactgtaatctattcagcaagtaaaccgccgttacctcttgaacattggttttttctgttatagtcacaacaacaatcatttaaacaactttttgatttttcttttctatttgataacgaacaggacgaccgagttttttcacttgtccctcatcaatagctcgttttaaccattccttcaattgagatttatgcagaccagtgttctcgataagggtatcaagtgtaatagggcttactgtcaatcgatggagctcagtaataaacaattgataaaaatccacagcctgcattacagttttttctgcttctgcttctgcttctgcttctgcttctgcttctgcttctgcttctgcttctgcttctgcttctgctgctgctgctgctgcttctgcttctgcttcgtgatcgattgaaccctggatttcatcttgttcgattgagtgagcaacaattattcgattttccgctacctctagatcaaattccgatgcaggtttcgcaaataattctgactgtgctggcatgaaaaatagatcaacctgttcagcttctttctgcgaagcagtagagttttctacggagaacaaatcagaaaccttaaggttgtgaacatctgcctcacaccaatgccctcccttcgcaactaaatcagtatttgccgcgctactgtcattcgttggttttacccataatggcacccaacactttttcaggttttcttctgccccgcttagtgtgccgccttttttccccgagtgaattaccagcgagctgtctgccaagcaatagatatatttgtttcgggccatagcgtttccagtgctgaagccagcctcggggtaaaagggcgaaatcagcattacactgccattcatcaaacccttgcgccattttgcgctggtagcggctttcaataggctatctgccagtaccccaataacgttgccgccaccaagcattgctcccaccatagccgtctcatccacaccacgggcaccaccggatacaatcgcaatgccctctgatgccgctcttgaaccgaccagctcggtataagacaagtccgcattgttggcctcacgtgagccaataaccgctaaaccaccaacattcagtaaagctttattaccgcaaccaaatagcacaggcggagagtcggttttcaattgctgttttaagcgcttgggatattcaggatcagagcgggtaactacccaaagacctgctcgatgccatttttcaacggctaacgccaggctgtggccacgattcagtaactgtataatgcgttctgtgctgatgcgggaatcctgccaggtgcttaatattgatttaggctcagataccaacaaatctgctggtgttgtggatttttctttcagccataacgcaaacctaccccattcagcattagtgaggggtttgacatcatcactgctcgccttggaaaaataactagtgagcaataatgtggcttgtgctgttggcgataaattcatgagtctttcaccgaagaagaggcaagtgctgcgggatatacaataccactacccgcttgctgtaacaaagctgcaataacggtaagagtccaaccagagtcaacgatgtcgtcgataaggagtactggttgattttgtataatttgtgttatctcaaaaacaccgtcaaggttgtggcattgatgaaaactattttgttgttccttttggggctggttatcttgaacttttgctaccgcatcaacaaatgtcaggttcaatctttgtgctaaacgacatgcaaatgcagggactaaattcgggtgtcttaaggaaggaacacaacacacccaagttggactaggattaggctgccaacgctgtgagatcatttcagccatagcatcaactagttcatcagaaaaataacccgaatgtttattttcaataacagtctttccccaaccagcatctccccatcgagagagaaccctacctggctgagcaactaagcaacctaactgccgtggaaaacaatatgtaggaaaggctcgattagaagttgctacctgttttcttggctggataatcatttcggcatgtttaagaaaagtgcctgcctgatgaactaacactggattaatagcctgattaacaacaggctggccgatgcatgacgagcatttgccacaaggtgtagggtcgtgatcatccagtacacggcgcaagaaagtcatcttacatctggtatctgacagataagcctgtacttcagcccactcttgcttacgctggttggtgaggtgagcgatacgggtgcgatccatagcataaggcacgggtattctgcgccataagtttccgactttaatcacaggagcggtgttctctgtacttagcagttttaataccttttcaatctggccatagcgtaggttggtttgctcttcaatgctacgaagcgataaaccatcactattatctagtacttgcaaaatttcgtttacctgagtttctgatgggaatgccgaattcctgaaaaacttatgaatatcttgatcttctataccagatatcaacacaccaatagcgttgtcgataccacgccctgcgcggccaacctgctggtagtaagccacgatagaacctggtgcttgatagtgaatcacaaagcttaagtccggcttgtcgtaccccatacccaatgcagtagttgccaccagcaccttaagttgattggttagcaataactcttcaagatattgtcggtaatcgttactgttttcaaaaccatcagcctcaatactgctatggtaggctctggcatttatgccattgacgttcaaccaatttgctacctgttcggcatcacgcactgttaaggtgtacacaatgccagtaccatgcaatgtgggaatcacttgcgccaaccaagctaggcgagaggattgatcaggcagcaccatagtttgtagcgagaggctttcacggatcagtggaccacgctggatctggatattacccagttgtgtttggatatcagccaccacgcggttattggcagtggccgttgtgcctaataccggtgtattaggtggcaactggcgcaaaatattgactatacgccgatagtctgggcggaagtcatggccccagtcggagatgcagtgggcttcgtcgatcaccatcagagcaatacggtcagcgataggatgaagcacggtttcaatgaagttatcattggcgagccgctcaggagaaatcagcaggcaatctatttgattatttataatcctttgtgtcaccgtctgccagtccgctgtattggtggaattcatagtctcggctatgatgcgcaggcgctgggcggactcaatctggttacgcatcagagccagcaaaggagaaacaataatcgtcggccccatgccgcgatcacggaaaattttggtgctgataaagtaaactgagcttttaccccagccagtacgctgtactaccaacagtttctgccgttggttaactaaagcatcaatagcttcccactgaccatcgtgaaactcagcatttggattggctagtgcagtttgtagtagttgttgggcctgagctcgattcattatcactccttgtttatacaattagctcaccattcattagcttagataaccctaatcaccttcaggttcatgttacgaataatgcaatttgtgaggcagtattacctaacggtataaggactgtttactcatttcgttattcgttttttgatcattccaccttggagttattgtaaatgatgatatgtccccactggcaactccttggctacatcacgaaaccaaggcaaaccatgccataccgctggatcgccaattatgaaaatgtgtttttttgctcgggtgagcgcaacgtttaacagattaggcttgctggcagcccattttgcgccaccatcattattttcgtcgcagcctaggacaaaaatgacaatatcgttttctttgccctgaaaagtatgcactgtaccaatacaatttttttgccatacgttgagttcttttcgtgtcatcaatggcatagattgccgccaggtagccagatcacgctttcctaataattcacacagtgctgacttaactgctttgaacggtgtaataacataaatcgaatgaagagaaacatttgcaacaagcagttggtccaataacttgagcaaatctttaccgtggctgtcacgatattgtttttcacctgtccctccaaccgatgccagccaatggttttccagaatgttgttcacaggttggcagcgaatcttgtcagcatcaagcccatgaatcatgcggccattgtaggccatcttattagccaaactgaacattggttcaatacaacgacggtgtacccacaatggaatacctagccagatcaggttgttcatgacttctaattcacatccccaatgattgacgcgatcagcaacctgctgcactgaaagtaatcccggattccagtctttagccttttcattcagagcatctaggcaaagacgttcaaccaacggcggaggggtcgtaaataccggttcaatctgcaaagggtctccaacaaccagtacccgttttgcacgccagagtcccccgacagcttgttgtggaggtgcttggccggcttcatcgatcattaaccagccaagttcttcgctttccactccgtggaacatgcgccctatagatgcgaaagttgtggataatacgggcacaaacataaacagcgtttgccaccagcgtataggcgtgattttggaatgaggttgtgctaaaaaagccgcgagattaaatattatgaagtctctaaaacgaggtactcctagtgcttcataaagccaagcctgatgaagttccatcgctgtgataaataatgcggaacgttgacgatttatctgtgcgttctgccaaagggccgttcgttgtaatgttgcatcagtgataggttggttgatatctggcaatgtgatatcggaaaactgctgcttcaaagtttgtagagaacgatggtcattcacccgctgttggataattttttcgatatcctgttgtaagattcgctttttttcagctatgccgttaactgacttgcgttgttccgcaatgcgctgggcttgttcggtttgcaaccccatcagtcttaatacttcgtgttgtgcacaccgcaacgtttctttatatgcatgcactcgcttgcgattcatcagacgcattagccatcctggtgcatcactttcgataattttttgttgctgttctgcatgctggagctgtttttctaatacatcctgttttgtttccacctgttccagcctgttaagctgtgttgcgtacagttcttctgtttgcttcaactttagtgataacgtgtcgagtgaatcgttatgctgtttttctatcagatacacaagcatttctaattgctgttgaagtttttttgttttttccagacatacgaggaaacgttttttagcggtggcgaaagagatggggttgtgatagtgcctccagcgccaaagactgagaaagttctcttcagcgggacgagaggcttcagttggggtgtcgcgtaaaaaatgttcatcaaaaaataagcgatcagaaaatttagtccggtttggtttgttgcccaaagcagcggaaatgatcccccagcattgtttctcttccttcaatggacgatagaggtgataggttctaacttttccctgactatttttactttttttatgttcgcgcttcgggcggttctcggcagctatctggtttgcggttggtgctaaatagtcaagcgattggaattcttcagccaatgatttcttttgcggcaattcttttgatatgttttctgctgcggcgttgttggatgacgcaatgaccatttcgaaaccagtgagcgcattcacaataaaaccggaattgtccagcgtgtcatcaactttttgataacgcgtaagtatcttcgctcgttcaacaatgttatgtgctattagatcgcgcagaagcgttgtttttccagttcccggagggccgttgacggaaagcagcccaccatcagcgagctcttctatcgccgtattaatagcaaattgctgcattagcgacatggcatgtttgggatcggaaggccagcgtccatgaggcatcttcgctggatggagtttactgatgatggaggcaagcccgtcttgtgaataaaggtctggattcctggggacactatgatgagaaagatatgctctgagagctttgcatctatctcctcgttttagggccgtaatagcgtattcaatgtcctcaaagaaaaaactatttaaaataggaagtgcaaaggttttatcattagagctgacttcttcttcaatttcatcgctattttcttgtgatgcttctgtacagtcgccatttccctccatccagtctatttgtaaagcatattgccattggggttcaaaatctgcccaactcaccagatgtgtcgtcaacagtgttaaaatatcatttgcttttaaaataccggggccattttctcgtattggcttcagagagacgctaaagttgccgagggtatttttaagatgctcgcaactggctgaaaataccttcgtattaagctgttcaaaacgttcatcacgcaggtgccctaaagcccaaggaagagaactcactgaaaatttatccagagcagggtttccttccgtgcctaatggaattttggcaaagcaggttgttccttctttatccagccgttgctcaaattcttctgcataatacccttcatctggaccaaacaccgcttggctgatcgcgttagcgatagctttatcaaacaaaccgacgtacaagttgtataagactttttgatcgggaatatcatgttgttgacggagttctgacgaaagccagggtagtgccttatctcccagctgatagagtgttttaagcggaattagtaagcttttatcttttttttcaagtgtataaggttggaagaattctatacgttgccaggtacggagaatatcattcgaaagggaaattgcggccatcatagctctttgaattatctaataaatgccttgaatgataagagtacagcaatcaatatgggttttgtaggcgtttggcttaagcgttatgacatacgtcacagtctggtaacaaagccccccatactttattcatcttccttatcacgaagcactattcgggaatgctagctacaagataggttaagtgtcgtatatttgctgtgatgaagaaatagccagaggagaacagcaaattaaatggataatttaataaaattattccctgatgttgcggatgcgagagcatcttcacttcgataaaaatgagccccaaaatgaagcctaatgttcgtcaaatcgagaccgcaaagcctaaataacgttaactttacctaagaacagcaattattagcatcacataaattcaagctcggctttttgggttggaaggtataaacaattaatcccgaaacaacctttaacaaaaagccgaacatattaagctacactggaaaagagaaccaacacgttacattagattcctgcttaacacactacacacattggtttacctgaaacgggttcggggtgaatttccgcttcgatgctgaatacccgctgtaataatttcggtgtcataacttcctcgggtgagccttgggcgacaacctgcccttgggaaagcagcaccaggtggtcacagtaccggctagcctgattgaggtcatgaagtacggtcacgaccgtttttccttcgttgttcagttcacgcagtagcttcatcaattccacctgatggttgatgtcaagatatgtagtgggttcgtcgagcagtaccaccggcgtatcttgggccagaaccattgccagaaaagcgcgttggcgctgcccgcctgaaagatcggtaacgcatttatcggcaagatggctaatctgcgttttttccattgcttgttgtataagatgacgatcatgaggtgctaaacgcccccaaaatgtaagccaagggctacgtccgtatgcaaccagttcatggacggcgatcccctctggtgtgagaggatgttgtggtaaaagcgccagatgtttggcgagcttgcgtgaggaaaagtgcgttaaaggttcactatctattgttatctttccggataatggcgttaatagccgcgaaaagcatttcagtaatgttgattttccgcagccattggggccgagcagcgccgtgatttttccggtcgggagggtgagcgacaggtcattcagaatgcgtttctccccatagcctgcagataacttttccgtagccagttgcatttaacgtgtcctcactaaaagccagaagaaataaggggcaccaatgatggcggtcagcacgccagcaggcagctctatcggtggcgctatggtccttgccagcaaatcggctagcagcagaacttgtgcacccataagcatggatgcgggtataagccagcgatgccgtcctcccacaagtctgcgaacgagatggggtactacgaggctgataaagccaatcggaccacaaacggcgacgcctgttgcggcgagcgctactgccaacattaatccccaggattgtacgtgtgggagcgaaacgcccagtgtgctggcgctgtcatcaccgagtgccagcaaatctaaatcgcgacaaaagcgtaggctgagtggtatcagtatcatcaataccggtagggctatagctacaaactgccagtcgcgcccccacagactgcctgtcagccacaaaagcgcgttgttgatatcttgtgggcgtgagagcattaggtaatcggtgatgcttgtccaggtagctgaaagtgccacgccaactaatgcaaggcgcagtggagaagaggggccggcgatcgctcgtagcaggattagcgcagccattccaccgccaaaagcgagtagcggaagccactgcactgacagagaagggaaaaggatcagcgcacttaccgacgccaggcttgctgcatgattgacccccagtacatcgggggaggctaaaggattacgaacaatcccttggaccaagacgccggaaagcgccagcgcagcgcctacagcgatggcgagtaaaatacgcggcaagcggtactgcgttagcacaaagtggtgtttgtcaccgggttgccagccgcttattaaagcgtcccagggaagtggttgcgtgcccatgcgtagcgctagcaccagcgtaactgccagcaacacgactaaaagtaagataacctgacgattcatgttcgcttccttgctagccagacaaagcaaggagcgccaatcagcgccagtaccgcacctgccgggagttctccgggccaggccagcgcacgggccagtaaatccgcaagtagcataaataccgctcccagcaacatgcacattggcagtgtgcggcgcagatcgtagccaacccagaaccgcgccagatggggcattagcagaccaataaacacgattggtcccgctacactgacgcaggcccctaccagaatcagtactgccagactgacgaagatgcgcagtcgcgtcaggttcacgccaagcgtatgggcactgacatcgccagcgttgagcagattaagtgatttcgccagcaacaaaactacaggtacagtgaccaccacgaaagggaatagttgccagaattcaggccagcggacatgggagactccccccgccagccagtaaaaaatgccgtaagcatgatcttcggcaagcagtagcgtaatacgtgttagtgccatacataaggcagataaggcaatgcctgccagaattagttggttgcgatcgtatttttgttgccagctaccgcttgcggccatcaccatcatccagctaattccaccgccacaggccgccaccaaagaaatggaatatccggctagcggtgccgggctgaaagcgctgaccaacgccatagccagtgctgcaccactgttaatgcccagtaaggagggggaggccagcggattatgagtgagcgtctggaggagtgcaccggccaatgccagagccgcgccaagcagaatagcaaccagactgcgtggtagccgcagattgataaccagtgcttcaggcaatgtcggtgtatgacctggcaccagtgccttgagtgcgctgatggcgggaatgggaatagcggaatagcaaaacaggcttagccagaatgcactaagcagtgcaaccaacggcaatccccaaagccagaccggatgatggcggcgtctcatggtgtttcattaaccggttgatggtggaagatttttaccgcatcgctgccaatgcgttcagcggcaaatatcccgcgcatacgagcccaggtgttgctgtctaccgctgctatctgatgcttgtgctgtgctgtcatcatctgccacagagtatcctgctgccagcgtttcacgatgctttcctgacgatagtgggccacgataagccagtcaggattgagtgccagtaactgttccaggttgagagaaaccattgccgcatgattaactgatgcgggaacttttagccctaatgctgttaagacgctgccggtataggtatcgctggagtgcaggttaaattgctgttcgcgcgaggtgccaaaaaccacactgacgccttgtggcaactggctggcatagcctttcatgcgttcacggtgctctgccagccgtttctgcatctcactctctttccccatgactttgccgatgatcgcggcagattgcaggttctcttcgtaggtttcgttgcgggattttagcagcaggacaggagcgatgcccttgagtgcccgataaatccccgcgtggcgttgactgtctgcaatgatgagatcaggtttcagcgcgctgatggcttcaaggcttggttgggcgcgagtgccggttgattgccagggcttaatacgctggcgaacatcggtgagaatgcgctgcggatcgttatcatcggcaatacctaccggactgatattgatggcggccaatgcatcggcaaatgacaattccagcacgactacgcgctggggaacggtattgagggtaaaactgccctgctcatcctgtaccgtgaccgcaatggcatggggcaggctggtgaagaagagcaaagcgataaacgtaacgcgaatcagtgcagacataacttaactccagaaatagcaaagccgggcaatggcccggcgaacggattaatgtaacatcagaactttagcgaactctgcatatagaacgtacgtggctgcccggcgtagatgcctttgttattatcatcataggaacgggtgtaatactcgtggtcaaagatgtttttcaccccaaaggccacactcagattagccatttgtggaccgaagtcatacgccacgcgcgtatcccacagcataaagcccggaatgcggccggtgctgccattggcgctttcctgcacggtattcgcgttatccgcaaattggctggattgggatgcgctattgaggttgaaggtccagttacccggtttgtaatctatgccaaatgcccctttatgtttcggtgagaacggcacttgattcccgtaggtgttgccctcttcacgaatttccgcgttgacatatatgtagctggcgtaaaccgaaacgttattcagtttgggagtaagttcggaaagatcgtaacgtgcctgagtttccagcccagtgtgtcgggtttttccacgtgccgtaaccgtatcattagtctggttggagtcgtattgattgttgaaattaatcaggaacagccccatttccgctgccaatgcgccgtcgtcgtagcgagttccgacttcccaggttcgcgccttttcaggttctacattgccgcttttcaccgctttgccaatttggctgtactgtacggtaccgaacgagccttccgtattggcgtaaagattccagctatcagtaaggtgataaagcacattgagtgcgggcaacggcgcatcataactgacttcttggcgggtaccttttacattgttgttttggaaggatttgatatgttcgaatcgtatccccggcgtgatggtccagttgccgatatcaatgcggtcatcaatataccaagcatgtgcctcggtgccggagcgggtattacggtcataagggcttgacgtgctgggtaattcgccgctgctggtggcggtgtagtaacgcatttcgtgactggattcattcacataacggtagccgatccctacttcgtgggccgaaggccctaaattgaagagctggctatagcgtggttcgatgctgcgcacccaatattctcgtggggaaagagtaatgcgcttgccctgctcaagataaccgctgcgcaaggtatgagtatataagccctgaatattgaatttgtgctgctggtcgggttgatactgatagctgagacttgcgagctgacggcggccccagaagcggtcatatgggcgagtggattgccagcgattggcatcgtaatcggcgcgtgaaaggcccccgggcatatccgcactgccatcgtaatattgcagtagactattgaaggtgtgcacttcattgggagcatagcggcttttgagcatcacatcgtcaatgtgtgtggcgctatgttcgcgccagtcgctgccgcgtgtgccggagtagagaagcgccgtgccgaaaccgttatctgctgtaccgccaatcatgaaattatgggtttcttttggattattttgtgaagatgtggggctaagttgtccttccacacttgcgtcaataccaaaatcctgcgggatagcgcgggtcacgaaattcaccacaccaccgacgctttgtggcccgtagcgcacagcgccgccgccgcgtaccacatctactgcgtccatgttgccgagagatactggcgctaacgatagctgtggctgtccataaggcgcgaagggtaccggaacgccgtccatcaaaaccgtagaacggctggcgagacgagggttcaggccacggatgccaaagttcatcgccagatcgtggctgccggtaccattgttttctggtgcgttgacgccgggaatgcggttcagcacttcacgcatagtggttgcgcctgttttggcaaaatcttcccggcggataacatcacgtgcgcctgcatgttcaaacacgtcagcttcacgcgcactacctagccagtcgcctaccacggtcagcacatctttctgcgcaacaggggcgggtttgagtgtgaacgtgttatcacccaatgtcttcacctgcaaatcagtgccgatcagcaaggtgttcagtccatcggtgatggagtaattgccgtgtagaccgcgactctgtttgccgcgggttaagctggcatctactgaaagggtaataccggcgtgggtggagtactgattaagaactttatccaattcgcccgcattaatgtcatagtgtgtgctagctggctctaccgcagcatacgttatccctgaggttaggcaagccaccggtaacaggctcaaacgaatcgccattaccagcggtgttgctttgtgaagcgcgcgcagtggctgtgcacgtaaaggcatcataacgtctccataatcattttgttgctgtattcacttatgaagtcgaacgaggaaacaaaaaggacaattgaaaatgataattttttacgttaacgatttttctgcgggcagaacattcacccaataacgggtaatatactgaatcttaacgggaagtgttttctctatgacggttaatatcgtatcggtattttttatcgggaaagtaccgcttaaccgtaatgaggaaacggccgggtcgcagcgtaatataccgcttcgatagcgagcgagggttgctattacttcactcagaggctgatcgctgaagcatagtatgccttgcgtccatacgttgtcttcgtcggttgctgcggtcagttcaccaaaatcggtggcgctgaatcttaggctttcaccttgacgcacaatacatttgcggtcagcgctggtcagtatcacctctacggcatgttgctgcacgctaagtagtgtggtgttggcttcctgacgaaccgtaaatttggtacctagcgcggttagttgcgcatgacgggtttgtacacgcaatagttttgcttcggtatcatgcccggtagtgatggcaatttcgccgtaccggagatgtaccagacgttgttgaggagtaaaatggacatcgacggcactgtcggtattgagtgtaagcagtgtgccatcgctcagtcgatgatgctgaatatcccccttagttgtatgataatcggcccgcaggccctcacccacttccgaacaccacagttgccagccaccgccagctcctagcagcaacagtatgcttttcatcactctgcgtcgtgacaggtgagtttcctgaagtgcatggcttgccacattgccgggcacgaccagcatctggttgcgcagattttccacttgctgccacgcccactgatgatcctgatgctgttcgtaccagcgctgccatttttcagtttgcagcggactgacctgatcgctactcagtattgcataccagtgtgatgctgattttaatgcctggcggcgagagtgggttaacatggtgttcatatcagagtccatgttccaggcgaaacagcaggcagtgctcggtggctttggccatatatttttttacggaactgacagacacattgaggcgtgaagcaatgtcgctgtaggtcagattttcaagctggcacagtaaaaacgcttggcgcgttttgttgctcaggccatcgatcatctggtcgatttgctggagtgtttcaagttgacactgacggatttccggtgagggcataaacgcctcgggccgttgcgccagcagttccagataggctttttccagcgcgttgcggcgaaacagatcaatcattacccttttggcgatcgtacagaggaaggatttttggtcgcgaatggcttgtagcgagtcgccggccatcacacgcaggaaggtatcctgcgctacgtcatcggcgtcaaaagacgattgcaatttgcgtgtgagccagtttttcagccagccatgatgcgcgccgtaaagcgattcaaacgttagctcagcggaaacaacaatgcggtcagacataccctataacatcaaaagtcaataatcacggcatcatcttaatgtgagaatagttatcattacaatcactacgaaggttttttattttatgttgacgtaactcaagtcggcatagccgggaaacctatctttgtttctttaagatattggcgaaagcggtcaataaagactgagttatggccggaaaaaacttgaaatcagtcataaaagagcggtagagaaaggtgaaaatcggcacgaccaacccagaaagtagatttatacactgcgccaattaacctaaagaacgctttttacttacttcgcagatcctgatttactcaggctagactatgtggtttatcgtttttcgtgttatctgaaagcaaagggttacagaaactttctctcattcaagtagaagtaaatatgctttatcctgaacgtgataaagaggcaagtgtactatgagtaaacaggtaaaaacttaaatcatcaaaggtaaaaagaagtgattaaggattttttaaagcgggtaaaaaacttgacgttatattgatattaaaagagaaaacatcggaggaaacgggttttaaattgattaaccaaagtgataaaataacagtgttaacctaataatacgatgttatatcaaaacatttaacgggattaacgggattaaaatttattaaagaaatgggcgttgattttaataccattaacataccttttaccctttctggttttaaaccgggttaggagatgaaaaaactattatatttacattaagagcctatctcaatagacgtaattgttgcaggcagtttgagcactgcccaggttcaaaatggcaaataaaatagccctattgagataggcagtaaactactcaataaaaactattttctaaatgaatttttaattgaaaagatgaaaaaccttgtaacgggagttgctttataggtttatcatctctattaacatggttaaccatttctttttacctgcatattaattttttggtgatcacacgatcatttttatcggtgattaatcagctaagagttaaaaaaacaggtgctccattaatgcgaggtttttaaaaggtgaagggggactaaaaacggcctattgactaccatgtttaatgcatttatcggcaatgttattcttcggttattttgtattttactaacctgttatggctatttaaaaacgaaaatgtcgggggtttttgtttaagtgattgattttttataaataaactttcattcataataatggttgattgtatttaatctataccctatggatttcaagatgcatcgcgacggcaagggagtgaatccccgggagcatagataactatgtgaccggggtgaacgagtgcagccaacaaagaggcaacttgaaagatgacgggtataagtctattaatagagagttgaaaacaaactagtacgtaaaatgttattatcctaacaggatgatatgaaagtattttctcactgttattttgtgaagcaaactgtaaaaaacaatgtaataaaaaagggataaaacggttaatttggccggatttaagccctgaaaaagaggtgattatccgaaaaaataaaggggtatctttatatcattagattatttattggctaattcatgtaaaaaacaaatggtggtggtctataaaaactgcttaaaattatctataaaatagtgttaataaagataaaaagccggggtaacctacgttaggtaaacgtaaagtatgatatttcataatgattaaacttagtgaaaaagcaagtgttataagtggtaaaaacaacggttaaagttttatgctaattaaaatcatcggttaaaaaatgacttttaataataatttaaaatctgccaattataaagccattaatggaagcggagaaataaaaattggtttggttatgttttcggggagaaagataaatgataatatgagtccattaatccgttaatctatttttcaaaatgaagtgctttaataacgttttcaatcggagagtaaagcttttataaatcagttaaataatcgatgataaaaaaacggcatgataaaatccccagataactgatttaacagaatacaaataggagccctgtaaatacgtcagtttaaacttgttttaacccgttgaatagcatatttttgctatgatttgatttaaatcattttctctttttatgtttttaacaagctaaaatcagcttatctcattgtttttaaaaattattaaacaggaattttagcagcaacctgttattttagatagaaaaaaggctttatttatgatctgataattgtcgccaaacaaaatatcgagatcagagaataaagccgatgacagttatctccacaaaacctcagttaatacaattcttcagtgacattttcttgaaaaaattgcccgcagctgtggctttaatcagttgcggaaaagcgccttcgtcgattttatgaagacactggtgatgctcgccatgactcagttgcttgaatcgggtcatccggcgttggtttgcacaggaaaagcgcttctcttaaactggaaatcgggtatctttctgtttcggtcagttatgtataggccatagtgcattctcctgtggcgggaaagatgcctactatagcaactgacctcctttctgaaaaattacgcttattagttgaatccgccgttcagtgtatgaaatcggcttactgcctatcccaatggggctattttatttgcccttctttgccataaagagcgaacctaggcagtgctcaaaatcctcacgtactacgtgtacgctccggtttttccgcgctgtccgtgttcaaactgcctgcaacaattacgcctattgagataggctcttaatatgctttaaattccgctttctgagactacccctatataacatggttgattgcggggcaaagcctaaataacttttcaaaatagtagaacacttggagggaactcagtccaatttttgcaatctgatcaattgtagataatcccaaaccactaaacggactgagttatgcctatcatagcacctataccccgcaatgaacgacgccagatgaaaaaaattatccagaacacccgagataaagattatgctcgcaggctcatggccatattgatgctgcatcgaggcgagtctgtctctctggtcgccaaaaccctttgcgccagtcgttcttctgtctatcgctggataaactggttgactttatatggtctggaaggactcaaaagcctgcctgtgggcagacccgctgtctggaatttaatcccgctttatcctttactgtcttttttattgcaatattctccccagcaattgggctgcctgcgttctcgctggagtcttgagttttttataattaaaatcaatgaattattaaacataaaattatccatcagtaccttctatcgttacttacataaaatgggtatcgtgtggcgaagggcagccccgacgcttaaattacccgatcccgagtaccatgaaaaaatggcgaaaattaccgaggcattgtcaacgtgttcagaaaaacatcccgttttttatgaagatgaagtcgacatcgagctgaatccaaaaatcggggctgactggtatttaaaagggcaacagaaacgtatagtgacaccaggaaaaaaccaaaaacattattttgcaggttgcctgaatgttcaaacgggaaaagtgacttatgctgacgggttaaataagaattctcagttatttatcaatgtattggaagaacttgaacgccagtattgtcatgctgaaaccctcactttgattttggataattacagtatccataaaagccgacgggtcagagattggctggcttgtcatcctaaatttaatctgttgtttttacctgtttattcaccctggctgaataaaattgagcgtctgtggcaatccttacatgaaacggtgacacgaaatcatggctgtcagtatatgtggcaattgcttgagaaagtgaaaacgtttttaaattcatgtccctacaggaatagcagagaataaaaagagtgagtgtattataattatgaaaagttatttagaccttcaggccccttgtggtgaataagcttcttaattgtatatattttgtaatttatccgtaaccaaaaatagaatttaataattaaaattatgaaataataagcatcccagcattacaatacataataataaaataacataaaagtaattttttgtttaagctggttcaaaaaaaaacatctatcgatgattacttatttaaaaagtcaaaaaaataaagtaaagtgttgttcatttcacaattaataattggagatagaattttaatgatattcttgtatgtaaacgctgaaaacagaacattaacatatggagagaaaaccgtttcctttactgaaaaggaatttcttatgttgacgtatttattagaaagaagagatgaaagtaacataccgaccaaacacataatagaacatgtttggaaaggaagagcgaatgctataggtaaaaataatgttgcacaacttttatatagtttaaggaaaaaactgtctagcttcgactgtgatatcaatatttcaatttcaataaacaatggagggaagtgcagattaaacagaagcactattccagtttataagaaaaaaaacaaaataaaccatttttttgttaagtttttattaatggtgatgaggtgagtaaaatatctgatattccgtacagaattcacaatttatttttttaattaagaattaacatacatgtaaaattcatacaaatatttcgatattaaaatattatagacatatctgcggaatgtcgagaatataacaatttattctggtcatgtatccaatccgttgatggttgtatataatcaccgttttttggagaaattaaatggagacgcttgaagtaaaatgtcgattttgccagcaaactgaattcgttaaaaagcatagtaaaggggatgcggatcaccaacgttatcgctgtttctcctgcaaccaaatctttcaacttgaatatgcctatcgagcgtgccattgctcatatatttggaacgagaaaacgttcaggaaacttctcaagaagctcgcctcgttcaatgttgtgttctggtgtactgataatttcaagacttacaatctattaccaaaaagccagcatcgcgccggaaagatttttactcaacatattgagcgagagaatttaatgcgtactcgaattaagcggctcaatgtatgatatgataaggtcattggtatttttattgagagtaaatactatgctgataccaatcaacggattgaatacacaactatttattcttatatactagggattttattaactagtgtggtatttagatcggagtttatatagcggtaagcccggggcaatcgaatgagttgcaaaagtgttaatatgagaaattaattaacaaaaaagttttgattagattactttttatgattaattatcgagcaatttattaaactataatcacgtcatgtcagattaaatattgtgcgttaaatctattttgaaagattaatttaataaatcattaactcatgcggtagctctggctgcaatccgcataaattctgaattctatgacgatgtaaactgccgctggattaatattcataaagagcaacggaactagtttctatttcatcagtaacatgaaattattttgttatgtgattgaggagtcacttttaccttatgtttcaagttatttatccctgtaaatataaaaaagtcaataaaagcaataaagtgaaataatttaactattaatgtgtagtaagttgagtgaatcaacactaataggttggcatctctaatgctcccattgtttttggtgaaaaatagcaatgaggaatgcatgtgtactgcatgcctggatttaaattcagtactatagtttaatgcggaatacttaatcactgacttgtcgggttttacatatacaaatatggccgtgaattatacgaattcttaagattatagatggagtttttgatgatactaaattacctctatgaagaagaatcaataagctggatagttattggattttttgctgcatgggggggagtggtgaagtatctgatggacaggcaaaaagctgacagaaaatggaattgggttagtgttatcaaccaaattgtcatttcaagttttactgggctattaggcggcttgttgagtttagatagtggtgccagtcattatatgacactcataattgccggactttttggtgctatgggcagtcgtgtattggaaaatctgtggcaacgttttttcattacaacaggagaaaaagatggttaatccgacattccgcaccgcattcgtaatttgctgttttaattaagaattaacaagtgagtgaattttatacaaacaatttaaaatcagtatattacagatatagctgcggaatgacaggttaattattacttcagttttatcagcgaaaaaaaatctgctatgcgcttatcctgatttgctcaggctcatacgtcaggcccttctactctctagctcaccacgtctgtcctctgtttgcccaccttgttcaggcgcttcaacgtattcgtcgagtgcagcttcaccagatgctctagggagtcaaaatgcgttagcacgttagtcaccgtttcgtccatctacaccgtgaccgcgtattccttagtatacccgtcatctttcaagttgcctctttgttggctgcactcactccggtcacatagttatctattctcccggggattcgctcccttgccgccgcggtccatcttgaaatccatagggtatatacccgtactcattgaagatgcttgattttatccgaaatggagatcattatcctcgctatgaaaatatttattacatcagaacaaaaaatcaaacttgaacgtcttcacgacaccactcgtgatggtcaggtacgagacagaataaaagctatccttctggcttctgaagggtggagttctgtgatgatagcccaggcattgcgactccatcagaccactgttgaccgccatatcagtgattaccttaatcaaggtaaacttaaatctgataatggagggtctgatagtttgctttcccgagaacaaactgattttttaatcaatcacttatctcaacatcttttccatcacacccatgaaatcgtggcctatgttgctcagctctggaatattacctttagcattcccggcatgaataaatggctacaccgtcagggtttttcttataaaaaaccttgtggcgtccctcataaattcgacgcagaaaaacagcgacaatttattgaatattatgagaatcttaaagtcacagcgaaagacgaacccatcctttttcttgatgctgttcacccgactcaaggcaccaaactcagttatggctggatgcgaaaaggcgagaaaaaaaccgtcaaaacaacaggaagccggactcgcctgaatatattgggcgccctcaacctgaatgccattggtcgtacggtgttccaggaatatcagaccatcaacgactacaacatttgctgttttttcaatgaaataagaaagtcttatcctgactatcatcaaaaaattcaccttattgtggatggagcgggttacaacaaagctcatcttgtgaaggagtgggcttatgttagcaatattgagttacattaccttcctccctatagtccaaatttaaacccgatagaacgattatggaaggtcataattaaacaggttcgaaataaccgttatttcgcggataaacatgaatttcgagacaacgtcttcaaatttttcaccacaacgctaccggatatagcggactcgctgatgtctagaattaacgaccattttcaggtgctaaaaactgcatcttgaagtttcttgggtatatatattttacggttatatcagacactggaaaatgaaatacagataaaattgtttttcccagaccgatacaaatgtgtcatccatcaattgcggcagttatcaaattaaaagtgatgaaaatccgtatgcgatatatcggcaagtatgacatgcactgggtgattgtactgcattattttaagtgaggtgacgatataataatataaaaagatattaaatttttattattttcgatctacacaagatgactattcattaaggcagtttaattcgtattttgatctatttttattggggttaattaaaagaatggcgtagattattttatgccagtcaatcagattggcttacataatgaaaaggtgaaaaatatgagaaaaataacagttgataatgatgtggtaggacatgatactgaaatcaactcggttgtttcatcaactgcggagaaaattcgccaacagtttggagtaaaggtcgaccctaattcaagtcaggaaaagttctacattgcaacaccgattattcctgaatcccgaaagaatatcgttgtaaccaatgaaggtctcgccgatgttatcacggcgaaatattactggtcacattcttttacgtcagaatattttgaggataactcagttgatgtcaaggttggagagagcaaagtgttggttgccccttcaaacccgttgtattacagcaaagtagtcattttcaacaacactaaatccgtggcatttgtaacagtaagagaaaaataacactatccatttcttcgtggaaatataaggaataaacaatgagcgatattgttaagtataacgatgtaagtgcaccgatcccttatgctgtttattcaaatgccgtatatgcatttgagtgggattcatctgctattctaaagcaagccgtcgtcaagggattgtcgtatgtaccacatgtagggaaatatctttcttacattgttggttttttttggaaagataaagagaaagacatttggcaggaggttgtaggaaaagttcaacaactggttgaagatagtatattaaaagcagttaaaggtatactctcaggtaacatcaatgaattaaaagaaaaaatgaatgaggtaatccgttctctggagaagaatttaggtacccaagaagcaagggatgactacatgcatcttgccaggagtatggttggaaaagaagctagcttgatttttcatgaaaataagacaaattttcacatattgccgatgtattccacacttgccctgatgcagattatgtattggactgttggcattgagcgtcgcaaggaaatcggattgagtgatattgaagtcgagaatctaaggtcatatatcaaaaagttagttagtgatgcagagcatcacgtgaatagagtttataagttagaacttgatagtgtagtgtcagactctgatgttaatcgcgtggctgataatatcatgtatgtccatggatattgtcaaatacatggtctggaatatatggacatcattaaaaatatccaatccagaggtaataatattactgggttttatccgagaactatcagctactctacattctttggttcgccaacaagtgatgcgcgtattttggcattaaggccagagaaggatatgccagaaccgttcaaacccaaatttttaaatgaacggtttaataaaattgcatcggtcaaagggtacatagtacgaattggtggcgctaaacgtgttggggggctggagataacatttgagaatggcagcaagtatcaacagggccaagcaacgaatgagcatgaaatcgtcaatctcaaaggtaatttgattaagacgttggaagtatgggggaatggggccattgatgaagcaaaatttacattaacgaatggagatgtgttgacaataggtcaacgtaattcctctaattaccgtaagttctctcttgatggtcattatatttgcggggtgttcatcgcaaatgatcgttctggactggctggtcaagcagctaatattgccgtttcttatcaccaattagttgagtaatacggtttcataaaaaactgagccagaagaaaccttgtgcccataagcaatccacttttaagatacaaggaggagtttatgggcacaccacgatttccggtattgttgcaaataacctgaggagaatgtaatgaacggtgcgctgggcaaagctgtactgatcttgcgggtaaaagtcccgtcgtagaaagggagttagccagaccactacgtagcgagtcttgcgtttccggcggtaacaaaggagacgaagcgtagacagcgaaacactcgagccgaaaccaaaaggtgaacgtgatagctccgaaatacatttaatcgtgtgtgccgatagtatcgttcagctagcaggcagcagcgtctgaatggtcacactggcaaatatccattcagcagtacacaccggagccgcaggcgtcggcgagtttgtagagaacagttcggaacccaggagattctgatatttctcaatggaatgagtatttcgggcacaagtgccaaacacaaagcctgagaaatgaatatcgggaagttggagtcagccatagtagcaatgaagcgagtaatgaccgtggagcgaagggctggcagacagatcgaacgtaagagggcaacaatgaccgtacacagcaacgacgggttattatggttaacaaaacttgagcgtataggtgagaagtcagcaggtaacaaacaacttgtgttcaataacttggggcacctgttgaacagtgacatgctgaaagggcaatttctgcggcttgacgggaataaagccgtgggtatcgatcgcatgacaaaagccgcttacggtgaacaccttgatgagaatatacaaaatctcatcctgcggatacgcagagggacgtaccacccgaaagcagcccggatcactgaaattccaaaagaggacgacagtaagcgaccactggctatttcgtgcacagaggacaaacttgtccagcttgcggtcagtgacatcccgcaatgttcgcggatgtccgcaaggttcaatcctgtcgccggtactggccaatatctacctgcatcatgtaatagatgaatggtttggtgaaatcagccgttcacatattcacgggcgggcagagatggtgaggtatgccgatgacatggtattcaccttccagtatcccagcgaagccaaacgtttctataaggtgctacccaatgaaaaataggggttaaattaatacaataaaattttagaaagttccggcttacaaccccctatgatgtagctattttaacctttcagattaaagggattttattgtggcaacagatgataaatcagcctcgacctcaattggcaccagctgtcaccagtatgaaattattgatgaccccacatactgcacagacatccggtgcagcaataaaagaccattaccgtgaggcgcgtgccgatgaaggggatcacgttgacggtcggcgtgttcttcgacggaacgggcaacaaccgaacaaactcatatgaccttcagctagcctatagcaactgtagctcccttgcgggtgaggaacgggcaaaagcatgcgtggaatatgagcggcgctcaaaatctggtttgggcaatcagagctatcagggcgggctcaccaatattgcgcgcctggaccatctttataaaactgatacagtcctcaaagatgagcagacagaggcgcaggttaaggcctatatctccggcatcgggacggcagacggtgaaagcgatgcagtgttcggaatagcgttgggcagcagtctgataaagcagtttgaaggggtggtgacgaaaacgaacagggctcttgatgagatcgtttctgcactgggtgagttcatcaggcgtaaccgtgatcaagcgacgatagaaaaggtgcaatttgatgtgttcggattcagtcggggggcggccgcagcgcgtcattttgccaacagagtgatgaaccaggacgcggcgatagcttccgcgatagacagggggctggatacgcacaaccaccacggcaaaccttccggggaggtgcggtttctggggctgtttgacacggtagcggccataggccacctactgaacttctacaacatcaacgggcgcaacaaccccggcgtaaatcttgagctgcggccatccgtggcgcagaaggtgtttcagataagcgcaatgcacgaatgccgtcataacttcagcttgaatagcatcgcggggatgtggccggagctgatgctgccgggtgtgcactcggatatcggcggcgggtacaacgcggaggagaatgaggacacgctactgacgatgccgaattttgaggtggttcgcgacgacatggcagaaaccagcacggcgatttaccggaaaacggaggctatgcgggaggcgttgtatcagcttcccgcgctgaaataccagctgccgcacggagaggtaaaaacgcggatgatagcatggccgctggtcaaccgggacaaggcgcgggagcatatttttgagaagaaggtgggcgcagcggtgtttctgacccgcaagagtatcccgaatgactgggaaaaggtgtgcatgcgggtaatgctggatgcggcacaggacgctggcgttattttttccccaatactcagcagtaacaaggagttgcaactgccttcagagctgacccctctctgtgagaaagcgatagcacagggacgggctgtgcggcgaggagagacgccagtgagcttcaccaccgatgagctgcacatcatcgggcgatacctgcactgttcggcgaactggaacatcgattcagaccggagcctgtgggtgagtccatccacgggcgaggtttttctgcggcacaattacgcgccgacggatgggcgttcgtttgtatggccaaatgcaccgggtaaagggtgggtgcggacggtgtggaagatggacgaccaacagcagtgggaagaacgggtaaaggtgaatgcagatgagctggacgggcttttctgagagagatgagagagatgagagagagtataactctatggtcatcctcgtttttacaacactcattttgatgaattttgcgcttgcttaaattgtagtggccaactagttccgggcagtaaataatattagatagagtctcagcttttgctggtggcacttcctcgttgaactgatgtggctggctccagttgtaataatcaatcaggaaaacttatatcccgcagggcttctgctctggtcatataaccggttacgggcctccatcctgatttcaagcttctgaacaacctttccattggggcattatcccagcaattgccacggtggttcatactttgctttgcgtcatacgataacaccaccgcctttgccggaatgaacagctggtatactgactaccttggtctgaatgaaacatcaccttttacggtctgtcgcgttgttcgtatgccatgtcccgtgctttaaccactaaatccgcatcgggctttgctgataatgcccagccagcaacatgacgacagtataaatccagtaccacagccagataataccagccgccttctgcctaaatatagataatatccccgcaccagacactatctggcgcgctaacgtagatgattcgggatatccaatcgttcaatccgggctgttttataactgtgtgggcttggctgcttgctgactatcccggcctctttcatcaggcttctgaccttgaaacgccccatttggtaccccagagtacgcatcatgcccagtaaagttctgctgtccgctgaagaaaacgtacgacgttgtcttgtcattgaatacctcttttaacgtggtaatctttccacctaaatgggtctccggttttattagaccgctacagtaatttatgtaaaaaacaaatggtgatattttataaaaactgcttaaaattatctataaaatagtgttaataaagataaaaagccggggtaacctacgttaggtaaacgtaaagtacgatatctcataatgattaaacttagagcctatctcaataggcgtaattgttgcagacagtttgaacacggacagcgcggaaaaaccggagcgtacacgtagtacgtgaggattttgagcactgcccaggttcaaaatggcaaataaaatagctctattgggataggcagttagtgaaaaagcaagtgttataagtggtaaaaacaacggttaaagttttatgctaattaaaatcatcggttaaaaaaatgacttttaataatggtttaaaacctgccaattataaagccattaatggaagcagagaaataaaaactggtttggttatgttttcggggagaaagataaatgataatatgagtccgttaatccgttaatccgttaatctatttttcaaaatgaagtgctttaataacgttttcaatcggagagtaaagcttttataaatcagttaaataatcgatgataaaaaaacggcatgataaaatccccagataactgatttaacagaatacaaataggagccctgtaaatacgtcagtttaaacttgctttaccttgttttaacccgttgaatagcatatttttgctatgatttgatttaaaccattttctctttttatgtttttaacaggctaaaatcagcttatctcattgtttttaaaattattttattgattggtcaacgcttaaatacctgttaatccgttggcgctttcaccatcgttgtatgaatggtattaatgacaatattaatccaatccagtgaaataccattctttttaaggtcgtctcttggtttgttggtggtatcgcttttatctttcaaccaaagccataccatcgtcatgtgtgcgtaagtacatctttaactggtgtcccattttttgcagactgacctgacaaatgatagtaaaagctattagtattgggaaaacgatcactttagtttgaaaactattttcagggaaatataaatgttacatctacttgcatggcctgatctgtttatttgcatttttgtcgttttctttgcttatctggtttttgggatggccgggtttggttctgctcttattgctagtccagttctggcattttatattcctgtagcgaaaattgttcctgtgctcgcgttggtagatttaaccgccgcagtgattaatattactagagagggtaaaaaatcagagtttagtgagatcaagttaattattccattaatggttgtcggtagcttgattggtgctgccattctattgatggcccgacctgatgttttagttctggtgttgggggtatttgttgttttctattcactttattcactatttttcagtaaaacctaccgtcaattccccgctaaagccgctattccatttggtctgagtggaggtattttcagtgcgttatttggtagtgggggttttctttatgccatttatctaaccgggcggatatcagataagcaaattttcaggatcacccagacgactttaattggtttcagtaccctgacgagagtgattatttttgttgtcatgggtatttatctggatacctcatttttgttattgatattggtatttattccagccatgttgttgggaatctattttggccgtcaggtgactctgaaaatctccagagaaacattcttgaagtttatcaatgttattgtattggcttcagggttaatgctgatatatcgctatatatttactttctgaaatagtaaccaataagaattaatgcattcaatataatattattaatttgttgttttcagttcatttcatatttattctctctatttttgctggatagatataaataaaatgaacagtcgtgattatagaaataataatttttttgccatttttactattacctcaagtgtcgctgttattggcattgtcattggtttgactatcccaatgatagcgttacgcttgaatagccaaggtattgatgagttgtacattggtttaatttctgcggctccggcattgggggttcttttgagtgctccggtcgtccagaaaattgtagctctggtaggtaagaaacacgtcatgatgattgcaacaggggtttctgctggcagtttgctcccacttttgggctcgttgccgatggagttgctttttcctctgcggctagttactggtgctgctagcgggttaatgatctgtctaggtgaaacctggattaatgaactctctgaagagaataaacgaggcagggtactggctgtttatacgacggtttttactgttagtcagttgcttggcccttctattattgctttttatggtatcgcagataaaacgccgatactgatttgtactctgattcatatcttttcactggtgctctttgtcatggtagatcagaagaaaggcgatgagttaccgcaatacggtaagaaatccaatttctctattgttcaatttgtgaagattgcaccggcgatctgtggtggtgtgctatttttttcctttttcgacgggactattctttctatgtttcccatctacgggatgagttgtgggtataccgaagcggtagctgcattgatgataagtgtcgttcttgctggtgatgcagtgatgcagctcccgtttggttggttggcggatcatatgaatcgtatgcgcctataccagatttgtggtgtagcaacgctcggagcaagtgcattattaccgtttgttatgacatatcagtatcttatctggcctttgttgattgttttaggggcaactgccggggctatctacaccattgcattagtccaaattggtcagtatttttcaggaaatgatctgatagtggctaatgccgcggcggctatgttgtggggtattgggagtttgtttgggccactgcttgccggtatagcgagttcagtgacgccatcaggtttacctattctacttgtcgtcattgcagcgctatttctgatttcaacaatggatcggtttaatccacaaagtaataaaagtgataaaagtgaagtgttcagtcgatagttgtacaggtgtaaacgctggctgtgaatggcagtcagcaatgagtaaatcttatgttttttcaaagggctggtgaatcgaatcttaagattgaaacattgcgattaattattgcgaaaagtttaatctctggaaattattctgctaatgcttggcgaaataatactgttagctattgatttagacactatgatcactggataatctttcgcctcaaattctctcactgttttctattctaaaagccaaacgattgcttttatgatttgttgaaccgattggtgcaatgttcattaaattgttgtgttattaagcaaggtaatcgttttcgtttgatgaggaagtggaagaagtaccatgaacataatgcaggggaacgacatgtttggcattcaggcaccagttaaatgcaaactggacaagtattttaaattgactgaacgtggcacaacggtacgccgtgaaattctggcagggatcacaactttcttggcgatggtttattcagtcatcgttgtaccgggaatgttagggcaggcggggtttccccatactgctgtctttattgcgacttgtttggttgccggttttggttctttgttaatggggctgtgggttaacttgccaatggcaattggttgtgcaatttcgttgactgcatttaccgcttttagtttggttttaggacagcaaattactattccggttgcactcggtgcggtatttttgatgggatgcttgtttacggtgatttctgttaccggtattcgttcttggattttacgcaatataccaatgggcattgcgcatggtgcagggattggtattgggctgtttttgttactgattgcgtcaaatggtgttggtctggtcattaagaacccgctggaaggtttgcctgttgctttgggttcgttcacctcttttccggttatgatgactctgcttgggttggctgttatttttggcttggaaaaattgaaagttcccggtggggtgctgttggtgatcgtggtgatttcagttattgggctgatttttgatccggcggtgaaatatcaagggttctttaagataccaagtctgggagatgatggcctgtccttgatttttagtatggatattatgggggctttgcagccaattgtgttacccagcgtgttggcgttagtcatgactgcggtgtttgatgcgaccggtaccatccgtgcggtagcagggcaagggaacctgttggataaaggtggacagattattaacggcggtaaagcgctgactgccgattctgtcagtagtatttttgccggtgctatcggtgcttctccggctgcggtatatatcgaatcagctgcgggtaccgccgcaggtggcaaaacaggtttaaccgcaacagttgtcggtattctgttcctattaattttgttcttttctccactttcctatcttgtaccagcctatgctactgcgccagcgctgatgtatgttggtctgctgatgctgagtaatgttagaaagctggatttcgatgattttgttggggcgatgtccggtatgctgtgtgcggtctttattgtgctgacctgcaatattgtaaccggtattatgttgggtttcagttccctagttgttggtcgtatctgttccggtgaatggcgcaaattgaatatcggtacagtggtaattacgatcgctttagtagcattttatgctggtgattgggctatttgattgattaaaaagtgcgtaaggtcggttcacccttgcgcattttgtcatttcttgcgattacttttaaattctcaattatttcccctctatttatctggttagtttacaatattcctgcaattctttcggatacggctccgtgtgtatctacctttttcgattgattcagttactttagtattaagatttgttctcactgtttttgtgttaacgggaagaaaaagagtttcaatctgtataccaacggttcttaggcaaattgtaagggcaacatggaaatattctttactattctgatcttgattttggtggtttcagtttctggtgttctgactaaagtgattccgttccgcatacctctgccgttaatgcagattgcaatgggagcattgctagcttggccacactttggcttacatgttacttttaatcctgagttatttctcgttctgctaattcctcctttgttattcgttgatggctggaaaatgccaaccagagagtttttccagtatggacgggaaatttttatactgatgctggtattggtgctggttactgttgtcggtattggttatctgatttactggctgatgccaggtattccgttaattgctgcttttgcccttgctgctgtgttatcgccaacagatgcggtggctttatcatccattgttggaaaaaggcgtatgcctaagcgcatgatgaatgtgatggaaggggaagcgttaatgaacgatgcttccggcctggtagccttaaagttcgctgtcgcgatagcaatgggaacgatggcattttctgttactggcatgaccatagaattcttcaaagttgctattggcggtttgttatccggtattgcagtaacctggttgtacagtaaatccctgcgcttaatgaatcgttggagcggtggcgatccggcaacccaaattgttttcatgttgctgttgccgtttgcttcttatctgattgcagaacatattggcgtttccggtatccttgcctcggttgccgcaggtatgacgatcagtaaatctggggtcatccgtaatgctccgttggcaatgcgtttgcgtgctgatagtgtctggtcaatgctggcgttcgtgtttaacggcctggtgtttatcatgttgggcctgcaattgccggggatctggcaaacttccgttatacaggcagaaattgatccaaccgttgaaacctggatgctgttcgccgcggtggcagtgatttatggcgcccttttattactgcgtttctgctggttatggctgatgaagaatatcagcaaagtttttatgagaaaaaatccactgaattttgcgacttataccacccgtgaattgtggctggcatcttttgccggagttcgtggtgcaatcactcttgctggtgcactgtctgttcctctgtttttggcggatggtacgccattcccggctcgttatcagcttatctttattgccgcaggggtcatcctgttctcgttgttaattggtgtcctctctttgccattcctgttacggggaatgcaaacttccgataaggaggcagatatcagtgaggtacgaatggcgcgggccgctatggcggaagtggcgattgtcagtatgaataagatggaagagcgtctttctgctagccccgaagagcagttggatgctgaggtgattactgaggttgcttccagggtcattggctatttgcgtcgccgtactgtggggcaggatgagatagaacataatctgctagtggaagatttggaacgtcgttttcgtctgacggcattaagggcagagcgtggtgagttatatcatctgcgtgcaactagaaaaattagtaatgagacacttcaaaccttgctgcatgatttggatttactggaagcgctactggtacagaaagagcattgatatcctgtaatttgttggttatcacgatcatcttgtgagtcgccttgttcagcctgatcggtgggtgtttcacctgtcaggttgatagctgattctatagtgtttactcgtatctggctggtggtattggctttcccgccgtagataccggaacctcttggcaatgatgaataatatgttggttccggtggaatggctgataaatttaccattgaaaggtgtttggttactgtgttgttatgaggtcatcgacgcttatttttgaaattccttttacgaatggcagattatccatcgcgtgttgacgtgcggaatggataaatgcgtcagtctcaggctggtgctgttcgccttgacggacggcagcgtacagcctgctccataaaccttctcccagtgtcttagtgaccactaactcttgcctttcaaatgtctcaacaacccaatgtggcagagccgcaattcccatgcgggcagcgaccatttggatcagtaacagggtgttatccacatttttcaacgtagggacaacccccgccggctgcaagaaacgccgccagatatcgaatctctgacgttgaacgggatagatcatcaatgtctcatcaattaaatcttttggctgtatgtgcagtttattggccagaggatgatccggagcaacaaccagtttgacctcataatcaaatagcggtgtgtagtgtaaatgactctcagggagaatatctgatgtcaaaacgacatccaattctcgttgcagtaatgcaggttgtggatcaaaagtgacgccggatttgaaatccacattgacttgtggccaggtttctcggaaatgcttgagtgcaggtgtcagccattgaatacaactatgacattcaatagcgatacgcagatttgtttggcccggctctttacattcgcgcagtgcattttgaaccagagggagcacttgttctgctagtcgtaataaaacttcaccctgtggcgtgaaacgaagcggttgacttttacgaatgaacaaccggaagccaaggcgatgttcaagatcgctgaactgatgagacaacgcggattgtgtttgatgcagatgattggctgctgccgctaatgaaccacaatgactcaatgattgtaatgtttttagatgttttatttcgatcatgagaaaccttcaggatgataatgaataaattgcgcttgtggtttataccttacctgttgattatggatgtgtaaacatctagacggctaaaaatgacgggataatgaaatgacgactattaatcacacacttggctttccacgtatcggtttgaaaagagaactcaaaaaggctcaggaaaattattgggcagggaaaatttctcagcaagaattattggaaactggccgtgagttacgtgcccgtcactgggaacaacagaagcaggctggtgttgatttagtgccggttggtgatttcgcttggtatgatcatgttctaaccaccagtttactactcggtaatgtgccaccgcgtcaccagaatccagatggcacgattgatctagatacactgttccgtattgctcgcggtcgtgcgccaacgggtgaacctgctgccgccgccgaaatgactaaatggtttaatactaactaccattatatcgtgccggaatttcagcaagggcaggaatttaagctgagttggactcagttactagaagaagtggatgaagccttatctctgggccatcaagtgaaacccgttttactggggccgataacttatctgtggttgggtaaagtgaaaggtcaggtatttgatcgcctctctttattgcaagatattcttcctgtttatcagcaagtattagctgagttagctaaacgtggtatcgaatgggttcagattgatgaacctgcgctggtactggaactgccagcagagtggttgacagcttatccgattgcttatcaggcacttcaaggacaggttaaattattgctgactacctatttcgatagcattggtcacaatctagaaacgattaaatccttgccggtacaagggctacatgtggatctggttgctggtcaggatgatatcgcgcaactgcatgaatcattgccgaaagagtgggtgctttcccttggtgtgattaatggtcgtaatgtatggcgtgctgatttaaccgctaagcatcagctaattaagccattggtaggtagccgcacactgtggatcggttcttcctgttctcttctgcatagccctattgatctgagtgatgagactgcgcttgatgcagaggtgaaaagctggtttgcgttcgcattgcagaaatgtgaggagttagctttgctgactgcggcattgaatcagccagatggcagtaaacaagcagaattggatgcttacagtgcgccaatccgtgctcgtcgtgaatctaaacgggtgaataatcaggctgttactgagcgccttgcggcaattaatccacaggacagtgagcgtaatcagccatacctacagcgtgcggaaatacagcgtcagcgctataacttgccattgtggccgacaacaaccattggatcattcccgcaaacgacggaaattcgtggcttgcgtttggatttcaaaaaaggtcgggtagatggcaccagttatcgtaccaatatctgtgaacatattaagcaggcaattaacgaacaagaacgtttaggattagatgtattggttcatggcgaagctgaacgtaacgacatggtggagtacttcggtgaacacctcgacggttttgtctttacgcagaatggttgggttcagagctatggttcccgttgcgttaagccaccagtgattattggtgacgtcagccgtcctgaagctatcacggtagaatgggctaaatatgctcaatcgttgacggagaaacctgtcaaagggatgttaactgggccggtgacaattctctgttggtcattcccaagggaagatgtcagccgtgagacgattgctaaacagattgcattggcactgcgtgatgaagtggacgatttgcaagaagcgggtattggtatcatccagattgatgagccagcattgcgggaaggtttaccactgcgccgggaagagtggcaatcctatcttgattgggcggtagaagcatttaaattgaatgctgcaattgccaaagatgacacacagattcacactcatatgtgttattgcgagttcaatgacatcatgccttccattgcagcattagatgcggacgtgattaccattgaaacttcccgttcagatatggagctgctggattcatttgaaaacttctcttatccgaatgagattgggccgggtgtttatgacattcattcacctaacgtaccgagtgttgaatggattgaagcactgttacgtaaagcggctgatcgtattccggtcgaacgtttgtgggttaacccggattgtggtctgaaaacccgtggttggactgaaactcgccagtcactggcaaacatggtacaagcggcgaaacgcctccgtgaatcagtgaaataactcatccaacaatttgcctgtcatctttaactggtgatgggcatttttcataaaataatctttctttttgcaatagcatgtaacggtgcggtttggctgggatcttttctattaccaaacttttagtaacttatatatgccatattggtatttgaaaaaatacattttattaacaaaataacccgggtagtaacaagatggaagcattgtaatagaaacttaataattaaagagaggattatatggatgttaataagttgcaaggtaagaaaagtagctctcgaagaaattttttaaaaagtagtgctgttattacggcgacagctgcacttgctccgatgaatttagctcgtgcagaagaaaagttatccccacaacatggaataggcgtatgtacgcttgcgccagagcagatatcagggccatatttccgaaatgacaaaattgtaagaagggatattactgattcagaattaggaataccttttttattgaagattactgtcatagatgaaaaaacatgtaaacccgttgataatttatttgttgatatttggcattgtaatagtcgggggaaatattctggttggagttatattagccccgatgtagtccctaacgttgctggagtagcttctatcaatagaactgatgataaaaattttctaagaggagctcaaccatcggataaaaatgggatagttaattttacgactatttatcctgggttttatgcgggtagagcgactcatattcatattgcaatcagaaaattaagcacaaatgtggatgacaaagagcactttgcttttgttggtcaaatgtattttccagaaggaatcaatacagaggtttataaatatgatctgtattcaaagcggagggtaatcagaactaaaaataatgaggatgaatattttaaaaatatgaatggtcatctttcagaaataaaagtaacaaaaatagatgaatatgatattaaccgtgggatactaggtgaaatagttctatcaatagacttggaaagtatatctaatttcataactaaagatgacttatattcccatacggtataagcagttttgttgaataaactaaatttcaatgtaataacagttgaaattataaaataacctatgtaaataatgtgctgattaataatttaataaagtatcagacatttgatatttatatacggatattgtgcaggcacagagagaattatctttactgtttgattgatactatcagtagagcatactgtctgtgcctgtcattttctcagaggaaagctttcagtcccgcaagcagaatgtcaaattaatgagctgtgtctccattattggcgatatcttcactgttttttaatgcttcatcgatagcaatttccagcgctgttataactgtttctagggccatacttggcgttcctgaataccgagctgcttgctcaggcagataagggatatggagaactccaccgcgtatttcaggatagatgcatgccaaatgatgcaacaggccatacatgacgtggttacagacgaaagtgcctgcggtttgtgaaatggaggctggcactcctgcatcacgcaaacccttgactatcgcattgatcggtaacgtggcgaagtaggcggcagggcctgttgcgacgatgggggtattgataggctgattaccttgattatcagggatgctagcatcattgatattaattgccacgcgttccacagtaatatttggtctgccgcctgcctgtcccacggcaatgaccagatcaggttgtacatcatcaatagcagcatacagacaagccagagagacgtcgaacacacatggaagctgacgcgcttcaacgcgggctccgcataattctcgcccctgtaattgcttagcagcttcccaggatggattaatcgtttctttaccgaaaggttcgaaacctgtaattaaaactgttttttgtgtcgtcatagtagtcatagtagtcatagtaatagtgcccttatatggtggaaagagtctaatatctaaacaatatgcatcctataaaaagacaactgtgatatttatatttggtaattgttttatttttgttgaaaatataattgtaatatgttggtaaataagcaagaaaaattatttattagctatagaagtaaaatacagttaattttttaatatgttcatcataagaaaaagttattttaaaaatagtccagtttattgcgttgttgatttataaatgttaggagagtattttaataacgacggtgatttatatttgattaagttgatagtttattggaaatattttgttttatgaccgggttatgaaatgataattttttctttgtgattggatggatattaacctctattaactctcaaggagaaaatatttcgatgagataatctgtgatatatttttctcgatacgttatgaaacataaatatagctaaacaatggattgtttttccataatatgaactcattcaagttagtttatggacggaagaaaacgccctgtttttttacctgtttcatggttattttgtgatttatatctcaaaataatgtatgtttttcttttttatattactttgaagtgacatttatcactaaaagatgtctataccctatggatttcaagatgcttcgcgacggcaagggcgcgaatccccgggagcatagataacgatgtgaccggggtgagagagtgcagccaacaaagaggcaacttgaaggataacgggtataaatgcccaatacagtagatctcaactaatttcattataaattcttcttgctgaggagtctgatatgtctgatgtatttcacttaggtctgaccaaaaacgatctgcaaggcgcaactttagctattgttccgggtgatccgaaacgtgtggaaaaaatcgcaagattgatggataacccagttcatctcgcttctttacgtgaatttacgtcatggcgggcagaaattgatggtacagcagtcattgtatgctctacgggtattggtggcccgtcaacctctatcgcggttgaagaattagcgcaattgggggtacgtacttttttacgtatcggcacaacaggcgcaattcaggaaaatatcaatgttggtgatgtgttggtgactaccgcagctgttcgtttggatggtgccagcctgcattttgctccgatggaatttccggcggttgccgattttgagtgtacgacggctctgtacgaagcagcaaaagatttaggtgtaacagtacatgtgggggtaacggcctcttccgatactttttatcccggtcaggagcgttacgatacctattctggccgtgttgtgagccgtttcaagggctcaatggctgaatggcaggcaatgggggtcatgaattatgaaatggaatcggcaactttattaacgatgtgtgcaagccaaggtctacgtgcgggtatggttgccggtgttattgttaaccgtactcagcaggagattcctaatgttaaattacttgagaaaacagaaagtaatgcattggggattgtcgtagaagctgctcgccgtttgctgtaaatcatactttttgggccggagtattccggctcactcttattttaaatagaaatctgttaatgtcttaacacctcacaattgattaagagtcatcatgatcacaacatctttattacatccatcagtgcttcctctcaatggagggattaattttcgtgatttaggcggtaaaaaagtcgcgagtggtggaaaaatcaaatcaggtttacttttccgttctggttctctggatcgcttaacagaaaaagaccaatctttcctggcaaataaaaatctctttcaaatcatagattatcgtgataccagtgaaatagaggataaacccgatttggtatggaatggtgctaattatcatcatgctccggccaatcccttatctgatgaagtgaatgcaaatctggaaaaattggcgtcagagatgttggagcaatttaatcctcaggcatttatgtttcgtctttatgaattattgccgctaaaaaattcagcctataagacattagttaacttactgcaacaaccggaaaaaggtgggatagtccagcattgtgcggtaggtaaagacagaaccggtgtaggttctgcgctggtattatttgcattgggggctgatttggatacggtaatggaagattatttagtgactaattgcactctggctccttatcgtgaatatttgttaaatgagcatgcgaaaactatgagtgacgatgtggttgataaattcgcttatgtttattccgtgagagaagagtttttaatgacggcattaaacagtattaaccagcattatggcagtgtagatatatggctggagaaagatcttggtcttgattttactgctcgtaagaaattacaagattatttccttgaataaaaagttggtttaattctggttaatacagcggtggttaaattgaatgtgtatacccgttatctttcagttgcctctttgttggctgcactcgctcacccccggtgacatagttaactatgctcccgaggattcgcgcccttgccgtcgcgatgcatcttgaaatccataggggatattgatcaatataggaatatgaatttgagtcttcatgaaatagttgatctggtaatcgcttttgttaaagctcatgatacctggatcatgccgattgttttcttgcttgcttttggtgaatctctggcttttttctccttgttattaccggcaacaatcatattgcttggattgggggcattaataggtgaaagtggtcttaatttctggccgatttggttggcggccgcagcaggggcttttttgggcgattgggtatcttatattgtaggtgcttattttaaaggtgatgttggtaaaatttggccgatttcccgtaaaccacaactactgacacgagtgcaccatttctttgagcgttggggtatttggagtattttctttggtcgattctttgggccattccgtgcaattgtgccattagtcgcgggtatttgtactatgccattgcgttattttcagatagcgaatatctgttccgcacttatctggtcttttggcgtattagctccaggcgcgtttggtttgcaatggttagtgaaatgggtgagctaattgggagcggcttcgcagactgagccatctgtataaatcattctggacatctatacagtagcaatttagtttatctggtcaaagcatgagatagaggaaataccggtgggtatccagttgttatatgcgttgataggtgctcttggtggcctattgggcggtggtattctcgtttggttctccgttcatcaacgtattcaacagcaagagctggaattacggaaattggacagccagcttgccgttgctaatgagaaaattgaacaatccgcttattggcgggttgaatgcgaacagttaaaccaagagttgcgggctcagagagaagtcaatagcgtacaagaatccgaactgcgtgaagtgacgacacgcttggaagagagtcgccttgcggctgaagagaaacagcggttgctgatcaacagtgaactacgtttgaatacgcaatttgagaatttggctaatcgtatttttgaacaaacgggtcgccgtactggtgaacaaaatcagcagagtctcaatacgcttttagcgccatttcgtgaacagcttgatggtcttcatcggcaggtacaggagagttttggtcaggaagcccgtgaacgtcatactcttgcacatgaaatccgtaacttacagcaactgaatgcccagatggcgcaggaagcgattaatctgacaaatgcccttaaaggtaataataaaattcagggagattggggagaagttgtgttatcccgtattctggaagcctctggtttacgagaagggcatgagttttgtactcaggtaagtatcaaggtagagggtaaccgccgtttccaacccgatgttattgttcatttgccacaagggaaggatgtggtcattgatgccaaaatgtcgctggtcgcttatgagcgttattttaacagtggcgatcggcatcagcaggagttagcccttcaagaacatatcgattcaattaaaggccatattcgtggtttgagccgcaaagattaccaacagttgcctgggctgaaatcgttggactatgtattgatgtttattccggttgaacccgcttatttggttgcgctgaacaaggcacctgagctgcttgatgaagcacttaaacacaatattatgctagttagtccatcaacattgttggttgctgtgcgtactattaataacttgtggcgctatgagtatcaaagtcaaaatacgcgcttaatcgccgataaagctgctcgcatgtacgataaaatgcgcttgtttgtcgatgacatgcaaggtttggggcaaagtctggataaagctcaacttagttatcgactggcaatgaaaaagctgactgaggggcgtggcaacctgataagtcaggcagagagttttcgtaatttaggtgttgaggtgaaacgtccgattgatcccgaattggttgataaggccagccaaccattctgtgctaatgattaatactaggatagggttttatctgaaaggctgatacacttttataatgctttgaataaaaaatgggcaaataacatggtagaccaaacgaaacaaaccacacattttggtttccgtactgtagcaaaggatgaaaaagcaggcatggtggccgaagtgtttcattctgttgcagcgaaatacgatttaatgaatgatttaatgtcgtttggtatccatcgtatatggaaacgtgtggctattgatgctagtggggtgcgccgaggtcagaggatacttgatttagctggtggtaccggagatttgaccgccaaattttctcgtatagttggtgaaaaaggcgaagttgttcttgctgatatcaatgaatctatgctgaaggttgggcgtgagaaattacgtgatgttggtattgttggtaatgtcagctatgtgcaggctaatgcggaagcgttgcctttccctgataactattttaattgcatcactatctcttttggtttgcgtaatgttactgaaaaagaaaaagccctgcgttctatgtttcgggtgttgaagccgggtgggcgtttattggtacttgaattttctaaacctttgttcgcgccattaagcaaagcgtatgatgcttattctttccatgtgctgccaaaaattggtcaggtttttgtgcaggatgctggcagttatcgttatttggcggaatccatccgtatgcatcctgatcaggatacgcttaaaacgatgatggaagaggctggctttgaacaggtgacttataccaatatgactggcggcattgttgcactacacagaggttttaaattttgagatggaaagaccatcactgagtacagttattaattccacacttacgccggttttaaccgcagtgatggaaacatcgttgaattacctgttgtaccgtgaacctgtgttaaggccagcccgtatgcggctggtggacaaagttttgtcgatcgaattaaaagaaatgaatacaccactcacgttggtattcagtgaaaaacaggtggacgtattaagccaatggagcggatctgccgattgtacggttaaaactcacttttctgctttgcttaaattacgggatcgccaacaaatttccaaattgctcaatagcggtgaaatggttattgaaggggatatgcaggttgttcagcaatggtctgctttgttagatatggttgagtgggatttggcccattatctttctccttatttcggggatatcgctgccgaaagtattagtcaagtccttaaaaaaggatttcagtgtgtttccagttcaatggaatgccagaaaaattatctggcggaagcgttaacggaagaatggaaactggccccaaatcagcttgaagtggcttatttcagtgaagaagttagcatgttggccaaagatatcgagcaaatagaacaacgattggcagtattagagggaaaatatgactccaggtgaattaaggcgcctttatttgatcatacgggtttttctttcttacggattagatgagctaattcctcggattcgcttaacctggcctcttcgttttggtcgttatttattgttctggatcccaaatagacataaagataaatcacttggggagagactacggcttgccttacaggaattagggcctgtttggattaaatttggacagatgctttcaacgcggcgtgatctgtttcctccagcaatagcggatcaactggcattgttgcaagaccgggttgcctcttttgatggtgctctggcgcgtcaatatattgaaaccgctttagggggggcattggaaacttggtttgatgattttgaacctattgctctggcctctgcttcaattgctcaggtccatactgctcggttaaaagagaatggacaggaaattgttatcaaagtcatccgccctgatattttgccgattatcaaagcggatatccggttaatgtaccgtctggctaattgggtaccaatgttattacccgatggacgccgtttacgtcctcgtgaagtcgtgcgggaatacgaaaagacattaattgatgaactgaatttgctgcgtgaagcggctaatgcaattcaactacgccgtaatttcgaaaatagctcaacgctttatgtaccggaaatttattctgattattgccgtgaaaatgttctagtaatggagcgggtttatggtatccctgtttctgatattgaagcattggaagcgcagaataccaatatgagattgctggctgaacggggcgtgcaggtcttttttacacaggtttttcgcgatagcttcttccatgcggatatgcatccgggaaatatttttgtcagctatgaacatcctgaagatccgttttatattggtattgattacggtattgttggttctcttaataaagatgataaacgttatctggctgagaattttattgctttctttaatcgtgattaccggaaagttgctgagcttcatgtggattcaggctgggtgcctagtgataccaatgttgaagattttgaatttgcaatccgtacggtttgtgagccaatatttgagaaaccacttgctgaaatttcatttggtcatgtacttctgaatctatttaatactgcacgccgttttaatatggcagtgcagcctcagttagttcttctacaaaagacacttttgtatgtagaaggcttaggacggcaactttatccacagcttgatttgtggaaaacagcaaaaccgtttctggaggagtggttgcatagccaggttggattgcccgctgttatccgggcgttgaaagaaaaggtgccttattgggcagaaaagttgccagagctacctgaattagtgtatgacagtcttcagcagcataaacatttgcaggtgagtattgagaagttatcaggtcatttgagagggcaacagataaaacagcggcagtcacagtatttacttggtgttggtgcgacattgtttctctgtggcagcttgtttttgctatctggcttagcaaatattccctggttgtttataggcgcgggtaccgtttcatggttgtttggctggtgtcggctgtgtaaaatttagtaaaatttgtcttagggtacattttctttgaaggtcggttatagttcgtcgtgtatatataccctatggatttcaagatggatcgcggcggcaagggagcgaatccccgggagcatagataacgatgtgaccggggtgagtgagtgcagccaacaaagaagcaacttgaaagatgacgggtatataccctaaaaaaataattcctgttaaatagaggtaaatcagaatgggcggtataagcatttggcagttactcatcattgcggtcattgtggtgctgttgttcggcacgaataaactccgtactttaggttctgatcttggggcatctattaaaggttttaaaaaggcgataggggatgataatcagcctcaacaggctcaaaaaaccagtagtgatgccgattttgagactaaaaacattactgaaaaacaatctgtagctcaatctgaaacatctgagagcaaaaacaaagagcaggtataaaccgtgtttgacattggttttggtgagttgctgctggttatggtcattggcttggtggttttggggccagagcggctaccggtggctgtaaaaacggttgctggttggatcagggcactgcgctctttagctgctaacgtccaaaatgagttggtccaagagctgaaattgcaggagctccaggaaagcctgaaaaaagttcaagaagaagcggggttgcagaatttatccccggaactaaaagcttcgatggatgaactaaaagaagctgctgagtctttgaaaaaagcataccaaaatgaacctgatgcagggagcatgaaagcatcagaaataaatgaggtggcacaaaagccggcagcgtctcaggttgtggcttcatctggaccttctgctctagtggatgatcaagcggcttctgcaacgaagaaaaaaacttccgattaagttaatggtgaacactaaaacatggctgttgatgatactcaaccacttatcagtcaccttattgaactgcgtaagcgaattctaaacagtttacttactgtattagtggtttttttagcgttggtttatttttctaacgacatctatcagatgatttctgcacctttgattaagcagttgcctcaaggtgccagtatgatagcgacagatgttgcttcccccttttttacgccaataaaactgaccattatggtgtcaatattcgtatctgcacctatggttctctatcaagtgtgggcatttattgcacctgcgttatataagcatgaacgccgcttgatgatccctctgcttgtttccagtagcctgctattttatttggggatggcgtttgcttattttgttgtatttccgatagcttttggattctttgctaaaacggcacctgaaggagtgctgattgcaacggatatcagtaactacttaagctttgtcatggcactgtttatggcctttggtgtctcttttgaagtacccgttgccattattttattatgttggagtggggtagttacacccgaatctttgaagaaaaagcgtccgtatattttggtcggggcctttgttgttggcatgttgttaacgccgccggatgttttctcgcaaaccttgctggcgattcctatgtatttgctgtttgaactggggattttgctctcccgtttttataccgggcagcggaaattgggggatcgttcagaggaagatgagcaggaagcgccagaagtgaatacggaaaagtgataatagtaatcttaacatgctgttctgtagtgctaagataattagcacgaagcgatagcatattaattaacccagcgcgagtgcgctgggtttgcgttaggagagctatatgagctatgcatttccaggaactttccctggtcgacgtatgcgccggttgcgctgccatgatttttcccgccgtctggttgctgaaaaccaattaactgttaatgatttaatctatcctgtatttgtgatggagggcattaatcgtcgtcaagaagtgccctctatgccaggagtgtatcgtctgacgatggatctgttgctgaaagaagctgaagagattgcccggctggggattcctgtattgtctctgttccccgttattgaagcagataaaaaatctctggatgcggaagaagcttataaccctgatgggttggttcagcgtacggttcgtgcgttgaaagatgccattcctgagctaggattgctgactgatgtggcattagatccattcactacacatggtcaggatgggatcatcgatcaagatggttatgtgatgaatgatataaccaaagagatcttggtcaaacaggcattgtcacatgcagaagctggtgctgagattgtggcaccgagcgacatgatggatgggcgtattggtgcaatccgtgaactatttgaaacggaaggacatgtaaatactcaaattatggcttactccgctaagtatgcttctgggtattacggcccattccgtgatgcaatcggttcaaatcgtaatctgaaagggggcaataaaaaaacctatcagatggaccctgcgaatagtgatgaagcattgcaggagattgcacaggatttgcaggaaggcgctgacactgtaatggtaaaaccaggtatgccctacctggatgttattcgcagggtaaaagatacatttggtgtaccaacctttgcttatcaagtctctggcgaatatgccatgcacatggctgctattcagaatggttggttacaggaacaggtaattgtggagtctctgttatgcttcaagcgtgcaggagccgatggtgtactgacctattttgcgaaacaggttgctcaacagttatatgaacagaaacgttaatatttgattaaaaacgggcgaatgcaaattctgcccgttttttgtttggttaaatttttacaaactgcttattatcaagtgccttaggtaattgtttattcagaatattaagtaacagaatagaacgggtttctccatctggctcattgtagatagcttgcaatccttcaaaaattcctgcggtgattaatacggtatcaccagccacaggtgtatctggtgatacatattcttgctcagtggctgatacgatctctttaatcagcgtttccggtacgatggcagggtgtacaccaaaacggacaaaatggctaacaccgcgtgttgaatggatagtggtagtatgaataatttcagggtcaaactgaacaaacagataatgaggaaaaagtggttctatattcacagtacgtttaccacgggttattttttcaattctcgcggtaggagtcaggcaagcaacatcctgtcgttcaagattttctattgctcgtgaaatttgcccacgtttacagtaaatgaggtaccagttttccatctttatttaaccttaatccaatgactattaagcatagcaaaatagaaaagggcattacaggcattatcttagtgataattgtttaatgatgcatatttattgttatgagtgggtcttatgtttttcagtaaaaaagcgatgggtaatattttggtaagtaacagataagataattaatataaatttggctgttatttgtgcagaaaatattaataaaagaaaaatatcagtatttctgttgagtaattgcaaaatttgatagtcattgagcaggcatatgggaaatccgtggtgatcaattggctgcatcttgtgcagtgaacccagaggagatagtgatagcattatttctgtggtaagagtaaaggtatcgagatgttccaatgcaatatgttccaatgcaatatgttccaactaaacatcttgctgggtaatttaatgctcaaatattaactcattagcttccatttcgttgtatttgactttaaggtcgcaaggttgaattaaccccattgctttttagtaacttattggtttactttgtagtcttctgaaaaaaacacaaaaaagctgagtgggatggcttataatgttttcccccttaaaaaccggcataaatgaatagtatgaaataccgtgacttaagagattttctaaccttattggagcataaaggtgagttgaaacgcatcagttttgaagttgatccttatttggagatgactgagattgcagatcgtacccttcgcgctggtgggcctgccttgttgtttgaaaatcccaaaggttattcgatgcctgtattgtgtaatttgtttggtactgctgaacgtgttgctatggggatggggcagaaagatgttaaagctttgcatgatgtaggtaagctgctagcttttttgaaagaacccgatcctccgaaaggttttcgtgatttactggataagctaccgaaatttaagcaagtccttaatatgccaactaaacggcttaatactgcgccttgtcaggaacatgtttcggttggtgacgatgtagatttaacccgtattcctatcatgcactgttggccagaggatgctgcgccattgattacttggggactgacagtaactcgtggcccgaataaagagcggcagaatcttggtatttatcgccagcaagtattaggtaaaaataagctcattatgcgctggctatctcatcgtggcggtgcgcttgattttcaggaatggtgtcaggcacatccaggagaacgtttcccagtggctgttgccttgggggctgatccagcgacaatattgggggctgtgacgccaattcctgatacattatcggaatatgcatttgccgggttattaagaggatataaaacagaagttgtgaaatgtctttcaaataacttggaggtaccagcaagtgctgagatcgtattggaggggtatattgagcctggcgagttagctccagaagggccatatggtgaccatacgggctattataatgaaatcgatatgttcccggtgttcactgtgacacatattactcagcgccatgatgctatttatcactcgacttatactggccgcccgccggatgaacctgctgtgttgggggttgcattgaatgaggtgctggtaccgattttacaaaaacagtttcctgaaattgtcgatttttatctgcctcctgaaggttgttcctatcgccttgccgtcgtgacgatgaagaaacaatatccgggtcatgccaagcgggtcatgatgggggtttggtcatatctacggcaatttatgtatacgaagtttgttatcgtttgtgatgatgatatcaatgccagagactggaacgatgtcatttgggcaatcactacgcgaatggacccggtaagagataccgtattaatggagaatactccgatagattatctcgattttgcatcacccgtttcaggattgggttcgaaaatgggaatggatgcaacgaacaaatggctgggagagacgcagagggaatggggacgtcctattgtgatgagtgaagaagtgcgtacccgcgtcgacaaaatctgggatgaattagatattttaggaccataagagggaacgcatgacaacactgagctgtaaagtaacctctgtagaggctattactgatacggtttatcgggtacggttacttcccgattctccgttctcattccgcgccggtcagtatctgatggtggtaatgggtgagagagataaacgtccattttcaatggcatcaacgccttcagaaaaggcgtttattgaattacatattggtgcttctgaactgaatttatatgcaatggctgtgatggatagaattctggatcagaaagtgatcgatattgatatccctcatggtaaagcctggtttcgtcaaagcagcattaatccgctgttattaattgcaggcggtacggggttttcttatacccgttctatattactgacagcgttggaagaacaacctgaacgccagatctctatgtattgggggggcagagaaccacaacatttatatgatcttgctgaattacagttacttacagagcgctaccctaatttgacggttgttccggttgttgaacagtcagagaatggttggtgtggacgtacaggaacagtgcttaaagcggtactagaggattttggtagtttggccaattatgatatctacattgcggggcgatttgaaatggcaaaaattgctcgcgagcgcttttgtggtgagcgtgatgcttctactgacaacatgtatggtgatgctttcgaattcatttaaaataataataaaaaaacccgcccctgacaggcgggaattacggcaacaacgactcagttataataattcttacagataagttcttaatccattctttctataatggtggcgataccttggcctaaaccgatacacatggttgccaggccaaactgaacatcgcggcgttccattaggttcaacaatgttgttgtgatgcgagcacctgagcagcctagtgggtgaccgagagcaattgcaccaccattcaggttaactttgtcatccatactgtccaacaaatttaggcccttcaggcaggcaagtgattgagcggcaaatgcttcgtttaattcaatcacgccaatatcacctagtactaaacctgcttttttgagcgccatttgtgtagcagggaccgggccatatcccataatggaaggatcgcaaccaaccgctgccatagaacggatacgggcacgaggtttcagccccagattcttggcataactttcactggttatcaacattgcagacgcaccatcggataaagcagaagagctgcctgctgtgactgagcctgttaccggatcgaatacggggcgcagggcggctagatctttcagattagcatctgaacggattacctcatcgtaatcaaaccgtttcaatatgccatcggcatcgtgaccataaattggtgatatctcattggcgaatgcacctgattgcgttgcttgtgttgcacgttggtgcgaacgaagcgcaaattcatcttgcatttcacggctgatatggtgaatctttgccaacatttcagcggttaagcccatgactcctgcggctttggcaacactcagactcattttaggatggaaatccacgccatgtgtcattggaacatgacccatgtgctctacaccaccaatcagtgtgacattggcttctccggtcatgatcatacgagcgccatcatgcagcgcttgcattgatgaaccgcacagccggttaaccgtcacggctggtacagagtgaggaatatcagccagtaaagctgcattacgggcaatgttgaaaccttgttctagagtttgttggacacagccccaatagatatcatcgatttcgtgttgctgtattgccggattacgtttaaatagctttttcatcaggtgagcggagagatcttcagcccggacctgacggaatgcaccaccttttgagcgccccattggggtgcggatgccatcaataatgactacattttccatgtttccagacctcacgctgtttttccggtgctgacagcaatcgttgctgctgtagagtagtaactttcattacgttcagctttggctttcagaccaggcggtacctgataaagcgcacctaggtgagcataattttcagccatttttacgtaagccgcagttcccattgtttccagataacggaaaacaccaccgtggaatggagggaagccaaggccataaaccagagccatatctgcttctgctgggctggcaatgacaccttcttccagacaacggacaacttcgttgatcatcgggatcatagtacgagcaatgatctcttcaccggagaaattactcttctgttggcagatagttgccagcagttggtctgtttgctcgtcttgctctttcttaggtttacctttcttatcttgcgtatatttatagaagccaaggccgtttttctgcccataacgttgattgtcatataaaacatgaatggcatctttataatcacgatgcatacgatctgggaacccttgggccatgacggattgagaatgatgtgcagtatcaagaccaataacatcgataaggtaagcagggcccattggccaaccaaattctttctccatgattttgtctatttggcggaaatcaccaccatcacgcaatagtagaccgaagccaaggagataaggaagcagtactcggtttacaaagaaccctggacagtcgttaacgacgatcggggttttacccattttgctggcataggcgactacggttgaaattgtcttttcagacgttttttcaccgcgaatgacttcaaccaacggcatgcggtgtaccgggttgaagaaatgcataccacagaagttttccgggcgttttagggacttagctaattctgaaattggaattgttgatgtgttggaagctaggacacaatcttcattaaccagagtttcagtttctgatagtacagccgctttgatcttaggattctctactacagcttcaaccacgatttgggcctgttcgataccggcataatttaaggtaggttgaatagaagagagggttctcgccatttttatagcatctagacggccacgttcaaattgcttgtttagaagtttcgcggcttcattcatacctaattcaagggattgctggctgatgtctttcatcatgacaggaatccctttgcgggcggattgataggctataccaccacccataattccagcacctagaactgcggcatattcaggtattgtgacttctttcagatgtttttttgccagtccttttacgtactggtcattaagaaaaatacccactaaggcacgggcaacatttgtctgtgctaaaggaatgaagctggcggtttcttgtttcaatgcttcatcgcgaccaaatgtagcggctttttctatagatttaactgcggtgataggagctggataatgagggccggcgactttcatcaccataccttttgccacactaaaactcatgcctcgttcagtttcattgagtttcaaaggctctaattttggctggcgtgcggctttccagtcgaggttccctgcaattgcttgttccagcattgatactgcggaatcaaccagtttttctttgggaacaacagcatcaatcaaaccgtttttcaatgcttcttctgcaccaatgtctttacctgcggcaatgatatccaatgcattatcagtcccgatcaggcgtggaaggcgaactgagccaccgaaaccaggcataataccaagtttggtttctggtaacccaatgcgtatatccggggaggccacacggaaatctgtagatagaacgcattcacaaccaccaccaagagcataaccgtttattgctgaaatggttggtacaggtaaatcttctatccggttaaaaatgctatttgaaaagttaagccattcttgcagtttttctacagatgaatcgaataaagagaggaattcagtaatatctgcaccaacaataaatgcggttttttcagaacgtaataaaacgcctttcaatccagtttgttgctctaggctggcaatagccttgtcgagagatgcaacggttttggtatctagtttattaatcgcggctggggcattgaaaaccagttcagcaatgccatctttcagccagcttacttgaattgtttcactttgatagagcatgtcgttctcctaaatgagcgcataccatctggtatgaccagatgggtttgattgtggttattatgttaagcaaatgcaaatgagtgattagttttttgcaagggtgatcacaagtgagatttgtatctcactgacaatgattgtttttatatcttgataaataaggtgttagcgggaacggataaattgagtgagtttttgcgtgatacctgcaaatatcaacggctgtgataagctaatggtttagtcataaaataaaaaaggtcaattgaaatggaaaagttggcatctctgtaccacgaacatatctctacattgcagcaacgtacctgtgaagcattggcccgtaatcaatttgatgctttgcttattcactctggtgagttacagcatatttttcttgatgatagagattaccctttcaaagttaatgcttgcttcaaagcttgggtaccagtaactaaagtgcctaattgctggttgtgggtagatggtattaataaacctaaattatggttttactcgccggtagattattggcacagcgtagaaccgctgccgactagctactggactaaagaagttgaaatgattcatctggcaaatgcaggagatattaattcagcgttaagcacttatgtaaaacagaatgttgcttacatcggttgttcaccgcaaagagcaaaagagattggtttctctgaacgcaatattaatccaaagtctgttcttgattatttgcatttccatcgttcatacaaaacagattatgaactagtctgtatgcgtgaagcacaaaaaacggctattgtcggacatttggcagcttatgaagcatttcaggctgggatgagtgaatttgatattaatatctcttatcttatggcaacaggtcatcgtgatacagatgtgccttataacaatattattgctatgaatgagaatgcggctgttttgcattacactgcattgcagcacaatgcaccttcggatattcgtagtttcctgattgatgctggtgctgaatataatggctatgcagcagatatcacccgcacttattcagcaaaaagtaataatgaatttgcttctttaattaaagatatggatgctgaacaaaaagcgttaattagtacaattaaagtgggaactcgctataccgaatatcatattcagatgcatcatcggattgctaagttgttgaaaaaatatggtatcgtgaaagatgtcagtgaagaagtcatggttgaagaagggctgacaacgccattctttccacatggcattggtcaccctcttggattacaggtccatgatgtggcagggtttatgcaggatgatacaggtacacatttagccgctccggatatgtatccttatctgcgttgtacccgtattctagaacctcgcatggtgctgactatcgagccaggtctttatttcatcgaatcgctgcttgcaccttggcgtgaaagtgagttcagcaaacattttgactggaataaaattgggacgcttaaacttttcggtggtattcgtattgaagacaatattgtgatccatgaaaataaagtggaaaacatgactcgggatcttcaattgccataatgaagccttatttgatacccgcagcttcagtgagttttactgaagagattaaaaaaagtcgctttattaccttgctggagcatactgacggggtggatgaggctaaagcgtttatccagcaaatcaaagctcagtaccctgatgcccgccatcactgctgggcatttgttgctggtgcaccggatgattcacaacagttgggtttttcagatgatggggaaccttcaggaaccgcaggtaagccgatactgtcccaacttatgggaaataatatcggtgaaataactgtggttgttgtccgctattttggtggaataaaattagggaccggtgggttggtaagggcatatggaagtggtgcccaacaggcgctgaaattgctggagacaaaatataaggttccacagaaactctgttccttgcagtgtgaatatgcccatatctctatgattgaacagttattacagaaatcatcagggcaaattatttccagtgagtatgcagagaatgttactttgcgaatttcacttccagctaccttagtgggggaagtcggtgataaattacgtgatctaagtcgcggtgtactgtatttaacacctgatctgtaaatattctctgtaactggatttctaaggaaccagctaaatgcattttcgtgccataacccgtattgtcgggctgcttgtcattcttttctctgtcaccatgataattccaggattggtagcacttatctatcgtgatggtgctgggcgtgcatttagtcagacatttatttttgccttaattatcggtttaatgctttggataccaaatcgggagcaaaaacacgagctaaagcctcgggaagggtttcttatcgttgctttgttttggacagtccttggcagtgttggggctttgcctttcattttttctgaacagccaaatctttctattacagatgcattttttgaatctttctccggtttaacaacaacgggtgctacgacactaattgggcttgattccttgcctaaagcgattcttttctaccggcagatgctgcaatggttaggtggtatggggattatagtgctggctgttgcaatactgcctctacttggggttgggggaatgcagctctatcgggctgaaatgcctggtcccttgaaagacaataaaatgcgcccgcgaattgctgaaacggcaaaaactttatggttgatttatgtgttactaacaatcgcctgcgctttagcgttatgggctgcgggtatgtcagtttttgatgccatttctcacagtttttcaactatcgcaattggtggattttctacacatgacgccagtattggttatttcaatagccccgcgataaataccattattgcgatttttctgctgatttctggttgtaactttggtttgcacttcgcggtattaacgggacgtagcctgacagtatattggcgggaccctgaattccgtatgtttatctccattcaattggtgcttgttattatttgcactctgatcttatggcatcacgctgtttataagtcggggatagagacactaaaccaagcttttttccaggttgtttcaatggcgacaacggcagggtttagcacagatagttttgctcgttggccatcatttttgccaatactgctgttgtgttccgcttttattgggggctgtgcaggctcgacgggaggaggactgaaggtgattcgtatcttactgctattcctgcaagggtcccgtgaattgaagagattggttcatccaaatgcggtttataccctcaagttagggcgaagggcattacctgaaaggattattgaagctgtttggggattcttctctgcttatgctttggtatttatcattagtttattattacttatcgcaactggtgtagatgaactttctgcgttttcggcaatagccgctacactaaataatctagggccaggattgggtgttgttgcggataacttcactgcaatgaatccagcagccaaatggatattagttataacaatgttgtttggtcgcttggaagtattcactttattagttttatttacaccaaccttctggcgtgaatagtctactgggagagggatatagctatgcattgtttattactttattccagtcgggatggacagactaagaaaattatcacccgcattgctgaaaatctacgcagatcaggggagttatgtgagctcagagatttagcaacagtaaaaacgatcaatttggaatcttatgacaagattatgattggagcttcgatcagatatggtcatttcaattcggcactgaaaaagtttgcaatctgtcatcaacagcaacttaataaaatgccaaccgcattttttggcgtgaatttgacagcaaggaagccagagaaacgtacaccagaaacaaatgtgtatgttcgtaactttctgtttaataccccgtggaagccagatttgtgtggtgtttttgctggtgcattactttatcctcgttatcattggttggatcggataatggttaaaatgattatgaaaatgaccggtggggaaactgatacaactaaagaggttgaatataccgattggcagcaagttgattattttaccgatgacttccttaaaatagtgagtgaaaaataactgatttgttctttttatcagtgttttgttgaaaaaaactgcgaacggcagttttttttttaataaatgcttgccagcgtcaaagaacgccctataatgcgccaccactgaccgacacaacgctgataaacattgtgaggtcgggcggagaaagcgataatcagtgcttgactctgcgggtgaaaagcgtaatatacgcagcccggctgaacgagaatgttattttttatgtcagcctgctctttaacaattaatcagacaatctgtgtgggcactcacaagaccgtatcgcaaaaaaatacgttttaaagtcttgaagagtgaacaacagttaattcattacgaaataattagtcagaattctttgagcatcaaactttgatttaaattgaagagtttgatcatggctcagattgaacgctggcggcaggcctaacacatgcaagtcgagcggtaacaggaaagcgcttgcgcttttgctgacgagcggcggacgggtgagtaatgtctggggatctgcccgagggcgggggataaccactggaaacggtggctaataccgcataatgtcgcgagaccaaagtgggggacctgaaagggcctcacgccgtcggatgaacccagatgggattagctggtaggtagggtaatggcctacctaggcgacgatctctagctggtctgagaggatgaccagccacactgggactgagacacggcccagactcctacgggaggcagcagtggggaatattgcacaatgggcgcaagcctgatgcagccatgccgcgtgtatgaagaaggccttcgggttgtaaagtactttcagcggggaggaagggtttagcctgaagagggttagattttgacgttacccgcagaagaagcaccggctaactccgtgccagcagccgcggtaatacggagggtgcaagcgttaatcggaatgactgggcgtaaagcgcacgcaggcggtcaattaagttagatgtgaaatccccgggctcaacctgggaatggcatctaagactggttgactggagtctcgtagaggggggtagaattccatgtgtagcggtgaaatgcgtagagatgtggaggaataccggtggcgaaggcggccccctggacgaagactgacgctcaggtgcgaaagcgtggggagcaaacaggattagataccctggtagtccacgctgtaaacgatgtcgatttggaggttgtggccttgagctgtggcttccgaagctaacgcgttaaatcgaccgcctggggagtacggccgcaaggttaaaactcaaatgaattgacgggggcccgcacaagcggtggagcatgtggtttaattcgatgcaacgcgaagaaccttacctactcttgacatcctcagaatttgctggagacagcgaagtgccttagggaactgagagacaggtgctgcatggctgtcgtcagctcgtgttgtgaaatgttgggttaagtcccgcaacgagcgcaacccttatcctttgttgccagcacgtgaaggtgggaactcaaaggagactgccggtgataaaccggaggaaggtggggatgacgtcaagtcatcatggcccttacgagtagggctacacacgtgctacaatggcggatacaaagtgaagcgacctcgcgagagcaagcggaacacacaaagtctgtcgtagtccggattggagtctgcaactcgactccatgaagtcggaatcgctagtaatcgtagatcagcatgctacggtgaatacgttcccgggccttgtacacaccgcccgtcacaccatgggagtgggttgcaaaagaagtcggtagcttaaccgaaaggggggcgctgaccactttgtggctcatgactggggtgaagtcgtaacaaggtaaccgtaggggaacctgcggttggatcacctccttacctgagataggttgagtgcagtgctcacacagattgtctgatgaaagaagagaaaacgttatcgcgataggcttgtagctcaggtggttagagcgcacccctgataagggtgaggtcggtggttcaagtccactcaggcctaccaactctacttatccctgggtcttccagacgctgcgtgactcatgtgctcgcgcacactgcgttactcgcgttgaaatccccggcggcaaagcgagttgactgaacaggcgatgacggtctatttctgtatggggctatagctcagctgggagagcgcctgccttgcacgcaggaggtcagcggttcgatcccgcttagctccaccatattcaacctaattcagagtatattggcgacagtatgctgcgaattattttgctctttaacaatctggaacaagctgaaaaattgaaatactcaataatatcgccgaggtattgttgaggtgtctctcaagctgaacagtccgagacagtttcgggttgtgaggttaagcgactaagcgtacacggtggatgcctaggcagtcagaggcgatgaaggacgtgctaatctgcgaaaagcgtcggtaagctgatatgaagcgatatagctggcgatgtccgaatggggaaacccagtgcaatgcgttgcactatcattaactgaattcataggttaatgaggcgaaccgggggaactgaaacatctcagtaccccgaggaaaagaaatcaaccgagattcccccagtagcggcgagcgaacggggaggagcccagaactaacatcagccacagcatcagaggaacggtctggaaaggccggcgagagagggtgacagccccgtactcgaaggtagtgtggttgtgagttcgaagagtaaggcgggacacgagaaatcctgtctgaagatggggggaccatcctccaaggctaaatactcctgactgaccgatagtgaaccagtaccgtgagggaaaggcgaaaagaaccccggcgaggggagtgaaagagaacctgaaaccgtgtacgtacaagcagtgggagccccaccaccaaagcgtttcgctttgcgtggtgcacaaaatgcgtaacagcagcactgatgacggttggcggagcggcagcgacgcccaacacacaaatcaagcagtggagcgttttggggtggggtgactgcgtaccttttgtataatgggtcagcgacttatattctgtagcaaggttaaccggataggggagccgcagggaaaccgagtcttaactgggcgaaagagttgcagggtatagacccgaaacccggtgagctagccatgggcaggttgaaggttgggtaacactaactggaggaccgaaccgactaatgttgaaaaattagcggatgacctgtggctgggggtgaaaggccaatcaaaccgggagatagctggttctccccgaaagctatttaggtagcgcctcgtgaattcatcttcgggggtagagcactgtttcggctagggggccatcccggcttaccaacccgatgcaaactgcgaataccgaagaatggtatcacgggagacacacggcgggtgctaacgtccgtcgtgaagagggaaacaacccagaccgccagctaaggtcccgaagtcatggttaagtgggaaacgatgtgggaaggcccagacagccaggatgttggcttagaagcagccatcattgaaagaaagcgtaatagctcactggtcgagtcggcctgcgcggaagatgtaacggggctaaaccatgcaccgaagctgcggcagtgacacgcaagtgttattgggtaggggagcgttctgtaagccggagaaggtggagctgtgaggcctgctggaggtatcagaagtgcgaatgctgacataagtaacgataaagcgggtgaaaaacccgctcgccggaagaccaagggttcctgtccaacgttaatcggggcagggtgagtcgacccctaaggtgaggccgagaggcgtagctgatgggaaacaggttaatattcctgtactgaatgtgactgcgaaggggggacggagaaggctaggccatccgggcgacggttgtcccggtttaagcgtgtaggtgggaggagcaggtaaatccgctcttctgtgaacactgaggcgtgatgacgagccgttacggcggtgaagtggttgatgcccggcttccaggaaaagcctctaagcctcaggtcatattgaatcgtaccccaaaccgacacaggtggtcaggtagagaatactcaggcgcttgagagaactcgggtgaaggaactaggcaaaatggtgccgtaacttcgggagaaggcacgctggcggtaggtgaaggagtttgcctccggagctgaagccagtcgcagagaccagctggctgcaactgtttattaaaaacacagcactgtgcaaacacgtaagtggacgtatacggtgtgacgcctgcccggtgctggaaggttaattgatggggttagccgcaaggcgaggctcttgacagaagccccagtaaacggcggccgtaactataacggtcctaaggtagcgaaattccttgtcgggtaagttccgacctgcacgaatggcgtaatgatggccaggctgtctccacccgagactcagtgaaattgaactcgctgtgaagatgcagtgtccccgcggcaagacggaaagaccccgtgaacctttactatagcttgacactgaacatggagccttgatgtgtaggataggtgggaggctgagaagtgcggacgccagtctgcatggagccatccttgaaataccacccttgaatgttcgatgttctcacctgggcccgtaaaccgggccggggacagtgtctggcgggtagtttgactggggcggtctcctcccaaagggtaacggaggagcacgaaggttggctaatcacggtcggacatcgtgaggttagtgcaaaggcataagccagcttaactgcgagagtgacggttcgagcaggtacgaaagtaggtcttagtgatccggtggttctgaatggaagggccatcgctcaacggataaaaggtactccggggataacaggctgataccgcccaagagttcatatcgacggcggtgtttggcacctcgatgtcggctcatcacatcctggggctgaagtaggtcccaagggtatggctgttcgccatttaaagtggtacgcgagctgggtttagaacgtcgtgagacagttcggtccctatctgccgtgggcgcaggaagattgaaaggggctgctcctagtacgagaggaccggagtggacgcaccgctggtgtacgggttgtcatgccaatggcatagcccggtagctaagtgcgggagagataaccgctgaaagcatctaagcgggaaacttgccttgagatgagtcttcccctgactgaggtcacggaaggaacgtttaagacgaagacgtggataggctgggtgtgtaagtgcagcgatgcattgagctgaccagtactaatgaaccgagaggcttaaccttacaacaccgaaggtgttttggtgtcggaagacagaagagagaagaattttcagcttgttcagagattgattcgggtggttgtggcggaagagcgacaacggccggaagaaaaccgaatatgcctggcggcgatagcgcggtggtcccacctgaccccatgccgaactcagcagtgaaacgccgtagcgccgatggtagtgtggggtctccccatgtgagagtaggacactgccaggctttaaataccgtagaaaccctcagcgaaagctgggggtttttgcgttttaaggtattatttatttacttattccctttaagaaatagatagtttgtttatcagtcttgaataattaaaatatattatagtaatagcaggcataaaaaataatttaaataactttttgaactgatgggaaagaaaatgagtcatgttatcctaagcttagccgagcatgacaaaaatttctctctataccctatggatttcaagttgcatcgtgacggcaagggagcgaatccccgggagcatagataacgatatgaccggggtaaacgagcgcagccaacaaagaggcaacttgaaagataacgggtatatattcataaatattatcgagccagttattaacagatcttaatgagttcgaatatctgttttgagtctgtaagttaaatttagactgtaatttaaattgtgtaattgcctattttttctctttccatacttaatattagcatttgattcaaattagcttattattataagaaaagtgcatattctagtattgaagataaatcttataactcaatattaataataagaatattttatcaattagtcttgttgctttcttagagtgtattgtttttaatatcgatagcttgtaatttgacttcttataatgttgcctttttgttttggtctttctcatttctactgaaaatatcattgatttttaatatgttttattccatttgtaattttacttattatttttttatataaaaatataatttaaagtattttctgttataaacactgaaaatttattaactattatcatgttgaacattgtgtgagaccaaaaatgaaataatttcagcttacttgtaaatcctcgacattttgttaatacttagttagatttagctatctagaagtctaaacgtgtaaatggataaaaaaatcgaggttatagcatgccaatttgtataccggatgaattacccgcagtgaattttttacaaaacgagaatgtgtttgtgatgacatctactcgtgcaaatattcaaaatatacgtccactaaaggtattgctgcttaacctgatgccaaagaagattgagactgaaaatcaatttttaagattactatccaatacgcctttacaggtagatatccagctattgagaatagataaccgaaagtgcaggaatacgcctgctgaacatttgaataacttttattgtgatttcgagcagataaaacaccaaaactttgatggcttaattgtcactggtgcgccattgggattagttgaattcgaagatgtggcatattggaaacagattgaaagaataattagttgggcaaaggaacatgtcacttctactctatttatttgttgggctgtacaagccgcgttgaatattttgtatggtttgccgaagtttaccagagaagtaaaactatcaggtgtttattatcactctactctgaaccctctagcattattaactcgtggctttgatgaatctttttttgctccccattctcgttatgcagattttcctgaacaggttgttcgtgaacatactgatctggatattctttccagttctgaagatgcgggagtgtatttactggcgagtaaagataaacgtatggtatttgtcactggtcatccggaatatgatgctggaacgttggctagtgaatatttacgcgatttagcagcaggtttggctccaaagatcccaataaattattttccagataataatccagaaagaaaaccactggcatcatggcgcagtcacgggcatttattgttttccaactggctgaattattatgtgtaccaaatcacaccatatgatctcacctacatgaatccaacactggattaatatctttataaatggctgaaattcagccatttaacccttctgattttttctactctcctgttattaacacctgtcaaaatatcgcactttttgtagtttatcttatataacaaaaacttaaccaaattatcttatgatttatggaatcaatttctctaatttaaaataggtaatattgtgtataacttgttgttttttattgaataaaaataaatttataaaaaaatggaaatcgtttttgatttattttaaatatctattactcttattcaggtgtgctttaaaatgaggatagatgaatgacgcagcaaactttagcgactgaattatcgtttattaaacgatttggagcagcagagcaggaggttttgatacctgaagcggtagattttctgaaagatctggttgttcggtttactgatgcacggaaaaaattgttagtcgagcgggatatttggcagaagaaaattgatgatggtgaattgcctgattttatttcggaaaccggttccattcgtgaaagtgaatgggaaattcaaaatattccagcggatctccgtgatcgcagagtagaaatcactggaccagtagaacggaaaatggttatcaacgctttgaatgctaacgtaaaagttttcatggcggatttcgaagattccttagcaccagcttgggataaggtgattgaggggcaaatcaacctgcgtgatgcggttaatggcacaatttcttacgttaatgagcagggtaaacagtaccaattgcaaccagacccggctgttctgatcgcacgggtaagagggattcatttaccggaaaaacatgttctctatcagaatgagccaatcgccggtggattgtttgattttgcgctctatttttaccacaaccataaacaattgctggcaaaggggagcggcccctatttctacttaccaaaaattcagtcttatcacgaagctcagtggtggagtgatgtattcagctttgcagaagatcgttttgatctgccgagaggcacaatcaaagcaacggtattgattgaaactctgcctgctgtatttcagatggatgagattctttaccatcttcggcaccatatcgttggccttaattgtggccgctgggattatattttcagctacattaaaacactgaaaaatcatagtgatcgggttctgcctgatcgtcagtctgtcacgatggatcaacctttcctcaatgcttattcccgtttgctgatcaaaacctgccataagcgcggagcatttgcgatggggggaatggcagcttttatccccagcaaagatattgagcgcaacaattgggtactagataaagtccgggcggataaagagctggaagcacgcaatggtcatgatggtacatggattgcccacccaggtcttgccgacacggtaatggacgttttcgatagggtcttggcagagcggcaaaaccagttagatattttccgtgaagaagatgcaccgattaccgcagctcaattactggaaccttgcccaggcgatcgtactgaagaaggtatgcgggccaatattcgtgtagcggttcaatacattgaagcgtggatttcaggaaatgggtgcgttcctatttatggtttgatggaagatgctgcgacagccgaaatttcccggacatctatttggcaatggattcatcacgaaaaatcattatctaacggtaaaaaagtgacaaaaagtttgttcaagcagatgttggcagaggaaatggaggttattaagcaggaagtgggagaaacacgtttcagtcaagggcgatttagcgatgcggccaagttgatggagcgcattacaactcaggacgagctgatagatttcctgacgttgccgggatatcaattgcttgattagagctcatcccattagggctactgagagaagtttgagcaacgaataataacaaaacaccatatccgattaatttaacaaagataggaagtagaagttatgacaatctccagaactcaacaaatcgctcaactggaacaagaatggaaaagtgaccgttggaatgggattattcgcccgtacagtgcggaagatgtggttaaattgcgtggttcggttaatccagaacatacattggcacagcttggtgctaaaaaactgtgggaactactgcatggcatggcaaagaaaggctatgtcaactcattaggtgcattgacgggtgggcaggcattacagcaggcaaaagcgggtattgaggcggtttatctttctggttggcaggttgcggctgatgctaacactgcatccagtatgtatcctgatcagtccctgtatccggtggattccgtcccggcggtggtaaaacgtattaataacagtttccgtcgtgcagatcagattcagtgggcaaatggtattggtactgatcatcaggaatatatcgattattttctgccaattgtggcggatgcggaagccggatttggtggtgttctgaatgcttttgaattgatgaaagctatgattgaagcgggtgctgcggctgttcactttgaagatcaactggctgcggtgaaaaaatgtggtcatatgggcggtaaagttctggttccgacacaagaggcgattcaaaaattggtcgctgcgcgtttggcggcggatgtttctggcgtaccgacgctgttgattgctcgtacagatgctgatgcagccgatctgttaacctctgacagtgacgcatatgacagtgagtttattaccggagaacggacttttgaggggttcttccgtaccagagcgggtatcgatcaagcaattagtcgtggtttggcttatgcgccgtatgctgacttgatatggtgtgaaacatcaacacctgatattgaaatggcccgtcgttttgctgaggcgattcatgctaaatatcccggtaaattgttagcttacaactgttctccatcgttcaattggaaaaaaaatctggatgataagactattgcgcgtttccaggatgaactgtcagcaatgggttataaattccaatttattactctggcgggtatccacagtatgtggttcaacatgttcgacttggcacatgcttacgcgcagggtgaaggcatgaaacattatgtggagaaggtccaggaaagagagtttgaatccattaaccgtggttataccttctcttctcatcagcaggaagttggcacaggttatttcgataaagtcacaacgattattcaagggggaacatcgtcagtaaccgcattgacaggttccacagaagagcagcagttctgattgtttctattcagcctgcttattgcaggctgaatatattgaggagttgcgatggggatagattcagcacatttgatagcacaaaccattttacaaggattcgatgcacaatatggtcgctttctggaagtgacttcgggtgcacaacaacgttttgaacaggccgactggcacgctgttcagcaagcgatgaaaaagcgtattaatctttatgatcatcatgttgggctggtggttgagcagcttaaatgtatacatagtgctttcggatatgatgaagagtacattgccaaggtaaaggttgtttataccggtttattaccggattatccccggtttgaaattgccgagagtttttttaattctgtttattgccgtctgtttgagcatcgtaatttgacaccggataaattatttatttttacctcgcagcctgcgcgcagatttcgggatattcctcggccgttatcgcgtgactttttccctaatgataatcttgcgttaatgttacggacaattcttaatgatctgccgctgcgtttaccttgggaaaatctggaaagagatatttattatattactgactatctacaacagacatttccagtcggagaattattacaggcaacttttcagatagctaatgaactgttttatcgcaacaaagccgcttggttagtcggtaagattcgcattggcggtcaggtttatcctttcttattgccgatccatcataacgaatctggtgggatttttatcgatacctgcctgactgattatgctgatgctagcattgtatttggcttcgcccgttcctattttatggtttatgcgcctttgcccgcggctttagttgaatggctgagagaaattctgcccgccaaatcaacgtctgaactttatatggcaatcggctgccagaagcatggtaagacagaatattaccgggaatatctggcgtttattaccttctctaaagagcaactgataattgctcccggtgttaaagggatggtgatgttggtatttacttccccttcatttgatcgcgtcttcaaggtaattaaagatcaatttgcgccgcagaaagaggtgactcaggagcgggtacaggaatgttaccgtctggtcaaggagcatgatcgtgtagggaggatggccgacacacaggagtttgaaaattttgttattgataaagcccgcatcagtcctgaactaatggaagagttgcagaaagaagtgccagaaaagctggaggatttgggtgataaaatcctgattaaacatctctatatggaacggcgcatgaccccgctgaatatctatatggaacaggtggaagaacggaagttgaaagatgtcattgaagagtacggtaatgcgattaaacaacttgctgcggcgaatatttttcctggagatatgttgtttaaaaactttggtgtgacacggcatggacgtgtagtgttctacgactacgatgaaatctgttatatgacagaggttaattttcgagacataccgccgccgcgttacccagaagatgagcttgccggcgaaccgtggtacagcgtggcaccaaatgatgtttttcctgaagaattccgacattttctttgcactgacagtcgtattcgtcgctattttgaagagatgcatagtgatttatttaaagcagactactggcgggcgttacaggagcggattagaagtggtcatgtggaagatgtgtttgcatatcgccgcaaacagcggtttagtcaacgtactgagatagaaacttattctattgctaaagtttcagcctgattttattaggaattggcgattactgtcagcaatcgccattttcaccaatagctaatattattatcctcattaaattatttctctaaattaaatacaaattaatttctatttgtttttattgtgtgaggtatgaatattcctaataaaaataaattttggattccatataatatatatttattattaggaaggcataattggaatgtgagttaaaaacatatatttaatggtttctttaagaaataaaaatagatccacttatttgtggaggttctataattttatagagtttggtagtcaaggatttttagccatgactagtggttgtaaaaataattgatatttttgactcgtaattaactacatgaaaattctcatataacacatatataactgcgtaaaagtatttaaggaaacaataatggctagtgtaattttatacggcgataacatttatattagaaataactaccttggaaatggcggctatctggatactaatggttatgcaaccgcacaaggcgcaaaatataacgtatacacggctaattcgccgacccgagctccgggtacaggtacgggtacgtggcaaattttgtctgcgagcggaaaagccatagggacacagatttacagtggtgatatagtctttcttttcaatctttaccagaataatggcggatatctcggcacaaatggttatgcgccatcacctgaactctataatgtttatacggcggataaagcagcacgtccggttgagaccctgacatggtacattttttcagatacaaccagtggatatgatggtaaagttcgtgaaagtgatgttatccgttttctgaatggttatgatagcgtacgtggaggatttctcgatacttgtttcaatgctactgttcctaacgaattatataatgtatatacttcacgtctttctaatcgaggcaatggcacaggcacttggaatttatcaaaagtgatttaatcaggatgatattcatcgattagtgttccattaactcatccttctataaatccttctatatatgtagagtctggaaatataattattttcggactctttatctcatttttcattgatattatttctaaacgggttaaataatttcgttattattctattctattctattctattctattgccgataatatttttagcgggatgataaattaagttaaatttattagtctgaaaaggcagggcacgaaaaaatcaatgccctgagaagaatatgataatttatgaaagagaattaacgaatcccgccatattctttactgatctcttttgctgcccggatcactaaagcaccaagttcggtgatacgatcatcagtgatgcgtgagactgggccggaaatggaaatagcggcaaaggcttggtgatgctcatcataaatacaggcagcaatacagcgcagacctaaagcatgttcttcatcatcgaacgaatacccttgtttacgtgcttgctccagattttcttttaaattcgaaggggttgtcttggtatgttgtgtgtaagaatgaagccctttcttatgcagtaattgaaccagttggttatctgataatgttgaaaggaatgctttaccagccccggaagcatgcataggcaatttacccccgataggggcggacattctcatcaatgcattacactgtacctgatcgacaataaccgcttcatattcactgtgatcaagaatagctaaattcacggtttcaccggaatcttccatcaaacggcggaggatcgggtgaatgagtgccaataaatttcggctctgtaagaaactgctgccgacaataaaagtatgtgaaccgataacccataaccctaaatcgccaatctgacggataaaaccgtgctgttgcaaagtagtcaaaaggcggtgagtggtggaatttggtaatccggcttgttgggctaaatcagtcagggcgataccaccgggtgactcggaaatatattccaaaagtgtcaggccgcgacttaatgactgtacttgcccattagcaacagcattattcgccgtaatcttggttttttttgtttttttactggtaacggcagtgctcatcgaaataccctctgaataataagatggaattcattttcatttctcattatggacgataaacctgaaaaacactcatccgatgtgtggaaaatgctacctatcattaagatttaaagaaatctcaaggttaggtctcgaatcatcatgatagttaactcactataaatgcacaagattattaagatggaaatggtttcctgtctatggatataaagaggcaacatttttgattcagcacgatataagccaatatacccgtcatctttcaagttgcttctttgttggctgcactctctcaccccggtcacatcgttatctatgctcccggggattcgctcccttgctgctgcgatgcatcttgaaatccatagggtataaacttgctagtactttttgtgtgtaaattggactcgtcttattaaagtcatcttcgtagaatatgaatacttttaggaattgactcattgtattaatagtattttagtggaaataatttataaataacatctctaaatgatatgtattaaataataccttgaggaatttataggaaatagagtttttatctaattattttttgattatataattacaaaagagcgtctgttattgttacaaataatgttttatattgttttaaattagtctaaattattttgattaattttttatattttcattttaattataaaaatatgaaaaaatattattaattatatcaaggataatattttgttactattttatcggaatgggagagtttaatgaaacgcatttttttgattatctgttttttagcatctgtaattgtcgcgattattcagggtatcggtttggtacttcctgataaagtcccagttgaatatttcaaagaaagtggattcaagaatgtgatgagaacgcttggtgttattgccgcggaaccccatcctgcggcttcaacacagcaagcgttagttcgggcttacctgattaacgaaatgaatgatatgggatatagcgtcactgaacagacattttattacacggcggctgatttggccgctcggcagaagagaatatattcaaacttcaatagtcaacaacgccgagcttttgataaagagtttgccaggataaatacaggcaactttgcaaaacaagtggaggaacaatcggaattaactggaacgaatcttatcgcaaaattggaggttcctgcgccagaaggaactttattattcgtttcacattatgacagtgttagaactgcgccaggagccagtgataatggtatagccgtcgcctcggtactccaattaatgcgggatcttgctgaaagaacggatataaaaaataacgttatattcttattctctgatgctgaagagttgggattactcggcgcgcatcactttgttaagaatattaatgagatcgcgactcaaccaatagatgttgtttttaattttgatgctcggggaaataatggcgtgccactcttatttgagacatcagcaaaaaatcttgctcttgtttcagaatggaatcagaatgcttataagccggtagctttttcatttagtcccatcgtgtatcaaatgttgcggaataacacagattttagtgtctttctggatagagggtttaccgggatgaattttgctacgatcttgggttacgagcattaccaccgtatgagtgatactgttgagaatcttaaccttggaactttgtggcgatatcagcgaacgattcgggatttgggagcgcatttcgcggtaaaagatgagattaacttgtttaaagaaagtgtagatgcagtttactttcctgttccctatattgggcttattatcatatctatattttccgctttcgttataggtattttaacatttttactctctatctcattagcgataagaaatatatggttttcatcttcactccgaactgtatcaaatatccagagcattttaaggatacttgctggattatttagccttgtcgcagcattagttgtacccacagcatcttatcttattacattacctgttttgttgtttttattaacggatttgatgttgcgggagttcaataaatttagcgttgcgttgattttattaattatctgtacttacattacatctattctctatgttccaattatataccttgtttctatcggattacatgctcctgtagtggggggtgtactcgctattctgccaatgcttattttaggatttggtatagccggtttttggaaacgagtgatttaattctatacccgttatctttcaagttgcctttttgttggctgcactcgttcaccccggtcacatagttatctatgctcccggggattctctcccttgccgtcgtgatgcatcttgaaatccataaggtatataaaattagtcgttataattaaaactaatataaaactagtcataaagtaagataacagaatggctggttcatttcataaactaaatagtagtaatgatataattcatgaagattaataattttgccatgtaaagtatataaggaagtaatataaacggatttgtgaaaataatgttaggaaataattttttgaatatattttcaaattgactcatgaataaatttcattttttttatgtgtcatttaaactaagattatctcttgttactattaactgtttgttgttttatatggttataattttctatcaatattttttcatataaattaaatacatttaaaattgatattttattattgatttataacttatccattaatattttaatgatataatttacatttgaaattaaatttttctaatgtgtaaaataatttttccagcaaataatttataaaataatatatattccttgctttatctatagcctgttactaagaaagtataaggggcttttatattggttaataacaaattagaaaatcactaataacccggcgatatggacaagtatttgacacctatcgcactgaaaataaaatttttttggcggatttatcgccaatgccagtcactggagcgtgatgtagttgttgggagcatatagatatgaaaaataatattaacggtaatcattttaaagtggctggcaatttcctctgtaattataaagtttatcagggagatagtaatggcagagttgttatattgttacctgctattggtgtggaaatcaggaaatatgacgctttaatacaacaactggtgaaagagggttttcaggttgtcactgctgatatgccaggttatggcgacaatcaacctaaaccaagtcgaaaaaatgactataactattccgatctgttgcaggattatcttccggccttgctagataaggctgttaaattaaatagcaataaaattcctattgtctttgggcacagtcttggggggcatattgcgacgctctttgccagctcaactgacaggccattttctctgttttgtgtggcaaccgggaacgtatggtataagaattggcagggaatggggagggtacagataataacagcagctattatttttaacattctgactgcgttatatggttatctccctgggaaaaagattggttttggcataagagaagctaagggattaatgcgggactggtccagaactgcttatacgggaaattattatcatgttcgtgcttataaggggaaggagaataagcatttatccaaggctgtttatatctgtgttaaagaagataattgggctccgttgaagtctactcaagtattagcaagtcttatacctaatgcagaagttagggaaataacattatctttcaaaggtaatcctcatagcgcctggattaaacagccaggagatattattgaaatcatgaaaaaagaaatgatggagaatagcgatgattaatacatttaaaattctgcgttgggaatttttgggattgttttttatcactttatttctgacttggcagcttgagagttatataaattggtggcagtttattgtgttattttttctgattgatattattggttattacccagggcggatctggagtttactgaataaaaaagaaactcctcctccagctttttacaccatttataatatttgccacaatttatttacactcagtgtgattagtttgctctggatctggttctttaaggacaattacagcgttattgcactatttgtccatatctgcctggatcgaggtgtactgggaaattttcctaagttatctattaatatatttaaacagcctactgttcattgaaaaaaattattatagagagatagcttatttgaagaggaatttatattatgaatttaattaaacaggcatcggaagtagaaatgcgggcaaaagattggggcttggatgaatggttcactgaacagataagtgttgaacaaagcaaaagaacccattatgccaatgatcctaaattaacctatttgccgggtgatttacgggagtctctgatcagggaactttcttttaaatcgatttcggaatatgaggcaacgaaagcattattgttacttgcagataaggctcctgacaatatcaactttgattatatgctgactcagatatttgatgaaggtagacatgctaaattattcagagaacatctggtcagaataggctttgcggatatcgacaatgtggccggaaaaatggaaagcctcttacgaggaaaaatgaccaatatgttggaaacattgagaacttatttcgataagtgggtggtgttgaaaaatgactacattgcaggcgtgttaatcattacggttgttctggaaggcgtgcttgcgccaacgtcagagctcagcgaaatcaagtggcgcccttttgatattgttgccgccgagacacaagccagagccaatgctgatgaattaagacatctgacagtgtgtgcaaatatcgtcaagatggcgctcgaaaatgagagttctctaaagcaatcggctcttgagtgtatagaagaagggctggcgttatggaaccaagtatctgttgatgatttgtttgtggagcgtgaaatgttctatcaacggggtatgcagaactatttgcgctttattgaaggttatgaattagctcctgggatgttgttgtccgattctacggtggaatctcgccttgagctctctcattccttggttgaacagatgcagcagtcacgccttaagtacatgggtttagtgtagatatggccttattcagcaggttgtttgaataggctaaggagaattaaaatgacaaatattgttgaagaactcaggaagaatagcgggaaataccaacatttgacaccagatagattgaaaagattgttattgggttctgaggctgcttcacaatgcctacgtttgatggctcaatccaatatggatgggcttcatcaagtcggtaatactatccgtgaagcctctgcatggcttcccgctattggtattgctctaacaatgcataatcatattgtactggcttgcagtaaatttcccgatatattcgaagacagcaacgtattattgaatgaagttatgacatcaaaagcgttggttgcttccgcttttgcggagggactacctggaacgaatatttttataccatcgcttaaaatgcattctaaagagggaaagttgtttgttaatggttcgaagaaaccttgttccttatcttcggttgctgactattatgtgttatcggtctgcgatactgataataataatgatatgaggatagtattggtttctaaatcagatcagaactttaaagttattcctttctggcgactggggattatggctgaaagtgataatcaagaagttaaattttcggataccgaaatttcattaacacgactttctcattataaagggctggagcagcaaataattctttcctatggtttatcgctatttaattactttgctgctaatacatactcaggtattcttgatgggctgactcgttttattcctgagaaagtagtagaacagcaaacaattaaatatactctgacccaagctgattataagattaatgttattctcggtcagatgttgattattgccttttatgctagccaggatgaaaacgccgtccataagattctcgcgttacgttatactttggaaaagatccttgaggaaactgccagtttcatattccgatgttgtggtggaattaaggtaatgacaacaccagaaattatgaatttctatttggcagtacagttatttaaatttcatccgataggagaattccaaatgattaaccagatcatgcagcaagcttgattacttttagaatcacctatttataactcaaggattttcccatgctgtttacagcatgattttatgcacctaaaaaaaagagagagagaactatgtttgttaatcaatatcgtgagagtttattaaactctgtgggccttgaactggatatcaagtctgctcaagataaccagcttacattatcggatggccgggttgttaaggattttttggctcaatatggtgccctgccatttgggcataatcctgatttcgctatcgctgaaattgacagattcactaaagataaagagcctatcttctttcagcccaatattcacaaaaaggtacggctattggctgaaatgcttgcggagcaaatagataaggaaaaatatacccactgtacttttactaacagtggtgctgaaaccgtagaagctgcgattaaatttacccgcctgtttactggtagaaagcgtattttgagtttgcatcgcagttttcacggaaaaacctattcggcattatccgctacgggatcaaaccggtttaaagctgatttcatttacgatgataaattatatgagcaggttgatagtgaagatttagatgaaataaaaagaaagctggagagccgggaatttgccgcatttatcattgaaccggtgcaaggagaaggtggaatgaaagtgattccaccagataccttgtccaatattttggcactgtgtaaagacaatggcacattgtcagtctttgacgaagttcagacgggtatcggtaggcttggggcattttgtgcggccacgctctacgctttgaaaccggatgttatcctgttttctaaagcgctgggggcaggtatctcgccgattggtgcgatgttatattcagatgagttttatttatccgagttcgacaggaaacatagctccacttttgccaataacgttctagccgcaacgatggggattgctgttatcgagcatctgactaaagaggagggtaaggcgttaacccacgttcaagaagtcagccgttatgttgatgaatgtcttgaacaattgtctgctaaatatccgcagcatttttactggcaaggggctgggttgatgcgtggccttgaaatacaggacagcaaagcggcttccaacatatttatcaatttcagtcaaagaagcggtggcctggcttatatcatttgtagtttcttattgaaacattatggtcttttcaccatgccgttaatgtctcgtccttgttctgtacgttttgagccaccgcttaacgtttccaaagaggatattaagacgtttttcaccgcttttgatgaggtatgccaactagttgaaaatggacgatatgacattcttttttcacacttgatagatgtacctgttgcggatctcccacccgcttcggtgagttatccaatttcaaaaaataacaacttggctcagattaaagcgcctatccctggattaattgagggtaagaaattcgctttcttgattcataccacttcggttaatgagctcgctcactcttattgcgtgtcaataaaggagaattacacgcaggagcagcagaaacagctcggtaattggatcacgcaggtttcttcaattgattttaatcctgatatcgccgttgagtttggtgtcgaaagttcaacggcatatgctaatggtatgctccttttctcacccattagtcccgaagatatgatggcattgtcagcgaaagaacgggcggtattgatgaaggaatatctcgatgtggcagagaaaaatggcgctgaaatcgttggcttaggggcttatacctcggttattactaatggtggtactagcttggtgaataatcggcagggtcggatattgactaatggcaactctctgacagcggtggcggtgattgagggaatacgctcaatgttggttgagaatgcatcccggcaaacattggcggtagtgggtgccagaggctccgtaggcagactttcagttattggcttagctcataactttggccggattatcttggttagccgccctaataaagcacgcatattactctctgaactgaccaaggcgctgctttccgcagtgttaaggactcatgatgttatccagccagattcggtcatggataagatgagaaaatggctttttaaacaaaatccgggtgtgacagatgcacaaacattacatcagcaagttcttgacgttgttgatacctttggtttggaagcgatagagagttatgaatattctttgagtcaggctgattttattgtttcggcaaccagtgaaggtaagcctttcttgaatacaaattatttgaaagattccgccatcgtttttgatgcggccagacctttcgatttcattcgtgatggcaaccatcaaatttacgaggggggattagtctatcagcctgagaaagtgacctatagcgattgcaacgtgatcgatgtacctgcgggggtaaatctcgcctgtttatcagaaactgtcgctgtggcgcttgaaggggtgagtgttcatcaaagcatcggtaaatctattgattataacgatgcattggcgattcgggatattgccaggaagcatgggttcatccctgtccagtattcccgaaataatcaaggtgagcgttatgagcatgttgcttgatgctccccagattattgccaccgggaacgctcaagatgttcttggcaacagtcacctcagaaacgtgctttgctattcaaagcacccgttgagtagcctgttgttcaatagtgaaacatattggtttactaatcaaaagggggcgattggtttctttcaggacaaaaatctgcatatgtgtgtaggcggtattttggctcctgacgaagaacgtgctgcacttttgcactcttttctcaacttcaccagagaaaagcgggctttcccggtttttctgcacggtgatgagagcgattttgtattgttgaaaaatagcggcttttctgtgaaccagcttggtgcaagttattcattgagccttgatggatatgacatgaaaggcaaacggtttcagcagcttagaaataaaatcaataaatctaaaagagcggggatttctgttcgagagatctgctcacaagaggaatattatcgatttaaaccacaactagaacagattaatcagctttggctgaaagaaaaacatgcgaaggccctgaaaaaattggtgattgatttcaataccgtggaagtgaattcaggccagcacagagtctatattgcaactcagggagaacaaattcaggcatatattgtttatagctacacttggggggaaacatcgggatggtttcataatctatctcgaaaaaaaccggatatacccgacggcacgatgcagtttattaatgaaacggcgattaatgacttcctgaaagagggtgtagtttcctaccttcatttgggcttcacgcctttggtggagttcggcgaggagggatacattaatgactcggcaatcttttataaagttgccaaatggttgtcatcaaaaggcggcattgtttatcctgctgcttcgcaacgtcaatataaaatgagctggcggccgtcgttgattgaaccggaatatattgctttccccagaggaaaggccatgaaggcattatggtcaacattgcgaacgactaatagtatctaagttataaaaagtcttctcttaatgttagatagcaggtgatcagtcggggctaaaaatactgggctgatcacctatcatggttaataatttactgtgtattgatatgttttctatggtaaatctattttcactgagcgtctatatttaaaattattttttccttcatagattgttgttattttctttttattttcggctttgtattagttattttactacttcacattcattattgttatatattgacaatagagattttgtatcaattttactattatttgtgactgggaagttatcaatgttgataaattcactaggtatcatataggaaggtaaattatttttaagcaggttaactaagttctccttattagtaatagttttgaatttacagaaagcaaccaagcgaacaatagaaccatcttctttttttaatggcaaaacaacagcgctatcaacaataggaatattcatcagcctttcttcaatttcatgtagctcaatgcgatagccatttagttttatttggttatctttcctgccaaagcaataccagatattgtcaattaatttgccgatatctccagttcggaaacttctcgttccgtgttgattaattgtcaatctattattatcttccgttttagcgccaatgtattttctcataacatgagcgccagaaataacaatttcaccattttctaatgtcagagtagagcccgatcttgactcgccaattggcaataattccatatcagaatgaaggtgttgatcgctaatttcaattaacgttgttgctacagtagcttctgtgggaccataagtattatagataattgcagatggaaatcttttccttaaatgtttaacgagatttttacttagaatttcaccacaaaatagaaaatgttttagattttttaacaaggaataattaaaactctgcgagagtaattgcttataggaaaaagagggtgttgaaacccataccgttggttggtaatgatttaaaacttgataaaatttttcagaatcagttgctgtttcttgagaaatacaaagacatgtgccaccgtataccaatgtaccaaatgtttcatacatggataaatcaaaattaaatagcgcttgattcatgaaaacaggtttttcaccaagcttgaaatcattgtacatccatcgcataagatcataaacactttcacgtccaatgacgacgcctttaggttttcctgtgctaccggatgtaaacatgatataggcaacattatcttcatcaaactcaatataatcaacatttgttgttttaaattgattgttaatcacatcgtagtaataaggcgtgttggatagtgatgcaatttctaacaaacgttgtattggataaattatatcgactggaataaatgggattttataagttatacatgcataaattgaaactaaaaaattagcctctttgtgtccgtataagatcaacggcgtgttgcggtttaaatttaattctaaatatttagaatgccactttttaatttcataatataaatcacgccaataaatgactttatctgagccgactatgacgggattctctggatgagaaggcgctatgattctatcgttaatcaataaatcaaagtttgattcactatactcgttgagatatttcattttataaaactgtatccactaaatatatataaagaaaaacaaatgaaagttaacgttgtcagtctgccaaagaaggagatgatttttgtatttaggatattagcgatattttctttatctctagtataattaattaaacagttatgcattactgagtaagaaccaaataaagcaccacttataatgtaattaagctccagtccattccaaatacccatgcaaaataatgtgataaaaatactgatattctgggcaaaaagtctatgatttttgaaaaatgctttctccattagtgtcttatataatggcataaagatgacgtctcttaaccattcagataaactaatatgaaatctacgccaaaaatcctgtgggtttttggctaaaatgggataatgaaaattaatcggtaagtttatgccgaataacttgcccgcgccacaagccatattggtataaccggcaaaatcaaaatataagtaaaaactataacttatagcaactactaagtatgattcaatcgtatctttattaatatagtcagataaaaatacgttatagataagggcggcgaataaaaatttctgaacgataccatataatatttgtccagcgccggaaaaccatttttctaaagagactggcacttgtaattcaagtaaatcacgtttgaagctgttccatcgatacatagggccagccagccaaactaatggtaagaataaataggaaaaatattcataaattactattttctgttgcttgctagagaataaaatgacatctatagctctgaatgtaaaaaaggataaaccgataacactcaatagatgactaaattccaaatttaatttaactaaaaataaaggtgaaattattagcagagaagatactaatttattaattatattctttttgaaaattagagttattaaatagaaataaacagataatgctatagggatataaattttatatctgaaaataatacaccagcaaataatagaaagcacacttaatgcaattttagaatttattcttttattaaagaatagaaaaaataaagaaaaaacaaatgaggctgaaaatagataaatgaaaaagttaaaatttgcaaacatgttttttatgccttttttattctaaaattgctgatattcatattttactttaacttcactgctaccattgacgatagaatcggagtgataaaataaggtaagcattaggaaaagatataataaaaaagcctttataaaatatttcatttcgcaaaatgctccacaatagctttatcagttaataaccaaccatattcccccatatgcataatatcagttaatactcctggctgatattgttcttcaataagatttaaatatcccatgccatgcgattttattttctctgatataatattttcaactagtttaaaatcatttgtatctgtgtatacataaggatttaatggctgcataataaacagagcgtcgacattatatttcgtcaataaatttaatatattgtcaaaggcgttcatttctttactgtacttgattccattaggaaatgcttttttactttttttatcctttacatacttttcatagtattttttatttacccattgtgtctccttgctcatgtttttaagttcaatgtttttagcatcattagctagatctagccattgaacttcggtattagcaatttgaaattgttttttcattaaaggaccttcatgaaggacataaatattgtcagctttaatttcatgattgtcggttattatatttttgatatttactcttgcctctgctatatagtttaaaatgttggtaactgacgatgctattatattgtctttatgaatcaactttaattgggttgcgtttagattttcaaagttatcttggttttcattgagataattagaaaatatattttttgcactttcatcatttgcgagtttatttgcgatataggatggaaaatgagaattgtatgcttgtggtagtagatctgttttttcaaaccatcctggtgatagaataataactattctactatccttatttaaatattcttgataagctgataaataaccataaattgctaataattcaaaatgtgctttaccaatacctattgtaggaatatttaaattttttgttaaaaaatcatatggaatgaatttatgcgttctgtttgttaattcagaagatccaaacaaaatgacatgattatgtttaaatccatattcaagagatttttcttttaagaaatcaatagcattgtgttggtctgtaatcgtaggtatatagttgatcgatttactatcatcttcaatatatttgtattctactagtttctgattaaaactattaacaaatactataataaatgaaaaagtaattgctgcgaataataatgctgcaatattaatagatatcttttttaacatcatttcaagttgttcaaataattgataattgacttaggggtttcgagaatagattcagcatcagttgccggtatatagcaatcgaactcctcttgtaattccaggatcagatctactgtagtaattgaatctattagatttttcttcaaaagctcatcacctaattcaacattttttctggcaattttgttgactattgataatacttgctgttcaagttccatatattgtccttttataccaagattgtatttatacccgtcatctttcaagttgcctctttgttggctgcactcactcaccccggtcacatagttctctatacccgttatctttcaagttgcttctttgttggctgcactcactcaccccggtcacatagttctctatgctcccggggattcgctcccttgccgccgcgatgcatcttgaaatccatagggtatattgatattcgtaatagctaccgcacaagctaaagcacatttgcttgctaatatatccgtcatctttcaagttgcctctttgttggctgcactcgctcaccccggtcacatagttatctatacccgtcatctttcaagttgcttctttgttggctgcactcactcactccggtcacatagttttctatgctcccggggattcgctcccttgccgccgcgatgcatcttgaaatccatagggtatatgctcccggggattcgctcctttgccgtcgcgatgcatcttgaaatctattgggtatacatatgttattagacagtatggaatattaatgctttagttttaatcttcatgcatactaattgatagccctttttttatcaagatcatataattgttctacgtataatttccctaataaatgagaaaataatgtttttttaaaatctccctgtgattttccatccctcaatataattaaatgtgtaagtgaaaatgctaactaatgcacacaaagatttacaacataaactatttaaaaagagatagaaaaattaaaataaatttttcatgattctgccggtgaatctgcatttccgtactaaagaaaatgaagaaagagggagtattactattatgaggatccattatgaggatccatttaggctggctgtagcagctattttttattgtagtataagattccgctcagtcttttggctgagcgaaatatcaaatacctgaaaaattatacttattcaaacaaacgttgatgaagcgtttgaacaatttgttctgcatctttgccttgaacaagcaagcataggttatggttactggcaccatgactgatcatacgaagattgaatttttccagcacactaaaaaccttttttcctaatccgttggtttgagaaagctgattaccaataattgccaccagcgccagatcttcttccacttcaacccgacacagcgtcgaaagctctgtcatcagtgcattggtcagcaggctgccatttgtgctagtggagccagtggtgtcgagagttaatgccacattgacttcagaggtggtgatcaaatccactgagatattatgacgtgacagaatggtaaatatttcagccaaaaatccctgtgcgtgcagcattttcaggctgtgtagtgtcagtaacgtctgtttctggcgcagggcgatagcgcggaactgtggtggagcttctgtggtatcacagaccagcgtaccgcctgcctgtgggtttttactggaaccgacaaagaccggaatgccacagcgaatagcaggaaacagtgttgccggatgtaggattttggcaccaaatgttgccatctccgcggcttcatcaaaagcaatcttatcaattcgttgggcggcgggaacgactcgtgggtcagtggtgtaaatgcccggaacatctgtccagatatcaacgcgtttcaggccaagggcttctcccaagagtgccgcagtataatcgctgccaccgcgtcccagtgtagtggtacggccgttctcttcacgaccgataaaaccttgggtgacaatcaggctattttttagctgtggtaagagatgttccgttgccaacgattgaagttgttcatagtttggttctgcacggccaaaactctcgtcggtatacatcactttgcgtatatcaaaccattcggcatctttaccgcgttggcgaagcaattcggtaaacaatcgtgtggacatcaattcaccgtggctgactaattcatctgtcagagccgcagaggttgccagagatgcggctttagccagggttttaatattttccagtagacgatcaatctcttgacgaatcgtatcggattcatgcaaacgatcaataattgcgtattgaatggagtggatctgtttcaagtagtcagcccgcttatctgcatcacagcctgccgctaatgcaactaataagttggttataccggcagaagcagacaatacaaccacacgtactgctttatttgccagtacgatatctgcactgttattcatggcatcgaaatttgccacgctggtaccaccaaattttgcgactacatgcccgccaatttctgggcattgggatgaaacagcactcattgcaataaccttctgttaactggatagtcttttagaaatatcgggttaatgggtttgagtcaacggagtgaagagtgacatcaatatctttcatgacgcgatgagaatcataaaataaattgaggatagtagagagaggtgactgttttttgtatgacccggcaaatagaactagaaaaacttaatcgttttgaccaatatcagcgattaaaggaaaagagactcgaatcatagaattacaggttacaatctttctttacccccaattacttacagccagttgatagagagcatagctatgaaaaatatcaatcctagtcaaacctcagcttggaaagcgttagaacaacattttgcacagataaaggatattcacctacgtgaattgtttgaacaggacccagatcgttttgctaagttctcagcgacattcgatgaccagatcttggtggatttttcaaaaaatcgcatcacaactgagacattaaaaaagttacaggcacttgctaaagagacggatgttgccggggctatgcgcagtctattttcgggtgagaaaattaattgtactgaaaatcgtgctgtactgcatattgcgctgcgtaatcgcagcaacaccccgatgatggttgatggggaagatgttatgcagcaggtcaacgcggtgttggcaaaaatgaaagatttcagtgagcgcgtgattcatggtgagtggaaaggttataccggtaaggggattactgatgttgtgaatatcggtattggtggttcagatcttggcccttatatggtgacagaagcgctgaaaccttataagaatcacttgaatatgcattttgtttctaatgttgatggaacccatattgcggagactctgaaagcacttaacccggaaacgacactgtttcttattgcttccaagacgttcactactcaggaaacgatgaccaatgctcactctgcccgtgactggttcctaaaaagtgccggtgatgaagggcatattgcaaagcattttgcggcgctttccacaaatggacaggaagttaagcaatttggtattgataccaaaaatatgtttgagttttgggattgggttggtggccgttattcgttgtggtcagcgattggtttgtctattgcactctctattgggtttgaaaattttgaacaattgcttagtggtgcacatgcaatggatcagcatgttgccaataccccatttgagcaaaatattcctgtattgctggcgttaatcggtatttggtacaacaacttttttggcgcagaaacggaagcgattctgccatacgatcagtacatgcatcgctttgcggcctattttcagcaaggcaatatggaatccaatggtaaatatatcgatcgcaatggtcatcccgtggattaccaaaccggcccaatcatctggggagagcctggaacgaatggtcagcatgcgttctatcagcttattcatcagggaactaaactgatcccctgcgattttattgcaccagccatcagccataacccattgagtgaccatcacagtaaattgttatccaacttttttgctcagacagaagcattagcctttggtaaatctcgtgagcaggtggatgctgaatttgccaccagtggtaaaacggtggttgaagttgaacatgttgcaccttttaaagtgtttgaaggaaatcgcccgactaattctattctgttacgtgaaattaccccatttagcttgggggcgttgattgccatgtatgaacataaaatatttgtgcaaggggcgattctcaacatctttacttttgaccagtggggagttgaattgggtaagcaattggctaaccgtattttgccagaacttaaggatgacaatagggttgtcagccacgatagctcgacaaatgggttgattaaccgttttaaagcatggcgttagtcacttcttctgaatcagaaacttaattgatatgagcgaattatgttcatcataattcgcttatttttggtcaacaatatttatataccctaaagatttcaagatgcatcgcgacggcaagggagtgaatccccgggagcatagataacgatgtgaccggggtgagcgagtgcagccaacaaagaagcaacttgaaagataacgggtatagaatttgttataactttttattctgtatacctgcaacgtggtattctctgcggtgatcaattgtactgtcggatgaaagaaatttgtcctaatggaaaagcgtatgtcaactgactcaatattaacaacggtgcctattcagtggctttcggtggattcacccgttttgcctgatgaggttttagactggttgatggaattgggctcaatgacccgccgttttgagcaatactgcaacagtgttcgtatcataccattcagagaatgttttattaccgaagaacaactttctgatgaaaatgagcgtttgctaacgggtcaacgatattggctgcgtgagatcgtactgtgcggtgataatatcccttggctattggggcggacgttaatccctgaaacaacattaaccggtcctgatgaaagtttggttgatttaggaacagtcccactggggcgatatctttttagtggtaataaattgacgcgggactatattcatgtagggcagcaggggaaccgttgggcaagacgatcattgctgaggttatcaggcaagccattattattaaccgaagtctttttacctgaatcaccggtgtataaaaggtaaaatttaaaagagggaagcagaagtggcgggaagtatggcgcaaagtaaatggctggcctattgccgtttaatgcgtattaacaaacctataggtgcattattgttgttgtggccgactttctgggctttgtggatggccggtaaaggtatcccggatatgcatatattattggtctttactgcgggtgtatttctgatgcgtgcagcagggtgtgcaatcaatgattttgctgacagaaaatttgatggttatgttgaacgtacaaaaacacgtcccctgccgagtggtgctattagtgagaaagagagcaagatcctatttgtcgtactggcgctgatttcttttggtctggttttaaccctgaataaaatggctatctggctgtcagccgttgggttggctctggcttggctttacccctttgttaaacggtttagccattttcctcagtttgtactgggggccgcttacggttgggctattccgatgggatttgcggcagttagtgagtccttaccactagagtgttggttgttatttctggttaatatcttttggtcggttatttatgatacacagtatgcgatggttgatcgaaatgatgatctaaaaattggcgtgaagtctaccgccattctgtttggtcgtttcgacaagttgattattgggttattgcaactcgctatgctattgctgctggtgctggtggggtatctgataaatctgggcggtatctactactggtcactgttgcttacgggcactttatttatttatcagcagaaactgatcgctggtcgggaaagagagctttgttttcaggcattcctcaataataactacgttggtctggtgctatttcttggtatcttcttcagctatgtctgaaatatctggtgataacaaccattatcaccagaatttaagaagcttatccttccctggcactctcttcggtatcgttatgctctggtggcaaactgacgctctcgatagtaagacgaatctcaggtgacattagttcacctaatacctgatacagctcttgggtatttgctgtaatcgcattaccactgtcactgatataaccttcttcacgcagtgtattgaccgacgtagtaaataccgccttatcaaagaattcaggtgcgttgataccatgcaataccgacaaacgttgcgctaacatccgactctctttttccagcactccccggctgattactgggttggcgttcagtaaagagagtgtgatggcataacgttgcagtgtttcacggatgccggctgccagcaattgcagggggcggatacgtgctggattcagcaccagcatgccatgctccttgttgcagataaggcactggcgagtcagttcgttgatcagcgtattaaccacttctggcagctctgttttgctataacgcataaacagctcggctttaaggagtggataaatgattgcgacctggcttaacagcgcttcgcggctgatacggcgatgatgaataacgatgcaggcaatcagtgatggcagtactaagagatgttgaatattgttgcggtagtaggtcatcaaaactgcacgatcacgtggcagaatgataatgtcacccatactgtctttgtctacctcgaacttatccatttgcagagcgtgttctagcaactcctccgcggttttctttggtacggtgacatcagtagcgtagggcgcattgcgcatgagctgtatataacaatccagttgctcaagcagttgctcacgagtgagtgctcgctgacgcgatgcaagcagggccgttgaacacaagttaattgcgttagccgccgccgtgttgttgatgtttaccataatcttctcagacagttgattgactgtcggattgaaccattcggggcgatggaattctattggatcaatagaatcgcgccagctaggaacatggttgttaaggtattggatcaacgggatgggttcgccaaagttgacgtagccttgccccagattacgaagtttgcgcaaaccacgtatcatctggaaaaagccctctttctctttggttgccccacgcagctctttggcataggtggcaacttccatcacatgctcgtagccgatataaatcggaataatggtaattgggcgtgattcgcctctcaacagcgcctgtaacgtcatggagagagtacccgttttgggatcgagtaaacgacctgtcctggagcgcccgccttccataaagtattcaacagaataacctcgggcaaataattcacctagatattcccggaatatcgtggcgtagagtttattacccttaaacgtgcggcggatgaaaaatgcaccaaggcggcggaatattggccctgctggccaaaaattcaggttgatgcccgcggcgatatggggcggtaccaagccttgatggtagagcacataagagagcagtaaataatccatgtggctacggtggcagggcgcataaaccagttcgtggccatcctgtgccaaacggcggatgcgttcagcattgtgaacattgatcccttgatacaggcggttccaggtccaacccagtacacggcctgacagtcgtaccgtttcataagagaaattcgccgcaatctcttccatcatgttaatggcattctgtcgggctttctcatgtgagattttcttggtacgggcctcatcagagactgccttttctattgcttttgaagccagcaacttgttaaacagctcctgacgaaccggcaggcgtggtccgacggcggctaggcgttgacgtgaatagtgcattcgtgccacacgagccagtttatgggcaatagtcttgtcagtgccatgctcagttgccatatagcgcagagatactgtgtttgaaaagcgcacgaaactatctcggcctagccagagaatggcaaagaatttttggataccattgagtagccgtaaatgtggagcgttctgcccttcgcgtccgggggaacggccgaacatgacagaaactggcagcagttgaatatccagattgggattattgcgatgtagatccagataagcatggaaaatttttacggattcttgctttggtgcgcaatagcggaatacacgtgggccattatcgataaatacataactgggaagttcagtgtcaccgatctccagtaaatttaatgggtccggcagatcctgctcaagacattgctgacgtaatgccagtaagtctgctttagagtgatacggtagcacgtacagaatcgggcgtgtcgtatcgagccgcaattcagtgatcggatctgtagggataagtttgctctttaccagtatttttagtggtaaattcaataatttataatatattttacgccaacttgacataaatatcttgaagcctcttgttagcaacacgttgccagcatatcagaaacgggggttgagatctgttgcgttaagacaataataagagtggaaagtgtcaaataacctcatatttggtgtgaataatttatggcgaatcaatccaagggcttagcccgtatcattaaagcaatcgtatattcagtgaagggtattagggcgacatggcaaaatgaagcggctttccgtcaggaaataattttagcgatattggctatgatggttgcattttatctggatatcggcgctattgaacgcattttactgattggttcagtgatgctggtgttgattatggaaatcctgaatagtgctattgaagcaattgttgatcgtattggcagtgagttccatgaattgtccggtcgcgcgaaagatatgggatcggcggcggtctttctgacgatgatgttgtcattaattgtctggggaaccatcctttggcactattttatggcctaatttggtttaataattaggtattatattataataggctgattttctgccttagtaggttcccaatcgttatttagctgtatatacttacatattgactgtataaacaaacaggggacgaaatgaaagcacttaccgcaaggcagcagcaagtttatgacttggtgcgtgaccatatttcgcaaacaggtatgccgccaacgcgtgctgaaattgcagcccgtcttggctttcgttcacctaacgcggctgaagagcatttaaaagcattggctcgtaaaggggtgatagagattgttgctggggcatctaggggtatccgtttgctgttggaagaatctggtttaccgttaattggtcgtgtcgccgcaggtgaaccactgttggcacaggagcatattgaaagtcattatcaggttgatcctgcattgtttaagccaagtgcagatttcctgctgcgggtcagcggaatgtctatgaaagatgttgggattatggatggtgatctgctggctgtgcataaaacacaaaatgttcgtaatgggcagattattgttgctcgcattgaagatgaagtgacggtaaaacgttttaaacagaccggaaataaagttgaattgttggcagaaaaccccgaatttaagccaattgaggtggatttgcgtgaacagggcctgacaattgaaggattggcggttggggtgattcgtaacggcaactggtcctgatagtaaaatatcaaattgttgtttttggaatggttaaagaattgcaatattacggcagaatcatgttgttgaatttatcgttgtgattatcttaaacgtgattctgcggttgtttatttcagtctggctctgcaccaaaagtaagtatttacttgctatctatttctttttacttccttcaattctgtggtcatgctggcattcatctcgtttaatacaggattctatctcttcacaaggtgaacataagccatgcgcttcgatgactgtatggcgtaaactgaacccggctgtttttgctaactgttggatggcggattcaatggttccaccatctcgctcggtaacagaaccacaacgatcacaaataaacattgctgaagtgtggcttggctgttcaatatggtgacataggacataactgttggtggattctattttatgaataaacccctgttccaacagaaattccagtgcccggtatatggtcggcggtttagcctgtggttctgcttcccgtagcaaatccagtaaatcataagcactgattgcccctggctgctctgaaatgagacgcaaaacttcaagccgctgaggagtaaagcggactccacgagcctggcaaataacttcggcctgttccagtaattttttttgattaatcaatttcattgcgcctcttacaaccagtacgatgataatattgtgatgttatcatgtttcttcaatagaaaatattatccagaaaagttcattgtgattgtcccctgatggagttaatttggctaaattggtactcagtagcaaaaataatgttttcttgaagtttatgataatacagacaagaattatcgtatatgacagataattttcggaaaggaagcatttgtgatgaaagagcttttacaaaatcagcctcattatagacagttccccgttaaaggctatcaggtaatgaagcatattatctctgaaaaaagaaagttaccttttctaagtgcattatatgcgttgattaatattttatttgtaattgcggtatgtatgggtattgtattatctgtagcaattgttttatttataataggtaatgtatctgtccctgatacggactatttacttctggcacaagtaggtggtgtagcattatttggcgtaatgttactcttggttattatttatcgcattgttaagcgtcctgaatgggaacaacggcgttattatcaacaagcaggtttatctcttttacccgaagataagcgtcaggtattacgactcaatattgttggtgactattggctaggtttttggagtgaaactctagagcattatcctctacagtcacgggttgcccatgatagctatcgttactgtctgctgccattatctccgactcaggaacatcaatcccaattatacagcgactggggaattattgatgaagaagggtatatgaaaatgctaacgggtttgtgggagggggtacattcaaaacattttgctattgatgctgctcttagtgatgggaaaatgtttaaagtgcttgccaaattagttgaagtaacacccgactatattcataaatgtgccaaacctattaataagcgccctcctgcattagtgtggggatttgatttatggcttgcaatcgttttaagtcgcaactgtttttgtgccggttatatcagtgaagaaatggcatggaaaaatatgctgaaaaccgctgattatatttatgaaatcttcggtagttttgatgagttttatacaaactttcggctaggcaatgcttactggagtaatgattttgatcggtctaaagagcggctggaacaatttaattattataagtcacattgtgactggccaattgctagtttgccgtggcctgaaccaaaaggcattattatggaaaggcagatgatgacaggtttttctgcattagtagaagatgttttacgcagtaacatggaagaacaacaaagttatgaatttgatattactgagctgtcagcgtctcgtgtactccattaatatttatacccgttatctttcaagttgcctctttgttggctgaactcgctcaccccggtcacatagtttgctatgctcccggggattcgctcccttgccgtcgcgatgcatcttgaaatccgtagggtatatatgaaacatttccccttgaagaacatttcaaggggaagcgaataattaataataggaaataatgctgtaaagtgagagaacggattttttcagtatggtatctattatttctaaaggtaacataatttaccccgtttcctgaaatcacctgtttcaaatgaaacggggccaatatttgctttattagttaatgggttaaatcaaactaataaattttctctctatatccttaatggctgcacatcctgccagtttcatgctaagtttcagctcatccttaagtaggtttaaaatggaagttacgcctggtgctccacctaatgccagcgcatacaaaatgggcctaccgatagcgacagctttggcacccaatgcgagtgctttaaacacatgggtaccgcggcggatgcctccgtctagatagactggaattttagatccaacagcttcaacaatgtgcggtaatgaggcaattgctgccgggacagtatctaactgccgaccaccgtgattagaaacttgaatcgctgcggcaccgtggttaacacactctttagcattttcggcagattgaatgcctttcacgatgattgggaggcccgattctttggcgaggaactccaaatcactgaaattaagatcccgtttaaatagctctgtaatttctgataaggttgctcctacgggagcgccagggatattagggaatggcagtgagtgtgggaaaataaatttattacgtttatctgcttctctgttaccactccactctaaatcgactgtaaagacgatggcagttgctcccatcgctttggcccggcgtatcagttcacggttaatacccatatctttggttaaataaatttgaaaccatttgggtccgttactcacttttgctatctcttcaagagatgaattagacagagtttgtgcagtaaacagggtaccggcagaggcagcgcctctcgctgttcccaattcagcggtagtatgagccagcccatgtgcggctattggaggaataaaaataggcatatccacgttactgccgagcaattcggttgttgtgtcaggctcttttactcctgcgagatagcggggaataatttggaaatcgtcaaaggctctggtgttttcacgtagagtccattcatcacctgaaccgccgctgatatagtcaaattggggcgttggaatcaatttacgtgcttcttcttccaagtcataaagattaatgatatcgagggatttttctgcactatttgttttataggctcctgtcagttttatgttagcagttgcagcgttggctgaggacacagcggatagcgtaccggcagcagcaagacttaatcctccaactatgacgtctcttcttgatggcatataattttcccttacttagtaggtttaataagtattgacaatagaatttgtccacatattaagaatagacctattctgaataattcaagctaataaatcctcaataatgtttttataagctgatcaatcctattggaactggcggttttttattatgagaggcgcatcacaaaactcagattaaaatatggtagcttattttatttgcttacctgaattttggggaatagttcaaatagagggactttcggatgctgaatgtaaatgaatagcttaggtataaatttggcttcaggcattgatatattaacggcatcaactataagaaaataattaatttctctaagttataaaaatatttcatcactccttatcaaaaaagggctattattgaaatgcgatctgaaaattatatacgatgatcaagtggatatttttattttcattaattcaaagttttatttaatgaaaacataagttttttccttaaggagaactcatgagtaataaaaatgactttaaagctttttctgttagtcaggatgctaatgttgtttctcaaggagaatatgaaaaaagtcaggaattgaatacgggaattccccctaatattatttccattggtttattaaataaggttttgcgtcaatcgtcaacgatatcatcggtggtggctaattttatctctacacaatgtagtgatgatgttttggatgatggcgatatagataagcttaccgctcaattaaatatcgctttagagcaaaaagctgtaacagagattccaagtgcttcattaacacaaaaaggtgttattcaacttaccgatgtgctgggtgatagtaatacgttggccgtcacgcaaaagcttgtccaagaaatgataactttgttaagtgaaagtattaatagcagagtacctaatattcggcaggtgaatggtaaggagttgtctgagaatattgatctggatgccgtggatattggggtatacacaaaagaagaagtagacaatgaagttaatgccaaaggtaatcggaatagtgccagtaaagcgattaatggttggtggagatgtggagatacaggcgttatctatcaatgggggcgtactaaggtcattgatgctggctatatagaacgtattcaattaccaattagtttttccaatacacattacgctgtcaatattaatgctattcaaagtaaaatgggttttatgggggcatctgttggctatgtaaatgtaattaataattcatctttcgatttattaaattcttgggtaaatgccaaatgggatagcccattcttttggatagcgataggatattaattatgtattattatagtgcgaaaacaaatgctttctatccggtagaattgaaacgaaattatattgctgctggttcactgccggatgatattatagcagtcagtaatgatatttatcaggagtatgctgctaataatgcgccagaaggaaaacaccgtgtagcaaataaaaacggtttgccggaatgggcagatattcctccgccaacgaaagatgaattacggcaatatgctgagctccaaaaacaacagctcatcgctgaggcaaccaatcaaattgtaccattgcaagatgctgttgatttaggtattgcgactgaggaagagaaaatagctttattggcatggaaagaatacagggtaattctgaatcggatagatgtttcacaggcaatggatattgattggcctgaacagccacggggataaatagatgtagtttttttaatccgcccccccaaattgacctgtttgattttggggggatatccggtttcaaacttaaatcttatttgttgattatctgctgtaatctagttttattatttgttattttagatgagattatatcctatataaactaatggggaaaataatgatagactttaaaggattaggccatattaatattgttgtagatgatatgacggcggcaatagatttttataaaaatctatttggggcaataccaagacaattctttcctcattttaaaaataaaggttttgcaaagtcagcgggttttattgataaccctgaacaggttgatgtatcaatggcatttttggaaattcctggagcgagggtttttattgagttaatggaatatcacagcccaattggaataaaaagggttgaaataaaagaagttaatgatattggtggtattgggcatatttgcctgagagtacaaaacatagatagtgtatttgagcatataaaaaattctcctgatgtcagattgataaattcatcaccattatataagccatataaaatagatgaaattacccgtgatgaatttatgttctttaacgaggaggatgaaaaaaactctgttttaaaacaagaaacttgcgagattatgggcaagataagatatttttattttatcgacaaatataatattcaatgggaatttgaagaagggcatgatgatattggcactgattaattactgcttaataattatttgtcgatctgctggctggaacagtagatagtgtcgttacaagtgtagtgaggtatctgagttaataaaagtgtacttggtatgctaaggtaacttggtttatgtactcagtacattcggataggctgaattagttgcattatttatgggagtaactcccacgcctaaagagcggagaaatcgcatgaaagatgaaatatttgccgatctgctggccagtgtagaagaaatggtgaaaatcgagaagggtgagctgacaccgaaaccggaacatgttcatactttcaccgaaattgatgttaaagcaatacgcgaagctaccggcttgaagcagcaagattttgctgtggcggtcggggtaagttatgacttggtgaaaagttgggaaagccaacgccgttatcccactggcgcatcaagaaaactgttgttgttgcttcaggctaacccttttattatcaaccagcttaaaatgatttaattgagcgacagcaggacaggaactgtacggagaggggcggtagtaaaaggttcggtactagtcagatctgttgacaagaactgagcttgagtatcttcacgacagataaaaaatagtccagaagattgggctattgtgaaagttgtattaagaaaaaacgactttaaggctaccgggtgtccggcgtggtttcccgatcacaatctgaacgtcacgccctagtcgattcaggcaatctagcatttttgcctcgctgatcccctggaacttgcccacgtagcatgttagataaacggggttgaagataaagacattgcccggtcactgtatgcgtatgcaagaggtcagaatatctatctgctacatgcattcgtgaagaagactgagaaaaccccggcagcagccatcaagacagcccatgcgaggcttaaggagttcaaatgaaaccaatatcactgaacgaattgaaggagttgatgttgaatgacacggagtctatcgctgcgtataaggaagccgacaaggaattggaactgatacagatattgtttgagatgcgtgagcgttctggcatgtcaaagactgagctggcagataaaatcggtatcaaaccatcaggtatcaatcggcttgaaaaaaatcctcttggcgcaagtatgaagactttggaacgctatgcagcagcgtgtggcgcggttattaacttcaacgttcaatatcagtaaaagaaatggggccttggtcccgtttatccttttaagccgaaataattatactgtagtatacccaatggatttcaagatgcatcgcggcggcaagggagcgaatccccgggagcatagataacgatgtgaccggggtgagagagcgcagccaacaaagaggcaacttgaaagataacgggtataaacgtactccgcgctttccccaaaatattcctgatagcaaactgtacgattctctacatttaaatcacctgcgatacctcttaaacgtcaattgtcaacgatacctaatagtgtcatcagtacggagacgtttctctatgctatagtaggccataatttaatatcattctctgcgttatatccccctatttgtgggatgctgggaatgccaaaataatctagaaagtatagcaatgtaccaaagtaaagaaattgaaaaaacgtttaaattcagcgagaaagacaaagaaacggttaaatatagccttaaccgtttctccgttgccccaatgttggactggacagatcgtcattgccgttattttcatcgtttattaagccggcaaacgctgttatataccgaaatggtgacaaccggcgcgattattcatggtaaaggcgattatctggcatacagcgaacaagaacatccgatagcactacaactgggtggcagtgatccgcaggcgttggcgcattgtgcgaagattgctcaggaacggggctatgacgaaattaacctaaacgtcggctgcccttctgaccgggtacaaaacggtcgttttggtgcttgtctgatgggggaagctgaactggtcgctgattgcgttaaagccatgcaggatgtggttaatgtgccggtgacagttaaaacccgtatcggtattgatgaacaggacagttaccaattcctatgtgattttattgatattgttgtgcagcacagtggctgcaatatatttaccatgcatgcccgtaaagcgtggctttctggtttgagtccaaaagagaaccgtgaaattccaccgctggattacccacgagtttatcaattgaaaaaggattttcctcaattaacgattgctattaatggcggtattaaatcgttggaagaagcgaaacagcatctacaacatgtggatggaattatgattgggcgtgaggcttatcagaacccgtctattctggcacaggttgatcatgaattatttgatgcttcaatgccggtagttaataccgttgcggtggtcaaagcactttatccttatatagagcaagagctatcaaaaggaacatatttgggacatattacccgccatattttaggtatttttcaagggattccaggggcacgtcagtggcgtcgtcatcttagtgagaatgcccacaaaccgggcgcagatatttctgttgtggaacaggcactagctatggtgactgagcggatgtaatatccgctcatcttaccgttgaaggcatagtctatcatgagacttaaacattaaaatatttatggatgtcgcgatttttttccgtgctttaatctgttttttcgggttagcttttcattatcggacaaaaacagatatccatatatctttgcgaaatattgtgatgctgttcgaataaattaattttgtcatattgaaatctggacaactgttccgggtaataatatcccagtttacgtgattcttgctgatagtaagtacatagcaactagtttgttaggtattatccagaacggaatgtatgaacattaggcatttctattttttcgataatgatatatgatgattattaacagtagacaaggactaaggtatccagaagttagtgatttcttaatggatattaaataaatatcgaatagtaaggtaagtaactaatgatagcttgtaaagaagagatgttattcaagataaaacttttatgtttggataacattggaatacaaacataagagcactggtgttagtaaaaccactaggctgttacaccagaacgaaaaattacccttgtggaggctagatgtttatggatagtttaagatatgaaaaattcagctatttcaatcataatgacgcttttttcgactcattaaaagaaagttatattgaatttccagattggttaaataagaaagctagaaataatgaatcagcttatgtattgtatgatactactggtaaaatagaagggtttctttatttaaaacttgagaataatgtttcagatgttgatcctcctttacctggtaatactcatcttaaaataggtacatttaaatttgaatcaaaagggacattacgtggacagcgttttataaagaaggtattcgatacagcaatagtgatggaagttgataatatctatgtgactgtttttgaaaaacatgattaccttattcgcttatttgaaaaatatggtttctataagcatggcgaaaagcgtacagataatggtatatacccgtaatcattgaagatgcttgattttatccgaaatggagatcattatcctcgctatgaaaatatttattacatcagaacaaaaaatcaaacttgaacgtcttcatgacaccactcgtgatggtcaggtacgagacagaataaaagctatccttctggcttctgaagggtggagttctgtgatgatagcccaggcattgcgactccatcagaccaccgttgaccgccatatcagtgattacctcaatcaggggaaacttcaatctgataatggggggtctgatagtttgctttcccgagaacaaactgactttttaatcaatcacttatctcaacatcttttccatcacacccatgaaatcgtggcctatgttgctcagctctggaatattacctttagcattcccggcatgaataaatggctacaccgtcagggtttttcttataaaaaaccgggtggcgtccctcataaattcgacgcagaaaaacagcgacaatttattgaatattatgagaatcttaaagtcacagcgaaagacgaacccatcctttttcttgacgctgttcacccgactcaaggtaccaaactcggttatggctggatgcggaaaggcgagaaaaaaacagtcaaaacaacaggaagccggactcgcctgaatatattgggcgcgctcaacctgaatgccattggtcgtaccgtgttccaggaatatcagaccatcaatgactacaacatttgctgttttttcaatgaaataaggaagtcttatcctgactatcatcaaaaaattcaccttattgtggatggagcgggttacaacaaagctcatcttgttaaggagtgggcttatgttagcaatattgagttacattaccttcctccctatagcccaaatttaaacccaatagagcgattatggaaggtcatgaatgaacaggttcgaaataaccgttatttcgctgataaacatgaatttcgagacaacgtcttcaaatttttcaccacaacgctaccggatatagcggactcgctgatgtctagaattaacgaccattttcaggtgctaaaaactgcatcttgaagtttcttgggtatagagtttgtatatgttagagacttaacattgacaaatggtgatatttttcttgattatccgttgatagttcataaaacaaaaaataaatacttattatcaatatatccagaatttcatacacgcctttttcctgactctcggcttttaactgagtcacctgatattgttcaggatgtttcacacactaatagtattcataaaatatatatatgtgcaatgaaagatgttcttcatatgaaaagaggggatattattgttatatatagaacggctgataagcaagggccagcacggtatagatctgtgattagttcactttgcgttgttgaagaagtcaggtgtattaatgagttctcaacgttagaaagctatattgattattgtagtaaatttagtgtctttagtgaagatgaattaattgaaaaatataaaataagaaagtacccgtacataataagatttacttataatatggctttacccaaaagaattattcgtgatagactcattaatgaagttggtttaaacagtagtgattattggggtatgatgaaattaaccgatgatcaatttaataaaatcatcaaactgagtgaagttaatgaaagttttattatcaattaagcctgaatatgttgatagaatacttgatggttcaaagaaatttgaatttaggaaaattgcttttaagaataatcaagttcaatctgttgttatatatgcaactatgccgataggaatgattgtcggtgagtttgaaattaaagagatcatttctaactctccttccgttgtatgggaaatgactcataaatttgcaggtacaacgaaggatttttttgatagttattttgagggaagagaaaaggctgtcgcaattagtattggtaatgttaaaaaatacgataagcctttgcctttaaatatgcttggccaagggataacagcgcctcaatcttatcgttacttatctgcatgaggtatgatacccctaccaataggagtattgctttgtctatctcctataccctatggatttcaagatggatcgcggcggcaagggggcgaatccccgggaacatagataattatgtgaccggggtgagtgagtgcagccacaaaaggcaacttgaaagataacgggtatattagacttgctggcttagtgaataacccgctcatcttaccgttaagggatcagtaaacttgatccttgcgttgtccgactttccagaatctgatgtgcccttattgcttcacttagcgagaacttctgattttctggtacgtccacattaattttgccgctggcaatcagatcaaataattctttgcttgcctcatccaactcttcgcgcgttgaaatatagccggcgatagaagggcgggtaacaaacagtgaacctttctgatttaaaatccctaaatcgacaccggtaactggcccggatgcattgccaaagctcaccatcaacccgtggcgtttcaggcaatccagcgagtgcagccaggtcgatttaccaacagaatcataaactacaccgactttttcaccgttggtgatttcataaattcgttcgacaatattttcacagttatagttaataacctgccatgcaccagcatctttagcgcgttgtactttctcttcagagccgactgtgccaatcagttttgcacccaaagcttttgcccattggcaggcaattagcccaacgccaccagcggcggcatgaaacaaaaagggttcgcccgactggatcttgtaggtacggcgtagaagataatagaccgtcagccctttcagaaaagaagcagccgcttgttcgaaggagatggtatctggcagaacagcgactttgctttccgcaacattatgtacttcactgtaagcgcctaaagttgattgtgcataaactacacggtcacccacttttatggtagtgacggcagaacccactttggtgactatgcctgcggcctcagtgcccaagccgctgggtaattgtgctggtgggtatagcccgctacgaatataagtgtcgatgtaattgattccaatcgctctattttctacttggacttcgttgtcagcaggagctctgggtgtgaattcacaatattgcaggacctcggggccgccaatagaggaaaattcgatatgttttgccatgactcaacctcatcaatgtaagggaaatgtgtgcacgtagtagttgaactcattgtgaacaggctttagtgtgttagaaataattacaaactatatgtaattactcaaggcacttcatagcgtatactcgtgcgctgttgcagatttatcagtggattattgcgggattcatggcgggaaaaaaatcaactcacaacaaaatggctgaaccgaaagatcgccaaatggaagggctgaaacttccgccacactctttggaagcggagcagtctgtgttgggcggtttaatgctagacaacgaacggtgggataatgtttccgaacgtgttactagcaatgattttttcagtcgtccacatcggcgcatttttgctgaaatgcagcggttgctggagatgggcaaccccatcgacctgattacattatcggaatctcttgagcagagtggggagctgaataatgtagggggttttgcttatctggctgaattgtccaaaaatacgccaagtgcagctaacattaatgcttatgcggatattgtccgcgaacgtgctgttgtccgcgagatgatcgctgttgcaaacgaaattgcagatgcgggctatgatcctcaaggcaggagcagcgaagaattgttggatctggccgaatctcgcgtgttccagatcgctgaaaatcgagccagtaaagatgaagggccgaaaggaatagagcagatccttgaagaaaccgtcgagcggattgagcaactctatcagcgccctcatgatggtgtaaccggtgtttcaaccggatatcaggatctggataagaaaaccgcaggcttacaaaaatcagatttgatcattgtggctgctcgcccttctatgggtaaaaccacttttgctatgaacctgtgtgaaaacgcagccatgatgcaggataagccggttttgatttttagtcttgagatgcccggcaaccagatcatgatgcgtatgctggcatccctttcacgggtggatcaaacccgtatccgtaccggtcagcttgatgatgaagattgggcgcggatctccagtacgatggggatattgctggaaaaacgcaatatgtatattgatgattcgtctggcctgacacctaccgaagtccgttcccgggctcggcgcgtcttccgcgaaaatggtggattgagcctgatcatgatcgactacttgcaattaatgcgggttccggccttatccgataatcgtactttggaaattgcagagatttcccgttcactaaaagccttggctaaagagcttcaagtgccggtggttgcactttctcagctcaaccgtagccttgaacaacgggcagataagcgcccggttaactctgacttacgtgaatccggctcaattgagcaggatgccgacctcattatgtttatctatcgtgacgaggtttaccatgagaatagcgacatgaaaggtgtggctgaaatcattcttggtaagcagcgtaacggtccaatcggtacagttcgcctaacgtttaatggtcagtggtcgcggtttgataactatgccgggccaagttatgacgacgaataagtattaacgaccaaagaatcaataaatttaaggaatagaatgaaagcggcaaccgcagttattgaccgccgcgcgctgcgacataacttgcaacgggtaagggagattgctcctaaaagcaatttgattgcagttgtgaaagcaaacgcttatggccacggtttactggagacagcacatacgctggacgatgccgattgtttcggtgtcgcgcgaattggtgaagcattgacgttgcgtcatggtggtatcgtcaaaccgattctgttactggaaggatgctttgatgcggctgacctgctagtactggttgctaaccatattgaaactgtggttcacagtgttgaacagttgcaagctctagaacaagctaagttatctcatccggtaaaagtatggatgaaattggatagcgggatgcatcgcttaggtgtaaggccggaagatgcggaagaattttatcaacggctgagtcgttgtaaaaatgtacagcagcctgtcaatattgtcagccattttggccgggctgatgaaccaacggtagacaccacttgccagcagatagcctgttttcaggctttctgtgctgacaaaccgggagaaaaatctattgatgcatcgggaggtatcctgttgtggccggaagtccatcaagattgggttcgtcccgggctgatgatgtatggtgtatcgccattatctgataaaacggccgtggattttaacctgatcccagcgatgactctaaaatcgagcttaattgctgttcgtaagcataaagctggcgaatcggttggctatggtgggatctgggtcagtgaacgtgatacttatcttggggttgtagctatcggttatggtgatggttatccgcggagtgcgccttcaggaacgccaatacatattaatggtcgtgaagtgccgattgctggccgtgtttcaatggatatgatctctgttgatttggggccagaggcgacagataaagtgggtgatgaagtggtgctctggggagatgtactgccagtggaacgggttgctaagcacactggtatcattacttatgagctggtgactaaactcacttccagagtggtgatggaatacttggacgaataatgttgtaagttatattgtttattaactaactgataaggagtagagcctgatgttccagaatgttgatgcttatgctggtgatccgattctttcgctggctgaagaatttaaaaaagatcctcgtgcggaaaaaattaatctgagcatcgggctttattacgatgagcagggagtgactccgcaattgcaggcagtggctaccgcagaagaacaacttagagcgttgtcacagactgcttctctttatctgccaatggagggattggaatcctatcgtcttgcggttcaggaactgttatttggtaaagatcatccggtgttgaaacagcgggtggtggcaacgattcaatcattaggtggttctggcgctcttaaaattggtgctgactttttgcatcgttatttccctgattcagaagtgtggtgcagtgatccaacttgggaaaaccacgcagctatttttgcgggggcaggtattaaggtgaactattacccttattttgatacacagaccaaaggggtaaaattcagtgaaatgctggaaacattcaggaaactgccggcaaaaagcattattgtgatgcacccttgttgccataacccaaccggatcggatctgacctatgatcaatgggatcaagttgttcaaattgttaaagagagagagctcctgccattccttgatattgcttatcaggggcttgcggatgggatggaaaaagatgcttatgccattcgtgctatggcgacagccggtttgccttgtctggtgagcaactctttctccaagatattttctatgtatggtgagcgagtgggtggcttgtctgttatttgtgatgatgagcagaccaaagaacgggtattggggcagttgaaagcaggtgtgcgtcgcgtttactctagcccaccgagttttggtgcacaggttgtggcgaaagtactgactgatcctgctttgaaggcacaatggttaacagaagttgagcatatgcgcttgcgtattttggaaatgcgcacggtgctggtggatgctctgaaaacggcattaccagagaaaaactttgagtattttctgaaacagcgcgggatgttcagctataccggttttagccagaaacaggtggatcgcttgcgccaagaatttgctgtttatctggtcggtaatggccgagtctgtatggcgggcgtcaaccatcgtaatgttgcacgtattgctgaaacatttgcggcggtaaataagtcataaattttaatgtaaatgatttgctatcgatgataatgatcgacaattttgtagaatagcagtaaacacctccttaaagcgcgctatttatggtgcgcttattctctttcctaatattaatttaatatgtcgaatttatagtaacttcattcacatattcttttcagtcttccattctatactgagttagtaacgagtattattaatcttaattggtgtttattttatataaataatgataatcattattgtttgagatcaatttttttctaccttaattgtctgtgtttatataaataacttttcaaaatagtagaacacttggagggaactcagtccaatttttgcaatctgatcaattgtagataatcccaaaccactaaacggactgagttatgcctatcatagcacctataccccgcaatgaacgacgccagatgaaaaaaattatccagaacacccgagataaagattatgctcgcaggctcatggccatattgatgctgcatcgaggcgagtctgtctctctggtcgccaaaaccctttgcgccagtcgttcttctgtctatcgctggataaactggttgactttatatggtctggaaggactcaaaagcctgcctgtgggcagacccgctgtctggaatttaatcccgctttatcctttactgtcttttttattgcaatattctccccagcaattgggttgcctgcgttctcgctggagtcttgagttttttataattaaaatcaatgaattattaaacataaaattatccatcagtaccttctatcgttacttacataaaatgggtatcgtgtggcgaagggcagccccgacgcttaaattacccgatcccgagtaccatgaaaaaatggcgaaaattaccgaggcattgtcaacgtgttcagaaaaacatcccgttttttatgaagatgaagtcgacatcgagctgaatccaaaaatcggggctgactggtatttaaaagggcaacagaaacgtatagtgacaccaggaaaaaaccaaaaacattattttgcaggttgcctgaatgttcaaacgggaaaagtgacttatgctgacgggttaaataagaattctcatttatttatcaatgtattggaagaacttgaacgccagtattgtcatgctgaaaccctcactttgattttggataattacagtatccataaaagccgacgggtcagagattggctggcttgtcatcctaaatttaatctgttgtttttacctgtttattcaccctggctgaataaaattgagcgtctgtggcaatccttacatgaaacggtgacacgaaatcatggctgtcagtatatgtggcaattgcttgagaaagtgaaaacgtttttaaattcatgtctctacaggaatagcagagaataaaaagagtgagtgtattataattatgaaaagttatttatgaggtgaattatggggttaaagttaaatattgcgtggtttgataaaaaaacggcagagtttattggtgaggaatattctggagatctgggagatgatggttcagtaatagaaaaattagggcttactattgaagataatattaataatggtgcgttcgatgtaaaaaaagaatgggtgccaacacttgaatcatgttttaaaaataaaattgaaacagataaatattggtataaaatatcatttgactatcgagataaatggtaatgaagctgtaatttaaatttatttacttaaaccttgccacggcaaggtttaagactatttgatggtgatgtttaaatggcaacaagttccagatgtttacccaaggcatttaacgcattcgcgatagtgtcaattttagtgctatgacttaatgacactatacgttgaatttcttgcggtcgagttcccagtaaccgtgcaagttctgcgttgcttgttcttgtttgaagcatcgtattcaacagtaaaaccttagccgctatactggctggtacttcgacaaaagcttcacctttagtcgatggtgttggtatttcgcgccggtcttcaaagtagaaatcaaacgcagtaaccagagcatcctgcgccatagctaatgcttcttctctggtatctccgcctgttaaggcttctgggatatctgggaacatcacagcccaacctgtttcgtcatgttcgaattttactggatatcgcatatttttactcagtgaatttatgcgagtaacccgtcccttggggccggtctgtcatttgatgcctggctgttttaatattaatttcctcagtggttctgggatttctttactagggtgccttggcatcgtggtttgcttaccgttcaggaaaactttcaagtggttagtcccatctttgaattctgctccctgagctttaagccaccggcgaaactcgctttgcttcactgcctcctcctgtttgtttaacttgaaaataaacataaacatttttgtttatatcatcaagaggtttataagcatttttgtttataagcgtaatagcgttatgaacatttagatttattctttataggatgaaatctgacgtgaaaattattctatatccgtcatctttcaagttgcctctttgttggctgcactcgctcaccccggtcacatagtttgctatgctcccggggattcactcccttgccgtcgcgatgtatcttgaaatccatagggtataatcgcagcgtatataatttgttcatggatattttcggctatgaagtatgttttttaatgtgaagcagatcaatttttcatgaaacatgtttcagatggtgaaaaataattctcaccatttcaaggtatatccaaacatttgttagctttcgataggggtttacttagatctttgttttgttgaatttatttctagcgtaaaacacgggttgattattaatatacagcaaaaaggagttttcaacaggatttaacttgatggttatcacataaaatagggctgatagtccagtcatgggctcttacgatcgttcttccaacttcgttgtaaaataaaaaatcccactttactgttttgcttttaacacataaaacaaacgtgtgtttaagaacaaacaagtgtccaaaaatgacgaatcgggaaaaacaaatattgcaacttctgagacgagatccgttaattccacagcaggaaatggccgatattttaggtataagtcgctccggtgttgctggtcatattatgaatttaatgaataagggatatataaaaggcaaaggttatattttatctgatcaccattatgtggtggtggttggttctattaatatggatgtttacggttattcatcgaataaactcatttatcaagactctaacccaggaaaaataaaatgtacccccggtggtgtaggcagaaatattgcccaaaatatcgctttattaggtaaagaatgtcatcttatttctgttgttggcgatgatttctatggtagcactttactggatcaggccagatgtgcaggtgttaatgtcgactattgctataagctttatggtgaaagtacctcgacatatatctctctattagatgacggcggtgagatgctggttgccatcaacgatatgcatattttggaaaaactgacgccatcgttgttagcgaatcattgtgatcttattcagcacgccggcgtgctagttattgattgcaatttatctgaagaagctttggtttggttgttgactaatgccggaacggtgccggtatttgtggatacagtatccgcatttaaagcacctaagattaaaaactggctttcctatatccacaccttaaaacctaattgtctggaggcggaagcgcttagtggaatgaaaattacccaacctaccgatgttccggcagtggcgcggtggtttcacgatcaaggtgtgcagcggttagtactcagcatgggcgtagagggtgtctactttagtgaaagcgatggtgtggcaggctggtcacttcccatcagtatcaagattgtcaatgtaacaggtgccggagatgccatgatggccggattggtgaactgctggctagaaaatatgacgctggcagaaagtgttcgctttgctcaagggtgttccgcgctcacgctctcttgcgaattgaccaataatccaaatctgtcaaatggcagtgtccaaaaactgttggaattataatcatgaaaaatcatgctattagcaataaatatttggatatttccccagaagttacagaggctttagagaataaccgaccggttgtggcgttagaatcgaccattattgctcatggaatgccttatccgcaaaatgtaaagactgcgctacaagttgagcagaaaatcagggaaaatggtgctgttcctgcaacaattgctgttatcaatgggatgatgaaagcaggtctgtcgcatgaagaaatagcgtttttggctagaaaaggtgatgaaataactaaagtcagccgtcgtgatttaccctttgttatcgcggctggaaaaaatggcgcgacgacggttgcttctaccatgattattgcggcaatggccgggattagaatcttcgctaccggcggtattggcggtgtgcaccgtggggcggaacagacttttgatatttctgccgatttacaggaattagcgaaaaccagtgttgcggtagtctgtgctggtgctaaatccattttggatcttggcttgacaacagaatatcttgaaactcacggtgtgccactgattggttatcagactcacgctttaccggcgtttttctgtcgtaccagtccattctccgtcaatattcgtctggattccccagaacagatagctcaggcgatggcagtaaaatgggatactggattacagggcggtttggtagttgctaatccgattcctgagccatacgccatgccggaagcggagatcagtgctgctatcgaacaagcagtacgcgaatccatagaacagagagtaaatggaaaagcgtgtacgccgtttttgttagcaagagtctctgagttaaccgggggcaatagcctatcttccaatattcagttagtgctcaataacgctgaactggcagcgaaaattgcttgttgttattgggagcgccacatgtgaaacccgtttcaaaaagttgcggctagaaaataaggggctaactgagcccctatctataaattatgcttctttcttcaatataggtttcaagaaacgtgcggtatgtgatttttcacattccgcgacctcttctggagtaccagaaatcagaacctcaccgccgccgctacctccttctgggccaagatccacgatccagtcagcggttttaatcacatcaaggttatgttcaataaccacaatggtattcccttgatcgcgtaactgatgcagaactgttaatagctgttgaatatcagcaaaatgcaaacctgttgttggctcatcaagaatatataacgtctgcccagttccgcgtttggatagttcacgcgccagttttactcgctgcgcttcaccgcctgataacgtggttgctgattggcccagacggatgtaagaaagtccaacgtccatgagggtttgcagtttacgggctagagcaggaaccgcatcaaagaattcacgggcttcttcgatcgtcatatccaatacttcattgatatttttgcccttatatttgacttccagtgtttcacggttataacgcttacctttgcactgatcacaagggacataaatatcaggcaagaagtgcatttctaccttaataacgccatcaccttggcaagcttcacagcgtccacctttaacgttaaaactgaatcgtccaggtgtataaccacgggtgcgtgattcaggtacgcctgcgaataattcacgaactggtgtaaatacgccggtataagttgctgggttagagcggggagttcggccaatcgggctctggtcaatatcaatcactttatcgaaatgctctagcccttgaatatcaatataaggtgcaggggtgatattggtcgcgccatttaactggcgttgggcaatcgggaacagagtatcattgattagcgttgatttaccggaaccagaaaccccggtaatacaagtaaataacccaactggcagattgaacgtcacatttttcaggttattacctttcgctccgatcagtttcagcacctttttcggatctgccgagatacgcttctctgggatggcaatttcacgctctccactcaggaattgacctgttagtgaatctttgctcaccataatatctttaactgagccttccgcgacgatttcaccgccatgtacacctgcaccggggccgatatcaatgatatggtcggcagcccggatggcatcctcatcatgctcaaccacaatcacggtatttcccagattgcgcaagtggattagtgtttctagtaggcgttcattatcccgctgatgcaacccgatagaaggttcatcaagtacatacatcactcccactaaacccgcaccaatctggctggcaaggcggatacgttgagcttcgccaccggacagggtttcggccgaacgggagagcgtcagataattcagaccaacattaaccaagaatttcaggcggtcgcggatctctttcagtactttttcagcaatttgcgcacgttgaccgctgagtttaatgttttggaaaaaatccatcgcatggccgatactgaaatctgagatctctggcagggtggtattctcaataaatacgtaacgggcttctttacgtaagcgagttccgtggcaggaaatacatgaacgattactaatatatttcgccagttcctcccgaacggcggtggattccgtctctttatagcggcgttccatattatgcagtacaccttcgaacggatggttacgcactgtggtatcgccacggtcattggtgtatttaaattcgatggattgtttaccggagccgtacaacaccacttgctgaatattggcgctgagggaattgaagggggcttcgatatcgaatttataatgctctgctaatgaacgtaacatctgaaaatagtagaaattacggcgatcccaaccacgaattgcaccgccggcaagggagatatcaccattttgaatgactctatcaggatcaaaaaattgctgaatgcctaaaccatcacaagttgggcaagcaccggctgggttgttaaaagagaatagtcgaggttccaactcactcatgctgtagccacatgtaggacacgcgaagttagcagagaaaatcagctcttcggcggtattatcatctatattggcgacaatagcggtaccgcctgaaagttccagcgctgtttcaaaagattcagcgagacgttgtgccagatcggcacgaactttaaagcgatcaataaccacttcaatggtatgttttttctgtaattctaatttcggtggatcagatagatcacagacttcaccatcaatgcgtgcgcggatataaccttgtgctgccagattatccaataatttagtatgctcgccttttcgctctttgacgatcggtgccagcaacatcagacgatgaccttctggcagtgttagcacattatctaccatctggctaacagtctgtgcggttaatggaatatcgtgatctgggcaacgaggttcccctacacgggcaaacaacaaacgtagataatcatgaatttcagtaatagtccccacggttgaacgtggattatgggaagtcgatttctgctcaatagaaatggccggggataatccttcaatatggtcaacatcgggtttctccatcagtgacagaaactggcgcgcataagctgaaagcgattccacataacggcgctgaccctctgcataaagcgtatcaaatgccagagaagacttacctgagccggacaagcccgtgataacgatcagcttgtctcggggaattatcagattgatatttttgagattgtgggtacgtgcgccccgaacttcgatgttatccatgaatcatttcccggattattcatacgtgcatatacccgttatctttcaagttgcctctttgttggctgcactcgctcaccccggtcacatagtttgctatgctcccggggattcactcccttgccgccgcgatacatcttgaaatccatagggtatataataataagtgagttattattacacagagttgactgattagatatacagtatttaagtgaaataatgtaataagtacggaattaaattacggtgagcttcgcaaagttcgttctaaagcggctgcgtttcatttttagtgtcgcatgttaaactgtgttgcttaataattgtagaaattcatttcatcaggagtatttccatggccagcagaggcataaacaaagttattttaatcggtaacctggggcaagacccggaagtccgctatatgccaaacggcggtgcagtgactaacattactctggcgacttctgaaagctggcgcgataaacagaccggcgagatgaaagagaagactgaatggcaccgggttgttttgtttggcaaactggcggaagtcgcgggtgaatacctgcgtaaaggttcacaggtttatattgaaggttctctgcaaacccgtaaatggcaggatcagaacggtcaagagcgttacaccacggaagtagtggtaaacatgggcggtaccatgcaaatgttgggtggtcgtgctggtggtggtagtttccaggatagccaacaatcacaaggcggaggttggggacagccacagcagccacaaccacagcaacaatctcagcagttcagcggtggtggcgcaccttcgcgtccagcccaatcttccgctccacaaagcaatgagccaccaatggattttgatgatgatattccgttttagagttcaatatttttctttgtaaaacaaatggttatcatgttgttttgtggtaatcataggctgttggagtgcctattgcaagcctgactaatccttacccagtaatgggtttgaacctcgaaagaggaagggaagtgcagcatgtcaggaaaaggctggttgcggggaaataatttactttgcgccagccacttttgttttacataaatagatgctcttttgcgtttatcgggaaaatcgtaatggaaagatatatgagttagaagtattcaaactcaaaaacagaaatgcgtcaaaatatagttcagcggatgtattgccgaatacgttaagtattcaaacagaactgagttgctggagtgaatggcggcaccccaatgtgaatactgtagtgccagaatagatccttttgaagttcatcatgtaagaaaactcaaggacataaaagcggatacggctctttggaagaaattaatgattgctcgtaataggaagacattagtgctctgccagacatgccatatcaattttcacaggggaacattgccttagataaagccagaaacttagacagagcttggttatatacagccgtcactcgtgctgaatctgaggtgcatagtggagcgaagagatgttttggaacaagccataacgaagcatcacacaccagtctacggagaacctatctgccgttgttgataagaaaatatcacgaaaaaagaaagcatccgtagctaaagttgtcacgatgtaattaatctgttaataatgagtttgtcatggataagaaagtgtcaatcctaaattgtgtgatagtatgctctatgagcgactatcgaatctatgttagaaaatgaaatcagtatagtatgcgcccgttttgattgtatggaattaagggaagtactctatgttaaggttgaaggtactaaaggcaaaaaatggtgattgcattttattgtcttgggaaaacaatggagtcactcgcaatattctaattgatggtggaaaatcatccgtatacaaaactggtccgttaaaaggtgaactttataaaacattaaagttaatagaagagcgcaatgaacgggttgataagttgattcttacccatgtcgatgatgatcatataggtggaatactaaatggattcaggtcaggagagcttctaatttcgctgtgtgacaaggtatggtttaactctggtaaattgattaaagaagcatttgatagtgacgtactaccagaaaacgaattggagctggagcggatcaatgttcaagacggaaagaccagtattcaacaaggagtctcgttcgagaaacggatatcagagttaggtatttgggagaactggctcattgaaagtggatatacttgtgagttttttggtgcaaaaatcacagtgctatctcctaaaagagaagacttagcaaggttactttgcaagtgggaaaaagaggtcccgcaaagcataacatcaggaaagaagactgattatggcaagtcattagaagagcttaatctaaatgataaatttttaagtgataaatctattcataatggaagctcgatagctattttgtttgagtacaataatcataagattttgcttttgggtgatgcacatgatggagttgtatgtgacgcaatatcgagcttaaaagacgaacaaggtcagaatataagttctagtaataaactgaaagttgattatataaaactatctcatcatggtagtgagtttaatacaagtgcccgatttctaaatttaatagattgtaaaaattttatcatatctacagatggaagttctcatgaattgccaaataaaaaaacaatagcaagaatagtgaaaaatgtagataacgcaaacattattttcaactacccgactctattaaatagaatctttagtgttaaagagatagaagagttgaaaaatataggtataactacagataattgtgatgaattgatccatgttaaatgatgaattagagaagttaaaaagtgctacagttagggtggaagaaggaagtggtgtattaataaatccatactcaactcaatattcatacatattgacagcaaagcacgttgtagaagatataagcgttgataaaatagaagtgaaaaatattgaagggcgaaatatatctgttttagacaaagtagaacacccagtgattgatgtagctattcttaaagtcgaacgtttagatggtgtcgaaatatctcacattgaaaacttttataaccaagaaaaaaaattaaagttttacggttacccaaaaaacaagagacataatcacatatttagagagcaattatattcttatgattgtttattacacgatatccaaggcaatacatccgtattcaccattaatgagctaactcaatatgaagatattgaaggtttttcaggtggtggtattttttttattaatgaagaaaaccaagatgtatctcttgtagctatcgaatttgaagtcagtaatactcaggctgctgatagtaaaattaactgcattagaattgatgcttatcttgattttcttcaagataaaggttgggatgaaattaagcccattcatttatctagttttaaattttatcgcgataatatctttgaaaatcttgatttagaaaatgaggatagtcttgatgttgtcaagaatttactaaaaataacactaaataattataagatctttaactcttattatgtgacaccaaacaaaatagtcgaagagtttgcgaatcgaattctagcgcataaccaagacttaaaaaaactatatgataaagaactttggtgtgcattcttggagttttttgctatttatttgtcaattttcgctccagatgatgaagactcttgtaattctaattatttagaacggttgtttttgaactttagattcatttacgatcattaccaatttaaaatttaggcagatatttaaaacttatatattagaaacagaaataggggatcttgaaccaaatggtaaaattgtaatttttacaaaaaataatttgaattttggatgtccatatattgataaaaatgtctcagaaaaaacattaacagatataggtagtgccataacaggagaaaggattgaaagagtgatgaggaataaaactatttctaatgaaatacttttttggccgtctgttaatgatgcttgcttatcttgcaaagaagaggagctaagtagaattaatatttttcaaggtgatgatttgaaagagctaattgttgaaaattacagagagtatctttcaaatgaacagtaagaatttctcaataaataataagtttcaggaactaaattcagagttaggcgtagaattctttgtcctatctgtttgtatatttgattctgcaatgataaatgcattttgttatgtaactcctaccacgagtattctaaaggaaaggtggagagagatttccgataacttaaattatgaatatttaagtaaatatgaaccatctgaatttgagcgttggaataattatcttgtttttatttgtcaggatgctattcctgataatataaagtatgagatagagaatgataaattttatatgagaaaagttgcactagaattaaaagggttagaaaagacagatatagaaaaagaaaccaagaagatactagatgaaaagttactcttgtccaatatacgtttgagcaataatgttgtttttgatagaagttgggaacaatttctaggtgatcattcaaaatctattcttttggctgggttgtctggaggaagagatggaaaatcaaagtctatgcgagaaaactggatcaataaactattgagtgatgaataaatgaaaataaaaaaagttgaaatacaagcatttaaatcatatttagagaagaaggatggtacttttgactttattcatagtacatcgggagagcctgcgaactttgtatcactattctcaccaaacggattcggtaaaacatcgttctttgatgcaattgactttgctatcacaaaaaaaataagccgatatgtgagaaatgaaaggttagagaaaattaatttagaagaaagtaatcaatataacattaaaggtgaatctcaactgataataagaaataaaaatgctcctaaaaatattgagacgcgagtggaggttattactagtaaatctgaaaagccatttatttcatcatataagaaaggaagaaagggaagttcagactggagaattcaatcaaagagtataacaaataaatattttgaatcctctatgttgtatcaagaatctattgattcttttttaagagaaaccgactctgaaacaagatttaaaaaattctccgaggtagatgatgaattagtaaacattaatagtgcacgttctacgctcttatcattgaaatcagacgtgtctaagaaaaaacaagaactagttgacaccaaaaataaactatcaagtgaaataaataggcaaaaagataacaaggattacgttcatagcattaatataataattaaagatgtaaatgagtacttagatgaaataaaaattgatgaggtaatagcaccatttactaaaaatgaacattttcacctttcagctcgtttaaaagaagctgaaaatataattaaaaatagagttaaagaaaatgatgaaaagctttctaaaatagaggttaatttatctcaattaaaacttggtgcatcgatctattataaatacaaagagtgtattaatgaaaggtcattaattttagacaaaattaagttttatgatgaagttggtgccctcaaagaaagttttaatacgttagagaaagagttattattaaatcaggatgttattttaagcctcagagaattaaacaaaaatgcccatgaatattttacctataagttaaagttagatagtactctcaaagagattgaagaattaaagctgaagttaaaaatgaatgatgctttaatcaaaagtttaaatgattcactcaatgaaaaaatcatttttcaccaaaaggtttgtgagaatattgaccaattaggtaaagagcaagccaacttatattttgtgtttaatactataaaagataaatcaacaagtttagatggtgttgaaaaagaactagctaatatggaaatagagattaaaaaaaataaaggccagaaggatgtggcagacatatgtttatcatcattagagaagttgaccctttttgattttaaatggctgcctgaattttttattatccatgaagataataaaaatgagttatctgatatttatgctaagtattgttacgtttacaaaagtaaggttgagattgatggtaaaataaaatcaataaataaagagttagaaagtataaatcaacaacaaactgacatatcttttttaatagataaagcaagtagtattgtcataagtacaaaacaatctcactgtcctttatgtgagcgagataacgaaacctatgatgagcttatttctagaattaataacaattctatgctatcagatatagaaaagaaaaaaaatgcctcgaaaagttcattgatggaagaactagaacaattatctatgaagttggatagatttaatgttgaatttattgaaaagaaaaaatcaatatcaaatggtttaaaagatgaaatttcttccttggagaatttaataaatgaatcttctcagaaaaaatctactcttgtagaaagtaaaaatatctttatatctgaaataaataaatttaactcatctgtaatgtttatgtcaaagtatgactattcaaaacatttgatttcaaaagtgcaatgtgaaagagatagagagcattctatatctaaagagattgaggacataaaagagtcgataaagtcaagagttaatcaaatagagcttaataagaaaataattgacctagaaaatgaacgttttaaattggtggtacatttatctaagtattctgattttattaaatctaatcaattaagtgaaggcgtaaataaggatgactttatttcttttgttatgcttaaaactgacaaattaaatgatagtcaaaaggggctaaaggatagaatcggaaaaattgtcattaaaattaacaagcttgaaagtgagaataaagattcacaatttaaaggtgttagtaaggaaaagatgaacgccttattggttgatttggaagataagatgtctttattatctaaggaaaaccaatggtttattagtgtggcagactcatttgataatgaggataactctgtggtttacacaaaagtgaaagattctctagagttacaagtcactggtatcaatgttaaaaacagaacgttatctgattgcttggccaaattttcatctattgagagcatttcatcaaagatcgttgattactctgataccagcttactagagaaagaactttatagtatatcctctaaagtttctaaattgagtgaagtaattgttgaacttgacagtgatataagaaaactcgggaatgaaataaaattaagagttgattctttcttcaatacagaattgataaataagatatatagcagcattgatccacatcctgagtataaaaaaattgtttttacttgtacgtctgatgataatccaaggttattaatatctgcacaaagtgaaaaaaatgacaaactaatgtctccaactttgagttttagttctgctcaaattaatgtcttagctttgagtatttttcttgcgagagccttgtcttcaaaggacgatgaaggcaatcctgttgattgcatactgatagatgatcctgttcagtcaattgatgcaatcaatactttaggtttgatcgatactcttcgaatgctttctattatgttcaataagcaaattatagtgacaactcatgatgagaattttcatgagttgctcaagaaaaagatgccaagcgatctattttcttctaaatttttgagattaagctcttttggaaaagtaagttccgatgcataggtgtaacttatgcatagtttaactcatagtcattttctgcttagtcctctcatcttattgaatcagatgagaggaaaactgctcaagtgcgaaaatgctcggaagatgttgagtcattcactttacttcctttattgaacctaaaaacggggtaaggaatgattttaaacttacatatatcgtagagttagatggtaattaagaactgtgctttgctggttgattattcgttccaacttagcattggaaaggaagcaatgtattccaaggttcggtaggaatgaaaaattaagacaatctatatattattatccttcttgaccgatgaaataatttcgaccaactctgtgttaagcacaagagcttcatgcggtttgactacttattttgtaaagattgttccttaagatgataaaagttaacgaaaactttaacgtttttgttatatttttctttaattgatttttaaaacaatgtgttatggtggtaggccagtcattaaggtcatcataaccgttttgagtgtaaagtttttacttttaaaacaaatggttatctcggaatgtcgtgataatcatagtccgttggagtacctattgcgagcctgactaatccttacccagtaatgggtttgaacctcgaaagaggaagggaagtgcagcatgtcaggaaaaggctggttgcggggaaataatttactttgcgccagccacttttgttttacataaatagatgttcttttaccacaaagtggagttaatttttaatgaggtcgctgccacaatttgggatcgcgaggcgttgttatcgccacccgagatataagcgccttcattgcgccagccattaataaggtaaccttctctccacgattagttctttgtctgcattcccaggcccgtactcctgcttgttgcactttaatgccgatttcacgatagataccatgagcagaagcgatgacccaggctgaacgcaaaggtaaaccaacaagccctgtcagagcggaggtataataagattccgcttccacaatcaatcgggatgccacccgagctagcgcaggacggttttcggtataaataagtgtgtctggcattagcccttcttggtgaagccattctagcggaagatagcaacgcccggccttcgcatcctcaataatatcccgagcaatgttagttaactgaaaagcaattcctagatcgcaggcccgatccagcacactcgcctcgcgaacccccataacccttgccatcatcagcccaactactcccgcgacatggtagcaatatctcagagtatcatccaacgttctgtaaggctcacagagtacatccattgcgaatccttccagatgttcgaaggcctgttgctgagggatttcattactcagagctactgtctgaaaggctgcaaaagcaggttcggtcatcggcaaaccgtcgtaagcctgctttgtcaggtattgcagcatttgaagtttctcgcgggcgctatacttatcaacactgcttatttgtctccccagctcttgcccgtctattatatcatcacaataacggcaccaggcgtacagcatcattgtgctgtgtcgtgttgctgtatcgaaaagtcgggtgacactggcaaaactttttgagccttgctccattatctgagtaacgtgtttaagtagcgcaggattcatttagcgatatcctctaacatcaatgtggcggtggcttttgctgatccaatcacgccgggaatacctgctccaggatgcgtgcctgcgccgacgagatacagattatcaatgcggttgtcccgattgtgtggtcggaaccaagcgctttgtgtcagcaacggttcaaaggagaaggccgaaccgagatgggcattgagttggtcacgaaaatcaaatggggtaaaaatacgatgaacgactaactgcttgagcagaccgggcatatagtacttttccagatacgcgaaaatacggtcacgtaagcgtggcccctctatatcccagtttaaattagctgtccccaaatgtggtacaggggccagaacgtagtaacttgcgcatcctcggggagcaagggatgggtcagtaacagagggggcatggagatagagtgaaaaatcctctgacagtcggtcatgataaaaaatatcttcgatgagttccttatagcgtggaccaaagcaaactgtatgatgggctaattgcgtatggtgatggttcagaccgaaataaagcacgaacagtgagttgctcattcgtttacgcaccagtgttcgagcgcgggctattccgaccggatgctgacctaacaggtgcttataggtatgaataacatcggcatttgaggccacaacgtcacatgtcatatttcgtccatcagctaattggacacctgtgacccgattgccatgggtggtgaagcgttttacctttgcattaagctcaatttctccaccaatgtcagtaaacaatttcaccattgcctcaaccagagcgctggttcctcctcgcggaaaccagactccccattctcgttccagtgcgtggatcaaagtatagatagaagatgcagcaaaggggttacctcctatcaatagcgagtgaaatgaaaatgcctggcgcaggctctcatccttgataaagcgtgccacctgactataaacactacgccatgcgtgtagacgtatcaactgtggagccgcactcaacatgtcgcgaaaagagaggaagggcaccgttccaagtttcaggtagccttcattaaaggcttcccgggaatagtctagaaagcgtcgatacccgttaacatctcttggattgaacgtatggatttgtgcttccagatgttgctgatcattgtcgtaatcaaacatcttacccgactcccaacagagccgataaaaagggtgtacgggaagtaaatcgacgtaatcagccatacgtttaccagcctgggtaaacaattcttcaatgacattaggagcggtgattacggtggggccggcatcaaaggtgaatccctgttccttataaacataagcgcgtccacctggtttatcccgttgctccaaaatacatgtcggaatccccgcagactggagccttattgccagtgccagcccaccaaaaccagcaccaattaccagcgctttaatcataataaaaaccctgaagcttcttgtgttgtttaaacattgcctttagagcaccctttatcggcactggtggtttacctatgagaatccgggccttgtcgacggaattaagttgctccgcataaaaacgtgcaatcagatttggggaaagttgatagaaacgttgcattacctgccaacgttgttgtggatccccagcgaggaagagcatgcgatttagaagacggaaaaagcgctggtgttgccactgttgtcgtgcgtaatccctgagggtaatgaataaggaggtatcggtaagctccggcagagcaacaatacgatctgccaaccgaatagcgtgtggcagagagtagcctgttgtggggtgaaacaaagctgcacgtaacccacaggtgggctgtcctgctagctgtgcccagaaagaggtaaaatctcccgtaagtgtaattggaagacaaccgctctcttctcgaatgagtttacccagtttccatccatgtttcttcgcgtactctgcgatagtagcctgcgacaaagccttatcaggtggcccccgatcaacgtaatgagtgtcctctatcagcagacgagttgaggagaacggcaggacatagataaatcgataacctgtatcctgtcccacactagtatccattaaaatcgggtgggttaaagagtgcgactcttccagctcccattcctgaccaaaaaatgcctgggtgccactccctataaatggtcctggtcgccagcctctcccatcaatgactgcgccagcacttagagacgagccgtcctgtaagtaaactttctgtggagtcagctcctgtaccaataaacgagtctgtatacgttcgcccaaatatgcatggagtatgcttgcaaagtgttgggatgtgatactgaaatatgaatgtggcaatgtgcgttgaaatgctggaaaaatgacgtcgtaacctgaccagcgataggtaatcagcggtgctatccactcatgttccgcctcagtaagatcatgttgatgaaatgaccacgtgtgattgcctcctattgtttctgtgttttcaataagcaacactcgcagatgtggtttacactgctggaaacgcattgcgatcagtccgttggccaatcctcctcccaccagaatcagatcccagtcgtacatcattttgttgatcctccgacaatcacacagttattaacctcatcaagagtcatatacatcacggaaattcgtgtttgttgaaagagattaaagatattcagtcatagcggaaagactcatgttggtagcaaaacagctgtacgcagcgcagcaatatcggcgctccctgtgcaaaagcaggcgacttttatctgctcaataattaattggaaatgttctataactgcatctgtggagagggctgcactatgtatgacggcagcggcttggccgaccaattgtgcccccatgcaataagctttggcggcatcaacaccatttctgataccgccagaggcgatcagtggcatatttggaagtgcctcgcgtatttcacgcagtgctgtcgcggtcggaattccccagtcagcaaatgccatggccaatgcgcggtgatacggtgtggatgctcgttctgcttcaatcgctgcccaactggttcccccagccccggctatatccagcatactgacgccagcttctgccaattggcgtgcgacaggaagcgataagcctgaacctacttctttaacaattataggaaccccaagttttgttacgagttgttcaatagcatatagaatatggcaccagttacggtctcctccctgttgcagcgcctcctgtagcggattcagatggataattagagcatcggcttcaatcatctgtactgctcgcagagcataattaacccgaattctggataagaaattgacgagaagcctgttccaggagcaaagttttggtgtgcaccaaaaacagctccgaggggggaacaggctatggacaacttagttgaaattttctgtgatgtcgatgatttttgccgttttttcatccctcaatgggaacaattttgtctcgatagcgggcatcgtttacgccgccgacaaggtcatatgtatcccagtgaaatcatgaccattttgatcctttttcatatgtcgcattaccgtgattttaaacatttttatctagaacatatttggaaatatcaccataaggattttccaaccttgcttagctatcctcgttttgtcagtgtggctccttccgttttggtgccattatgcagctatctgactcaattaaaagggaaacccacaggcattgcttttattgattccacccgtttgagtgtctgccataacattcgcatccctcgacataaggtctttgcggggatagcaaagcgcggaaaaaattcaatgggctggttttacggtttcaaattacacctggttgtcaatcatcagggtgaaattctcgcgcttaaagtgactccgggtaatgtggatgatcgggaacctgttcgtgaattatcaaaagaattaacgggttctctttacggtgacaaaggttacctcagccaggaattggcggacgatttagctaaaaccgatgtcactttcatcacgaaaaaacggcgtaacatgaaagcgagtatgcaagctgagtgggataagataatgttaaaaaagcgttttatcattgaaacgattaatgggcaattaaaaactctttctcaaatagagcattcccgccaccgaagtataaaaggctttctgttgtgcgttttaggtggattgattgcttactgccttaaattgaagaagccatcactgaaagttttctactcagaagacgatttttcaatgacggattaagcagaattcgggttaattaaacccgcgctcgccacgaatttgggctgccccgagattagcgaaaaggagaatatcaggagctatctggcgtagtgagcgactaagcccatcgtttgcttcattttcaagagcaacacgttgcgacccgactcccattgaaatgcccagtacttgagctgcctctgcaagatgatgattaatcgcatgagcacgatgaacccctccagtcatagagcttatgagcagtggtgcctgcaaaatttttccaaagagggaacacttaagatctatactgtctagatccaattctggcagagcacaatgctgaaatcgccactcagcaaaccccgtacttacttgggactccgtttgaggaggacggaatataatatccagatgctcattcttgcgctgagtgtgatcgatctttttcatttttttcgggccaaggttgaaattaattaaacatcgcaatatttttatcaaaccagtgtcgtataaaatatcgtgaagctaaatttctgcgatacactattgccaaatatttatcaatgtatctgatgtgcctgcgtaattgtttatgcactttagattttccgagcagcgtaaccattgttaacttttccttatcctgatacatatctttccctgtattattcaggtcatcgctcaagtcatccagtaattgaaacgcttgccccagatgttgtgatacatgacgcaatgcctggcgaattatatcaggtgcattcacagcaattgccgctaactgaaatgttgtgtcgaaaagcaaacccgtttttaaatcgttggtggtagcaatggcatgataattaccagcacataatgtattgttcagatcgcgaaactgcccttggacaagaccgtttaaacccactgtatgggaaagtatggcgacagcagcagatttatcgtattcagaaaggtttgtttctacaatgaggccaaaagcccggctcagcaaggctacagccgctaggatcgctacactttcaccatactgccgatgaatagccgggcgtccgcgccgatactccgcattatccatacagggaagatcgtctaaaattaatgaggcggcatgcactatttcaattgcagatgccagctgtagaaagtcagtcttccaggggttttctccaagatccaggactatgagtagcaataagagggggcggatacgttttccagacaccagtgtactttctcgcatggctgcgcagactttatcatctggggctcctgaaggaagtaccagttctaggtgttgttgtagtgcactctgtagctccagtaatgtctcttcgtaattcatagctcgtgcagtactgacgttcataaatatttcccgaatcacgtaaataatttcactaagccatttgaaaaacaatgataagcttatattacaataggcttcaggcttatatacccgttatacccgtcatctttcaagttgcctctttgttggctgcactcgctcaccccggtcacatcgttatctatgctcccggggattcactcccttgccgtcgcgatccatcttgaaatctttagggtatatatccgtcatctttcaagttgcttctttgccgtcgcgatgcatcttgaaatccatagggtatagcataacttcatttatccagcagtgatgcattcccattggaatatggtgcggcaaacgtaatctgcacaccattgagagatcatcagcatttaaaactacgatatctgtacagtgcaatttttcgacataaaccttaaaaataagccaaccatcatcttctttaacagcacccggtttggctacaaaaacaggttcttccggcaaatcattatcaaaactgtggcttaatacactcttatcaaaacaatcaaatttaattattgatctcccttcactgtcagaatcctcccagcaaacgaaccaggcatatctgtgctgtctaccacagactgtagggtttatggctgggaaatcagtattccccctgaataaaatttctttatcaacattcccggatgctgtgcataaagtaaaacgacaaagttctgaactattatttttaaatatattctgtgtaaatactgggaatgaccgccaaaatgaggcgtcgaaaatcacattcccatcggcatcttcataaccatttgcaaaatgaaaaataaatccaggaactgcatcatagaatttcacatcatggcattttcttgaaactaaaagaacccggccatcttcactttcacgtgaattcatggatgcaatgatgctttcattgccaattacattgctcaacttaagatttatatgcggcccacctaaaaaaaataaaaagtaattttttgtcactatgaaatcgtgaattaaataccttttcttaagcgaaattttgcgtataaccatcatatcgccggcactgtctattttgtatagcgttaacttagatccaataccatatgtcacaccaaatccatataaattatcatcatttggtatttttttaggatgtgctgtaaatggtacttcacgaaggttaagtttgggaaggaaagaaaatcgtgcttttagctttccagaaaagtcatattttgaaattgtctcaagagttaccggattaattaaatgtggcatccctccttcccacaacgccagaagcttatgagaatgatatacaatatttgtatttgccggatttttaataataaaaaatctcatcctgagttttagttttttggggacggttccaaccgagcgatacagtaacctttgagcttcttcctcttttaagtattcctttgttaacacatgtctgtttctatagaatatcccattatcactgaacgttactttaaatatcattccatccccatcaaatggatgattataatattcgtctcccctatgcaggcgaccgggaccaattctaaagaaagtaccttttaactctgaaggagcctctccctcaataggaactaattttgaatcaagttcctccagctgagattgaaagggattaatatggtttttcgataatacaacgtcgctcaagccttcacctctatatttccaaccgaataataggtaatgatttaataccggagctctataagaagatataactatactaaaataacagtactttattgaagatgaacagaactatttttttccaaagggatttttgtaactgaaatcacgaagaagaatttttctataactataaacagtaacacacctttgatgtgatggcgtacatgtagaagggtgactgaaacattaggagcaacgccagataaacgtgtactcaggcttggaacgtgagagagtgcaagcatgaactgtcccccaaatgttggacttcaatccgtacatagggggacaatttaaatatggtgggtttgtatgtattacgagatatcaatcaaaccaagatcattgcttaatgtcgtaccactgatattgtagctggcaagtacttgacttccttttttgtataaaaaagctttacgggcttcattatcatttccccatactacaaatacatgcataaaaactgttgagccatcaggaacgccaagatcgccagggtcaacagtatctgttaatccaagagtaatattattaccttgctgacttaaatgcttttcaccgtcgccatccatataactaaattggattctagcaacgaatccacctgagtttttaagactcatcttgccaatttcttgcaatgtcattacagtctccttttgagaaaaaactaataacatttagctattcaaataagtaagtcgtctaagatgtgttaaataaaaaataaatcttaacgagtggaataaataacacattaaaaccactaggacaaataattgttatgtgtgttttataaaaaacaaaaattattttaacaagtaccagaataagtaattttctttcattagatatgtaatatggttcctattttttctttataacacaataaaatgagatatttatttttatacaaaatgactttattgttttgattagtaatgatttcaatttataatgtttttttataatagtaattgcaacatcatgacgctgtgaataaatgatttcgtatttatttaatgaattattagatatttttccatcttgattttttctcagtcgattatttcattagtttatgacaataatttgtctcttaatgcttaattaaaatctatatatttttataaataagtgaaaatgactttatctaatactataagataatttttttgatttaaaaataattcattaagtgtttagtatcccaatgtctgacgttggcgattattcagtttattcataaagaatcttatgttccattttgtcgccgatgaaaagtctgtttcctaatatcttctgcccttttaagttgttcaagtaactcttcataaagttgttgcagggggttgatgggatgccgctggagaactcacttcaaatcagcggcctactctacaggattgacccaaagtaaatagagtaaaaaatttctttaataccttattaacgtaggtttttttgtctgaatttgtatcaaatcgactaaatgaccacccgtgtattggtttagtcatccttttatcgtaaaaatattaatggattcgtatgtaatttattgattatcaatacaaatctccttcaatacattggcatgatatgcgatatgttcaccgataaaactggagacgaaatagtagctatgatcataaccagtgcgcaggttcagtgtgtagggatgtcctgtgttttcgcatacatccttcagcagttcaggacgtagttgctcttcaagaaacggatcatcggtaccgatgtcaattaacatatgcaatggctcggcgttattagccagcagctcgattgtgtcataggctttccatgtgtcacgatcttcgcccagataagcgcgaaaagctttttctccccaaggaacttgagaaggagcaacaatcggtgaaaaggccgatacgctgtggtaacgatctggattgcgtagtgcgatcatcagtgcgccgtggcctcccatcgaatgaccactaatggcccgagcggttgttaccggaaagtgtgcttcaatcagtattggtagctctgacaccacataatcatacatacggtagtgcggcgcccaaggattttgtgttgcgttgaggtaaaaactggctccctgacctaaatcataggcgtcatcatctgcaactttctcaccacgagggctggtatctggggcaacgagaataataccctgttcggcagcgtagcgttgagcgcctgattttgtgatgaaattctgctcattacatgttagacctgagagccaatacagcaccggtaatttctgatgttcagcctgaggaggaaggtagacagcaaaattcatggtgcagtcaagcacggtcgattcatgctgataaacatcctgccatcccccaaaacaagtgtggcgttcaatcctctccattctttttcctctgtaaaacctacctacaggtttactcatttgacggtaaacctagggttatcgtttcctgttttattaaaaaccgcctgtcacagcacggtttttaactcccgtaaaacagcttagtaatggatgactgtgcgaatggattttccctcatgcattagatcgaatgcttcattaatgcgttcgagcggcaaggtgtgagtaacaaaaggttttaactcaatttcacctttcattgcctcttccaccattttaggcaactgactgcggcctttaacaccaccaaaggcggtgcctcgccatgaacgaccggtgaccagttggaatggtcgggttgatatttcctgtcctgcaccggccacaccaataatcactgattgcccccagccacggtgtgcgctttcgagcgcagcacgcatcacattgacattaccaatacattcgaaggtatgatccactccccattccgtcatctcgataatgacttgctgaataggtttgtcataatcatttgggttcaggcagtcggttgcaccgaactgccttgccagctcaaattttgccggatttgtatcgatggcaatgatcttgcctgcttttgcctgacgagcgccctggataacggcaaggccaatgccgccgagcccaaagacggcaacggaatcaccggactgtactttagcggtattatgcactgcaccgatgccggtagtgacaccgcagcctagcaggcacacttcttcatgatttgcttccgggttgatttttgccagtgatacttcggctacgactgtatattcgctgaatgtggagcatcccatataatgataaataggctgccctttgtaggaaaaacgggttgtgccgtccggcattacaccttttccttgagttgtccgtacggccacacacagattggtttttcctgatttgcagaacaagcactctccgcattctgcggtataaagagggataacgtggtcaccgggtttgacgctagtgacgccttcaccaacctcaacgactacgccagcgccttcatgcccgagtatgacaggaaaaacgccctctggatcatcccctgacagggtgaaggcatccgtatgacacacaccggtatgactgattttgaccagcacttcaccggcttggggcggggctacatcgatttcaacgacttcaaggggacggcccggtccgaatgcaacagcagctcttgatttcataagctctccttttgaatagacagtgctacgcgtttgcgaatatatacccgtcatctttcaagctgcctctttgttggctgcactcactcaccccggtcacatagttacctatgctcccggggattcgctcccttgccgtcgcgatgcaacttgaaatcccttgggtatagattaataaagtcaatcgggttatcagcgaagatatctttgtaatagtttgttaagaatatgatttcgcctctgtagaaatggtacaaaaattttaacattaatacatgtttttaaaatagcgtactagagataattgggaaactatgatttgtcatggtcacagatgtcctttcaggaaaaggcgggttgtggagaaataacctaactttgcaccaaccattgcgagttccataatatccaacatagttctactggctggtaaagtatcggttaagtaatgagattcttgggagttattcactgaacaagccctcataaatagaggacctatatgtattacgcaacatcgatcaagccgagattattatttaatgttgtaccactgataacataactcgcagtcgattgacttccttttttgtataaaaaagtttgacgagcttcattatcatttccccatactacagacacatgcataaaaatcatcgctccatcaggaacaccaagatcgcctgggtcagtagtttttgttgcgccaagattaatatcattacctttattacttaaatatttttcaccgtcgctatccatataactaaattggattctagtactacagccgtagataccagaaagttgcatttcccttgatactcacaactctgagaaaccgcatgaattaagcttttctatgagtgtcttttctattgagagaagtaagtacggctgtagtattaggacccatgcttattttcgctaacatattggcacatattgttgtgccagctcatcactggtactggaagctggcagagtcggagaacaatcacagaatactgaaatcatttatggctattgacactaatggtcattaccacataactgaagatatacccgtcatctttcaagttgcctctttgttggctgtactcacttactccggtcacatagttatctatgctcccgaggattcacccccttgccgccgcgatgcattttgaaatccattgggtatattatgaaatataaaggcagaatttacttcggttatctacgttattcccactcctccaagtttacgtgatgggagatgcctcagaaattacttctggttcgagtgctgccattgacattaaagttataacattactacctacgttgatgagtatgtctgtaagaagataatatcagacctgacagagccaaaatcggtgataagttggttatatgtaccagtagtagtggatgctaaagtctactgcaggagatatctatgaccaacctaggaaacatattaacaataatgtattgcatgttgtattaatctgagtttgaatatctttctgattgtggtgaggtttagtttttgtccatccacataagttaagtaagtagtttttcaatggcttttgtacagaatgtgaaataagctaatgattacccaagatgctagttcaaaacttatcggtttcctgtatcagttcgagcgtgccttatatcgcatattctcaagtgaacataattctgttgtatttgggatagaaacagtagatgatgtggtagaggaggctatattagctagtggattaccaagcattactttcgaacaggataaacatagtttagataccagagctcagccttatcaggacagtagcaagaatttgtggcataccttgcatatctggctggatgctatgaaagtaacccgtgaaagatatgacgaagttacctattgtttagtcacgaaccgaattattgataaaaaaaatcttgtagtatttctttctgaagcgaaaagtgaagagcagattaatactgctttagcaatgttaaaagaacaggcgaaaaaaattacggggaaagttaaatctattgcagaggaagtgttaacttattctgatgaagagttaatattcctgattaaaaatatagaacttcttgatagtcatggaacggcttctggtatttccccaaaggaagctacaattcagttactacatttaccatctgaagtaaaggaacatggagataatatctatcagacgttgtttggatttatgatcgacaaatgtaatactgcttggaaagttaaacaacctgtcgagctgactaaagaaccttttgctaatctcttgaattctgaaataagtctaattaaacgtaaaaactttactgagcaaccttttttccaaaccgctttcaaaaattatcttaagcaagataatgcagagcatttatttatcaaacaacttcaacatattgatataagtacaacgatgtgtaatcgagcattagagcactattgggcattttatgctgaaagggtcagattacaacaggcaggtgaaattcctctttcagcatggcgagcccgtgatgatgtactttataatcgttggttacaaattaaagattgcattgaacttggactggaatcagaaggaaatagccaaaaattgaatatgttgaagaaaatttatactgatacaacggatcccaattatacggcttcactggctggtcaacgaactgagaacctttattttacgacaggaaattaccacgatttagccaattccccttcaaaggaaacatttatacactggcataatgatttcctgaagattaaggagaaataattatgatttataaagatagcaatataattaataacagttcactcgcctgttttctgcttgtctattttgtagaacaatatgagagctgttctgtgaatgatgatcatcctgatttaatgaaactattacttgtacttcctattgtatggcataaagtcagtcgggaatcaatcaaaaaaaagaaaagaacaacacctctaattgccgtagtacaggaatcacttttgattaaatctaacttagcgcaacgtgtttcagaatatgcaggagcctccattcaggggctgaatttagctgtttcctctggtttgctaatgcgattgattgaacacggtgaaacgcggtttgcaacaaacttctcaaaatggccgggaggaataaataagttgcttcctaaagaaatggttcaaaccataacacgattggcaaactggttttcttgtgtagatacaccttccatttatcgtcttcttctgggtaactaattatgaaattcactattgatgcattaatactttggcctgttaatcccaataataatcttcgggtaatcccctttaaaagcgataaaataaatatagttcatgggattagcggcacaggaaaatcatcaattatatcaataattgattattgtcttggagcaagcaagtgtgctattcctgtaggtattattcgagagtctgttatgtggtttgcgattaaagctaatattcgagggtataaatatcttatagcaaggaaaacacccagtaaaagatcggttagcaatgagtaccatctttccccttatcctgaagaacttcctttgactcttacttcaactcattcagatgctgtttttaaaaataaatttaatcaacttgttaatctgactgatctccctctgtctgaaaataacgaaaaaactggatttgatggaagagcttcctacagagatatggctgcttttaattacttgccacaacatattgtggctaatccatatactctattttttaaagccgactcttaccagaataaagaaagactaaaaagggtaatgccgtttgcattaggcattattgatcgtcaatatatgattagagagaaagagcgtatagatatacagaagcagcgagattcactatataaacagcaagaggtaaacaaaaaagcgttgtcaagttgggcttttgatgttgatcgcctatggaaggcatgtgtggaattggggttattatcagaaacagaaaatcaggatactgatgctaaagtaaaatcattaaattacattaatgatatatatactgaagggcgtatcggtgatctattgggtactcctaattatgagtataccaataggcgtttaaaagcacttgttgctcaaggagaggagatccaacagcatattgatacattacggatccaaatcagaaactatgagcaactattttccagaggtcaaggttttacacaggcaatacagaaagaaaaagagcatattgttggatttgactggcttaagaataatttgtctccaggaggtgaatgtatcgcatgtggatcaaaaacaaatatattatcaacagttgttgataatcttgaaaaacaaatttcccggattaactctatctccgaggttctttttgaaaaccccatagcagataaagaaattgataaattaaaaaaagaattacgaattcagcaagataaacttcaaaaaatccgcaaggaaaaatttaatctagaaaaaatagataaatctaccaacaattccatgaataaagtatatgttttaattgggcgtatccaagaaacattatcatcacttaaaaaagtaaataacactgatgatataagtgagaaaataaaagaattagatgatcaattcaatgaaatagagaaattcttttttcagtctaataaaagcagaacagaatatattgtttaccaagagataaattcacttatagaaaagtatgctgataattttaggcttgaacgtcgaggcaatattaaacttgacaaaaatgagttaacattatgttttaatgtagataatgatagaagaaatgaatttttatgggaagtcggcagtggagctaattggatgggatatcatttatctgtctttttagctttgcatgaatttctatctcataaagatcgtactcgtcttcctccgtttagctttttagtgattgatcagcctagtcaagtttatttccctagtgctgcttccggagataatatattagatgtaatggcagaagatgaaagtctccagataaccagacaaaatgatgttgtcgctacacggagaatttttgaaatgttggcagtcgcaattgaagaaaataactatttttttcaagtaatagtgcttgagcatgctgatgaatcaatatgggggcaagtaaaaaatacatgtgaagccgcgtgctggaaggatgaaggagatggcttgatacctcgctcttggagtttgtaatataatctactctaggatttttctgagtaagagcaaaggatatctaactttaatgttagatatcccagactgctgacaaacctagtttaatataaccgggtttgttggcagtatgaatactcagcatcaactaagtattgaacttattcacttttgcgagcatgatcgcagttcattcaccagtttagctaatagttatgacttcactcgcagcactgcaaacagcgatatcaaaactcaccgtctggcgtaaaggcgatcaacgcgcaccacataagccattactgctattgtatgtgttgtctgagtacaaaaaaggtcatgggcaattgtttaaatacggtgatgaaatccatcaaccactattacaattactcactgattttggccccagccgcaaagaacactatccttcaatgcctttctggcgtttacggagagatggcttttgggaactgaaaaatgcagaacattgcacaccacgtcggggaagcaaggaaccgccaaaacgagagctgattgagtatcaggttgccggaggttttgattcagacagtttccagttactgcgccgtcagcctgcgcttgttgatgaactggcacaacagatcctcaatgaacatttccctgaaagcgttcaggtaagtctggttgagcgactaggttttgatattaacaagaggttaaatagccgtgatccacgttttcgtgatgtggttttacgcgcttatcactaccgctgcgccgtttgtggctatgatttacgtctggatggctctctggtcggtctggaagccgcccacatcaaatggaaacagtttggtggcccttgccttgtggagaacggtttggcactttgcacacttcatcattccgcttttgatagaggtgcaatcggcatagacgagaatctgaagattaaaatttctgatggggtcaatcgtagtccggttgttgagcaattgttctgggccagagatggcgaaagcctttatcttccgcgtaatcgtcagtactatccggcagatagatttattgaatggcatcagactcaggtgtttaagacatagataaagtcgatttgtgttgcaggtattaaccgtctaggtattttgatgtttagatggttatatcatgcgcttttctccaaatctctcacattatctctcccgcccttttccatcccatctgaataactccataccactgtaatatcaatccaaatcgtatgagtttgtctcgatatatgaacaggactttactccaaagttaccgacatggtggtcttttcggagctaaagaacgcataaaatgggagatgatacatcacattattttcgccgtacccaaaagcagaaaacgtcatattgaaatctacgaaagcttgtcaatccccaagataaaactcatgtcagtgaaagaaattaatcagcaatataaagaatgggggctttcttattatttaaatcgatgagaaaggtaagctacagtaatattgcataaaaataatcattgaactatatcttgcatttgattctttcttattcagagtagttcattacccactctttattagagttttggttatccttggataaactcatatatgtgtctgccatataaaagaggttgtcaaactttgtgctgatagtatcattatggtattactttctctgagtcaatatattgcaccttaaaataacaaattgttactatgtaacaggaatttatttcataaattaataatcatcattattataacattggtttattttttaatcgccaacatatctcacaaattaagtaagctctgatcaaaatattagaaaaagtgatttaatatgttttactatatgcagtataccagtggtccgctgatctttatgaaaagggcttaaaatgtctgactctatttttaactttaaaaattatccaatagtatttattggatctggaatgtctaaaagatacttggaaaattctccaacatggcctgagttgctggaagaatactggaataaaattgataacaatggtcaaggtttttataattacttatcggaaataaaggataaatataaagaagaacaaaatgactctgatttaaatcataaagtatattcggacgcagcaacttacattgaaaaaaaattcaaggaattatttaattcagggaaaatatcattagaaggattaacatcaaaaagagtttttgacgaggatatatcaccatttaaatattctttatgtcaaagattcaagcaagataaattaagacaaaatattaaaaaagatgaatttgaatcatttaagaagtttttaaaaaatgcaaaaatgattattacaacaaattatgattcatttattgaaacacttttgtcagaacaaaatgttgaacctaaaatgtatattggcaatgaaggtttttttgatgatactattggatggagtgagttatataaaatacacggagatatagaattacctaattcaatagtaattaatagttatgattatgaaagatatgatgataaatctatactgattagcgcaaaaatattgtcaagcatgataaaaagctcgataatttttattggatattcattaacagatagaaatgtaaaaaaactactgactgatttttcttcacaacttccgaaagaagacaaaagaaaatctgctgaaagaattattctgattgagttcaaaaaagatgaaatggatattataaaaacgcatagaacagatgataaatcacaaataacgtatacatctatagaaacagataattataaaaagatatatgatgaaataagtaatatagatgaagggttgccgccatatgatattcttagatatcaaagggtaataaagcaacttatactagaagaaggggagaaaggaaatctaggtagtctattagtcacaccttctgatttggatgaattagagaaacatgccaattctggtaaaaatttagttgttgccttaggtgataaacaacttgtttatattagagtaaaagaaatggaatatttagaagattatatctttgataaaagtgaaataccaaataaatcagctattgaatttcttatcgattgtcctcctcatgccagaactcctttctcaaagttaataaaatcttgtgatttccataatataaaaatatcaaaaaaagaaatgaaaaaaatagaaacaagaataaatatgcatggaaaaatagataacttagttaaatctgttaatctggataaaaaatactcaagtattgggtttagatcaattgaagatatcaaagccgagaacttattaaaaaacaaagaattattggttataataaagaacataaaatcaataagtaaagatgaattaaggaaatatatccaagaagaagcctttccattatttaaaataaatggaaaggatgatcatttaaaatcaaacttaagaaagttatttttagcttttgatttattaacatatggagatgtaagtttagatttgctaaataaaggtgactaagcttctcttaactaaaagaaaagctctaaataaaaattagtggggtgcttagtacccccacaaaaaaatatccatttaaatcgagcctcttctagttgaatacttttctagcctttcgctcaataagttgaccgtacatatcaaaataccgactaggccaaattccagggggatgaatttcgagatagttagcaataatccattcgcctttaggtcaaggccgactgagcgtattggctaatgatgaactgagtcccgcttcacgaaaaacagtcgctaaggttgttccacgcttacgtaatgcagcaattatatccgcttgatgccagccatttctaacattatttattcctgttatcccttccattaattaatattgatggtggcgattcagacagtgttcgtggacagggtaattatgaccggcaaggctaagcctttcctgcctgaatcaccattgcaagcgatgggatctttgtagtaacaggttaatacgttatcgattagatttgtcggggccagcttttgtttgatggtaaaaatagcttcataaaaattcacaataattacagtctgttgtggtgtctaaaactattaagacgcatcaatttgtgagccgaggaaaggtgagataatgatacaaatggaagagggaaaaatagcgtattaaccatctaaacgtcaaggtgtttagatggttggtaagtggcttataatagcgaatagtagatcgactggaccctgtaaataattctgtatattagctcacacctatatttgcccacctactcccttaaacttctcaacaaatgcagcaattttctggaaaacagcctgctttttcgttctgtattccgggttaagtggacttaacttaggtagagtggaattgagctctgtgccgttttcacttgcatattctcgttttaatgatgctgtaatatagcgcttagccgcatcttcatttaatttctccgagctaattaactcttctgcttcacgtttttgttcagcttgagcaaatttgaaaaattcatcaataatactggccttgtcgataatttcgtccaagttagtttgattaatgaaatcaacaattagactttcttttgctcgattgccaaggctggaacgaattaaacggcgaacttcatcaattaactctgccttatttttattctttttattgttttcaaaaatcaactcaagaatgtaatctagattaatttcctgcgatttgagcaagtccacttcaaagacgacatcatcccagtcaatagtagatttatctttctcgttagacgacttttcacggcgtaaccaatcacgcgtatcattataggttgagcgataatcttgaatagtacgctcagttggcatctcaatcgcttgcatcgcggcgatatcttcatcactcaggtagtatttagccttaaatgcctcaacagcctccggattactaatatctacatgttgtagagcctttaatcctgcaaattcatcatagttttgcagtacattctccgcacgtaaatattcaccaaatagtttggcaaagtcctttttatcttgttctttaacaatatcatcaggattaggaaagcgtctttgtagctctgtcactacctctaaaaatccgcgacgtgcttcgccggtgattaaatcggtaaagccttccatgtattctttatagcttttttccagcactatgtttttggtgtttttatcaccaaataaagtgatagcctcaaccgtagtctgttctaaatcacggaaggtgacgatattgccaaaggtcttcgtggcgtcataaatacggttagtacgtgaaaaagcttgcattaggccgtggtaacgcagatttttatcgacaaataaagtattcaatgtcggcgcatcaaatcctgttaagaacatgccaacaacaatcagtaaatctacttcttgatttttcactcgcttagcgaggtctttatagtagttttggaaacctttactatctacaccaaaattcattttgaacgctgcattataatcatcaatggctgcgcttaaaaattctttggcactgctgtccattgcggtgagctcaaaactttcatcaataagctcaccaatagcatcttgctcttcattagcggcgaaagagaagatagtggcaatattaagcggttttttatttgctttattttcttcagtctctttttgtaaatgcttgaacgcttcataataagctttggcggcatccacgctactgacagcaaacatggcattaaaccccttgccaccggcttggagacgatgtgttttttgcctgaagttatttaaaatatactgggaaattgcacgaatacgaacaggatgtaaaaaagcttgcttgttttctgccgctgttaactttttctcgtcttgttcggtttcaatggacttaaactgtggtcttacatcgttataatcaactttaaacttcaatactttttcatcacgaatggcatcggtaatcacatacgaatgtaattctcggccaaatacactactggtggtgtctgctcctaaagcattttgcgggaaaattggcgtgcccgtaaaaccaaattgataatactttttaaatttcttctttaggtttttttgtgcttcaccaaactggctgcggtgtgcctcatcaaaaataaacactacttgcttattgtatattggtaaatcgctttcactttttattaagttattaaatttctgaatggtagtaacaataattttattgtcatctttttcaatattccgttttagccctgcggtactctccgaaccattaacactgtcaggtgaaaaacgttgatattctttcatggtctggtaatccagatctttacgatcgaccacaaaaaacaccttatcgataaaatccaactcagtagccaaacgcgccgctttgaaactagttaaggttttgcctgaccccgtggtatgccaaatgtagccaccactttcagtattactccaatttttagcctgatatgcacttttaattttccacaaaatacgttcagtagccgctatttgataggggcgcatcactaataaagtattgctaacatcaaatacagaataatgaattaacacattcagcaaggtatttttctgaaaaaatgtggctgtaaaatcttttaagtctttaatcagcgtattatcagatttggcccaattcatggtgaagtcaaaactgtttttatcacgcttggtagtattggcaaaatagcgcgtgtctgtaccgtttgaaatcacaaaaagctgtaagtatttaaacagcgagttttctgtattaaagctttctttactataacgatgcacttggttaaaggcttcacgaatagcaactccgcgctttttaagctcaacttgtaccaatggcaggccattaaccaaaatggttacatcgtatcgattcgcttgcgcccctgtttgcttgaattgcttaatgatttgtactttattacgggcaatgtttttcttatccacgagatagatgttctcgatatgtccatcatcaaaaacaaagtcgtggatataatcgttatgaattttacgagttttatctatgttgttatcgctgggcttatctaagtattgctcaacaaatcgttgccactcactttctgaaaaattaacattattcagtatctgcagttgctcacgcacattggccagcatgttttggggcgtgtttaagccagaaacatattcataaccttggttgactaaatcgtcgattaattcccgttctaaatcaccttcgctttggtaggtttcatttagctgcaattccttagtgtatttatccagtacgataaagttatttgattcagcaacagttttgtattcgtacatacttcacctataaattcgattcactctaattttctgcctgttggaagcggtacatagtgttaatttcattaaccagatagcgcaaaacacgcttgtcatcttccgtaagctcagcgacctcttcacctgcatgttttgaatgactagagatattaataatcctggcttcataagggttaggtctgccatcaccggtttttggcaataaatcaccccactttttatagccaagaaaagtagaggttttttctaatatatttcttagaaagttgaagtgatacttgctcaactgaccgttttcaatggctttttcgagttctgacttcagataaagatgatatgaaaatggtgaatcattcggttggattgctagctgatatgtgccatcttcatgctttgtcagcctgtatttctcaaaccatttctttttatagcttttatcatcactgtttagctcattgtgtagcacgttatagaaaagagggttatgcgtcgtgatgatgaatttaacgctagactcgttagatttaataagtttagcaagatgtactgccagctcaatcaaatggttttcatctaacgagctaacaggatcatcaataaagacgtattgcaattgattaaactgatctgtttctcgctcaccgggttcagcaacattcagcacgctgatgacttgctcaatcagtgtgtaaaatacgctccagataaagttgctttcttcgccttttgatattttaacattttcagttggtgcttcattgccacgttcgaaagaaaatgtaacttccgaaccattttcactaaaatgtggagttaatttttcatccgtatagtgttgaaagttagcaatgatatttcggtcttgcccctgatctttcagcacccaatctgtaaatgaattcggctggattttgagtttaggctcggtattctcagataagtcgttatcccagtaaaacaagtcttcggtaaaggcgttgtaatacaaaaaattagtacgggtcaatgatagttcttcattattgccacctttatcattatcatttttaggcgtaattagctgtttaaattcccgtgaaagccgggttttacccgtaccattaaaggcatagatcagttgtactttcttgttggcatcttttagctgctgggctattcccgttagcgttttgctcatattatgcttctacctctggcttggggaaactcaacagcagatcgcgataatattcatattgcttttgacgtaattcaatttctcgtggtagaccttcactgatggagctggttaaagtgtcgaatttatctaatatagctactatgcggtcttgttcgacaagtggggggataggaattggatatttctcaaacattggttttctaagtgatgtcaccgaagcgtggacggatactttggttaagtaatgagcaaaattatttctaatataataaaatagaaattttgaattaaaacggtcgtctctaacaacaatacgatatgctctttgatgcagagcatactttcctgaaacataatgaaaaactttacctacacctactccatctccggcagtaataattgcagtttcatcaaactcaaaactatctatcgcccgtggttcctgagagcgaacaaagaaaggatattgcccatctaaaacagcttcatttgtattacgactgcccgttccaatggttgcaatttcccccaaagtcttccactccacttcattttcttcaaaacttaacaattggtcgcgataatattcatattgtttttggcgtgcggtaagctcagcggtaagcttagcggtaagctcggtaaaggcgtccaaaatgcggacgatttcggtttggatattgagagatgggatgggaatttgtattttgtttaatatagcctgtgtcaggctaggtctccctgcacctgtgtctagcgccaacagatcgatagttttgataaaataatataaaaatttagggatgattttcttagcatcaatttctgtatagtaaattgtgtcaacgttccaaaatggtgactcaatataaaaaatatttgttatcgagcccttacgggggattaaaactgttggctgattatatgaataagtatcgacataccccattatcccgcctgaaccataaactggaatatcgccagcattcaagttcttccaatctttgccatgttttattttcgccacttgctccaaagattcccatactacctcagccccttgaagcagtttctccataaaactcatattgctcatgctttattctccgttccttcaatctcagcaacaatggcatcaatatccatccgaagctggtcgatttttttaacggtagtctttagttcagcattgagttttgtaatatcaattacttcgcggttgtctctagcttcgacatagctactcaccgacaggttgtaatcgttagcggcgatggcttcaaaactgactgatttagcaaaatgctcaacatcatctttgctatcaaacacctgcataatttgttcgatatgattgtcggtaagtatgttgttattggtttcttttttaaacagagggctggcatcaataaactgagtagtggtgtcggttttgtgtttagacagcacaagaatgttgacagcaatggtcgtgccaaaaaacaggttaggtgctaatgagatcacggtttcaacatagttgttatctaccagatatttgcggattttctgctcagctccaccacggtaaaaaatacccgggaagcaaacaattgccgcgcggcctttgctggataagtaactcaatgcgtgcagaacaaaggcaaagtcggctttggacttcggcgctagtacgccagcgggagcaaagcggtcatcgttaatcagtgttggatcatcactgccaatccatttcaccgaatacggtggattagagacgatggcatcgaacggtttgtcatcaccaaaatgcggttcggttaaggtgttgcccaacataatattaaacttgtcgtagttaatgttgtgtaaaaacatattcatacgcgcaagattataggtggtatggttaatctcctgaccaaagaaaccgtcttcaataatgtgggcatcgaagtgttttttggcttgtaatagcagagagcccgaacctgcggcgggatcatagattttattcacgctggtttgcccgtgcatggcgagctgagcgattagcctggaaacgtgttgtggtgtaaaaaattcaccgcctgatttacctgcattagcggcatagttagagattaaaaactcgtaagcatcaccaaacagatctattttgttactttcaaactgaccaaatttaagccctgccacgcctttcaagactgcggctaaacgcgtatttttgtctttaacggtattacctaaacggttactggtggtgtcaaaatcggcaaaaagacccttaatctcggcttcagatgggtagccgttggctgagctttcaatagcgacgaaaatgctatttaagtctttgtttaagttatcatttttattagcattttcggcaatattagcaaacagctggcttggataaataaaatagcctttggttttaatagcatcatctttaatatcgtcagtgataacagcatctgaaagctcggcatagttaatgctctcatcaccgccttcaatgtagtttgcaaagttttcacttataaagcgataaaacagcgtacctagtacgtactgtttgaaatcccagccatcaactgaacctctcacatcgttggcaatttgccagatttgacgctgtagttcggcgcgttgttgggtacttgtcattgtgaaactccacttttaatacgtttttgaatggccatcggcccataatcatcccagtattataacgagtaaagacgttctcatcattttgaatcgcgacaagtttagtcgtcatatctgggtcatttgggactgcttccaacactgataggcaatcctgtcctgtattttgctcatagcaacttgatatgacagactaattttggtttgcttaactcggagaactgaaaaatacctacgttaagaaaaaattactcttctggcaggttatcccttgtcggttttggcagccattcgatagcagtaccaatattcaggttcaggttactgcgaatcatcatagacaatacgcttaataacctgattaatagcagtttcactcattggcttacccgcatcgttatgaccggggaaaacgtatttcctgcgcttgtgcagcttgataagaatggctttaacctgatttgatagcgggacgatgtgagggtgacgtatttttattcgttcagcgggtatttgccagatatctttatcaaaatcgaattcagtccattctgattctctcaattcgatggtattccggtaagtataagtataagcaaaggaaagcttaactttgcgtatttactggggttttatgggttttgcgccctacaggattcgaacctgtgacctacggcttagaaggccgttgctctatccagctgagctaagggcgcatcttgagagatgagctgcatcagtaatgctctgatgcggggagagattatacggtgacaactccttgagtcaatggcttttctgcttataaatcttcatctggctattttctgattatcaataaaactgacagcacgttcatgttctgacaaaataggcagtatcccaatgtttgatttatggatttattcgtacatgccagcaaaaattattgatgggaaaacgattgcgcagacaatcagaagtgaagtcgcagtgcgtgttcaacaacgtgttgctgcgggaagacgtgctcccggtcttgccgttgttttagtcggcgaaaacccggcttctcaaatttatgtcgcaagcaaacgtcgtgcctgtgaggaagtcgggtttgtttcccgttcctatgacctgccagataccaccagcgaagcagaattgttgaatcttatcgatcagcttaataatgattcagatattgatggtattttggttcagctccctttacctgccggtattgataacgtcaaagttttggaacgtatccagcctgataaggatgttgatggcttccatccctataatattggtcgtttgtgtcaacgcgcgccaaagctgcgtccctgtactccacgcggtatcgcaacgttgcttgagcgttgtggaattaatacttatgggctgaatgctgtcattatcggcgcttcaaatattgttggtcgtccaatgagcttggagctgttattggctggctgtactaccacggtgactcatcgctttactaaagatttacgtcaccatgtggagcaggcagatttactcattgtggcggtcggtaaaccaaactttatccccggagagtggattaaacccggcgctattgttattgatgtcggaattaatcgcctggaagatggcaaagtgattggtgatgttgattttgaaactgcatcagagcgggcaagctggatctcgccggtgcctggaggggttggcccaatgacagtcgctacacttatccagaataccttgcaagcctgcgaggaatatcacgatgtggaaagaattgaaggttgttaatggaaattttttatttagaaggtcacccttatgtggcgttgtgtgatctgttgaagtttcaggggtggagtgaaagtggcgctagcgctaaagcggttattgctgaaggtttggttaaagtcaataatcagatagaaacccgtaaacgttacaaagcgatagccgggcaggttgttacttttaatggtaaatctgtccacattaaagaatgattaaaacgggctcccttaaaaatgaagggagccgtagattgcgggtaaagtcttggccttttgattgttgggactgactgaaaaagtgcttaatcggtatgtctgggaagtgagtaaagcgcgattaaaaaagaaaaggtaaaataattctcggatgttaaataacatcgtggttatcattgatagatattaaactttatttaaccgagggttttataaactgaatgcttctggataaatccgataagtttttgttgtcagttaacctaactgtctgtcgttaaaagatatctcaatgtaaaatagtaaaaatataaacgttttatcacccttttaatctttatcattattacttttctgtttattgtgtaaatcggctttcttagttttcaaatgaagtgaaaacagatacttgaaatggtgatgaaaagattatggcggtaaataaaggttaaatctgatagttaatgcataaggctaatctctgttgaatgtaaaaaatgctaagtagaaaaggttttttatatcggagataaacgggaatttgaaaaagattttagcttcaatattataccctatggatttcaagatggatcgcggcggcaagggagcgaatccccgggagcatagataactatatgaccggggtgagagagtgcagccaacaaagaagcaacttgaaagatgacgggtatagaaggttaaatgggttgataaccaaaatggatacttttatcaatatcggttgattttactggaagtttttattttaccctgcaatgctctatttactgtgatatgccaaggctataaagcaaccttagctaacccgaattctgcttaatccgtcattgaaaaatcgtcttctgagtagaaaactttcagtgatggcttcttcaatttaaggcagtaagcaatcaatccacctaaaacgcacaacagaaagccttttatacttcggtggcgggaatgctctatttgagaaagagtttttaattgcccattaatcgtttcaatgataaaacgcttttttaacattatcttatcccactcagcttgcatactcgctttcatgttacgccgttttttcgtgatgaaagtgacatcggttttagctaaatcgtccgccaattcctggctgaggtaacctttgtcaccgtaaagagaacccgttaattcttttgataattcacgaacaggttcccgatcatccacattacccggagtcactttaagcgcgagaatttcaccctgatgattgacaaccaggtgtaatttgaaaccgtaaaaccagcccattgaattttttccgcgctttgctatccccgcaaagaccttatgtcgagggatgcgaatgttatggcagacactcaaacgggtggaatcaataaaagcaatgcctgtgggtttcccttttaattgagtcagatagctgcataatggcaccaaaacggaaggagccacactgacaaaacgaggatagctaagcaaggttggaaaatccttatggtgatatttccaaatatgttctagataaaaatgtttaaaatcacggtaatgcgacatatgaaaaaggatcaaaatggtcatgatttcactgggatacatatgaccttgtcggcggcgtaaacgatgcccgctatcgagacaaaattgttcccattgagggatgaaaaaacggcaaaaatcatcgacatcacagaaaatttcaactaagttgtccatagcctgttcccccctcggagctgtttttggtgcacaccaaaactttgctcctggaacaggcttctcgtcaatttcttatccagaattcgggttagctaagagtggttttaatcatccaccaggataagttttttcatgcgagtattctaatggtgttttgtgcaagaggtattgagatagcacaaagtcacttagcaaagggtataaagttttaataatgttaagtaatgctatatttaaggttttatgcgtttttagtatttaccatgcttatgaatatcttaggtttaatactgggctattttaacgcaatacttattgaaaaatgtttaatctgatgataatttaaacttaatatactgattttaatgataaaacaaaccagtggagtagatagtttggaattaaatcaagtgattaaagcgcttaatgaatccggtaataactggagtgtagagcaaataggtgaatgtcttgcaattactaatgaagacggaattaaagcacatctggctatttgtggcaggcaaattacagtggaagcattactgttttcggaagagaatgttttagatcccgcttctttaaatcagtttattttagaaacgcacaagatgattcctctgacttcagttggaataactaaagtagagggtcaatcttactatactgcttttggttcattgtcatcagaatcaaaacaagaaagcgttgttatcgaagtctctacgttgtttgccaacatcactgaacttcttgatgcgtattctgagttcctaaaataacaatatagaggcaaatattaatgaacgtgtggaaaaagctttttaaggcaatcaagggaacggtaaataacgcggcagaagctgttgctgatggcaatgctctgacgattcttgatcaggaaatccgggaagcaaaagcagaaatccgccgtgcggatgaaagcttggttagcatcattgctaagcgaaaaatggcagagaaaaaggttgcggatatcaaaaacagtatcaccgagtacgagggttatgctcgctctgctgcgggtaaaggcgataatgggcttgctttagagtgtgctcagaaagttgcgaccctgcgtgatgaactggaaagagaacaagggttgtttgaatcgttccagaaggctgaaacgacgcaccgacacactgtacaagaggcgaagaagaaggtgtctcagcttgagaaccaggttgatttggttaaggccactgagcaggtgcagaaagcccaagctgcgactcacagttctgtcgttggcgcttcttcaaaaacatctaccgcccttgattcccttgagcgtatcaagtcacgtcaggctgagaaagcggctcagttcgaggctcagcaggagctccacgatagtatgacttctagcgatctggataaaaagcttaaagaggctggcataacgtcaagttctatgtccgcagaagatgaacttgctcgtatccttggcaagtaaatactcagttgttaaatcaagatcctgctttttaaagtgggatcttcctatcaagagatatttctatgctttccaaaatcgcagatgcatttaagagcgcattcgggggtaagacggttgcgcctgctgttccaaaggtgccggaagtattaggtttgcgtatcggtggggcacttgagatagacccactgatgctgaaactgattgaatctgacctaaccatcgaaaatgcagcttcaactcagcttatatgttccgttggtgtagtcgatctaggtgataacgtgcgtttggttcgttattacactgatgacgaaggttatcttcaagtgcttcaagaaggtgaaggggatgacggcgtgaaggaagtgagtttgtggtatttttatgaaactaaaccgatcgattcacaagctcaatgggatgcgctgattgaaaacggtatcgtgacaccaagcagacgatatgatctcgatggtacccagttctctccgttatgggacaacattaagccggtggctgttaccgaaaaaacttacagtaaagaaggtcacataaccgaaactgatcagtttgtgatggtgtatacgcgtcaggttgctcataacagaacagaagaacttcaggttgtgggagaagaaaaagttgtagggagtcacctggatagattgatggtactgagcaccggtattcaacttaaccaaactgattttaaagtggtggcataaatgatcacattggaaaatgaagaacaggcttttactcaatttatgcatggtgtaggcaattttggcttgtgttttgggctggcgctggtttttttcatcgttttcaaattcatctacacaataattactccgcatgatgagtggaagcttatcaaacaagagaagaatagtgccgcggcgatatcgcttggtggcgctctggttggttacagcattgccattgcaagtgcagcaagcaactctgtgggtgttattgatttcgtgatgtggagtgttgttgcgctgttggctcaaattgctggcttcttcatggttcgcatattcatgatgccaaagattgtatcccgcattgagaataatgaggtccctgctgcgattgtgttggcgtcggtgtcaatttctgttggtcttttaaatgcagcctgcatgacttactgatttagggattgtatgacgaacgggaataaaaagcgcagaatgcgcagcaccgccattaacattgagagtaaacgtaaatattggcgtggtttctcattcacatcattggcgctcagtgttggttcactcgtgggttgtggtcaatcggcggatgagttgtcaattcatgtttataaggatttggcgtcttgtcagaataatccgaagaatacgatcgctgctcaatgtgaaaccacataccaagcggcattacgtgaagcggagcgtacttcgcagaaatttcgccagaaagctatgtgtgagcttgagtacggtgagtgtgaagcaatgccgggggccgtaggttatcgaccgaagatggccgcctttatgatggcggcggtgaagccagaacagtttaaccagtacgatattgctgaaaagtatcgcaatgtgttctatcagccactatttacctcaacatcaggctatggcgacttgtaccgtaagctttttttcgctgatggtaaggttattggcgattattccgatattggcaatatccagtacgagatgaaccgacgttatttgcatccgctggaaacggttcgcctgccaatggagaaacgagaagttcctcaagttggaacaaatgcaaatgtcgttgcaggtataaaccctgtactgaactcccgatcgactgcttatatcgcatctgggatcgttgatgaaatcggtgattattcagcgcgtaagcatagagagagaatgtatcgagagcgcttgatacgtgaaaaggaacaaaagtttaaaagtagcgattcccgttattctggttatgatagcaagccaattgtcactaccaaatcttctggtggttttggttcaacatcttccgctaaatacagttggggtggttaaccagcgctggcattttattctcaggccagtctcttgcatggagtcattattgccgcattaagcatttgtgagatggtttgttccaagattcaaataagcattatcaaagggttaatgtcatgcttcagatcccaacaacacctcgtcatgattggaaagtgcgagcaaaagaatttgggtttggtttccatacaatcgataatgaaccgtactggacggaagaccgttattaccagtttactctcaagcagattgaagaacatattgaagatccgacagcggaaatccaccgcttgagccttcaagcagtagagcacgtggttaacagtgatgagttgatggctagattccaaattccagaagccatgtggtcattggttcgtggatcttggaagcgcagagatccaagcctctatagtcgccttgattttgcctatgatggtaaaaacccggctaagttattggaaattaactcagatacgccgacctctgtttatgagcatggtttttttagctggctgtggttggaagataaggttaaccgtggtgaattgcctcatgctgctgatcagttcaacttactacaggagttgcttgttaatcgcttctgtgaactgaaaccctttttgccattcaacacgcttcattttgcctgctgtaagggtacggaagaagacaaaggttcggttgattacatggctgactgtgccaaagatgccggtattcatatcgagtttgtctacattgaagacatcgggctcagcgagtgtggtcaatttacggatagtaataacaagatcatagactcgatgttcaagttgtatccgtgggagttcatgtttcgtgaagaatatgctcaacacttggtcactgcgggtgttaactggtttgagccaatgtggaaatgcctcacttcgaataaggcaattttgccattgctttgggagatgtttccaggacatccaaatctgcttgaggcttattttgctgatgatccgaaagccaagcgtttaactcattacgtcatgaagccgatattcagccgtgagggcgcgaatatcagtattcacaaagacgggaaagtgattgaaaaggtagagggtccttacggtgaggagggttacattgtgcagcagtacaccccattgccaaagatcggtaatagccatgtccttatcggtagttggctcgttaatgatacgcctgcgggtctatcggttagggaagatattggcaggatcacgaaagatacatcacgatttgtgcctcatattattttaggttaataactctataccctatggatttcgaggtgcatcgcgacggcaagggagcgaatccccgggagcatagataactatgtgactggggtgagtgagtgcagccaacaaagggcaacttgaaagatgacgggtatatatttatttctggagcagggtggaagaccctgctttctggctctgagtaaacatccaacttgattgctgaaatgtcatttttgtatgatttttcatccattttttaacaggtattctccttcttctttattattatggtgaagtacggtgcgcatcagaagtagatccaattcggtatctgggaggtgttttttgtctttgagttcgcggcgggtaactgaatcatccaattcgcggcagataaagttatgaatgcgtttaaaacgtggactatattccgtttcgtcagtgttacgcttgatggcaagcagagtctgtatttcttgcatcagccccgcgtctgtaaccgttccggccagtaggctgtcgaagcgcatcggggggacacctttaccagcttcgatccaacgtaccgccagcaatgggcgtagtacataaaggtattttttcagccgaattttctcgcctttcaggtaactacgaaagtttttctttgccattgacagatagtgatatcgcgctctgttgttggagaaatagtctggtaatagggcacgtagtgccgccatgaactccacgtcttcgtagtagattactggtgagtctgcccactccatcagtgtcgggttggctcgtttcagcagccctaacgttttacgcagttcccaaccacagatatccagctcgttactgatcggtagttcaatgacatcccgagagggatcgacgcgtaagtaccatgatggcgcatgtacataaataaaacgtacatcgtaatcactgcttgtcgaggcaaatccccaaccgcggctacctgattcacaggcgtagagtattcgtatttgcagctctgtctcaagttgcgccagtttttggcatatgtgttgcttcatgatgtcactgataccaaatttttctttcatcttgattatccttttacgcaaaccacttgacgcagggtgtgaacgatttctactagtgaagactgagcggccattacggcctcaatgtctttgtaggccatcggaatttcatcgataacgtcgctgtccttgcggcattccacgtgtgccgtggcacgcttttgatcctctattgtgaagcgttttttcgctgccgtgcggcttaatactcgtcctgcaccgtgactgcatgagcagaaactctctttgtttcccagacctcgtacgataaagcttttcgcacccattgagccgggaatgatgcccatgacgcctcggtgtgcagcgactgcccctttgcgtgtgactaacacgttttggccgaagtgctgctcctgttgcacataattgtggtgacaatttaccgcttccattgtggcagtgaatggttttgttattaccgtcgccaatgctgccagtgtatgttgcatcatgacttcgcgattgtggcgggcgaagttttgtgcccaaccgaccgcttccatataatcagcaaagtgacggctgccttcctcaaaataggccagattacgatcaggcaggtgagcgatatgttgtttcatgtcctgttgggcaagggtgataaatagattaccaatggcatttcctacaccgcgtgagccgctatgcagcattacccatacccggtcggattcatccagacagagctcaatgaagtgattaccggtccctagtgtccctaagtgcagatggttattggttttcagcaattgtggatatttatcggttagctgtttaaacccggtttgcaacacgctccaatggtgatcgacggtttctggtggttgctgccaagcgcctttatcctgaccgctacggtttgctgtgcgtccgtgtggtacggcaatttcaatagcatggcggatcgcatataggttgtccggtaaatctttggcattcaatgaggtacgtactgccatcatgccacaaccgatatctacgcctaccgcggctggaataattgccccacgagtcgggatgacactgccgatggttgaacctttaccaagatgtacatcaggcataacggctaaatgtctgaatataaaaggcatttttgctgtattcaacagttgttcacgagcttccgcttctaccggtacgccatgagtccacattttcactggtacactgtttggcgcagtcattaactcgtaatcgtttgttatcacattgttctcctgattacttagccgtcactgttattatatacccgttatctttcaggttgcctctttggatgcatcttgaaatccattgggtataatttcaagtaacgaatatttttcctttttaatcaatgcttctgaatttgttttttatcttggtcttattttttaaccattaggaaaatattgtaaataaaaattttattacactattaatatagtattatgtttaatggtaattgcaattatttgatttattattttgttgagtaatgttgaaattgtgatgctaatctatataaaaatgtgtttgtaagaacatatatgaattcattatagttttaaattgtgttgataattgtaaaggaaatgtaaaacaattaaatgatttaatattatgatattgttgtaatagtacgtttatatactattcaaatagatgtgtatgatatgtgcataattatcatatctatatgatggattattaaatgagaaacattatctttttatgaaataatatttctatggtctgaataaaatcagaggttgtctttaatatatttcttgaaaatataagtatgtatagtatatggctcataatatttttattgatttatttttgtgaaattttatttatatcttgttgatataacacaatattttaactgtatgttttattttgttttttttgtttggtaaatgtatttatattgtcagatgtagaaaataaatccatgcactatttataaccgataatttataatgagttaatgatttcttaattgcttaaatataggtaaaaacagtcacaaattatcatgttatttatcgcttaataatcattagtaaatgatattatctttgttttttattttgttgaaatattttcatgtttattgctggttttaatagctcctcaattttcaattgaaatatatgatatcaaaatatttaataaatatttctttcggataaaaatgaaagcgttttattaatagttaatctaaccagtaaacaggttttaaatcgtgtgatgacttatttatcttattgtcaatattaacgaaatgattaaaaacattgccattaatagttatttttttctatccataaaggggttaattaacctcttttttacgatattgcttgcattttaattttaatcttttcattaaaattgtacggaaattatccgtacaatttgatgttgtattgggtaatgtgaatttatgtgtcaaattagccaattatcgtcattattaatcatcgttaatacttgccagtacatttcctgcctgttgataaccgccttcttctacatagataacgatttttccagaacgatgtgcggtgagttgcgtttccattttcattgcttccatgacagcaatgacatcaccttgtttaacttcatcaccctcctgcacataccaggattgtaaaacgccggatattggtgctgagacgggattcggtgctgttattgtcctctccatttcactatttttgttttcaatgatggaatttcgcccagaatcaggcaatgaaagcccttttaataattcggctggtagccctagttcatgccgacggccattaatttcaataaaagtacgtgttaccttttcttgataatgattttcctgacgcggagatatttttatatcattgataaagtcagtttcgatccaacgagtatgaacgttaaatgtgtcatcggaaataaaatcaggatgctccatcactgctcgatgaaaaggcaatactgaggcaacgcctttaatgctgaattcctgtaatgcccgctgcgcacgggcaatagcttgttggcgggttgctccggtgacaatcaacttagccatcagcgaatcaaaagtgtcagggatggtggaacctgctgcaacaccggaatccaatcttatgcctgggccggaagggggagaaaatactgtcacggttccgggtgtcggcaaaaatcctttacccgcatcttctgcgttaatacggaactcgaaagaatggcctaaaggaataggcgttgaggtcaatgataaaggtttaccttcggcaattcgaaattgttctaccacaatgtcgatccctgtggtttcttcggtgaccggatgttcgacctgcaagcgagtattgacttccagaaaggagatcgtgccgtctgcactgaggagaaattccactgttccggctccaatataaccagcagcggtgcaaatatcttgtgctgcttgatgaatacgctggcgctgatgttcagccaaaaatggggccggtgcttcttctaccaatttttggttacgtcgttgcagtgaacaatcacgtgtaccaagtaccaccacattgccatgtttatcagccagaatttgcgcttcgatatgacgaggtttatccaggaactgttcaatgaaacattctccacgaccaaaggccgctgttgcttcacgaacagccgaattgtagagttcggtgacttcatcaagccgccatgccactttcatgccacgtccaccaccgccatatgccgctttaattgcgattggcaggccatattgttcggcaaacgccagagcttcctctgcgtttttcaccggttcttctgtacctgaaacctgtggggcacctacctgttgggcaattttgcgtgctttaactttgtcacccaaagtatcaattgtctctggttcaggaccaacccagatcaaccctgcatgaataactgcacgggcaaattctgctcgttcagccagaaatccgtatccgggatgtaccatgtcggcacctgaacgtttcgcaatatccaataattggggaatattgagataggtatcagcggggcggtttccgcctaaactataagcctcatcagccaatcgtacatgttgtgcattgatgtccgaatcagcgtagacggcgatagattgtaaaccataatcccggcaggcacggatgatacggacggcgatttcaccgcggttagcaatcaaaactttttttatgggatagtttttaatattcatggtcattgcggtactcataagcggcaatcgctctcttttatttcatgaaattcagtgattgggttgaagcggatacgggcattgacaggaatttgtcccgcaagatcgagatgatagttggcaacggaaccaatgactggatagccaccggtcaaagggtgatcggctaaaaacaaaaccggttgaccactggcaggaacctgaattgcgccggtggtcgttccctcactcggtaactctttatggttaagacgcgataatggtgtgtctccgtacagacgaataccaactcgattagattgtggtgtaacttgccaaagttggttttgtagcagggatagcgcttctgcggtgaaccagtcggtgcgcggccctagaataatgtccagtgtaacgatatcgtcagtggtgggcatattgaaagccgggctttcatccattgataccgcacaaccctgcgtcacagtaagaatatccaaaatatcgcctatagcgattggcttggggccaacgtgtgccagcgtgtcgtaagagaggctggagagaataggttgcttggcaaagctgccacgcaccgccaaataagaacgcattcccgctttgggcgttcctaatgtcactttatcgccttcgctcagatcaataggctgatagccatcaacctgaaactttcggccagatgttgtttgaacagtgattgggcagtcagcacctgtaaccgcgataatgacattgccatgagaaatgaagcttaatcctccttgcacaatttccagacaggcattatccgaaggattaccggcgatccggttggcacttctcagcgctgttttatctagcgctccggcagcggaaatacctaaactagcctgtcctgaacggcctaaatcctgaaaaagtgtttgtattccagtggttaggatttccagcgaggcgtgtttatcaacttgcgaaggtagaacgtcctctatgggggcaacagggatttcggctttagtgatagagattgctgcgcctttgcgttgatctctgaaacgtacccggaaaccgggttgtaacagggaagagggagaacgtgagagatcccacatgcgttctggcgtgataccgatgatttgccaacctcccggagtggcttgagggtatattccactgaattctccggctaggccgactgatcccgcaggaatgcgggctcttggggttgtcctgcgaggaacatgtaaacgatctgactctgcgactaaataggcaaatccgggggcgaatccggtaaaagcaacggtgtactcgctttcggtatgccgctgaataacttcctgtgtggtgatactgaggatttctgccacttcttccagatcttcaccagtgtaatacaccgggatttcaacgagtttcccggttgtcctatccagtgtattcaggttgcggccgttgatatttccggcaagtttgacggtggaaaccacattgggacgaaatcgaatcaacagtgttctggccgctggaataatttcttctacgcctggaatgggatgagcgttaagtgaatcaaataacgccagcgtttcattcagatcatgaagctcgacaataatggcatctaaattaacaggtaaaaaacgcactaggcacccctgggtatttaaataaaggagcgtacggtgatcccagcttgttgcagggttagtttcacctgacgtgccatttccaccgcgtctgggctgtcaccatgaacacagatggaatctgcctgaatacgggtaaagctaccatcaatggcttcaactcctccttcggtcaccaattgcaacatgcgtcgggcaacgagattagcgtcatgaagcacagaccctttttcccggcgggaaactagcgtgccttgtggagtgtaagctctgtcagcaaaggcttccgcaacggtacgtaaaccgttttcctgcgctaaatccaatagttttgagccagctaatccaaccagcactaaattgtcatccacttcacgaatcgcggtaataacggcaagggcttggtattcattgtgggcaatggtgttatacagtgcaccgtgcggtttaacataacttacggtggttcctgccgccacggccaaccctttcaacgcgccaatctggtaaataacatccgcgatcagctcattactggaaacatccatattacggcgaccaaatccgaccagatctggataagagacatgagcaccgatcactacctgatttttgtgggcagattttaaggtttgaaagatcccggcgggatcaccagcatgaaatccacacgcgacattggcgctggtgacaatgctcagcatggtattatcgtcacccattttccattgaccaaagccttcgccaagatcgctgtttaaatcaatcatgttcatagtcgtaaccccaatcaaagtgatctctaaaaaagtagtaaaaaattcaggatgcttatcagctctacagataggcaatttctgttacgccggtagacgttgaactaatgagtcattcctccgctaatagcaatgtccccactgttttctaatgcttgattaatagcgattttcagtgccattgttattgtttccagcgccatacttggcgtaccggggtgttttaccgcctgttcaggcaggtagggaatatggataaatccaccacgtactaatccaccacgtactttgggataagtcagtgccagatggtgcagcaggccatacatgacatggttgcagatatatgtgccggcactctgtgaaatcgaagcaggaacccctgcggtttgcaggccactgacgatcgctttgatcggtagggtggaaaagtaggccgccgggcctgttgctacgattggggtatcaatgggttgattgccctgattatcgggaatacgtgcgtcgttgatgttaatcgctatgcgttccaccgtgatatctggcctgcctcctgcttgtcccacggcaatgacgagttcaggttgtatctcatcaatagctgcgtacaggcaggtgagagaagtattgaatacacatgggagctggcgtgtctcaatatgtgctccagatagctgttggttttgcaattgcctgaccgactcccacgatggattgatggcttcaccgtcaaaaggttcaaaagcggtaatcagaacggttttcataggatatccttacaaaaacatcaaaaaatagagcagaaaaacattggcaatcaacagcgctattcccgtggggatttgtgctttaatgaccgcattgcgatttggtaattccaacagagcggctggaacgatattgaagtttgcggccattggggtcatcaatgtaccgcaatagcccgagaacataccgatggcggccatgaccgctggattaccgccatgttgcagtactagaatgggaatgccgatcccggcggtaacaatcgggaacgcagcgaaagcgttgcccattatcatcgtcaataacgccataccgagtatgtatgtcgctaccgcgatcaatcgattatccaccgctaaataatgttcagtcaggtgagaaattgcggtaccgacacctgctacggtaaataatagtcctagcgtcgctaatatctgtggcaggataaacgcccaaccgatggaatccagtaagcggcgcgcctcttgggttgattgagttacattttcacgtgtcattttcagtgcaacgccatatccgactaagcagcctactgtcatggaaaacagcgttaccaaggtggcatggttgccgctaccgaacagcgcctgttgtaactcagggatgtggttaaacagtaatacgccgatcaccgtgacgatagggattgccagtgcgggaagaaagaggcgattacccaaacgggaggcactttcctgccgttgctgaggtgtgcgttgatggtagctacccaatcgcacaccgccaaaaccagccgtcagtgccatcaatacgacgattagcccgacaccgatatgtagcatcttttgggcctcggcttcgctgtctgcccatagtgctattaagcggtaagtccagtcgcctactaaaaatacgatgccatatagcgcccagaacaagctggtggtcaggcggcgggggttggtgtgatcacgccaagacattgtggctacggccaacagaatcacgcctgccagccaataaagatattgttgctgaaacattactccaccttactgcgatttttgtccatgccattcagtgctgccagcttggtagcgatctggtggtcaagacgagacaagcggaaagcgtggattaggaaggcacagatggcggtaggaattccccacatagcgatatgtagcggttccgtttggataccgccagactctagcataaagttatgcataaagatgattgcaccaaaggcgacgaaaatatcctcaccgaagaaaaggccaacattgtcggttgctgctgacatggcccgcaggcgataacgtatatcgtcaggtaggtcatgatgacggttttccgtagccccttctaccattggtgccagcaatggacgcaccatttgcgggtgccctcctaaactggtcagccctagcgcagcggttatttcacgaatgaacagatagatgatcagcaaacgtccggcggttgctgttttaatattgctaatccaggtttgagctcgttcttttaagccgtgccgttctaaaagaccgatagttgccagcggcaacagcaaaattagtggcaaatttcgggtattaaggaagccggaacctagtttttccagaatcgctgtgatcggcatatgagcggccagcccggtaatgatccctgcgacaatcactaccaataccgggttaaacctaagtaaaaaacccacgacaataaccgcgatgccaatcaacggccatagattcacaatctgttgcatggtgtgtcacctcggtggataaaaatcgcggttgcttgctgtgtcgtcataggttgaattcctgtgtggtagatagtagataaatgtatacccgttatctttcaagttgcttctttgttggctgcactcactcaccccggtcacatagttatctatgctcccggggattcgctcccttgccgccgcgatgcatcttgaaatccatagggtatatatctaagcaatatgcgtaccatcgttggataatttgcatttattgttaaattattgtttttttattgttgaacaataaatagagtgaggcgaaagaataggcaaataaaattattttttaatgataaaaatgaaatgcagatcactttttataatagtgatgttctatggtggtgcgtttaatgcaccattatgaggcaataatcattctggcgtagaaaacagtcagtggggaggaatctctatgcttgctggcagtaggtgaatgtgtgaagatgcctgccattcttatctttagcagccgggagcttgtggccaggtttgcgacatttggtccgctctttcaattaattatgatgaaaaaaaataattcctctcctaagacgttaagtgaaaaagttacagatattatccggcagaaattgattattggggagctatcacccggtcaacgactatcagaagcggctttgagcgaacaacttgaaatatcgcgtaatacattacgtgaggtttttcgggtactgactcaggaagggttactgcgatatgaacctaaccgtggtgttttcgtcgccactccgagtatcgcttctattatcgatatttatcgaatccggcggcttattgagtgtcaggcattggcgcaatcttatcctatgcatcctgcggttgaacacatgcgcggtgcaatcgaaatggctaaacggtgtcgtgatactcaggactggatcggtgtaggaactgcaaatatggcatttcattcagctattgttgaactgactgacagtgaacggctgataacattctatgggcatatttctgcggaattgcggctggcttttggttatctgaacgatcctgaacttttttatgttccttatattgatcagaatgcccatattttggcgttacttgagaaaggtgaaccagaaagtgcggcctccgagttaaaaagctatctggagcagtcagaacgtacggtattagcggcttatacgcgcaaaaatcgtacttaataaataatacttgcgaccagattggcaaatttcttgataaaataaattaatttaattaatgtgttcgaagatttttcatatttttggtttgtaacgttatatttgtttggcgtaatcccaaacaaaggcggtagcgtctatgccattaaggaagcgaatgataagagaagctatatatgccttttgtgccatgataattgagcgttttaatcctcccaatgacaagatcactttgttattaaaatatcattcatcgtatttttgcggtaagtcatattagtaacacgagttacaggaaaacgtgacttatagtccgtggtttgataagtaacatcgttcgatacttatcgaatgaaaaaacctaacacgataaaatccatttttggacaaagagttagatatatcagaatggcatctggtatgtctcaggaagcttttgccgataaatgtgggcttgatcgtacttatatcagtggcattgaacgtggcgtcaggaaccccacgcttgaagttatcaatgtcatagcaagtggtttacagattgaattaaaagatctgtttgactttgacgcggagaaaaagagttagtgatctataccttatggatttcaagatgcatcgcgacggcaagggaacgaatccccgggagcatagataactctgtgactgggggaagtgagtgcagccaacaaagaggcaacttgaaagatgacgggtatacctgtttttcaggcagatcttctctgtgcctgctcctgtagactcaaaacggataacctgcatttgagtagcaggttatccttcatctgccacaataggacatttagcctttccagcgggaattgcggattacgttacagtaattgaggggaacaagtcccggctgtttatcctgtatgacatccacattgaagccaccaaacattgtctgggacttgtccttgatgccatcataaaaagcctgaatgatatcttccttgaagccgtcagtacgtgggtgatgctgtacaaccgcagtgcgctcactgtcgctgaacgcttcgtaattgatccccaacacatccatttcaacgccagcagtaacgagcgcaatttcgggtaccataaactctggaatgcccggcgtggtatgtaaagcaatcgccgtccagactttatcaatatcggcctgagcgataccgtatccttgcaggaaatgtttcgccgcattcgcgccgtcaacctcgaatcgtttgtcacagctacagtgttcatgtgtcaggccgatgtcatgaaacatacatccgacatagagcagttcatgatccacgttaagcccaagacgctgaccggcgagcgcaccccagtagtaaacacgacttgaatgatgaaaaagcaggtcagattccgtatcgcggatgaacgtggttgcatcacgggttatttgggtatcaggaatactcacgccgttaattgaaaaattcatatgctgtctccggttgattaagtgaaggtcagcataaaacacatgacacccgtcctgaattaacttataacgatgattcaggacactaagattaaataagacttctgtagagcaatgattcacaacatcaccatattggctgtgcctgacgttcagctactcgatgtttcaggccccctagatgtattcgctgaggcgaaccgtatattgcaccggcaggtctattccctgagcgtgatgtcgaccggttcagacatcatcacttcttcttctggcgttaggctgatggctgatgtgattttgagcgatacaaccagccactcggcagacacatttcttgtggctggtgcgccggatgcgcatagccataccctttcagaacaggagtgttctgcaatcatcgaaatgtgtcatcgtagtcagcgttacggctccgtctgtactggtgccctgttgttggcgcagaccggactgttgaagcagcgtcgggtgacaacccattgggagtgtgccgaattgctcgcgatgcgttttcccgaaatcattgtcgaaccggacatgctctatgtggctgatggttccgtgagaacggcggcaggtgtgacatccgggctggatctggcgctcaggctggttgaagaggatctgggtcgcgaaatcgcgatggaggtggcagcaagtctcgtcatgtttttcaggcgaccggtctgtcaggggcactttatccgcaggagccagttatccctatccgggagagccgcttttcaggatttacaacgctgggcgcaggcaaacctacagggcataagtggcttgcaggacatggctacacatatgaacctgagtatcaggcatctgggacgtctgttccgtcaggagctcaacatgaaggcaggagtatggctggagcatgcacgtattgagaaagcgcggacgttacttgaggaaggcaggctcccgctcaaggcaatcccgggagcttgcggatacagaagcagcgatgtaatgcgcagggcctttgttaaaaatacgggcatcaccccctctgtttacagaaaaatattcatacagacgcagcagagcggcacaaatgaagaaaactgagagccagacgtgggaaatagatgacgactcaccttgcttgaaaaatgatgcgcttcaactaaaggaatagccatacgcctttctggtgtttcaatgatgtcacgttgtacatcaacaaacatactgtatttgctttcgctccgtttgtattgataaacaacaaattgcatttaccagttcctgttttcatcagcaaatgagccatattgttcaataaattgagcaatttcttccaatcctttgcgattatctgctttccaactttcagctttgattcgttgagcttctctggtcatggctttattaacaaaacctgaaatatttacaccggctgaattcaggatcagataattttctttatcaaaagttacgttaactctatgtttcatagcacacctcagaaacacacttaaaatgaacatgaggaaatggattgcgagcaggaaaagataaatgcaaacagctataagtaatcattactcttaccgaatgatataaagtagattggagcagcttatctcattgataaactactccactttaatttacagccacctactttgtgtacctcgaaggccatatttcagcgggatcgcgatccaaagccgtggcaataagccgttgaccttttggccagcggcgttgcagggtattggcaagggtcgatgatgctaatcctgctttccttgaaacggcggctagcgatgtgccacgttttttcagctcagctatgatgtctgctgggtgccagtcttgatttttcattaattaatcctccgtgttacggataactttgatatgaaaaggtaagtcgttacatagtagactataagtcacatatgataacataacttaccataaaaagtgactcatagtccgtggtctgataagtaacatcattcgatacttatcagatgaaaaagccaaatgctgtaaaattcctttttggacaaagagttaggtatttcaggcagtcgtctggcatgtctcaggaagcttttgccgataaatgtggaattgatcggacgtatatcagtggtattgagcgtggggttagaaatcctacgcttgaaatcatcaatattattgcgagtggtttgcagattgagctgacagatttgtttgatttcagtgcaaaaccaaaaggctaaaatagtcgctttcccctttatttcttagaaattttcttatctttttgttggaatgaattactgtgctagccttgataaaggttgagaaaatgggttggtggtaactgataagtacgattaaggaaatgtcattgtgagtgaattgtataaaggcatgagtcaggaagcgtttgagaatggttatttttacgtaactgaacttcggcagtttgctaaatctttaggaattgcaacaagtcacttaaaaaagaatgagcttgagttacatattcggtcgtgcttgtttggttattctggtgatttgcctattgctattcctaacaaaagagatcgtgttggtcgggatttactcgccttggaaagtttggtaataaattatgtgagtgacaagcaaacgaaaaatttcttattagaacaggtgaaccgccaatatgggccattagcggataaatctggccaatggtattggttaaattattggcgtaaggcgcaaattgctaataataacaaaattacctatggcgatttggttgagcacttggcttctctgaaacagcaggaaggaaggcttccacagatcccttccgcccgtttaaataattttattagtgacttcattgctgatccggaaaataaagataaagggaaaaaacaggcactggaaatatggcaggcgttgaaagaaaaaaatttacctaaaacgtatcttgcttataaacagaataaataccaaattgaaaaataagtttattgaggaagaacctataccctatggatttcaagatgcatcgcggcggcaagggagcgaatccccgggagcatagataactatgtgaccggggtgagagagtgcagccaacaaagaagcaacttgaaagatgacgggtatatatctccctcaataaatggctttattaaatagttataattttctgggtgttatctcgttcaatttttattgtcaatttacccgatggtgtttctgacaactgattacgaagataggtgatatccttaggaagggcttgttgaccattaacttccagtacaatatcaccgttctttaatccaaatttttcgatatctttgggatcgttgtaaaatatctctactttgttattaaaataacggattgcaattgtgcgaagtaatggactgtcataacgggtgaaatttttagcgttaaaacagagcagcattttatttgggataaacagataattatcaaaacgtgagaagaaactcataccgagattgtagagaccacttttattttcgccaattctcagacgacctaccggcagttgctgtaaataaaagccatcaatcagatactctttactactatcaagcccactagcggacgcgtatttgacactggttccttcagaaattttatctttgtgctcttttttcagatattcaataaattcctgagcaacatagctgtaatcggccccggtatctatattaaaaacgacattagaaacttggattgcgggagatttgccgtagctatcactgtaaggttcacattgttgataatttaggattgaaggtgcatgtcgccatactgtcaatgtgtggttcaggttatttatttcccagtttagctgacgaaaagtatcaatgccgagaataccatccagctcctgaccaatggactgattaaagagactcatgtcaatgccaatccagggatcggagctcggcactgtatgattaccgagggtaatcgccagaggttgccataatgttaggtcagctttgtgtaagcgtttttcactggttgtaaccagtccatcggacaacatacggtggaatgtaaccggtatttttgattctggtgtggtttgtgtcagcgtttttgccagcttattatcgatgaaggtataactggcaccggtatccagcaagaattgatattttttaccggagatagtgacaggaacaataatcgatgttggctgatggatgttcagcttagtagaaaggacaggtttatttttttctggcatatggattttttccatatggctacagcccgttatcagcgtcagcatgctggcggcgataattgcccgggaggttgttttttcctgttttttcataatattagattccttttctaggagtggaagataaaaatccagggtccggtaaaaccccacattattatctgctttttactatatccaatggatttcaagaacaataacatcattacattagttaatgtgaaatgtagtgagtaattgtttaactgcggttgaactattattggtttcaggggtaatattggtgaaagtttcgtctgtcggtaagtttgagtggtaaaaattattattattttatttttaggtataatgtaaaggtaataaatatttattggttttatatttatatgtggaaattattttcctgataactatttagatgatgtcaatataaaaaagtaacacttttgggctaaaggaatatattgattttatgtctatatcactaaaactcagtattgtcgtatctatttataatggaatgcggtttttaccgcagttttttgttaatttatctcggcaaaagctagctaattttgaattaattttggttgatgatggttcaacggataatagtcgccagattattgagcaatatgccaaaaaattcccaaagatagaaattatcgcgcagaagaatcaaggggtttctgttgcccgtaatacggggttagtgaaagccagaggtgattatgtggcttttcctgatattgatgatgtcatttatccgggtatgtataaccggctgttagagattgctcagaataatgatttggatattgctacttgcaacggtcattatgtttatgatgatggtcggcctgctcgaaagatttttccttccgatcgcctctcttctaccgcggttctgagcggaccagaatggttgcaacaagcactgagttcacgcaaattcttgcatgtaacttggctgaatatctataaacgggcttttctgacaaaacatcattatcagtttgaaccggggttgcatcatcaggatattccgtggacaacagaactcttgttgacggcaaatcgggtgcaatatattgatgaatctttttatgattatctgattcacgccgcttcggtgtcccatgttcctgcggatgatcgtattaaggtaagaacagcacatcactatatgaaaatcttggagatgctgaataagattaatcagcgctatccacagcaagtcaagcaggtgccggcatgtcattggcaaattgcgaaagaggggctagggattttgcataccattaatgagatagaatcctctacgataaaacaacaaatcgttcatgaattgtttgagcgcggtatttggtcaatgatctggaaaaatgcccgtggatttagattgcgttggcgtttggctcgtcgttatccgcgacttcgagcggtgttaaaagccgtttaagagtgaaaataacggctttaataatcgttccctacctgtggttattttccatcttaatcgcaggtatcgccgatgtttttcaatgcatcaataatcaattgccagaatcgctgttgatcgagtttgacagcaacttgggtatggcaatcttctgttggcgggtaacggaaatccgccactgtcattcctacggttaaggtaccgttcagttcaatattgacggggactttttgcgttgtcatcactgtaggatcaataacataggcgacggcacaaggatcatgtattggcgggcagttgaaaccatgtctctcttgataacgttgaccatagtaatccagtagttctacgacaaaccgagacactttggtattgatacgtgaaattgctttggtgatttctggtgtggcgcgagcttgatgtgtcagatcaagaccgaccatggtcagcggccatttttcattgaaaacaatatgtgcggcttccggatcggttttgatattgaattctgccactgcacttctgttgccggtgtgatatccaccccccattaataccacttcttttacccgctcaacgatctgcggtgctttacggacggcgagagcaatattggttaagctgccaacggggactaaagtcaccgttttgggcgggtgagacatgatggtatcaatgatcagatccgttgcgtggcggggatcaagtgttcgggagtgtttaggcaacttcacgccacccagaccagattcgccgtgaatatccgatgccgtttcgatatcgcgaacgagtggccgatgacagcctgaggcaaagggcacgccggtaataccggcaatatgcgctatcgccagcgcattgcgagtgactttatccagtgtctgattcccgacaaccgtcgtgacggctaatagctcaatattagggttgccatgcgccaataacatcgcaatggcatcatcatgtcccggatcgcaatcaagaataatttttttggtggtcatttttactccttgctagagaaagtgatataaaaaatgagcataatccagttaaaacgtctattccgtgacaaaatcttagatctgggtgagtgctctcataaataattagtaaaatgtttcataattgtgatttgattaacacataaacgatagttgagttgtggagctagttttagtgtgatttttatataggttcgctatggaattggcgggctatatctgcttcggatttattattaatttgtgaataattgcgagggcttgaatggatattcatgtagatagattatcaacagtgattgagtcggtggcaaccagtgaattttatcctaatttactgacttggttggagcaatttattacttttgataacgccattgtctatgccttcgagcaaggttctcctccgcgttgtttgagcaaaactgagaagaaaaacagcgatgcaataaatcagatttatcaacagggtgcttatctgcaagatccattctatcaagccttgatagatggggctggcactgatctatttaccttacgggaacttgtcccttcagggttttatcatactgattattatctgaatttttatcgtaagaccggttggcaggatgaaacgggggtgttattgaagctctccccccagaggcagcttggcctgttttttggtaaggaaaatcagccatttttcatccagaaaccacattggaaaaacctgaaaactgtactggaaattatccgcagtgtggcgcgattacatgatgatatgactcagcaaccacctgctgctgagatggtttgtctggatactcagactcgttatgccttgactccgagagaatgtgagattgtggagttgatattgcaaggtaaaggttcaccacagattgccgagaaactttttatcagtacggggacggtgaaaaaccatcggaaaaatatttatcaaaagttacaaatcagatcacaagcagaactttttagcctgtttatgatgcctcctgtccgttattttgcctaagtcacaaatgctaaaactgtgttgcaaatatccctaaggggacatggcgatgtgactctgcgctacagataatcgggtgattatgttggatgctaatcgggctataccctatggatttcaagatgtatcgagacgacaagggagcgaatctccgggagcatagcgaatgatgtgaccggggtgagagagtgcagccaacaaagaggcaacttgaaagataacgggctatcacatgaacaatcatcttgattcattaacttattacgctgcgaccaagaaatatgatcttcgttttcccgcattacaagaagatctggatgtagacgtcgtgattatcggcggtggattttccggtatcaatactgcccttgaactggcggaaaaaggtatcactaatattgcgatcttggaaagccgtcatcttggctatggcagtacaggtcgtaatggtggtcaggttatggcgggtatcggtcatgatctggaggtgatcaaacgccatattggtgagcgagggttagaaacgatctttcagatcagcaatctgggtgctggcatcattcgtgatcgtatcgctaaatataatattgatgcggatctctgccgtggttatggctatcttggcatgaataagaggcaggaaaagacgttacgtagctggttgcaagattttaaggcggtttctcctgatgaagagattgagctttacaccggcgctgatgtgaaaaaggtgattggttctgatgcttatacttgcgtgttgaagcatatggggggagggcatgttcattccctaaacctgttgttaggagaggcaaaggctgcgacagatttgggcgtaaagctctttgagaacagccaggtactgaatattgaatatggtcctagagtaacggttcgtaccgcgatgggatcggttcgtgctaataaaatgctgtgggcctgtaacgcctttcttaatagtggtcttgagccatatatttataaaaaggtggttaacacttatgccttccaattaatgacggaagtgttgccggacgatttgattgagaaaatcagcccgattcgcggtgcatacagtgatattcgtccggttattgattacttccgtgtgacgaaagaaaaccgtctcttgttcggtagtgcaacccctttcattgagcatatcccatctgatttgaaagcctggaaccgccacttgatgctgaaagttttcccttatttgaaagatgtgaaagttgaactggcatggggagggccgttgtgttgcagtgcaaacttgttcccacagattggctctttgccgcagcacaataatgtgttctatgtgcagggatattccggttttggggtcactccaagccatatcgtttgtaaagtgttggctgaagggatgagtgaaggatctgaacgttatgacctgatgagttcaattcctcatgcgaatattattggcaaagataagttgcgacatctgatggtatcagcgggcaaaatttggcatcaaacgtcagggtattggaaaggtcgccgttaatttattgatatcaatagtattcattgggaaattcataaattattttatttggagcgagaacattatgattaaatcacttttactgaacaaatccctgcctgaattattggacattggtagcgtaagcaatctgggagcgactgtgttggaaggcgatccgcaggccagtatggcactgatatttggtgaaccaacggataacctgacatgtggtattttcgcttgtactcatggcaagttcagtatggtgtatccgtttgatgagcacgcaaccgtgacagaaggctcggtaaaattgaccgacgtgaagagcggtgaaaccgttgaatatcatccgggagattcctggtttgcgccgaaaggaacggaagtactgtgggaaatcaccgctgaccgttttgtgaagcattatctggcttgtaataaaggttaaaaaacacttatacccaatggatttcaagatggatcgcgacggcaagggagcgaatccccgggagcatagataacgatgtgaccggggtgagtgagtgcggccaacaaagaggcaacttgaaagataacgggtatattttatagaggtaaataatgagtgatataaacttattacagccagtgatggcctttttgcaacacaatcatgggcattatattaatggtcagccagtcagtggtcaggggagtgaaacattttctgtcataaatcctgcgactgatgaaatcattgcaactgttaatcaaggcggtaaagcggaagttaatgctgctatgcaagcggcacaggcggcatttcatggggtatgggcccaaacttcaccgatggagcgcggtcattgcctgaatcgtctggcagatctattactggcacatcgggaagagttggcgcagttagaaaccctttgctccggtaaaaccatccagttatcccgtatgctggaaattgattcttctgctcaattcctgcgttattttgccggatggtcaagtaagatcagtggcgaaaccttgaatgtctctttgccctcttttaagggtgaacaatacacggcgtttacccgtcgcgagccgattggtgttgtggtagggattattccgtggaatttctccatcatgattgccatctggaaaatggcggctgcactgacttgcggctgtaccattgtgttgaaacccagtgaatacaccccgttgaccatgctcagagtggctgaattagccaaacaagcgggtattcctgatggtgtcattaatgtgattaatggttccggttcggtgcttgggcctgcactgataggtcatccgttatgcgccaaggtgactttcaccggatcggtgccaacgggtattgctgttggtaaatcagcaatggaacagggattgactcgcgccacgttggaattgggtggcaagaacggtgcggcgtttttagcggacatgtctgttgaaaaaattgtcgatggtattctggaagccggttatctcaatcaagggcagatttgtgcggcagcggaacgtttctatattcccgcaagccatatggatgatgtgctgaaattgttgtctgaaagactcgcggcaatgaaaattggctcgcctctggatgactcaacagaaatgggtccgttggcaaacaaagcacactatgacaagatcttgtccctgtttgagcaagcgcgtcaagaaggcagtgagattgtttacggtggtcatgctctggccggaccgggtttctttgtggcaccaaccgtgattcgtgctaacagccctgaagattcattgatgaaggaagagacatttggtcctgttgggactttcctcagctataacgatgaggaagagctgattggcttgatgaatagcactccgtttggtttagcggcgagtttgtggaccaatgatctcagcaaagccatgcgcatgatcccacgtatcgaagcaggaactgtttgggttaatatgcatacattcctcgatccggcattaccatttggtggtaccaaatcctcaggtataggtcgtgaattcggtagcgcctttattgagcactatactgaattgaaatccgtgatggttcgctattgatttgatattcggatcaaaataagcaaggccccttgattgaaaggggccattgtcaaacctaaggtcatcactggcattgattcaacctttgtgattaataacgtaacgagtgctacgaccaccggccccggtgctttctaaacaatttagctcaaccaaatgtgccaagtgtctggttgcagtggcgcgacttaccttcgccaccttttgatattggctgctgctaatgccttgctcaaaatggccgtccagcatacggtttagcaccttagtttgctctgcggtaagttgagtctggtctattcgctgccaaaacttagctttttgcacaacctgattaatttcttgcagtttgtttattaaggtctcattcaatattttcagaaaccaaaccaaccaatcagtaatatccaagccgccacgttgagtattttcaaggagttcgtaatacgccttacgatgatgacaaatacttaccgacattgcatagaaacggattgagcggttttcggcttgagcaagtgcaaggtctgttagaaatcgagtaatgcgcccgtttccgtcttctaaagggtgaattgttacaaaccataaatgaacaattgctgctctgatgatgggatcgagactggcatctgttcgggattggttgaaccactctataaattggggcatttcgtcgaccattctttctggcggtggcgcttcaaggtgaacggttggcttatctaaacgaccggatatcacttctatcatccctttgcgtaatttacctccttgtatcggattgaacatggtataaccttcagggaatatcaactgatgccatctgaggatacgctcaagggttaaatcggagtggctattttctatcacatcaagggcaacctctgtaatgccgtcactcttctctatgattggataaggtttttcttccgtaatgcctagtctgtttgccaatgatgaacgtatcgaagccgcattcaatctttcgccttcaatttcacttgaatagagtatgctagatagaaggctatcaagcgttgcctgcttggtgtcttcataatcagatttgcctaataacaatccttggttgaagtgcacatctcgcagtaatggtgcaatagtatcggcattccaatggaatttcggccagttcggttgttcccatatccacattggctttgcttcacctgtgagtcaaataaggcttttattctactcatcaaatgaggcaaatagcaatgtcatttgactcattctgagcttttcgcctggtattttgtcaacatgaggtgaaatcaccaatatcgggaaataattaagtctcttgcctgtcaaaatattgccgaaatgatgcctctaaattatactaatagttattaatagatattaaaaacagtggaggcatgactatgccgacaagtgtagcactaagcccttattttgaagcatttatccgcaatcagattgatagcggccgttataacaatacaagcgaagtcattcgcgccggtcttcgtgcgttagaagagcgagagcagcaagtaaaagttgaatcactcaaaagcgctataatggctggcatccaaagcggtgaaagtcgagatgcgggagatgtttttgaccgccttacgcaaaaatacaagaacatggccgaaggtagtcagggtaaatgaaactgagtatttcgcctctggcagaacacgaccttgaagaaatcggcgattggattgcacaagataatcctgtaagagcgctcagctttaccaaagagttataccagcaatgcttgttattagcggaagcacccgcaatttatagggaaagacctgagctcgggaaaggggtcagaagcagcgcttatggtcgctatgtcgttttctttcagattattgatgatacagaagtccgtatataccctatggatttcaagatgcctcttgaaatccatagggtataatttgttttatagttattgatatgttaaaaagattgatagatttttattcgtaaattagcttgttgattaataggaattaacgactctggtgcttccaataaggatatttcatttatacgagaatacttaatcatggtggttttaactaataatactatggtgatgacggaggtaaaaatagatggataatcatctccgttgtcggtttagtgaaggcagcattaccctaccagaaggttatcaagagcaaaccgtcaacatcattacagcccctaatgcccctgcattgaacatttcccgtgatagtttggatgaaggtgaaagcctgaccgactacttggttcgtcaaaaagagttactaaaaaaaggattgcgagattggcaattacttgacgaacagcctgcggttcttggtgacaacctgttatccggcaccgcgctgttttcccgttatcgtcccaaaaaagagcaacaagtttatcaatatcaggcggtgtttctattagatgaccgtaaggcgctgattttcactctgtcggcacatcaggccctatctgagtcagagcgccaatggctggatggttgtctgaagagttttcaattaccacactgatttttttgataaggggatatcgccatgccagaagcggcacggttgggtgatacaataggccattctggcgctttagctggattgattggtgggacgattttaggagcagctatctctgcaattggcggtattgtaggtggagcgctgtttgctgcgggtattgcgtcctcctgcttgggggtaggtattctacttattggcctgtctgttgcggttgggatgttggcaagccatctgggggaaatggcccgagataactgtaccaaatcgggggcagcgtcgcgaagtccctgtggaacaattacccgtggttcctctaatgtatttatcaatggcaaaccggcggctatcgcaacctatagtcaggttgggtgtgacaaggatggcacgcgccagatggctgaaggctccagttctgtttttgttaatggttacccattagcacgggtcggggataagactacgtgtgatgcggtagtcatgaccggttctccgaatgtttttatcggcggcggcacgaagcctaccgaagcggtgacgccagaagtgccgcattgggcgtatcaggtgtctgacctcacgatattggcggctgggcttattagttttggcggggcagcggctaacggccccagtgctgtaaagaaattgtttagtaaaatccctggcgcggggaaaattggcaggatactgtgccgcctgagtccgttggctattggtgcgtcagtagtgggtatcctgatgaatccagtagaagtggtagccggacagaaatttcttaatgacgacgacgaactggactttatcattgaaggagaattgccgctgtattggcagcgttcgtacctgagtagttatgactatgacagtgtgttagggcgtagctggagcctgtcttgggaaagcacgcttacgtctattgaagagggaatattatggcgttcaccactgggtgaaattatcccttttcctgatgtgcccatcggctatcgctgtttctgcccggaagcacaaagctggctgatgcataccccagaagacacttgggaaattcgtgatgccagtgaacatatttatcattatcctgaatttggagctgatagtaccagccggctgagccgtattagtgataacgtcggtaatgaacaggtattccattacaacgaattgcagcagatggtgaatattactggcagtggtaaattaaacctgcattgtgactatcttctcattgaacttggcggcaaatccgtttcccgcctgaccaccgtctggcaggtattgtataacggcagccgtgtactgctctgtcgctatcactacaatgaacatgctcaactggtgggtgtcagccatcgggatgaccatcttaagcgccagtttggctggcatgaagggggattactggcatggcatcaggatgcacgtgggttacgctgtgactaccaatgggagcaaacggaagaagcgctgtggcgggtgatttcacagcagaccagcgagggagcgggttaccgtctgcattatgatgaggaacaccgtgttcgtactgcgcaatggtatgacggtacaacgacggtctggacactcaacgaagagcatcagattattcactgtatggaccgtgcgggcgtggagcaccatctgttatgggatgaatttggcttaccgacaggctatcgagatgccgatggtaacacgcgacggtgtgagtgggatactctgggacgacggttgagttttactgacggcaatggtcatcagacgggctggcagtatcaaaatgacactgatcgggtgacgtttattttgtggccggatggctgccagagtgtttttgagtatgatgaccgtggtcgattagtgagtgaaaccacgccactgaaacagactacccgttactgttatggtcacaatcagaccttgcgtccttacctgcgtatcgatgcccggggcggagagagccgttttatgtggaacgatcaggggcagcttattcggcgaaccgactgttcgggccaggccagtgagtggggttatgatatgcaataccgtgtcagtcgctttaccaatgccttgctggaaacgaccagctatcattatcacgatgatggacaactaacacaggttacctatcctgatgattctactgaacgaatgacttgggatagcgccggtcaactgttgagttaccagcgtaacgaaaacgaagcccgttactgggaatataatgtattggggcaggtggtttgtactaccgaccgtttacagcggcaaatccgttatcattacactcccgaaggatatttggtcaaaattgacaatgccaatggtgacagttacatcctgacccgtgatgctgaaggttggttaacggaagaaattcggccggatgaaaccctgatttattatgaatacaacgccgctggattactcagtaccgaaagacgcatgggtgatagagtgtttaagtacccggagcgtcgggtacaccaccgttatgatggcgctggaaatcttattcagcgggaaacgtatactgataactatcaatatcaatgggacagcttggggcggctgcgacaggcagagcgccagcccaatgaagttggaaaaaaactggatattctgccgaatacggtgtgttttgaatacgatgctttggggcgggtaacccgggaacaaaatggtgaaaatatcctccagtttggttatgacgaattagataacctgacggaactgaccttaccgcagggagagacgttgcactggctctattatggttccggtcatctcagcgctgttcgttacaaccagcaactgataacggaatttgaacgtgatgccttgcaccgggaaacctgtcgcacacagggggccttattccagtatcgccgctatgatccgttgagtcgttgtatcagccagtacagtgtgccgcaggctaacgttcagacggatataaaaccggaaatctggcagggtaaaccctggcgggcgtggcattatgacattcaggatgagctgttcctaagggaagatcattacttggggagggtgaattactcctatgatttagaaggccgtttgaaaagcgtagatagcacggatagttatcaggaaatgttctggtatgacggggcggataatctgcttgaacacccgcaatcacagagagagaggcagccggtagggagccttactcccccgggagacagattaagtcaatggaacaactggcagtacgagcatgatgaacatggcaacgtgattagccgtaaaaatatgcaggggcagcgttaccggtacgatggcgacaaccgactgacgacagtggaagagctgagtatgaaggttgtctatcactatgatgcgcttggacgccgtatcagtaaggtggtgaaaaccgggattggtggacaggcacgttatgaacaaacggattttgtctggcatggtttgaggttgttgcaggatcatgagttaaaaaccggtaagaggcaaacctactgttatgaatctcatgacagctacaccccgctggcgtgtattgaatcaagagggaccgtgcgtgagtatttttggtatcacaccgatattaatggcgcgccactggaagtcacgaatgaggcgggaaaaatcgtgtggtcggggaaatacgatgccttgggtaaaattagtggtctggcgctggcctattttgtcgatactgatcgttcattccatgatttcaagcaaaacctgcgttatgcagggcaatattttgacaaagagacggggctgcattttaatacgtatcggtattacgccccagagattggccggtttatcacacctgaccccattggattagcaggtggattaaacttatatacttacgcgcctaacccaatgagttggatcgatccgtgggggttatacaagggtgagggacaacggggtttagggaagtaccatgtcttccatgaacacaccctgaattcatcggaatatcaattatctgatggtcagcactttaaacggggcaaccaatctgtgtacgaaagaatgcagcgcgatccggcattcagacgtgaaatgcagactaaatatccgggagtggtggaacatgttcagccaaattctaaagggaactttagagggacttcaccaaagaatatgacttggcatcatgagaatcagccagggaaattaagtctggttgaccgatatgaccataagtcctatcacaagatttatcatcctgatgggtcaggtggtagagataaatggggaggtgggaataaatgccgcaagtaatggagttattatatgaaaacaattagtggtttcgatcagttacttagtctttataaacaactgcctgatgttggttggatttatattgataaagattttgatacagaatctacccaagatattttaaataaaaattattatctggctgaaaatgatgatgaagagtttgatatggatgaaactcatggaacatttctagaatgccccatgtttgcagatattatcgataacaaactggaacacaatcctaatgcgattaaagaagatttaattgaagcagtgatacattatcttgtatacgatgattttctagattaagccgcaaaccggaagatctttatgatcttccggccttattcatgatttaccgaggtgcatagccacggcaagccggcgctaactgaagtttagatatggggctgcattttaatacgtatcggtattatgcgccggagattggccggtttatcacacccgatccgatcgggctaaaaggcggactgaacttatatcagtatgcgccgaatccggtgacttggattgatcctttaggttgggcgggcaatcctaaaacggcaacgcatatcacttatcagggtattgatgctgaaactggcaaaccgtatgtgggctatgccagtaagcaggggcgacaggcagcccaagagatattgaaatatcgatatggtaacggttttggtcgctttggtggtaaaccacctgaagttatctatgaaggttattctcaagcaggtaaagatactgctcgtggattagaacaacggcgatttgaaaatctgggtggtcttgagggtacagctaataaacaaaatccagtgggaccaaacaatacccgccggactgattatctggctgcggcggacgaacatctagggcaaacaactaaacgcaacggcaaaggaggcagccgttgctgacggctgttttgatcaatggtgaaacgaattgtctggaagcataaccatctggttaatattaaactgagggataatctgtataccattggacagatgcttaatagtgtagaaatgcagttttatgatatctgtaatacagatggagtctggaaaaatattgatttaaatcaagtgcctactttatttcggattttagttgtcaatgctgtttataaattgatgccagataaaattaaggataaatcagttattcctaatactcaatcctataataattactggataaagccttattcttcattcgatggtgatcattatcctggaggtaaaaactcttttttatttatgggcggtaaactgattgatatcggtcctgagggtaatatcggaaccacactggcacccgtattaaaagaagacttaaccttaccaaacgatcgggaactcattgaaaaatatgaactaaccaatatgtggtcacatgaagagttagcagaacgtctgtgtcgttattttgataccggtattaaccgtgatgacctgaaattcgaggtgtttccgggactgtgggatgacagagagcaattaaggcccttgaccagtcgtttaccggtaccgctacgataaatagataatataacccgaattctggataagaaattgacatgaagcctgttccaggagcaatgttttggtgcacgccgaaacagctccggggaggaacaggctatgaacaagttagttgaaattttctgcgatgtcgatgatttttgccgcttcttcattcctcaatgggaattattttgtttcgaaaaagggtaccgccagcgtcatcggcaaggccatatgcaccccagtgaaatcatgactattttgatcctttttcatatggcgcattaccgtgattttaaacatttttatctggaacatatttggaaatatcaccacaaagatttccccaccctgctcagttatacccgttttgtcagtgttgccccttccgttttggtcccactatgtagttatctgactcaattaaaaggaaaaccgaccaagattgcttttattgattccacgagtttgtgcgtctgtcataacatccgtatcccgcgtcataaggtttttaagggaatagcccagcgcggaaaaacatcaatgggctggttttacggcttcaaattacacttggttgttaaccatcagggcgaaattctcgcgctaaaagtgactcccggtaatgtgaatgatcgagagcctgtacgcgaattatcaaaatcgttaacgggttatctttacggtgataaaggttatctcagtcaggaactggccgatgatttagccaaaatcggtgtgactttcatcacgaagaaacgccgtaatatgaaagcacaagcgctgtctgagtggaataacttaatgttaaaaaagagatttatcatcgaaacgattaacgggcaattaaagaccatttctcaaattgagcactcgcgccaccgaagtataaaaggctttctgttgtgtgttttaggtggattgattgcttacagccttaaattgaaaaagccatcactgaaaattttctactcagagaaagatattttaatgacggcttaagcagaattcgggttaatatataaaagccggaagatctctgtgattttccggtttgatcaaataacactgagcgcatctctcttcccccgcctgaccgccgtctggcaggtattgtataacggcaaccgtgtactgctctgtcgctatcactacaatgaacatgctcaactggtgggtgtcagccatcgggatacctccatataataaatctaaagatgaaataattaatatgttcactatcgaagaataaagttaagagccggaatatcctcacgatcttccggcttgattatgatctaccgtaacttaatctcattgaactggctctgttgccggagtagtcttgtttacccagttgccgctcagtgcatagcagatggtgtaataacattctttggaaagccatttaactgggttattgttgcagataatttatcaaatcctaccaatcacaaataccgagtaataaacccactggaaacgagttcagtacggttagtcacttttgttttggcaaaaatattgcgcaggtgggttttgacggtagacagggaaatattaagtatctgtgcaatacgtttgttacttgatccttctcttattaaattaataatttcttgctctttagctgtcagaatagttggtgtttcaggaagcaaatctctgacagctaattcaattaatggcagaatagcactgaggcggttaaagtcttttggtgtaaatagggtatctcgtaataaagagacgccggcaataatttggttgtgttgacggataaatatttcggcgatgtcctgtatattatttggctgcataaattcatggtaatatttattatgtttcgtcagtattttctgatccatgccaaccatattaatatcaccttgttgataattagctggttttaatggatctaaatgctgaaaatgagccagataattctggtgggtttcgtctgagatgccgtacagaatgtaattttcagggcgtaattcattattcaccagatagaatgctgcggctgagataggaaccagatgtgcaatggtatttaagcaactgtagattaaagcattttcacggctattcggtagtacagtagacaaggaagttctccctttatacccgttatctttcaagttgcctctttgttggctgcgctctctcaccccggtcacatcgttatctatgctcccggggattcgctccctagccgccgcgatgcatcttgaaattcataggatatagaataatatctaactggataaatcaataatgaagattaatcgaatgctagttaaaatgcaaaatcaacacaaaataaacatattaataacgtgatatagattgcaataaatgaaatttctcaccgtgatgatcacctgttaagaatagaggttttggtatatatctgaaataatttcttaatgcacttattaagtaatctgttttttattgattgatatttaagtgattatttttgatttttgtttttttctggtgtttttcgtcacagcttttcggctatgaatccccctttaggtatcgttcttcaggacgatagtcggtattccgtttcactttctatagtgtatttatcctcaataaattgtacaaaaaattcacaagtaaatcgctgtgagcgttatttctacgaccggaagtaaaagggaagataaatgaatatgtcaacacgactgacttcgcatattgaaaagggagtggtgggatttcctaccgcactggcaagttccatcggggtgatcatggcgagcccggttattttgaccgtgaccagtggctttgggattggcggtgacactttcgtactggcaatgttgatcagttttatcatgatgcaggcccaagtgacgacgtttgcggaggcagccgctattttgcctacttccggctctgtttatgactatatttcttgtggcatggggcggttctgggcaattactggcgcactttcggcgtatttgattgttcatatttttgcgggtacggcagaaacgatcctctctggtattatggcattagtgaattttgacagccttaatacgatggtggaaagtcataacgcttcatggatggtcggtgttgggctcgttattacgttcggattactgaatgcgttgggtattgaagcgttcggtaaagtcgaaattgtgctgacattctgcatgtggagtactttggttattttcagtatttgcggattattaatgccatttgctgtgccgctggagagttggtttggtgaggggcttaatgtaagcgatcccttggcagtgctgagtctggtaggtatggcgatgtttatgtttgtcggttgtgaactagtgacgccaatggcaccggaaattaaaaattctgccaaagttttgccgcgagcaatgatgacgggcctgtgtggggtggctttctgtatgggtctatatggggcgtcaatcagtcatcaggtagaaaatgtgttggtggatgtagaaaataatgttcgcttgctagaaacgccaatggccattcctgcttttgctagccaggtgatgggggattttggtaaatattggattggtatcgggttattattggcgggagcggcaacgattaataccctgatggcggcggtcccacgtattctctatggtatggcattggatggtgcgttaccgcgtatttttgcttatctacatccacgttttaaaacgccaatatttgggattttggttgcggtaatgatcccctgcttacatgcctttattattcaaggtgatttgagtcggattatgcctttggtgctggcagcggtatgtgcctggtgtgtcgcttatttgctggtgacatgttctgtgatattactgcgtattcgcagacctgatttacatcgtgcttataaatccccttttttcccattacctcaaattgtctctagtgtaggaattattttggcgattattcacattacacctccgggaatgaatcccggtgatgtgtacattccattcgccatcatgttgggtctgaccgctagctatgccctgttttggacgctctgtgtacaacgggtgaatccgtttaaacccgtacccgttgagcaggtactttcacatactttcactaagggtgaattgccggaggtacagcttgagccacttcgttctcttaattgagggtatttggcggcggttaaataaaccccgctatcctactggctatcaggcaggtataacgctaaaccggttggaacagaatttatcgccttactgttgtgagcgtttatcagcggaaagtttgcaagtgacgttacctgatggattgcagattgacgtttgtgaaaagccgaagacgctgtttctggcctatattgtcagttgttgttttcgtttgcagggaatgacttcactcaaggaaaaaatcgttattaaagccaagataaaggggatatttcggcgaaaaaccgtgacttattactgttatcatggtgcagaatatgggcaacagattattgatttactcaatcaatatccattaattggagaaacattagcagagctggatttccgggatctggtattgaatattcatcaagggcaatggcaacttgaggtggaacattttgctgcttctgagattgtcagccgattgccggccagtcgtcgttatttgcgtttgacttctgagcagcgttatttgttgctcagttcgttgctgatgtttagtcaactcatggaaaagatctaatattttacagtgttggatgtcgtttgtttgctagtaaaaatgtcgtatgtttgctacgcttgtcgatcataatttctggagagccccatgattattaaagagcgtattcaggcgcgtttgaagcgatcaaaacgttatgtgttcattcgtgacgactttaaagatattgctggttacgatcaggtaggaaggatactgcgcggtttggtcaaagaaggtcaattgctgaaagtgggatacggtgtttacaccaaggctcggaaaaatagcgttactgggaaaataatgcctgcttctccgggaggctctgatgcggttattcttgaagcgttagagcgtttaaaggtgaaataccatttggatggagcttctgctgcctatactgacggtaaatcaacacagattcccgcttatacccaaattaaaaccacattccgttttaaacgggtgttatcggtggggaatagccggttaaatggatgatttatcaggtttatttgcagatgttgccgatgtactaggtatcggtactatttctattgtggaaaaagattactatgttgttgaactgcttcgtctgctacagcctttagcgtttgatacccataaactggtatttgctggtggaacagcgttggcaaaagccggaatttcacttgatcggatgtcggaagatgtggatatcaaactggttccacagcctgaatttttggtgggtgttcagtactcccgatctcagcgcaaaaatatcagaaaggatattgttcagacgatatcagcgactattgcagcatctggttttttggggattgacgatagcaaccctaagatcacacgggatgaatatcgctacaatgatatttcggtccgctatccccaacgtgttgtacaggttccctacctcaggccatttatcaaactggagttgatggagtctgatttgctgcaagcggcagaacggcgcgatattcgttcatttgtcacgcaactaacaggaaaaggtcgggcggttgaagcgttcccctgcacgacgattatcagcactcaagctgaaaagctggtagctatgctgagacggactgctgtgtttatgcgtaatattgatagaaaggatgacgagtcactggttcgtcatctgcatgataactactgcattgtgaatgcaataggagtggatatccgtcaacttgctggttttgtacaacaaactattgaacaggatattcagcgctatggccgccagtatcctcagtttcagatttcgtcgattaatgaactgagagctggattggaagagttgggaagtaatcccatctatcagcaacgttatcaacaacttgtgatcccaatggtctttgaacatagtagaataccttgggcagaagcttacgattgtttccggcagacggctttatctgttctgaatgagctgaactaaattgtctgattggtgaacgcatttacacagatattggttattgttagtaaaattcactgtaaatcttggcctaattcgggtggagatatcgggcgaaaagcagtatatacccaatggatttcaagatgcatcgcgacggcaagggagcgaatccccgggagcatagataactatgtgaccggggtgagtgagcgcagccaacaaagaggcaacttgaaggataacgggtataacctgttttcctatttcagtgaacatagtgtggatcgcaaattagacttaaaaaaaaccaccgctctttattcaagagttgtcggtggtgatgtgagcgaaaatagatatttacattggcacagaatttcgcgccatatttaaagtatcgacaagctgatcaatatctgatttgctggatctaaaactggatatacaaaggcgcagggcttttgtattggcaaaggtggttattgagatccagcattgattaatctctaatactttctctaaaattttattaacatcaaaatctccattatcacggatacaaataacaggcaaagcagagggattcaatatctgccaatcatttttcgccagttgtgatcttaaataatcagcaagattgatctgataatcaatcatattgctaaatcccgttcggccaagaattgccagaggcataaatagttttaatccgttaaaacgtcgagaccactgaatggagtgaatgtagggatcggaattaatatcatcactaaccggcatataattggtggaaacagcaaaaggtgttgtcagaatatgtttatctgcacatataaacatgccagtacccattggggcagaaagccatttatgggcgtcaatggtaatggaatcagcctgttcaatacccttgagatgatgagaatattgatcacttaacaggattgcgcctgcccatgctgcatcaatatggaagaacagttgatatttatttgccacagcggcaagctctggcagcggatcgataatacctgcatttgtcgttccagcggtcccaacaatcatgaaaggtttattgccgttcgctatatcattatcaatagctcgggttaaacctgaaatatccattcttcctgtatgatcaaccgctattaatctgacagcactgtgtcccaaaccagattgtaatgctatttttaaccaggcaagatggctatctgaagagatataaaaaataggttgcccatttattgactgtaaaccctgttgggcataatcgggaaaatgttttgtcagggcgcaaataagcgcagtacaatttgcttctgcaccaccggtagtaaatgtgcctccgctattatcagcattaaaccctgccaggccaccaaaatatttaattaatttttcctctatttcaacgcaggccggggcgtgactccagaccgctaattgtgggttatatagcgcagtaatgaagtcagaaataataccccagaaagttgatgatggattaaatagcccaaaataatgcgggctggtgacatgaacaattcctttttccataagatgtaatacatcatttaaaacatctgttggcgaaaaattgccatcaaaggtgtattttgataaagcgtgggaaatatcagttttggaaagtgaaggattaactcccattgtcggcaactcagcaatgtgattgttaactgaattctttatgaattcaataatatcattacgttgatgtatctcaggaaatagtgaagagatgatttccttgctgatatcccatctgtcatttgtgtctatcatttgattgatctcctcctgtaaaaattaaatagcgtaatcatcagtcgttccggtattcgctttaatagactcatatattctttctgctcttatcgcgactgcggaaaaagattgagcatcgctaataccatgagttcgttctgaaaggccattgacataaagatgagcggtaccacaattttttaatttcactttatagtcactgtcgatggtaagcccaccttcaaaatcttttaccaaaaattgatcgaattttgccagtagatcaggtagcgggttttgataatatcccgtgcctaacacgatagcgtcacaaatatggttagtctcttcaccagtaaatgtatctttaataacaatttggtattcttcgtgagagtggtcaatcgtaattatttctgaattgaccatcatgtgaagacgttctttgccaatgacttcatcttcatacatcgttgaaaatagcgattggctctcatcaatatcaatgcctgaatagtttgtacttttaacgtgttcgaaaaatacttttttgttctccgggcttaaagatttaaagtattcgatattttctggtaagaataccagattggggaattggcctagttgcgcgatcttaaagccgattgaacgatgcagtgaaagaatgtcaatatcatcttttttattgattaagtcagcaatcacttcgccggcactttgaccagaaccaataaccatccatcttcggggtatgttattttggaaattatttattttttctaaatatgcagaggtatgaaaaacatgatcacctaacaagttatcaaacatttttggcgtaaatggcgttgatccgctggataatatcagcgtattggtaacatactcaaaatcttccccggagacactaaagccatccagtaatccacggttgataaccggatatatatgagtcacattttttttgtattgcacataattttccagtttttgtccaacccagatcatgtaatctgaccattcaaagcgacttgctggacgacctaataagccaaatttaaacaggcgatttttttctttcaaatacatggcaaaactataaggactttgtgggtttctgggggtcactaaatcccgataaacatgatgattaatatcggtgcttggcaataataaattaggatgccaggcacaagaatctgctttttcaagtgctaagaaattattttgcaattgatactggtgttcgatttttttctcatcaaatatacaagctaatgcgatacctgcgggcccaaagccaatgctgagtacatctataaattttttattatttgtattcattgttaagctctcgaattaatgggtaaaatatagcgtggcttcataatggagttctcattcatccataaacataatttagcggctgagcattcccctttaatgaacttaatatggccgaggattgtctggaatgtctctctattcaaacgatgcaataatttatcgggaatcgctaattgatgggcaatctccaatgcggcaaaggtttcaagaaagaagatgttagggaattgctggtattgttggatatagtgttggatacaggattccagtgggttaatgaattcgactggagcaaatccgataccggtaatttgtccattttccacattttctggcaaattaagttgcttgcatgcagcatcatcagtaaggataatttttccatttttcttttcagagaaataatgatgaagaaatttttcacttttaccgatagtaccaataaaaataatttgatcggtattgtcattgggttttaccgcagcatcgtctctgctcaacattctgcgaatatcttctgccagattatcactatattttgagccatcggtttttatttcataatagtgatctccatcttcttttgttaatacagtaagtgcatgggcaatatttttattattgaagcaaattctgaatatattgctatttcttatggtcaaggtagtttcagttgcagtaggtaacagaacaggaatgttatgatgtgagtagacttccgccgcacctattgccgcgttacttgaaaaatgacctatgaccatatcgacattgttctcaatattatagtgtgctgctttagcacctccttcaattgagccataatcttcactgaagataaattccagtgtgctattgttatgtagatctttaaatatctcaatagcacgcatgacagttaatgcatgtaccgatctctcaggatctaaaatggcggaaatgccacaaataagcttgctattcattttatttatcttaataagtaaatcgtgaataggagaaaatctgatttttctgtttgagaaaatcagtcgaaagttcagttggcaataggtttaatgtaataatctcagacaccgctaaagcgattttatatcctataccacagaatccagccgcaacaaaacatctcttttcttcatcgataaagtcaagaatagggcgttcatctggtgtatatgaatcatatcctttaatgatagagagaatattgcttggctcatgtttaaattttgattttaggagcctttcgctgatatcgttttcaataatattatcattatattctatatcttctggtgtctcggccacatttctaatcttagatccggcttgatagaaatattcagcaagtggcacgatatgcgtgccagtttcggtatctataattggcatatttgtactgtaggaggtacggatatttgccagagggatacttttagcattaacgggcagtttatatgccagtgtttttgtccatgcaccgatggctaaaacaatatagtctgcttcaatggttgagtgagcaagttgaacgatggctttaccattttcggttgttattgcatgtactttggtattctctaatactagattccccgtatctctaacaacttgtgctaagtttgaggctgtatgtctaatatagccaaatccgccattgggctcaaaaaggataattcggttgttatgcttggaataacatccattggttaattcgaaagctttttcggcggatatgagctctaaaggatagagactgtcgcaataatccctgatacttgttttgactaattcaatatttttctgattgagttcggcggcataaataatacctgtctgtttgagcgtttttttaaatatttttcctacctgactctcttgcattagctcgacacttcttcgtgtgagcctggcaatttccggatcaggatcatgtacgcggaataatgcaccggagaatttagtcgcgccattaccgccaatagtctcttgctcaatgagggagacattgagtcctttcaatgccaagtttgcagcaactgttgcgccaactattccccctcctataatggtaatgcgtatggttttatctgtttgcataatcaaacacctggtcttgataaatttaacaatgaacagaaagcctctatatcatggtgagtaatatattcttttaatttttgggatgttttgggtattatcggttcagacaaaattgcaaataaaatagcaagattcttgtctaaaatattgtaatttaattttgcgtttaataaatctaacatctccattaattcagcggcaatttccttaatcgaaaaattatcgtatctggaataggtttgccatctttcgataatttttgtttctgattctgataatacgatagggctggtaatattatcagaattcattttttccaaattatcagatattttgggcagcagataattaaagatatgattccgccatgtccagaactcttctacgacaaaattttcagaagcgtgttctggcgatattagagagacatagaacctgacactgtcagaacaggcatttttgacgatatctttcacccaaatcgcatgattgcggctggttgaaaaatcttttccatctaattttaagaaaaagttagtatagaaagcatgtttaaagtgtaattcgtcgttcaataatatttgagccgggtatgcaagaatatggctgtaagaacaatccatacctaaaaaattgaccatgcaagtattatcatcataaataaggtcataaggactctctgtatcggcgtttttttcagaaagctctttcagtgttgctaaatatccggctaatcccataaaccaggtatgaatacggtgattttcatcagaatagagtttcagccctgattcattggggcgagtcacgccccactcttttataccatgcgcaaaaacttcctcgacccatgctgttaattgtggcctcataggagaactaagaattttctcttttaatttttcggcaattaccggcagtaatagaaagttgcgctcaacatgtttataaacaacgttttcattgcacaaaatacagcgcaaatttttcatttcaaatgcgtccggtgccattgcgcaggattcacattggcttggatctgagctttcaccacaatgattacattcacctctggcaaaggcttcatagccccatttttcacatttttcgcaataaggttctaaactcacctttggtgcaataatgccttggtccaaacaagagtgatagagcatcttgacggcatcttcaaaatagcggttatcgtatgactctagccaatgatccagttttatatcaattaagatcaatgattcctgtatttttttcgaattctcttttgccagtgctggtgcacttatgcctatttcttctgctttgcgctgtaaataagattgataatcatctgaataggatatcagataacactttttaccctttaaacgctgagtgcgagtaaatatatctgcacttaaaaatggtcctgctatatgaccaacgtgcagatcgccatttggtgttggtggcgtaatggtgacaatgtatttattcattattaatcctgctctaatcgggtaagaaagttcaatgtactttccttgtcccaccatattgtgtaaaagtggaaatcttcctgattgttatttattacatgatgttcagagtctaatggaataataattaaatcccctttggtgacagggaaatcttcgtcatttattcttataatggcattaccttggataacaataaataattcatattcattgtgggaatggcggaaacttttggtttctggtcgtacaatacaccatgcaccgccaaatggcgtatttagcccctcccacggtaaaagtcttgaaccgtccagatcatattcatgaaccattgaatcccaatccattttacgaataatattcatcatacaccttcctctaaaagttgaaattcattcatataggctcgaaatgtatttcgaagaatctctatggcttcttcaatggtatcactactcacattgagtggcggaagaatacgtaataccgtatcgtttctgccacctaattctgttattaatcctttatttaatgctattttttgaatatgttttgctgttatttcacatgctttacctgtgctggcgttaagaatttcaacacctagcatcaagcctttaccacgaatttcaccaatgatgttaaaattatttttcaacgcggcgagatgctttttaatttgtattgatctctgtttgacattctctaataaattatcacgctttattatttcaatggcttttgtacctgaggcgaatgccaactgatttcctctaaatgtgccaatatgaatacctgatgtccaattattgaaatctttcttatagaacataagggaagagggtaaccctattccactggtaccttttgaggtaacaaatatatcaggctcaattgcgtactgttcaaaagcataccaggttccggtcctgccgcaaccggtttggatctcgtcaataataaccggaatagaatatgtctttgaaacacggataatactgtctacgaatgatttttgtgcagaataaacgccaccttcaccttgaataagctccagaatgattgcggcaatatttcctaacccagagtttgcatcatttaaggcggattcaagatataatccggcatcaagatgatctgaattgagtacccaactttccgaagattgagattctgagccataggggaaaaaatggacgcccggcatttttcccagaatatttttcttcatacttctattgccagtaacggcaatagcagcatgggtacatccatgatagccacccctgaaactaataatttcgtcagctccggtagctatttttgccagcttaatggctgcttcaatggcatccgcacctgttggcccacaaaaatgtattttgtatttgttgcgcaggctttcaggtagcatacttaaatgcgcttcggtaaaaagttctttggcaggcgtgggaaaatccaagcccaaacagagttttgatacttgtgcatttacttcggcaattaattcagggtgagagtgtcccagaggtaaagagccggcaccggataaaaaatcaataaatacattaccgtcgatatcctgaacataacaaccattgcctttttctagcgaaatctgaattcttttaggatatgacacagcacttgattcttgctctagctgttttgctaatgcgatttttgaaaagggacctggtattgtggtgtgaatattaaccttattcattttaagcctcgattttatttttattatgaatagatcttttaatttttatatttttttcgatagaatcaataatgtgtttggatctaatagaaactaaactcaatgagccggcatcacctaagccgtgtgaagattcacataatccgtttagataaatgcctatatcggtagcattaatcagatctatcttataatccctgttgatgatgatcccgttatggctatttttactcattaatggatagagttctgccagaagaggtggacagatttcctgatattcctccctgccaatatctttaaaacctgtggcggagacaaccatatcgacatctatttgatatgtttcttctaacccatgattttttactatttgtaatgaaacaatggaatctttcacgctagattcaacaatatccgcagagttatgaattttgattttatgctgaccaaaatatttatctctatagatagtccgataaagttcatcgagaacatcaccatcggaggcagagtagtttgtcagatttaaatctctttttaatctcgctttatgctcctctttactgttgaaaaatgtgtctacaaattcaggaaaataaacttcacctgtaaatggcgaggtatctttcagtcggtagccaaatttccttgatacaccgtgaatttcaaggtgaggaaatttgtctgctaaaaatatcatgatttcgatagcagattgactgccaccgactaccgcgatactttttactttcccactggaaatatgactaataatgttgttaaattctgcaccatgaattaaatggttatggtcaagttgtcgcagagataaaggaatatagggggttcttcctgttccgactatcaggtttttacattgataggtttctcctccatctgttttgacttcaatgagtgtattttccccatgataatgatcaataattttcacggatgttatcgatgttgaatagcgaacgactttatcgaaatgtttggccgcccatttgatatagtcgcggtattcataacgatatggaaaatataatcccaagtttaaatgttcaaataacctgttattttcaaacaggtaattgatgaatgaatagtggcttttggggtttcttggtgtcgcaagatcccgtaaagggtggttttggatatcggaatttgttaataacagcccggcctgccattcgcatgatggctctttttcaaagaaaagcacttttttatggggtaattcttcctccagtgttatcgctaatgaaatattggatggcccaaatcctacgcctatgatatcgtattccacctggttcatgtaaaattccttaaatatttaaacttttattagtaataatttttttatttttttagataaaagcaggtaatacttcttcaccgatttcttgaataacctctttagggggccttttgccgtactgaataccaagagcggcgtgattaactccgacttcttgccactcttccaacaattcaatcagtcccaggcggccggttttcaggataaatccgccattcgtgggggttctgggataatatttatcctcaactaaatcaatccattcattagttaagtgcggtttgaacatatttcctgggatattttgtctaaattcgctaatattcttaccgagtttggcgacgccctctttattatgggtttgaataggataggtaaaccatccatccgaattttccgcgatccatttaatatcttgttgcccacgcccagtgactatcagggggataaaatcattgaccgccttgggtattaggcgtaaattcccatcaatataacctaatgggctattaatggtgcgattgttgttatccaacagcgctctgaacatattgattgattcgacaaaccgcatccctttttcattataaggtatgttataggcagggaattctgacattctgtctcctgcggcgacacccagtattaaccggccatttgataattgatcaatagacgttgctttcttggctaaatcgatggggtgtcgcagcgtaaatatggcactgccgaaaccgatggcgattttgctggttaatgcggctagccaggcggcatagacaaatggatcgaagccctgacctatatcgccaaaattgggatcgaacagcgggatatctcttagccaaatggcggaaaagttttgttgttcgatttcacgaatgagatcgatttcaggtttaatatcagcttcttgatttaacgctctgagaggtaaaaacatgccgatgctgattttgttctccttgaataaattggtatacgtcttatgctttgaataattgaacataataaatcctcaatgctattttaacatttagctgacttgaataattatttcagttattaataattatcgagaaactagcattaaaagtaagtgaattaaagctatattatttaaacgccaaccgtagtttttctaaatttgcatgtcttattctgtttacatttaccattttcccgtatgggtgttgaagttcagttttatatattgatatctgtaattggcatggtagtatctttgtcatatatactcgtcatttttcaagttgcctctttgttggctgcactcactcaccccggtcacatcgttctttatgctcccggggatttgctcccttgccgtcgcgatgcatcttgaaatccaagggtatagaggacatacagtgcacactggagaataaaatatgagttctattttgcctctgttagctctcagagcttttactgaagttggtcgacggggcagtgttaaagctgcggcggctgcaatgggtgtatctcctggggcggtcagtcaacagattcgtattttggaggatagaattggttttgcgctgtttttaagaacgcctaaaggtataaagcttacggctaaagcggatcgggtttatgagacgttattactttcgtttgataatattgacaaatctattaagtctcttaaagcaatgcagttcgaacataaagtctctataaataccacttcgtcatttgccgcatcgtggctgattcccagactaaaaaattttaatgagaaatatcctaatattgaagttaatatagaagcttccaatgaattggtagacctaaaaagaagttctacagacattgctgtacggcatgggcttggtaattacccaggtttaatatctaccaggttaattgcaccggtattaattcccgtgggtacgccggaacttttaggatcaggaccaccgataaaccatgttgaagattgtctgaattaccctttgttacaggattcagatagatctgattggcatttatggttaaaagcacacggaattaatgaaggggcgaaagcaagacagggctccagtttcgaagatgattttttactggctcgcgccgctttaaccggtcagggtttagcattggtgcctgaattttgcgttgaagaggaattgcgttccggtcggcttaacgttgcactggaaaaaaaatggccttcccgatttgcttattatgcggtgacattgccagaaaccttgttccgacctgaaattgttaatattattgattggcttgttgagcaatctaatttgtctgacgattgcgtgggagaatgttcattagcttggaaccaatctgagtcattgtgatatgttattgcggtttttcacgattaattgatccacaagaagataaatagttttcttgtgtacttttatgttcgcattctttactgacaacacaataaatcaataaatgtaatttatgcgtgtagcaaggaacaccgtgatattcattttcaatttctgagaattaatgttattttcatttagttagcggtatataccctatggatttcaagatggatcgcggcggcaagggagcgaatccccgggagcatagataactatgtgaccggggtgagagtgcagccaacaaagaggcaacttgaaagatgacgggtatagagagaaattgaatgctggctctttattagtaatattttaaatgcgagtgatattttagcagttaaattattaagcgtttgtcttgaggggagatatataccctatggatttcaagaggcatcgcgacggcaagagagtgcagtcaacaaagagccaacttgaaagataacgggtatagagatgatctacttatacactgatagttcaccaaatggctataagatcacaattgctttggaagagttgggattgccatacacattaaagcatgtacgaattgaaaagggtgaaaatagggagcttgagtttttacaattaaaccctcacgggcgtatacccgtacttgttgatgaaagtactgagacgaccctttttgaatcgtcggcgattctgctttatctggcatcgaaaactcagcaactgttgccggaggattttaaaagccgttgggaagcgattacatggctaacatttcattcttccagcgtcgggccaatattgggacaacgggttcattttgaattatttgtaactgaaaaaaatcatatggctatacaacgatatcgtcgcttaacggaagaggctttctctacgttgaataaacggcttagtgatcgcccctttttcgccggagatgagtactccattgctgatattgctaattttggctggacccatattgccagaattattgactttgattttagtcatcatgaatatttaagtgcctggcatgatcgtattgccttaaggcccgcagtacagcgtgggattatgataccggagccggcaaccggcccttaaatggcaatgcccgacaatagggcaaggaattgtcatgcctttgaagatcgatttacctaaaatcaattctatacccaatggatttcaagatggatcgcgacggcaagggagcgaatccccgggagcatagagaacgatgtgaccggggtgagagagtgcagccaacaaagaggcaatttgaaagataacggatatatttcggaggaaattgttaatgtctagaactggtgaggaatatattgaaagcttgcgtgatggaagaactatttttctgaatggagaaaagatcactaatcacgtggatcaccctgcttttcggaatgcaattagaaccgtagcttcactttatgattatcaggcagcacatgctgatcagatgacgttcgaaacatctggtggtaagcgcgttggtttatattgggaacttcctactacccgagagaaattaattgccagaggtgaggcggcgtatgcctgggcaatgcagagttgtggttggttaggtagaagcccagatcatgtttctgctgctctgaccggaatgatgacttacctggaagtctttgaggaatattctaaggatagggctgaggcattaaaaaattactattcatatgcccgtgataaagatatttatttggcttttacattagtcaatccacaaggtgatcgatccaaaacgcccagtgaacatataaaaaacgtctttcatactcttggtgtattggaggagaaaccgcaaggaataattgttcgcggggcaaagatgttaggaacagcggctgtccttgcagaggaagtggttgttggcgtgtttaatccactcaaagagggcgttgatgataaatatgctctatcttttgcattaccgttgaatactaaaggaataaaaattctttccagaaaatcctatgaaacaggcagtaataaatttgattcccctttagcgcatcagtttgatgagaatgatgcagtcatttattttgacgatgtttttgttccgtgggaaagagtttttgtttataaaaatacggatatgtgtcgccggcaatttctggcaactggcgctgacgttttaatggatgttcagggtatggctcggtatgccgttaagctgcatttcttaacgggtttggctcatcagcttactgaaactacaggcgtcaatgagtttcctgctgttcgtgaatcattagctgagcttgcttgctatgccactaatattgaagggctgtttcgtggtttaattagcaatcctgatcgacataatgagtactatattcccaatcgattacaactatatgcttgtcaggttgcattacagtcaacttatccaaaggtgatagaaagcatcagaaaactttctggtggtggtgtgattatgttaccgtcaaattatattgatttagcaaatccagaaatccgtgacttaatagaaaaaacacaatattcaactctactgccacccattgaacgtgtgaaattactgaaattagtgtgggatgctatcggttctgagtttgcatcacgtcatactcaatatgaaatgttttattcaggagcgcattatgttgctctgtctcgtctatatgatcaatatgattgggattttgctaagaatatgagccgagggattttagattctattgatgttagttgagttctgtatttaattcagatgcaactaacttgttttatttttatcaaatttgaagtggcgggatagattatatcccgtttttctattttattttttaatatgtgggatggtttgactaatattatatcaacgtatcgagccatttatatatctgctaataaactatcgcatcttgttaaagaatcatttctctgaaatgttttgacatatttacgtgtaattagtgaaagttagcatacaatttattctattaataatagtaattgttcttattattaaataaaaatttagtgcatgatttgccgtgtcaaaaaaattgaataccaacaatcaacaattaaagaagagaaaaaaatgaaagtaaacataatgatatgtgctcttatggcttcctttaatgcctttgcttctcagtgtcaccaaataaaatttcagcaagatcagcaaacaataactgggaattttaattctcagagggaagcgtgtattgagtttaatattctgcctgaacattatgtacgtggattggcattgggtatgcagaaattggtggtacagaagggtaatcaacaacatattcgtacgctatttactgataacccggtggatgctcgtcaatcaattggctttaccgttcctcaggtaggaaaatatcggttggcagccaagggcaaaacaggggaaccgtggcagcttacattgtcatttccatcttatattcccaaggataatgattatcggcagcagccagaaagtttgcgtctgaaacaacttcaaactgaaatcgcacaaggaaaaggcacccatgctttctggcgggaaataacccgcaagggtacgccgttaattgaagattatgatgataaaaataagcgagtcactttcctgtggcgcggcgcaaaagcgaatgtctttattctgggggcaccgagtggtgatcatgatccgatgtcacatttggttggtactgatgtttggtttcgcagctatatcgttccgtcagataccttgatgcaatatagattggcaccggatttaccgcgagtcgaaggcacggctgacgaacagcgtcgatcgattttgattacggcacaggccgatccattgaataaaaaggttgtgccggctgtatcagaggatgtgtttaaccatgattcattgctggcactaaggccaactctatgtgatatcgcacaatttaagcaatcgccttttcagggagcgactaaacttcatcagcttgagagtaagattttgggtaacagtcgagaaattgcgatttatcaaccggttactccgatgaaacagcctgctatgttggtgctgtttgatgggcagatttaccgtaaacagtattatattgatagatttttcgattccctgattgaacagggcaagatcccacctatgtatgtggtgtttattgatagcctggatagtgcacgtcgaggtcaggaattaccacctaatcctaattttgctgaatttatggcgagtgaattaataccgtggctggctgctcagggtattaaagcaccggcagagcgtaccattatttcaggttccagttatggtggattggcgtcttcatgggtggcatttaatcatcctgaattgtttggcaatgttctcagtatgtctggttcatattggtgggctcctcagggagaagcgcctgaatggttgatccgtgagtttgctaaagcagagaaaaaaccactgcgtttctatttacaggcaggattatttgaaaccaatcgcggggaattggaaggtattttatataataatcgccgcatgaaacagacgttattacagaaaggttatctggttgaatccagtgaaatttctagtggtcacaattacatttcgtggtgtgaaactttgtactatggaacacggtcgttagtaacgaaatggtaagttaattctattttcttcacataattgtcacatagtttctttagtatccctttatcagataaagataatttttactccgattacgttttaataaggaaaccttaatgtcaaacaagtataagaaaagtttggttgcagtcatggtctcaaccttaatttcaagtgtcagcttaccggtatcggcggctgatgatcaaaatgcaaatcaaattatggcggaaggtcgggcagtaaaaggtaatattacggaatttggtggtgctcgccgtatgactcaaaatcagactgaggcattaaaagcggcgataaataatcataaagctaaaaatgttattttatttattggtgatggtatgggagattctgagattactattgcccgtaactatgcagaaggtgcgggtggatttttcaaaggaattgatgccttgccatttaccggccaatacactcactattctctggataaaaagagccgtaaacccaactatgcgacggattcagccgcttctgccaccgcttgggcttctggtgtaaaaacctataatggcgcattgggtgttgatgtatttggtaaagatcatcaaactctgcttgagctggcaaaagcgaatggtaaagcaacaggtaacgtaacgacggccagggtgcaggatgccacgccagcagcactgtatgcgcatgtcactgaccgtggctgttatggtccgcaagagacgataaaaaaatgtccaacgaatgcgctagaaaatggcgggcgtggttcgatcaccgagcaattattagtggctcgtgctgatatcacattaggtggaggtgccaagattttcgcccagaaatcggttgttggtactggcaaggataaaacgttggaacagcaggcacaggaacagggttatcagttggtcagggatgctaagtcactggcatccgtgactagagcggatcagaaaacaccgttgttgggcttgttccatgaagacaatatggacattgcttgggaaggacctaaagccgtttatcacggtaatattgataatcccccagtgacttgtaaagtcaactcgaaacggaatcctgatgcgccgacgttggcacagatgacggagaaagccattgatctgttgaaagaaaatcagaaaggtttcttcttacaagtggagagcgcttcgattgataagcaggatcacaaagctaatccttgtgggcagattggtgaaactgtcgcattggatgaggcggtacaagttggtttgaaatatgcgcgtaaacacggtgatacattagttattgtcaccgctgatcatgctcacgccagtcagattattgaagctgatataaaatctccggggctgactcaggcattaatcacgaaagatggttcggtgatggcagttagctacggtacttctgagggtaaggaacaggaacatacgggtactcagctacgagtggccgcttatggccctcaggcagccaatgttgtaggtctgactgaccagacagatctattcttcacgatacgtgatgcgatgaagttaaagtaatttttgggtggttggggaataagtggttgaggaataaagagttaaggaataaagagttaaggccggatattctctggccttaatttttttgttgataaaaaggcaatataaattgcagataaaattttcagcaaaacagtaatccaagggaaatatataccctatggatttcaagatgcatcgcgacggcaagggagcgaatccccgggagtatatgactggggtgagtgagtgcagccaacaaagaggcaacttgaaagataacgggtataggtgttgtttgatggcagctttttgtgtttatattagataggattcataatgttcagaggtgaattgatttatgccaccgttaatattaaggttattaccaataatacttatcattggaatggttccatcatttatagaagttgatatcactttgccagcatttccccaaatgctaaattttttttctgcagctgaatcggcagtgcaatttactctaatagtaaatttcttagggttatgtatattcacacctattttcggcccactttcagaatcatatgggcgaagaaaaataattttaatcggcgctactctgttctttattgggagcataggttgttcaaccgtggttgatcttaatcaattgtatttatttagatttatccaaggggcaggatgcagtgctatttggattgtcgggtttataatttgttcggatatttataaagatgaggaatcagtacaggtttttggcattctcaacgcggcaatatcaatggccctcattatagctcccattgcgggttctcttattgttgcacattataattggagatttacctaccacttagtggctttactgagctttctttctcttatggctgtgttcatcgttcctgaaacaaatcgtaatacggtaaagttgagtgtaaataaggtcatcaaaaattattgccaacttatattcaatacgcgtttcttaatatattcttttacacctgggctattagtatctgcatgtattgcatatgtatctgttgttccctttttatatatagataaaatgggaatgagttactacatatttgcagtgcatcaagcgatattaggaatatgtttgtcggtggctggattttattcaggtgctttgaatagaaagattggatcagctaattgtatctatttgagtattataatttgtttgataggttgtggttcattaatgatatttagtcatatttatcccgaatctgcaatactttttacactgtcgatggccgttatctgtataggttctgcttttcaatatagtatggtgttttctcgttctttggcgttgcaccctgaattagttggttcagcatcatccttattaactttttttcgacttattttcttcagtttcagtgtccttatttcaggatgggcatttactggaaaactgtttaattcagcaattgtagtatcatcaataattgctatggggttgttattttcattgtttgtcttaattgatttgcgaaacaatgtagttaataggagaattaatgatgaatcacatgttagctgattaaagaagagcaggtaacagccatagtattaggttgtaccggcatgatggggatggcaaagtacttatccaaagagatgaaggctgtaggaatgccgattcaagtaattgatcctacagcagttgcattgggttatttacagatgatgataagagctggtcttacccacagtcgtttggaatatccaaagttggatttaagagaaagggagattagttgcattaagcggccttcttcttaattctgtgtaattgtcatcccaatattgagtgcttgagttagtgctttgtgatattttcgaaccacggtttttcaactctgtagtatgttgaatcgtaatagtttgaacgggtgtcacaagatattgatttgatctgccagattagctatttcaactgacttgtacttcacgcttttttgtatatgatattggtaatcattatcatttgtctgggtgcaagttatgatcagggttaaagacagagagagatcgcttttctggcagggtatcaccagcttgtggggaataggtttatctagcttggctggcatgctattcgtcatcatcaatcccggaattgagcagtttaaaattggggtagtattagcgatgttgctgacgctatttatgctgctaaaccagaagtcacgccattttctattaataccatcagggtttgctgtgttatgtgctttattggctggagcatatcgactgggttgtttttgacgttttatagcagaataaatggagagaagttcgataagaaaaacagacagattggtgcgaaaggagggacttgaaccctcacgtccgtaaggacactaacacctgaagctagcgcgtctaccaattccgccaccctcgcaggtactgtcattttactttttattgcttaatctaaactggccgaattcaatcagcggttgtctgatttggtgcgaagggggggacttgaacccccacgtcagtaaggacactaacacctgaagctagcgcgtctaccaattccgccaccctcgcaaattcagacattatcaatctgttgattgataatacattgataatacggaggcgcattttagaggttttgtagccgacgtcaatcattatttatttatacccgttatctttcaagttgcctctttgtttgttatcaaagatggcctgtccttgaatcaaggacaggctgagtcaattagaatttttttgttgcctgataaaccttgaatttccccgtctgagcaatgacttcatgagtaccaaaagttttatccagtaagtcgggataaggcaggaaagcattggcaacaatccgcaattttcctccgggtttgaggtggttgggagcttggcggatcagatcatcggttgccagtaaactggtttttaatccttcatgaaaaggaggattagagataatccagtcgaatttatcttcgatattggaataaacgttactgacaacaacatggccttccagtttattggcttttaaggttgctttactggaggcaatcgctgctgcattaacatcactgagcgtcagtgctaactcagggtttttcttacccaataccgctgccagtacacccgcaccacaggcgatatccagtaaattgccggagagaggcttgtcaaaggtagaaagcaataaacggctaccaacatccaattcatcctggctaaatacacccggtaacgtattcactatgacgttttccacctgataactgttccaccagttatcctgttcgaactgcacctcatgttctaactggccgtagaacaggctgcaacgacgggcactatcgatttttcgaaacgttgccatgccgtccatcagtttgtctacactacgtactccgctacggttttcaccgacaataaaaatattgataccttttggcaaaacagagaacaggctgcgtaattgaaagcgagcttcctgcttacttttaggccagtagtagatcagggtgtcacaaccttgagtaaatgctttttcggctaccaggccaaaccaggcactctcacccagcgtgcggatcagtgattgccagtgatgatattggttagtgtgcactcgcacactggcagcatcaatttgggttgccagtgtatcctgaatatcaccggcgaagagcaggtggtgagagctaaattgctcacggtgacgtaaaataacttcactggcgggggttaacgcagacatttgtctataagctccttcaatggttctgtgctcaagtatcagatagtgataaatctcaacccaatattggcgcagatcgtggcctctgataacatgttaccgattattttttacagcaggtaatatagatatggtaacccggcgcgacaggttattagctcaattggggattacccaatggaccttacgtaaccctacggttttgcaaggtgaattagctgttcacttacctgacaccactcgtctgctgattattaccaatgaccacattgatttaactaattcattattaatagatattttcaccgctatggggttggataaatcctctgtttactgcattacaacaaataatgttgcgatgttaccggaacaggttaagtgcccatattggttgttaggggtggatattacactatcatggccgggaatttctttgagaagcccggcattaaatgatttatattgtgatggacaggcaaaacgttctctttggcaacagatttctcaacatgaacaacatttctctattaactcccgctgatctcccgtccgcttttctggttgagaaagccagtcatgcgttcccgtggagtgaaaaaacatttttcggtaatcagggggagcggtatttgaattataaaatagcgattaatgaacaacttattggttttgccataacccaagtgatattagatgaagcaaccctatttaatattgctattgatcctgactaccaaggtaagggttatggtaaagcattattagcgtatttaatgtcaattttaccgggcaaaggggtgaataccttatggcttgaagtcagacaatcgaatcattctgctattagattgtatgaacaagcagggtttaaccaagtctctgttcgtaagcattactatcctactgcgacaggtaaagaagatgccatcatcatggcgttgccgctgtttgcctaataagcgctataaaattgattgattgtttatagcaccaatttcagcgaaaatgagcgccaatttttcattcacccacgggtttggcaactgttctccttgcggggaagcgtctgatgttgaatacaagcccgtatataaagcagaagattgttattgatgtcaaattccccttttcagcaggaagtcgctaaacggcgaacttttgctatcatttctcaccctgatgcagggaaaacgacgattactgaaaaagtattgctgtttgggcaggcgattcagaaagccggtacggtgaaaggccgtggttcaaaccagcacgcgaaatctgactggatggaaatggagaaacagcgtggtatttccattaccacttctgtgatgcagtttccttatcaagattgcctggttaacctgttggatacgccggggcatgaagatttctccgaagatacttatcgtacattgacggcggttgactgttgtttgatggtcattgatgccgctaaaggggttgaggagcggacacgtaaattgatggaagtgacccgtctgcgcgataccccgattctaacattcatgaacaagcttgaccgcgatatccgtgatccgatggaactgatggatgaagtggaaaatgagttgaatatcgcttgttgcccgatcacttggccgattgggtgcggtaagtcttttaaaggggtttatcacctctatcttgatgaaacttacctgtatcagaccggaaaggggcacacgattcaggaagtccgcgcaattaaggggctgaataatcctgaactggatgctgcgattggtgaagatctggctgaacaattgcgtcaggagctggaactggtgcagggggcttctcatgagtttgatcatcaggcatttttgcaaggtgaactaacaccggtatttttcggtactgcactgggtaacttcggcgtaaatcacatgttggatggtttggttaaatgggcacctgcgccgatgccgcgtcagacagatgttcgcgaagtctccgctcaggaagataaatttaccgggtttatctttaagattcaggccaatatggatcctaaacaccgtgaccgtgtggctttcttgcgtgtggtgtcaggtcaatatgaaaaaggcatgaagctgcatcaggtaagaattaagaaagatgtggtgattgctgatgcgctgacatttatggcgggtgatcgttctcatgtggatcatgcctatccgggagatattatcggtttgcataaccacgggacaattcagattggtgatacctttactcaaggggaagatctgaaatttaccggcattcctaactttgcgccggaattattccgtcgtattcgcttgcgtgatcctctgaaacagaaacagctgctgaaaggattggttcaattatctgaggaaggtgctgtacaggtatttcgtccactggcaaataacgatttgattgtgggagccgttggtattctccagtttgatgtggttgttgcccgtttaaaaagcgaatacaacgttgaagctttatatgaaccagtaaatgtctcaacagcgcgttgggttgagtgtcatgatgctaagaagctggaagagtttaagcgtaagagtgagcaaaatctggcgctcgatggtggtgataatctgacctatattgccccaacgatggttaacctaaatttgacccgtgaacgttatcctgacatcaatttccgtaaaacacgggaacattaatatttttaaggctaacaacaagttagcctttttctttacaaaaatatatgtaacacaagaataatttataatttagtcgggtaagatccatcttattttatagcactttgctttattttcctgttactatttcctcggtctttgctgtattgatgtgcttatttcccgatttagcctctcagctattgggagtgataacctgtttttaattctaatgtagattgtgattctgcttagattacgattctacttagatacattgtgtaaagatacattgtgtaaagatgcattgtgtaaaaacacctgtgtaaaagcacactgcgtaaaaacggtttgaatggctttatagattcagaaatctaaccggcaattaaggaaggtataggatgaagaatgttaaattggcccatttgttggtggctattgccttgggtactgctatcgttagcaatagtgtactggcggaggagtcttttaaaaataaagcgacacaagcactcgacagtgctggtcagaaaatcgatgattcaatgaaaaacatcgatggttatatgggtgatagtgcgaccacagcgaagattaaaagtgagttgttggcagcaaaagggatcaacagtagtgatatctcagtaaaaacagagaggagagttgtctatatttctggttttgtgaaaagcgagaaacaatccagagaaattatagagattatctctaaagtgaaaggggtcaagtcgattcaaaacggtctgaccataaaaaaataatatattttgttatgagtggttgttttccattcagataattttacgttgtactaaactgaatagcactaaccagatatgcgccctcaccaggggtacttttatcaaaatattggctacgtagcaccataatataatgacggataataactttccaagttatgctctctatccgtcatttattttcttgggggctgtgtggggaaacgtataccgataacgttggggaatattgatctattatcctataaatataagtcgtctattaaatctggaaaggttgcactggtttgtgaaggtggagggcaacgcggcatttttactgcgggtgtgctggatgaatttatgcgtgttgaattcaacccatttgatctgctgcttggcacttcggcaggcgctcagaacctttcagcttatatttgtggacagcgtggatatgcccggcgagcgatcagtcgctatacaactaatccagccttctttaaccctttgcgttttgtacgtggtggtcatttagttgatttagattggtttgtgcaggccgcttcacaggaactgccattggatatcccgacagctttacgcaaatttgaggctggatgtgagttttacatgtgcgcatgtcgttcagataattttgaacctacctatttccagcctgatgagaataattggctggaagtgattaaggcatcaagtgccattcctgggttttatcgcaatggtgtgacgatcaatgatgttgtttattatgatggtggcatcagtgatgcgattccagtagaagaggcgtatcggcgtggtgcagataccatcgtggtgatccgtacggtcccttcacagctctattacacgcctgattggatgcaacgaatggaacgttggttgggagatagtggtctgcaaaagatggtacggatgctacaacaacatgcgaaaagctaccaccacacccagaaatttattgaaaatccacctgatgatgtgcagatttttgaaatttatccgcctgcaccattaactgccagtgcattaggcagccgtttgccagcgctgagtcgggattatcaccttgggcgtcgttgtggtcgctatttcttggcgacagtgggtcacttatttgttggtaataagtttaatcttggtgactgctcctcatcctatcgcgagaagcttcccacttcaaaggccgccgctggagtatgacaagcacgatcaggctcaatttggcatatcggacactgccagtcgcgtttgtttaatcgcattatccagtaccttcacgccaacacaatgatgatttgactgttttccatgttgacgtttaaacgttggaaactttgcccgcaacttcggattaaattcggattaaagaagttatcgaacgcggtattcagattaataatcgcctgttacagcgcaatagaatcatattcttcattcctccgccgggcattgagcccggcgatagaaaagttgaaagcatactgaatatcaataccattccatttttgacgaaaattatggagatacttatgtcgcattgggcgagtatctgtcttgagcgataaagtgagtcgttattaccgcatcttacgccacaatggcatgatattggtcaacacatcagggggagggcaaggatcattcacctttgccattttccacaaaccggtgtggcttttacgggccgcattattggacatgaagacttgatataacgagcctgtatcgccggcatgattatgggtatcaagaaaacctttatttccccatcgattatagagggagatactatcgccttctctgatgtttgcatttggtggtgtggtttcacaataaataacccattctaatgccgcttttttgcggatatctgaggtgtagacttgatgtatttcggttaattgttcattttgctccaccacatcataatatcgtaaataaccgccatcacagtaatacaggttgtgcagtaaaataatatcattattgattatttcactgccgacagattttcctgttgctgactcaattcgccaggcaccgccataaatagctaaagaagcgtctacagttaccacgccatattttgttccgggtttattaccgttgccaaatacactgagataccccccgctccaattcttgtagctgtttaatattgtcacggtatcgccatatttaagtacattatccatatccatcatttcctcggaaaatatgttattgcctttcaaacaactgatacttaccctgaaatgacttcccctccgattatgctattagtgcataacttctggtgtcatttcaggattcggttattgccatcaacaggttatcttgccttttatctgatcccttgtgggcctaaaatagggttgaattcctgcactgttgaatattcatagcaatgggagataggaaaagaaaagatcaaaaagttaatttttatcagataggggattatttggaggatgagtgagtttggcttattatcatgttacttgaaaaggtaagccatgttttttttgtttttaaccctgttcatatcagcaaaaacggtatcattttaccgatatatctgccgtgatatacagaaaaaagcggcataataccgctttaatttattgataaatgtcatctctactgatgttgccagcgtagtgtattttggcttttttattcaggactgtgaccaaattaacacgactatgctgtcattgtaattattattgcctccattgctggcaccgataatggctgttcccggtttttcgtcaagggtgttataggcgtaacggagtttgcagggcttgccgtcgcctatcatttcaatgcagactttgccggtactcgatgagtaatttttaaagcccaacacactattggcaccttggctgattaatgtatcgactaactgatcgtcaatatacacttttatcgtttgctggtgggcagtattaccataggctgacaggctaagctttatattgtgaggtaactggaaacagtgtttaccggtatttgtgctgccacatattccgccacagtttctatactcactacctaacgaatcaatatcaaccgatacggcggcttgaacttttttgaaagtaactccgttccagtaagcttgaataaaggagggttcaccatcgatagcatgagattttgtattgtattggatgtaataactatccttgaaaaagtaaatagtagcgccggcggtatttttccataaaataacggcattgaggtcttcactaaatcctgcatatttcccgatagtgccccaccggtctgaaatggttttcttattaatcgaatgtgaactgacggtgtaatcgatgcaatctctgcctttgaagaaacagacaacatcttgttttgtatccacccattctgtggctgcgtcgataccattttcaaatccggtacctttcaatcccggccatccctcaataatgggttttggcccatcaatcaccaaggctttggctatatcgaatttaaggtattgagagcctttaaaaaaatataatgagccgtttaaattaatcacatcgtcaatatctttttgaaactcgatagggagactaggccaatcattgctgatagtttggggataactcgtgtctgctttatcttctgagtcgttatatctaatgttttctgagttaagaaataaataggtgtttgaattcattttttacatccttaataatggttaatttgaatgtcattttgatgtgtttactcgattttctattttcagatatcactgcgatatatttttgtctcatgataatggccaattcaacactaccacactatcatcataattgtcattggaaccattgttagcgccgataatggctgtgccgggttttgcttcgagagtgttataggcataacggagtttgccgggtttaccctctcctatcatctcgatgcagactttgccggtacctgatgtgtaggtcctaacatctgttatgtgacttattcctttaccggttaaggtatcgaccaatcggtcatcgatatagacattgattgattgttgatgaacatcactatttacgtaggcagtcaggccaaatcgaatactttgaggtaattgaaagcagtgtttaccggtattattaatcccacatgttccaccgcattttatattgatattactccccaatacattgggatcaacggacactgctgcttgaattttattgaaagtgacgcctttccatttagtttgaataagctcgggttcaccatacatactattcaacatgagatgtaagcggagatactcattacctttaaaaagataaataaaataaccggagttccgccatagaatagcggcatctaaatttgcactaaattttgcgtattctccggtaattctccatctttctgcgatatttttcttatcaatggtgtgtgaactcacagtgtaattaatacattccttgcctttaaagaaacaaacgatatcttcttttacatctatccactctgtggcggcgtctatcccgttttcaaattccgttccggctaatcccggccatccctctataatgggttttggtccgtcaatcacttgtgcttttgcaatatcaaatttaagatattgcgagcctttaaagaaatacaaagaaccatttaaattaatcacatcatcaatatgcctttgaaactcaataggcagattaggccaattattacggataggttgaggataaccggtatcgatgttatttaatggatcattatatttaatattttctgaattaaggaagaaataggtattggtattactgtcattgcccatctcgctgcctaataaatccatatcaattggcaccgcagcttgaactcttttgaaggtcacaccccgccaattagcaccaatgggtgcttgaccatcgatggtattcgatttcagattaatcctgatgttcgaattgtctttgaaaaggaaaagaaaagggctaccaatatttatccataaaatagctgtatccagattttcactaaattctgagtattgttctgttatcccccatctgtctgcgatagttttcttgctaacagtatgtgaactcaccgtataatcaatacaatcactacctttaaagaaacagacgacatctgtcatacccatttttgctacatagggccattctatggctacatctatcccgttttcaaattccgttccggctaatcccggccatcctgctataataggttttggtccatcaatcacttttgcttttgcgatatcaaatttaagatattgtgagcctttaaaaaaatacaaaaaaccatttaaattaatcacatcatcaatatgcctttgaaattcaataggaagatcaggccaatcgttatttataggctggggataaccgatatcagattcatacgacttctgattgtgtctaatattttctgagccaagaaaaagataacttgatgtattcatttatatatatcctttttggtgattgggatttaatatttcgtttgaatttttttaccactgaaatagggtgagaataatattaagatacgctaatttaactctatcatattgatcatctgtctggtgaatagggaaatttatattatttaaattaatcctgatgataggttataagcaagactatatattaacaactcattaatggatttaatattgttggattttatgtggattactttatttaagaattaaagatgaacttatttgaggtataaaatacaagattaatgtgtaattgtattttttataggagatattttagttatgaaattagaacaacatgaacgtcaaatctcaattgaaagttcgtctaattctactgcggttccaataacggtatgggaaccaaatttatatcctgaaggtcgatgggtagatgcgacaacacagagagctggtgtgttgtttaaggactcaggttacgggactagcgcttgggatatcatcagtgttgggggaaggaaagctttcaaggcacaaactttgtctaaatttggtcactgtctcgggattgcaacagacacaccggttgatgccagacattgttattgtgaacttgacctgttttgtaatccatatcctgacatttcagtaagtgtgctatccaagaaaacgagcgcaagcggtacatatcaaaatattggttacggctatatggcgattcatttgactgggggatatcaaggtaagcctcaatggatgccatcaaacatttcgttagggacttcgattgacacggcgacgccttatgtcatggtttggaatcttcaggctaatttgattcagtcagtcaattttgttggtaaacaaacagatggtatttataaagggcaaccgacgctaggcagtgctaattctggtgttgcactgagttatgaatggccaaaaaattcttggtcacgttggcgtattggattgctggcggcaaataacggaacattaattattgagtggtataatagtgtggcagataaatggaaggtagagctttgccaatataatatgaacacgctgatgacgggaaatcttgcggctggtcaaatagggattatttctggtatgtcttctcaggctactacaatagatcaacaaaattctctttaccgaacaccgtttgatcgagcgatattttttcaagatttttaatatggaatattgaatctggttatttgactatcttgtaggatatataccaaggggctttcttattagccccatatatccgttatctttcaaaatgtattggttttaatgataaaagtttggttttttgcaattaaacagatcggaaaaattggaataagttacttcaaagttatctactgttttgaaaaatttaaataatcagtatgtgaataattaatggcttactgggaagatagtcgtttttaatataagtttatattatattatattatattatattatattatattatattatattatgatacatttaaatatatattacattgaaaggcgagagtatgaaataaaattgatcgctgttttatgagttgataaaaattatctttctgaggttaagccaccactaatgtttccatttatgaatagaaaatgtcggtagcggcctaactccaaattaattctatacactgtgtatgacacagcacttaatcattgaaactaaactaactgattgcactgaataaccgcagagatagatgcatatgaatcgatatgtaccgtactaccacgtatattactccattgagcttttatagtagaaacattagatgcaagagaataacgggcaaccagtgtgaatggcatacgtccagaattttctgggatcttactgctgtaagtaaatccaccgtaagccaattgttcgccttgatcagttacaatagcaaagttccctccaggaaaattgttacctgaagcatagggcgttggtatatttaacgtgattaatgctgttaagcatggtgagttcgaatactttgaaacatcaagtttcaaaccgggtatatcaacataattttgacttgatgtttgtagcggattgctacgtggatctattgatgcaaaaacaattgacatgattaatactcctaggttagttattttcgttttttcttatttagttccctctaaaatacttatcctaattcttaatttatacaaatcaccttatcataagactctattatttactttttttaaaattaaacaaacatcattattttttataaataaagatctggctcaactaatagatagataatttatattatttttttctgattttaactcaatgtttatatttaactgatagataattgaaattggatttaattatctccaagtgatctactgttttgaaaaattattttgcatatgggtaaattaatgccattaatggattataagtaaattcatatattaacaattcattggtgaatttaatgtttttttgataagcatgagggtttttattcattttagaattaaaattaatcttgattttaggtataaaaataagattgaagtgtgattttattttttataggagatattttagttatgaaattagaacaacatgaacgtcaaatctcaattgaaagttcatctaattccactgcggttccaataacggtatgggaaccaaatttatatcctgaaggtcgatgtgggtagatgcgacaacacagagagctggtgtgttgtttaaggactcaggttacgggactagcgcttgggatatcatcagtgttgggggaaggaaagctttcaaggcacaaactttgtctaaatttggcaatattggcagtcactgtctcgggattgcaacagacacaccggttgatgccagacattgttattgtgaacttgacctgttttgtaatccatatcctgacatttcagtaagtgtgctatccaagaaaacgagcgcaagcggtacatatcaaaatattggttacggctatatggcgattcatttgactgggggatatcaaggtaagcctcaatggatgccatcaaatatttcgttagggacttcgattgacacggcgacgccttatatcatggtttggaatcttcaggctaatttgattcaggcagtcaattttgttggtaaacaaacggatggtatttataaaggacaaccgacgctaggtgatgctcatggtgttccactgagttatgaatggccaaaaaatacttggtcccgctggcgaattggattgcttgcggcaaataatggtacattaatcgtcgagtggtataatgttgtggcagataaatggaaggtagagctttgccaatataatatgaacacgctgatgacgggaaatcttgcggctggtcaaatagggattatttctggtatgtcttctcaggctactacaatagatcaacaaaattctctttaccgaacaccgtttgatcgagcgatattttttcaagatttttaatatggaatactgagtctgattatttaaataagatttcaaaatagcgctacatcttataccactcataattctatgtataacaattggttggatggggctatgtgtagcataattacgaaacgttatttaaccatcttgtatgatatataccaaggggcttccttattagcccctaattattgtaatatcgaaaaatgattttgatgataattttattagcgttgctaaatgtggcataaaaaagcggcataataccgctttaattgattggtaaatattattttcgtttgtggtgaaatttttcaaagtatttttaattcacaccagcggccaatttaatattactacgcaatcattgtaattattattggtgccattttcagcgccgataatggctgttcccggttttccatcgagggtgttatcgaaataacgcagtttgctaggtttgccatctccttcaatttcaatacaaacttttcctgtacctgatgtgtaggttttggtcgccatcggattatttgttcctttgccggttaatgtgtctaccagaaggtcgtcaatatagacttttaccgtttgctgaatgttcgtattattgtaagctgtcaggccaaatcgaatactttgaggcaattggaaacagtgtttaccagtgtcgctagtaccacattctccaccacaatttgagggtttggtaggcggacaagggtcattgattttttccatcttccactggtctaccttatgtactttacgagcgctattaccagaaagagatacaccatataacgtgtttggtttgttggcattaccataactattaaggaaacctttatttccccatcgattatgtaggctgataattgctccttctatgatatttccctttatagaataaggtgtctcgcaataaataatccactctaatgtttttggagaatatgtatttatatcagatgtgactatcggatgtatttctccacttggtaccggttgatttgggccatcataatatcccaaataaccaccatcgcagaaagccagattatgaagcaaaataatatcatcattaattatttcgctgccgatagcttttcccgttcctgattgtattcgccatattacccctagatcagaaaaggaaggagctacagttaatacgttatgttttgctcctgggatgtcgttacttccatgtgtactgagatatcctccttgccagttattgtaaccatttaatattcttactgtatcgccatatttaagtatatctgccataatttatccttaatgtttgtggtttatttttaacaatgagtatgacactgaaattaccctggcttaattattctgtttcataattttatgggttatttcagaataggttattaaaatcagcgaaatgctcaacttttttgtaatcctaaaaaaatgattaacgcttgatttggattaattatgaatattaatggttgttgaagaaaggcagaggatttgtttcttgcttctgacaatgaatatatcactaaaattactttcatttaatttactatatttctatcttgaactgtggagaaatcacattataccgcttgatttaataacgatagaaaaataaaaacttaatttttattgacacgaaggatacaactctaataaattgatactttgatataaataacatttatacctaatagattatctggatggaactcagtccaatttttgcgatctgaacatccaagattaacggaaatataaataatcgatattttgataaaggaattatcattatgcgaatgcaggttaaaaactgattgaaatgaatggctttcataaagtaattgttgtaaatataatgttttctctttttttcttttctggtatttgattctttaggctcttctattaatgcattcggtaaagatttgcctgaggaaatatgggaagatgttttttgtagcttggtagaaatactataaatggtaatgactaactaataagacagagaaacagattgtggcaaagaaagaaaaacggcctcaccatgacggattattcaaatattttttaacgcagcctgaaacggccagagagtttctatccctttatctgcccgaagaaatccagtcgttgtgtgacttagccacattgaaactggaacccggcagttttgtggactggcatttacgtcaactgcacagtgatgtgctgtactcggttgaaacggctcggggacaaggctatatctattgtctgattgagcatcagtccactcctgacccgttgatggcctggcggctgatgcattatgccatgttagccatggaggctcacctgaaaaaaggccatactgaactcccgttggtggcacctctgctgttttatcatggtgagattcggccgtatccttactcaaaccggtggctggattgtttcacgctccccgaacaggcggctcgcttataccgtcaggcgtttccgttggtggacgtcagtgtgctcagcgatgaagagatcctgacacataaaggggtagccctgatggaactggtgcaaaaacatattcgctgccgggatatgcaggaatggctcctccaattggtggaactcttgaatgcagggtataatacaaccgagcagctcaatgtggtgttacgctatattttactgaatggacatacgctggatctctcacactttgtccatcaactgattgaacaatctccggagcatgaaacgatgctgatgactattgcagaacagcttgaacaaaaagggcttgagcgaggtatcaagcaaggtattgagctaggtcgagaagaaggccgagaagaaggtcgagaagaaggtcgagaagaaggtcgagaagaaggtcgagaggaaggtcgagaggaaggtcgagaggaaggtcgagaggaaggtaaactggaaacggctcgtgccttattacggcatggcgtgagtttggacattattgtcaccagtaccggactgagccgggataaaattgaaatgttaaagcattaaattaatcttctctttcacagtaaaatgccgatatttaagatcggcatttttgttcttattcaggatgatggctatacaagggacttttacgtttgcccggcgaagctgaaaccggtcagactgaagtaacaatctccggagcatgaaacgatgctgatgactattgcagaacagcttgaacaaaaagggcttgagcgaggtatcaagcaaggtattgagctaggtcgagaagaaggccgagaggaaggtaaactggaaacggctcgtgccttattacggcatggcgtgagtttggacattattgtcaccagtaccggactgagccgggataaaattgaaatgttaaagcattaaattaatcttctctttcacagtaaaatgccgatatttaagatcggcatttttgttcttattcaggatgatggctatacaagggacttttacgttttcccggcgaagctgaaaccggtcaaactgaagtaacaatctccggagcatgaaacgatgctgatgactattgcagaacagcttgaacaaaaagggcttgagcgaggtatcaagcaaggtattgagctaggtcgagaagaaggccgagaggaaggtaaactggaaacggctcgtgccttattacggcatggcgtgagtttggacattattgtcaccagtaccggactgagtcgggataaaattgaaatgttaaagcattaaattcatcttctcttttacagcaaaatgccgatattcaagatcggcatttttgttcttatttatagggagcgagtgcagccaacaaagaggcaacttgaaagataacgggtataaatgggtatcgtgtggcaaagggcagcgctgacgggtatttaaaagggcaacagaaactatagtgatactaggaaaaactaaaaacattattttcatgctgaaactctcacattgattttggataattactgtatccataaaagccgataggtcagtgaggttggcccgtcatcctaaatttaacctattgtttttacctgtttattctccccggctgaataaaattgagcgtctgtggcaatccttgcatgaaacggtgacacgaaatcatggctgtcagtatatgtggcagttgcttgagaaagtgaaaacgtttttaaattcatccccctacatgaatagcagagaataaaaagagtgggtgtccatataagttatttatgattgttttttatcaccaaaccgaattggttgtgtcaaaatagaatttagtttttacatcaaaactgttaaattccaaactttcgggatatagtggttgtcgtagtgtcaactttgaccataacacctttattgagacaaagttcattttgatttccaataaatcataaggcaacaacacggtgaaaacagggctaaaacaacgctttcatatgctaataggattagcagcaatactgatcataatccaattatttgatactttaaccggtggcgcactaagtcatttcggcatcattccccgatacgctcaagggttaattggtattccattatctccattcttacatggtagctgggggcatttgttcagcaatctccccgcgttattagtattgagtgcgttattgatggcccactccattcgttattatgtgatagccagcttgtttattatctttgtgggcggaacattagtttggttatttggacgttcggctattcatattggtgccagcggatggatttttggtttatggggattgctgctggctaacgcttttttcctgagaagagtaaaagatttcttctttgcgattctcgtgtttgtatattatggtgggattgtgtttggcttgttaccgtggcaaacgaatatttcaacggaaggccatatttttggcgcgatatctgggctggttttttcttggttatcgaagagatgggtaataacgagccattagttttatggtattggggataagtagattatccccatttcagataattattaatttcgggcgattatgtccatttcaacgcggcatcatctacaggctgtcccaaaacttgtttatcttttttgtaatcatgtggaatctgccaatttggactatatccctgacgaggaagcaagtcctgtgcacgtttcacataaccagatcgcaaagcgccaaaaatatgttcgtcctcctgcatctcacccggctgagcatgtggtgttacaacggtagcatcgcgacgttccatttcattcaacaaacggcagatataatccgcagatagatcaactttcaacgtccaggcgttattgatataaccaaacagacaggcaaaattagggatattctgtatcaacgttcccttataaagcatgcgatcatgactttgttgcttttgtccatcaatagagagttcaattccaccaataaaatgtaatttcagcccagtggcggtaataataatatctgcgggtaattctttgccggattttaataaaatattgttttcagttatacgttcaatatggtcagtaacgatagaggctttaccttcttttagtaccttgaataggttattgctgggaataagacagagccgttcatcccacggcatatattttggcgtcaagtgcttcatgtcaaaatctgggccgacacgcctgcgagccaatgccagtaaaaacgatttcaataatgtaggtaaatgtcgacttattttataaattaagcgaaacagaaaaagattgcgctttctgctcaatgtgtaaatccagcgctgtggaataatgcctttgcaaaactctgctatcttatccctttcaggcattgaaaagatataactgggggagcgctgtaacatcgtgatatgtttagtatcatttgccattgcaggcaataaagtcactgctgttgcaccactaccaatgacaacaacttgctttcctttgtaatccaacccttcaggccagagttgagggtgaattaccgggcctttgaaatcttcaatgccggggaatttaggtaaatgaggttcatcatagttataataacctgttgcagcgatgagaaaacaacaagtaaattgccgggtttccccacttatttcgtcaatcgcggtaacggtccactggcgagtcgcatttgaccagtcagtatgagtaatttttagcccaaactctattttcttatcaatgtcatactcttttgccgttgcatggatataactttgaattgaaggcccatctgcaaaaacactggtgtctgtccaggggcggaatgtatagccatagctcatcatatctgaatctgagcgaatgccgggatagcgaaataaatcccaagtaccacctatcgtttggcgacgttctaagataataaacttcttatcaggacatttccttgttaaatgacatgctgtaccaatgcctgcaatacccgcgccaataatcaaaacatcataatggttattcactgtatctctcctacaaggtcattttttgatgagttgaaactcatctagctaaagcaatgtgattcttgtcgtcattgacagtagcatatcaatatgaaattgttttagtcttacgttgctcattacaaacgtttaacgtgtcaatattccctaccaccacaattaaataattagtctgagaatattttcaccctttaatatgaatattgggcaccgtgtttaagtcgttatagacgaaacaaataccaccaaaagtttgctcaagcatttctgcctgcgctcgctcaccccggtcacatagttatcgatgctcccgaggattcactcccttgccgtcgcgatgcatcttgaaatccatagggtatattgattgaatatctttttaaagtttagatcctagtcattcatggggagatttttcggttaattcgataaaataatccagagaagaggatattctctgaattattttaaaaatgtgaagttgttcaagggattttaatttttactgattgctgactgagccctgctaatcattttcatgttaggggccagtttaataccaccacactgtcgttgtaattattgttagcatcattttcggcaccaatagtcactgttcccggttttccgtcaagggtattataggagtaacggagtttacaaggtttgccatctcctataatctcgatacagacgttgcctgcccctgatgtataagctttagtatcggttcctttgccggtgaatgtatctaccagaagatcgtcaatatagacgtttactgtttgtttatgggtagttgtattagtataagctatcaggccaaatcgaatactttgaggtaattgaaaacagtgtttacccgtgtcattggtgccacatgttccgctacagcctccgttatttcctcggtcactgcctaataaatcggtgtcaatcaatactgctgcttgagctgttttgaaggccccattggtataattagtaacaggtgcaggtccaattacaatagtattcgattgaggattaaatgcgatataatgattgtctttgaagagagcaatcgcagagtttattctccatgtaacagcatctaggtttttactaaattctgtgtgtttctttgttatttcccatctgtcggagatagattttcgcttaattgtgtgtgagtttacggcataatcgatacaatcactacctttgaagaaacaaacaatatttgttgtaaattctgtggctgcatctattccattttcaaattcggttcctttcagtccgggccatccatctgcaataaatttcggtccatcaatcaccttagcttttgcgatatcgaatttaacgtattgcgaacctttaaaaaaatataaataaccatttaaattaatcacatcatcaatatgcctttgaaactcgatagggagatcaggccaatcgttactgataggttgaggataggcaatatctgatttttttgatatttcattatatctagcgttatctgcgttaagaaataaataaacatgtgagttcattgatatatacctttcatggtttttaagtttgtcattgatttctcatttgttaaattccctgtttacagatgaaacatatcaataataatattaaaactatttggcgaaacagaaaaatttatactgtgaaaattaatataaaagatggggcgtggcaatgttatatattaacaaattatttattgatttaatgatgttgtttttctgcaaaaatataaatatatactaagagataaggtttatattatgcagtgaaggtataagacactattttatatttatttttgatttgtttctatgttttaataataacagattgaaaatatattagattgataatgcttgcatataaaaagcggcataataccgctttaatttattaatgattttttgtggtgaaattaatagggtattttaaactaattcaccagtggccaattcaataccacaacgctgtcattgtaattattgttggcgtcattttcggcaccaatagtgactgttcccggttttccgtcaagggtattataggagtaacggagtttacaaggtttgccatccccgataatctcaatacagactttgcctgtaccggatgtataagctttagtatcgattcctttgccagtgaatgtatctaccagaagatcatcaatatagacttttactgtttgttgatggatagctgtattagtataagctatcaggccaaatcgaatactttgaggtaattggaaacaatatttaccgccatcactagtgccgcattctccagcgcaattggagggtttggtaaccgggagacaaggatctttaacttgtgtcattttccacaggccggtatagggtttacgaaggttattagcagcagtgtatacatggcatactgtgttagggactccaacccaaccattagtatcaagaaagcctcgggttccccatcggttatatagcgtaatactttcatcttctttgatttttccatcaatcgatggcatgtcagaataaataatccactctaatgtttctggacggatatttttatctgatgtgtgtatcgggtatatttcgccttctggaacctgttgacttgataatgcataatgtgctaaatagccgccatcacattgataaagattgtggagtaaaatggtatcgttgttaataacttcactgccgataggtttacctgttcctgattcaattcgccagaatgttcctgcctcagtggtggttatcaccgtatgtttgccatctgaaataccactcgttccatatacactaagatacccaccatcccagtttctgaaactatttaatatttttacggtatcgccatatttaagtatattcgccataatttctccagaaagtttgttatctgtttctaatcgttgatatgtcccttgtaactgttatgaactcatctattaccgctcaataaccttttaaattgaaccattgtgataaataggggctgcacttttgtggttcttaatcgggatagccgtcgcgataaacgcctgctgattgagtatcagctctaatgattattcggtaaaggtagtgcctttgttacttacttctaacaatgaatgagtctgctgaaattgttgttgcttgattattctactttaccatcatcagcttcatctcaagcctgattacgttgttcatttactggatgatacacggtgcttttttttgctcggcatgtgatgtaaattgcttatcacgtcgatgaaatttaagccaacaggaattgagatttataatgtcgaagttaattggaaataatcaggtagttggaactaataatatagttgttattgcgatggttgtcgcattagttcaatttattaatgcgttagagtacatgatggtaactccgctttttgtttatatgtcgaaagattttcacatgccggttacgatggcgggggttattgcgggtgcttatgttttctcctcggtattttctggcctgacatcctttttctttattgatcgttttaataaaagaaaggttctcattttaaacaccctgtttctcggcctgattacgttcttaacgattttcgcctcagaaccataccaacttattctgctacgtatcattgccggtctgtttggtggtgtgacgttgggggtaggtattgggatcttactgaataactccccggaaagtatgcgaggaagggtattgggaattgcgttttcatctttttcatttgtaagtattttaggtataccgttatgtttatatttggcagagagttttaactggcaagtctcttttctatttatcgttattttatgcatagtaagtttgcctctgatcctcttctttatcccaggaacagagaaagtaaaaaatagccagaaaaaaattgtgctaaccaaaaaaatagcattagctggaatggcaagtggcgtcagtaactttagccccttcatgcttattccgatacttgctccgctattaatgaatgtattttatatcccggaaaatcaggtttcactggtattcttttacggtggtatcgcgtcttggttgggaacttatttaaccgggaaactttgcgatagatacccgcctcagagaattaccatcgccgcggcgacgttatttattgttaatatttttctgggattaacgggaaaaataaatggatacgttttcttctcactttttatgttcgcgacttatgtacaggtgatggcggcaaacgtgctcgcttcctatgcctcgacgcctgaaaatcgggcaggttttggtgccctccagatggcattttccaatttgggtgctggcgtggtgttcttcttctcgtccattttcttagacggtaaggagattattgctgagaacgtgcggcctattttcatactgactatggttagcgccctgatattacctatatatgtaatgaaattagctcaggtgatgaaaagagggacgaaaaatttaatgagtaatgtttagcgtaataattaagggaaaataaatgtagatatgtgagctagccttaatgataaaatatagattttgcgctatattttaatttaaggctaatcattgatataagaaaataggcgtgattaataaggattgaatgttattttaagtgtaatgtcacaggaggaaattaatgttgcaaggataatttaggtcaatgctggatggcagtgtgcgaaaggatgaagttattataaatcctatcataattattatttgacttactaattgatataggtgaataaaatggaaagaaaattaagtaacactcggaataaaccagctattaatattatcgcgggagtaacaaatattaaatctatttataataaagtgccgtgtaaagttgtcgttgaacatggatatgttgccagaaaaagattctctgtggataaaatgtctgaatggcatggcgatttatgggctccctggataggtgataaatatgaacctaataaagccattcatatctataccgaaaggggatttaaatctgaatttgaatttaatatttggatatttcaggattattggaatccaccgaatgaaaatgcggttaagtattctataaatagggaattcacttacgataatgcattagagatccctggtaataatcgaggtggaggaaataagatactgacgttgaattttaatgataataatattgatctggaaatgatatagcgttatgagatattgaatatatcggataatgtgctgtaccaatagacattcgttgaaatgaaagcatttctccgcgtgttgttcagtatttttgatttctttgtggatagtttatatggttgactattaggcaagtttttatttgagctgataatgaaattattgaaatgctgatacgcgtagaaatcgtttatctctttaatacctatcttattaaactatttcgcttaccgtttattgttataaagaacaaatccacttaatgaagtgagttgtactgcgtataggtgaatacgcgggttgatggagatataattaataatgtaattaataatcaatatcatttgagcaaagaagataaaataaagtcgtgaaataataataacaattatccgatatttattgaatatttttactgtttattacagattgttacaatttgtaacaaattaagaattaaaaatggcaataattataattagttacgaaatatcattaagaatttcctgaattttatttatttttatttaattatgtcttgtttaacttatgttgaagttgtacctcttattatctatataagattaatttttctttgttggatgttttctacggtaattctttcgttagcgtgagtatagtttgaggctatttttttgcatcggttgtgttattaagccattcgtcaattgagatgccattattcattccctcatatttgctgtttgtctaattatcggattaataactatctggctttcgtcctgactttcgtcaggaactggagcgtattcctcaggatgaaatgttgagcgatgaactgcgagctgaattggcagcactgacgccgcaagaagggtaattgtcacattattttcacgagatttaagtagtaaaggtatttgaatgactatacaagagcaggctacatcttctgtggcgacggctaaccatcataccggtggggtttactcgtctttgtttgagaaaattaatttacgtccggtagaacgattaagtgatattgcatgttttcatgacagtgatggattggctggggtgacggaagatgaacgggtgaccgcggcggttagcgttcttctcgatctgctgaaagcctccgcgcaaaaagtggaacagttggataaagcattgctggattttgagatcggcaaattggatcgcaaaatcggccgccaactggatgtggtgatacatcagccgggatttcagcaaatagaatctgcctggcgaggtttaaaatttttggttgatcggacagatctcggtcagaacgtcaaaattgaagtgttggatgtggccaaggatgatttgcggcaagattttgacgatgcaccggaaattgttcagagcggtttctatcgtcacgcttacattcaggaatatgacataccgggtagcgaaccgattggcgcagtgattgccgactatgaatttagtgccggatcgcaggatattgccttattgcgcaacgtagccaaagttgcggcagcggcgcacatgccatttattactgctgtcgctccaactttttttggcaaaaagagcatggatgaagtggtggtgatgaaagatatgggtcactattttgaacgcgccgaatacacccagtggagatctttccgcgacagtgaagatgcccgttatattggcctcaccttgccaagagtgttgggacgtctgccatatggcccgaagagtgtgccggtgcgaacgtttaattatgtcgaagaagcaagagggccggatagcagtaaatatttgtggaccaatgccgcttttgcttttgccgccaatatggtcaggagttttgtcaaaaatggctggtgtgtgcagatccgtggtccgcaagccggtggtgctatcactgatttgccgatccacctctacgatctgagtaccggttatcgggctaagatcccatcagaagtgctgatcccggaaacccgtgaatttgaatttgccaatttgggttttattccgctctcttactataaaaatcgcgattatgcctgcttcttttcggctcactccacgcagaagcccgcagtgtatgacaccggtgaagccacggccaacagtcgcatcaatgcgcgtctgccctacatcttcctgttatcgcgcattgctcattacttaaagctgatccagcgggagaacattggcaccactaaagatcggcgtctgcttgaaattgaactgaataactggctcaacacactggtaacggagatgaatgatccgactgacgacatgcaggcatctcatccgctgcgtgaagcatatgtggtagttgaggatattgatgacaatccgggattcttccgaatcaaactgtatgcggtgccgcattttcaggtggaagggattgacgtcaatttatctctggtttctcagatgccgaaagcgaaatcgtaattatttattgggagttatgatgaaaattctacgtcctctctggattgaagacgcctttttagcccctcaacaatttcagcaacaagcgcgttgggaggcattgaccaacaactgtattgcgcatctggggctgattcacccctggggagtgcttgatattcggtttgatcaggaggcactgcgcttaaaccgcctgaaagttcagcacctcaaagcccgtttaccggatgggacgctgattgatactgatcatgctgacaatctgcctgcggtctgcgatttacagcaggtggcgtcggcggatatgcgtgctgttgaggtattactggcgctaccgctggagcacgccaatggtggcaattgccgtcagagtagtgaaagtgtggggccgggacaaccgccgctacgttatcagcaggaatgggtcgaaattcaggatagatatggcaatggacgtgaatccattgcggttgaacgccatgccatttccctacgctttcaacatgatcagaatgaggcttatctgacatgtccattggcgcgtctggtgcgtgacggacaaagcggttggatgctggatgaccgttttgttccgccattgctctcttttgctgcccatccgccactgctagagcagcttgatctgttgctgactcagctacgtgctaagcgtacccgcctgatgggaatgcgccgtgaaagtcatcaacgcatggcagactttgctgttgcggatgtatcgctgttctggttgttgaatgcgcttaacagttatgaaccggtgttgaataattttaacgctgcccctgcactgcacccggaaattatctaccgtgaactggtgaagttagcgggggcgttactaacgttctctctggagagcgatctcgatgcgatccctgattatcaacacgaccagttaagtgacgttttcccgccactgatccggcttattagtacattacttgaggcgagtctgccatcaagagtcatttcgattgaactggaagtggtgcgtgaaaatcagtggagagcatcacttcatgatagacgattgtgcgaagaggccgatttctatctctcagtgcgatcgtcgatgccagcgcacctgctacaaacccagtttccgcaactgtgcaaagtcggggcacctgatgatgttgagcggctgattaacttgtcactgagcggcattcctttacatccgcttagccatgtaccggcggcgatcccgttgcggttggaaaaccaatattttgcttttgatctaaataatccagtcgctaaagccatgttggaggcgggaagttgcgccttctatgtgcccggtaccttgtcgggcgttcagttagaactgtttgcggtgttacgttcgtaaataacccgtgactaaagtcgcgggtttccttgaggaggatctatgaacaaagagatttcaattgatgacctgatgctcgacattgggatgctagtgattgcgctaaaaagcggtgataaatcgatgtacggtgaggcgttatatcaaaaaggggttgaattgatagatgcggcacggcagcaattaagtgcaagtggcatcagcgaagagaacatggctcacatcatctatgccttgtgtgcattgctggatgaaaccgtactcagacgccctgagcgggatcatggctatgaaacttggtcgaaaacgccgttgcagacacgattttgcaatagcaaccatgcaggagaacggctgtttgaacgtatacgtcacgtgctggatcaaccacaaccctctctgctggtattagcgggtttccagcgcgtattggcattgggctttcagggcggtgacttggaaaagatttctcaggaacgccagtcattactggatgtcctgactgatcgtgccggggtaatggcggtgcagccccatcagatgatacgcgtcaatgcagaccgtcatcagggccaatattggcgtgcacgctctccgtggttttggggatgcttggcggtagccggaataactttggtgtggtgcggtctgcgtctctaccttcagcaatatttgtctgttaggtaaggctaaggaggacacattgagttgcgtattaaaacgagcgttgtggcttttagcgggtgttctggcggcgctgttgtgtctgtttttcttcccgttagggaatgtgtcagttgcattgtggttggctgtgatctcgatggtagcggtgatggcttggtggtgggtgaggcgtaccacacttgaaatatcccatcaggccagtgtttaccgtttgctggcggcattgcccgctgcttcgtggcaccagcctgtggtgctaacctgcggagatagcgtggcaaccctgtttgcgggagaacttgtacgcttcacgccacagggctgttttatctgtgtgccgaaacaaagtgagatgagtacgctggtagaagcgattattgccgccagacctgattggtgtaggcagatcagcgtgttattaacactctttcctgaacagcaatgggatcacgcggtgatggcggcaaagatcagggaatttcgctatcaggttgatcgtgttgctcaactgaccgcttgtcatacaccggtattgatcgccagctatcttgatggcgatatcagcccgtggttcgagctacaggcagatagcgcgacaatgacggtatggggagaaaaacacgccgctgttgggatgaatatctggttgaccgaaggagatgcacagcaacgcgtcgcacgtttacaacaaacgattgtggcggcggcatggcaacgctggatggtagaaaatatcttgaacgaatgccgatcccaggagctggtcagtcggccttgttacccgatagcaatggcactgacgtttttgccacaaacgccacaggcagacagcttatggacaaaatggctggtcgatcgtaccactttaccccgcattagccacagcattgctgaggcggtgaacgtatcgccatttcccgatgccatgttacgcctgttgccacatcatgttggtcatacaccgcaccgacgagcggtcatctggggcatcggcctactgagcggatttacctgtctggcgttggcctcctgtgcctggaacaacttgcgtctgttccgccagatacgcagtgatttacagcattatcaggtcgttggcgtgaaagatagtggtgcaaaagttcaggcttaccatcaacttaagcgtgatgcgacgttgctggaaaaatatcaacgtgatggcgaaccggtgcgtttagggttagggctctatttaggtgatcgcctttatacgccactgatgactgtgatcaaccatgcggtgttaccggtatcttcgcctcctgtactgaagagtggcaagccgttgccacagacattgaacctgagcagcatgtcactgtttgacgttggacagtcacgtcttaagccagaagcagccaaagtgttggtgaacgcattgatcgagattaaagctaaaccggagtggatggtggtgataacgggtcatactgattcaaccggtgatgccgtaaaaaaccgcgagctatcactagcgcgggcaaaagcagtacgagattggatattacaaaccagtgatgtatcgccgacttgctttgtcgtaaaaggtgaaggagcaacgcagccgattgccaccaatacaaccgcagtggggcgtgctgttaatcgtagggttgaaatcagtctgatgccgccgagcgtgatcgcctgccaacgaccagaaaatcactagggctgatgaggacgtcaacaccatgcactctgatgtttggcatgagcgcaatcagacctaacacgctaacagactgccatacgcgggtatggcaactcttttaaacaactcttttaattcagcggatgaagtgttggttaaacatagaactggctgggaaaacctcgccagacagataaatttttacctgagaatgggggcatttgttgaatgccgcctaacctctcaatgacaactgggactttaatatggataccgtatgtaccgcactattgtgccgcttaaattcttattgcgcacgggcattggaagctgctgctgcattttgccagacacgggcacatgctgaaatcacggtggaacactggttgctcaagctgcttgagggtggtgaaggcgatattacggtgattgctcgacgttatgcgtgggatatggatgcgttatggcagtcgttgctgactacaattaaccgtttaccacatagcatcaaccaacgcccgcggttatcaagcgatctgtgtagtttgttacaggttgcttggtgtattgcttctctggaagagggtaacgaatctatccgttcggtgcatcttttgcaggtgttgcgcggccaaccggcttggttgcgtattcatcatagctggccgttactcaacttgagtgtgacgcaactacaatgtttgcgcccgttgctggatcaacaatcggatgagcgcccggagatacagatagcggcgtgtctgacggcggatggatcaatcgctgaaattgcgggtagcgacccagataaatatgcgcttaatccccaaccattatcatcggctttgcagaacgtattggacaaattcacgctggatatcacagccagagccgctgagggtggcattgatccggtatttggtcgtgaccgcgaaatccgccagatgatcgacatcctatcgcgtcggcgtaaaaacaacccaattctggtgggggaaccgggggtagggaaaaccgcgctggtggaaggattggcactgcgtattattgagggcaatgttcctgacagcctaaaaaccgtcagcgtgcggatgctggatctcggcttgttgcaggcaggcgcgggggtaaaaggcgaatttgagcagcgattgaaaaacgtcattgaagcggtgcaacagtcacctgcccccattctgctatttattgatgaagcgcacacactgattggcaccggtaatcaggcagggggcgctgatgcggctaacttgctaaaacctgcgctggcacggggagaattacgcacgattgccgctactacttggtcggaatacaaacagtattttgagcgggatgcggcactggagcgacgcttccagacgatcaaagtcgatgaaccggatgatgagacagcttgcctgatgctgcgtggactgaaagcgcgttacgcccgttatcacggtgtacatattcaggaagatgcggtgaaagccgctgtcactttatctcgtcgttacctgactggccgacagcttccagataaagcggtagacctgttggataccgccagtgcgcgagtcaggatgagcctggatacggtaccggaggcgttgacgcaactccagtcccaattgaccgcacttgagatagagcaacaggcgatactggaagatattgcactggggcaatgccatcactcagaccgtttgacacaaattgaaatgcaacgtcatgaactgtatcggcaacaacaacagcgggataaacagtatcaacaggaaaaacagctcacgcaacagttgctcgatgcccggcaggatatcagtcggcagggtgatatagcccggttgcaacagcaactggcgacacgacagcaagggcagccgttactctcgtcggatgttgatgtgcgttctgtagcaacggtgattgctgattggaccggtgttccactgagtagcttgttgaaagacgaacagaccggtttgctgcatttagaacagcatttaggggaacgggttgttggtcaggaggcggcgctacgggaaatcgcccaacgtttacgtgctgctaaaacaggattgacgccggaacaggggccattgggcgtattcctgttggttgggccgagtggcgtagggaaaaccgaaaccgcgctggcattggcggataacctgtttggtggagcgcgttcgctgatcactatcaacctatcggaatatcaggaaccgcatacggtatctcagcttaaaggttcaccgcccggttatgtcggatatggtcagggggggatcttaacggaagcggtacgtaaacgcccgtatagtgtggtgctgttggatgaagtggaaaaagcccatcgtgacgtcattaacctgttctatcaggtatttgatcgcggctttatgcgcgacggcgaagggcgcgagatcgattttcgtcataccgtaatcttaatgacctctaatctgggcagtgatcaactgatggcgttattggcacaacaacctgatgccccgaacgccgtattgcatgagctgttacatccgatgcttcgtgatcacttccagccagctctgttggctcgctttcagaccgtgatttaccgcccgttacaggctggtgcactcagacgcattgttgaaatcaaactggaacaagtgactcggcgtcttcatagccattatggcctgacttgcacggtggaaagcagcctgtgcgacatcttagtgaatgcttgtctgttgccggacagtggagcacgcaatatcgacagcctgcttaaccagcaaattttaccggtgttatcacaggcactgctggaacgtctggcccatcacaataaacctgctggcgtgacgttgggcttcgacgaagaagagggtatcacccttgcttttaccgatgctgaaccggtcgcttcattggatagcgaggaaaacccatgatggatagaaaaatgctgcgcgcccgtcagcttaaggcgagtcaagctgtgctgccgggccatgcccgctaccggcttgaagtccggcgctgccatgctgaactggacgtattcagcttcaccggcgaagagcgcctgtgcgccccttattgctataccattgatttcaccagcccgacccgggatatcgacccggcggtgatgttgaacaaatccgccacatttatcttgcaggcaccggaaaacccggagcaggtgcgtaaagtacacggcgtcatcacccgttttaaccggcttaccacctcggcggatgaaacgcgctatcaggtctgtctggagccctatctggcgttactgcgccacacccggcgctgtgggatttaccagcaccagtcagtgccggagattgtggaaaagatcctgcgtgaacgacacgaatttcgcgggcaggattttctgttcacgctggtgcgggattacccgaagcgggaactggtggtgcagtggcaggagagcgatctggactttatccagcgcattctggcggccgtggggatctggtattgcttcgagatggacagtcgtctggggattgaagtggtgcggttcggggataaccagcgcaactatcagtacgacgtgcgtttaccgttacgtgacccggcgggcatgaatcacaacgatcgtgattcggtgtgggatttgcacgtggaacatcaggtagtgacgcaaggtgtgaaggtgcgggactacaactaccgggaagcaggcaatgacctgcaatatcaggtggcacgagatcgggatagcaccgtggtcggtgaagtataccgctatggtgataactttcttgaaaagggagaacagatccaaccggtaccggaaaccgcaggattttatgcccgtttacatcacgagcgcaacctgtaccagcagcaccggatcagcggcaaaagttcctccccgatgctggtccccggcttagtgctggagctcgacggagagcgaccggcaggggtaggaaaagcgggggtgttgattgtcgccatgcacagcagcgcccggcgtgacagcaactatctggtcagttttagcggtgttccgtacagcgaagtgttgagttaccgaccggcgctgcgggaacggccggtgattgccggcacagttccggcgcgggtgaccagcaactggtcgaacggcacctacagccatatcgacaccacgggtcgttaccgcgtcaaatttgattttgacctggatgaatggccgttggggggagaaagcctgtgggtacgtttagcccgcccgtatgccggtaaaactcacggttttcactggccgctgattcagggaaccgaagtggcgatcgcgtttgagcagggggatccggatcggccctacatcgcctatgcgttgcatgattcccggcatgaagatcatgtgactctctacaactacaaacgcaacgtgctgcgcacaccggccaacaacaaactgcgcatggatgacgagcgcggcaaagagcacatcaaactgagcaccgaatatggcgggaaaagccagctcaatctcggccatctggtggatggacagcggccccatcccaataagcgcggcgaagggtttgagttacgtaccgacgactgggggacgatccgggccgggaaagggctgtttatcagcgccgatcagcagattaaagcctcgggcgagcaattagatatgcagcgggcgctggctgaactggatgcggcgtttcagaccgcagcggggttgcgtcatgccgctgaggcggcgaaagcggaactggctgatattgaaacgcaggccgcttttatgaatgaaacccttaaagcgttgcaacagcgagcactcttactttctgcgccctcaggtattgctcaggtgaccccgggcaatttgcagttctccgccggggagaacctgataaccaccgtcggttgtgatgcggatatgagcatcatgaagaaattccggctggcggtggggaatggcctgagtttgttcacccgaactttgggcctaaagctgctggcggcttccggcaaggtagagattcaggcacagactgacgcgatagaggtgctggctcaacaggcgctgacactggcaagtcagcaggatcgcgtgaccgtctcggcgaaaacggaactgcgtctggagtgtggcggggcttatatctcgctgaaagacgggcatatttcctttgccggccctaaaaatgcccgcttccagtgtgacattttgcagaaaaacggcccggtgagtcagagttcagacctgacgttacctgagcgttgtgcgtcaacggcagagcggatgatgggtaatcaagatggtgtaacgaaaaaatgaggtgtagacaatgatagaaacaactattccactgacagtagattacgatttttctcccgaggctgaaaccagacggcaaaccggtttgttggctgacttgcgtatggcattgactcagcatgacggccacggttttttactggttgacccggcggtttttctcaaaaaccgacaggaagagcgattaccggcggcaatcctgaatcatcagccggcggccataccgacgcagataaagcatcatcatttcgaatcccgctattcgccctggctggtgccattggatatcaatcgttctgaggatgctgaactgctggcgctgagcgtcacgcaggcgttgcaggaagctgatccggcggagttgatagccgggcgtgggcgaatggtgtgtggctggctgttcagtgccagcccggtctccacgattgcacaccatatcgggatgatggcggtgcagtccgtctcatttcaaccgcaggtcatgctgcgcttttatgatccggcggtcaataatgccttttggccggtactggatagctggcaacgctcgcgtttgttggggccattgacagactggtatctgattgacggcgacggtcagttactgcaccgggacaatgccgagtctgctcaggaactgtacatcttttcactgtcattgacagcggaacaggtagaagaaatggcctggtcagggccgatgaatcgggcactgcgccgatatcgtcaggcacatcgcgagcagttacgtcgaacagaacgggaatccctgcatattatgctggccttgctgcgtcgggtgacagcacgctacgcctttgatatggcacaagatctggaatcctgtgcattgcatggtctgctttaccacccggagatagatctacacccccgaatacagtcgttgttatccaatgaaggcggtgatagcgatgaaggttatgccgagcgcaccgtcagactgacagtagaagcatggtcagcattggctcgtgactgctgttatgccaatcctgccattattccctcaaagaaccaggagatattgtgatgaatgaatcattatgttggacatgtgagtccatcgggccggcactgctgccagtgcgctataccgtggtgcctgataatgtttcggaaaccttgccgacgtgggcagaaacgctagaatcggcggctccgggctatcattatgcgctgcgtgccttacggcaggggtttttgtatgtctattatactaatgccggattagatgagccggagagttgggatgcctggagcgttagcgaagatggtgcgctgtggcaacagtttagtgcgccttttggtgtctctcctcagaaaacctcagattgccgtgcgccgaatcatttgaatgccaatatggaatttattgcgctaagggatattgccttgcgccaggagacctggctggcttttacaccttcggcgtggagctgggagaccatcgagtattatcacaacaaccgcgcagcgcgggaaaagcggatgcagtgcgtgaaaccgtggcaatggcgcggggtaccggaaggggtggggattgctcaggcgacggtagaaaacctgaataccgtcatcgattacggtctgggtgacaatgattccggcaaatatgttctgccttgtaaccggaaagtgtcgcgtatcagccggacattagaagaagcgccctactacgaagtttatcacggtgcgttgagaccgaagagcaccttatatccgtggagtagcaagcgagcgggatgtgcggacattacggtcagagcgatgcaaaagcgggggctggcaaaagatggcacgccggtatcgccggtgttaatcgcgttgcatgatccgataggaatagcgcatgaattagcgggctggggtgatgatatcgccggggcgcataaaacctttttggatgaattgtcgattgagtttatgaccgacagttcactgaatggggcggagaatcagttgcgtcaaatgcacaccacacatttcaaaaagccggataaagaaaaggatgccattttggcggcctctacgggtttgtcaattcaggagtgggaaaaacgcagagaggattcaattcgtcacgccatcgaatcggataagaaaacctttgcccacgattggaaaaaatataccgcagagctgaatctggctaaacgacaggcatttaatcaatgttatgccgatctttgcaccgacgtggcgaaggaactggagcaactggcccagttgagggtgagttggctgaaacagagtgggtttatcacctgttgtcaggattttcataccacccgactggaggacaatctcaattatcgtgaggccgtggattatgccatcgcttcgcttaacgtgaccgaaaccggttgtgcctatttagatgctttaattgacgaatattctgcgctgtcaccagaaaatattgtctggcgctcgttattgctgaataacccggaagtgatgaaagagatggacgggtttttacagaagatgcagttgaataaggggaatgaaaaaccggcggacatttcagtgtttatgaagacggtaacgacactgagtggaaaactggttgaagcctacgataaagcgaatgaagcactggaaaagccgcccaaatccgacagtacctttgcccgggcgatgttacacagtgaccggcggctggtcacgctgggtgaccggttctttaattttacccgcttagggaaagtgctaaatagcaccaatgaaatgttgagtaaaagtctattctcggtgatttcaggtgtgtcttttggcagggcggtgaaactatcggtatcgcagcttcaagagggtgatctattccggcgtcaggtgttgaagcaacttaaggaatcaggagcaaaagctcgtcttgaaacgaaaaatggttataacgataggtttaaagaattcgcccaaagtgccgaaggtgaaccagttttaaaaaaatcccggattaagttattggcactattttttaatgggttggaatatgccaatcagttaaaagagagtaaagggggtgtcaagggccaggcccaggtgaccgccgcgtttttaagtacattgagtacggcaatggagattgtggagccgatggttaagcacggcatagaaaatatagctgctgccaacacgattaagtttattgggacgaatgcagggacggtttctgctgcattaaattttggagtagatatcagtgagttgggatctgaattgtggaatggacgacgctggcagtttattggtctttacggtcttaaagtggcttatgattttgcgcaactcacagcagcattaaatggtttattagaaatcttaattaatagggcattaatttcaactgaaagtttactagttagaggagtatcaaggcttttggtgtgggaatattttgttttgctatgtaattggcgagtgatgctcgttatttttgtggttgaagtattagtgatatatttttctgataatgacttacaaaaatggtgcagaagttgtgtttttggtttggagccagcgaaaaatttgcaatccacgcaatggatttaccctgaatcacagaaagataagttgtgtgaggaacaacgtaaaagtttttttgaagcaattaaggacggcttatgagtacttatcgtccttataaagaagctattgactttgatgaaataaaacgtcagagaaaagatattgatatatcggtaaaggttaagcgagaaataataattccgcgctatcctgaggatagaaaggaggaagaaaaagcgattgaggaacttcaagctaaaatccccgaactggatgcgatattagcaaaagaaccaccgccaccggaattgccgccgggtaagccgttaatcaaagtgagtggtgtattagaagaactcgaaacactctgtgttatgggttattttactgatcgtgaatatgatccggccgcttttgcccgtcaggaagaacgagagttgtttggagggttattgatggcagtggcaggaaatacttcagcggcggcagttagtttgcaaaccaaagtgagggtaagggatgtttgtgattttgtccggggtaaaattaatggagtgccatttcacggttggttaggttttactatagcaaaagcgggtgattacgttgaattagcagtaaccgagcaggagggacactatgtggtttatgccattgcccatcccgaattaagggtgatatcgatgaccccgcgttgtaaacagggtattcactcaaatgctaaatatcagatacgtggcacttggtatggttctttagtgcttttctttgctttcatggtagggggaatttttagtgagcaaaccagagaaaatattattttgtatataaaatatacctctttattttgtggtttgatggcaattgttttttcaccgttaatctatttttcctgtatgagaaaacctaaaccgacatttaggttggctgaggagattttcacggtattggatttccctaatcctacggaaattaatctttatcaatttacgatgaaaaagttgaaggaaatgaaggctaattctccggcagggaaatctggtaaagagagtgaaagagttttgccggataagagctgttactccagctattactattattactgattcaagtaattgagcagaggatatcggttttatgaagaacaaagtaaaagttttgctgatgcaattaaggatatctcatgaatacttgtcagatgttaagaggtgctattgactttgaagaaataaaaagtcaaagaagcagtcttgatacatggattgaagtaaaccttgactggatagtaagccatccagaagacagagaagaagcagaaaaggagattgcaaaaacaaaagaaaaaatccctgagttggatgcaatattagcaaaagagccaccattaccagaattgcccccgcgtaaaccattaatcaaagtgagtggtgtattggaggaattcgagacgctctgtgttaaaggctattttactgaacgcgaatatgctcctgaggaatttgctcgtaaggaggagaatgaacagtttggcgctctattgcttgcgatgatggggaatacctcttggtctgcggtgaattcacagactaaaataaggttgtctagcgattatcattttgtgcaagggaaaatcaatggcatcccttttcatggttggttagggttgaccacagtaaaaagaggtgattatgtcgagttagttgtgatggaacaggaagagcattatgctgtttatgcgctgacaaagcctgaactgagaactatttctattattccttggtgtaataaagggatacgatcaaaagcatgggatgaagtcttttatacttgctgcatattttttcttatcgctgctatttgtttgggaactattctttttccagatggcagcaatttttgggatggagcagatatttttaccttatggcttatgttttttacagcggtattttctgtctattcatacgttgtgagcatcaaaaaaccgtggcagtcaattaaattggctcaggatattttctcagtattgggctttcctagtccgcaagatattagtcttgagaaactaaccaagaaaaggcttaaggaaataggggctaatccatcacctggaaacagtgaagaagtcttgccggataaatactgttttataagcaattattactattactgatttaagtaatcgagtggagataaaaatttatgagatagtcttcagaattatctatgctgagtcgtagagatattaaaagattaccggtctttggaaaattcagtcatgaattatccaaggtgaagttttgtctatttttatgcagtttgttttgtttgtaattttgtgtaaatcaaggagttttcgtgacacagatctataaaatggtttggataggttttgttattaatctctcgacatgtttgcttttgttggttgttataacaggatttgatttcaattatcttgggctctcttatcgagagcggagttttctcgataagatattaatatttatgctgatctttatttttctggaagtggctaatctgttggttattctcaaaatgccaagatatgcgaaaatcagctcttttattacatcctgtttctttccattaaattccgcggtctattttatccgggaaaggtatcgggacagcgcgtggatttggagttttggcgctattttattgctgattaggggagcgagtggtatttgcatcatgatggctgctgaacgttatctctcttatcgtaagacaaaagatcgttatttctttgcagagaaacctgggggctttttgttaacgctgaccccgttgagtaaaactatttttctgccttatgaatgcgttaaaagagttgaggaacgtgaaaatagtgtgctgataacggtcgatttaaataagaaaatcgacatcgtatgctcaaagaaatttattgatagcgatgatcgcaaaaaagtcataaaaacgcttttacaaacggcgttgaataatcagggcgacaatattatggcgctgaaaatgtgaaaatttattgttaatgatatagggttcatgatgtttgaaggtgttattcgcctgggcgataagctcagtagcggcggtgaagtgatttccgcctcctcttctatcgaaattgaaggtaaaagagtcgcattattaaatgatttagtcagttgtccgctgaaagggcatggtattaatcgtattgttaaagctaattctcaatgtatttctgatggtaaaccggtcgcatttgataaagcgctttgccaatgcggttgttatgtcatttccagtacgacgaaagccggaataggggaatcataataatggcttgggatattccggagtcttattccgtacaccggccagaaccgccagtctggtcgctttggtggcgtctgttcagtctggcttgtttcgctgtcgtggttgctgtcggcagtttctggtatctggttaaagatcccgccagcttgctttatgcgttggtcgctttagccggaataaccgcactgttcggggtgattgccggttggcgactgtttcgttacggcgtcgaattggagcaggcggaagtgctgatacaagagaacgcctggcaggaggctcgctggcaagcgtgggcttcgcaggcgatacgggttgtggattatggcgcgttttttccaccggaagtgccatcaccggcggataaggcggtattggtcaatggcgatagcgcactggcattgccccctttttccaattatctcaatttgtttgaaaatttactgggagcggtgcgcagtagtttggcagcacatggggttaatcataaagtgaatgtctatttttcattagacagtcccgaagcggtcgtatgggagcaattttgtcaggtttggaaaaaactggggctgcctttgtctcagctacaaggcccggtaaaactcaaagccgattatacccatcaaataagcgactggttgaccacggaaaccaaaggattgctgttggtcatcacatggtgttgggaaggcaataaaacgccggcggcaaccagtgagggcgcggtggtttggctactggcaccgtcctcttctcaattgtcggcaaaatgctgtctgcatcggccaatggtgacggtagccgcggaggctgagcagagtatggcccagtttctgcgttatcaacgtcctgccatcactgccgggactctgtggtacaacgatgatgactcaccggagaaagataggctgttaattgggttaaatcagagattgaaagccttgccatcatcggcacagcagagcgcgtcggcaacacaggatcagcagttcgtcccccattggcttgggaaatcagggccatatgcggattggtttgcattaacactcgccatgaaaatggccgagtaccagcaggcaccacagctttttctgctagcgcaccatgccacgttacaactggggactgtctccccgctaaacaatgtcacttcatcaggggacttccatgtttaaagcttttattacccgcaatcttggggtgggtctggtcaccagtttgatcgcactggtgttgggcggattgttatctttctggggcgatcgattcgggttatctactcaggctattaaaataattgtctggattatcagcatggtgggggtgatatggctgttgaatctttttcgtgattacaaacagcgtctgcctgtacaggaagtagcggttaaaccgcctgtagagcaagctgtactttcagaagcgccattttattttcaacggttgcaatatcagcttcgtcggcgttatggccccctttggcgtcggcgggtatgtattttgttggtgatgggacaacgggaacaagtagaagccattgcccccgggttaaccgcccagcactggcaagaaggcgagcaccacctgttgctgtggggcggcggtttgcaggtacagccggataaagcgcagttacaggcgttgcgccaattgcgtcgccgtcgtccgctggatggcgtggtgtgggtgatgaccgaagagcaactcggccagcgaacgcagatagagaccgcgttgcgcatgctggagaaacagggacaacagcttggctggcaggccccggtgtatgtgtggaatgtgcgtcacagcaactgggaccagcgcgaccggccaacccagaccgtgggctgttttctgtcagaagagtgtacgcctgagagtctggcgcagagcctgcacagcctgatacccacgctggcgaaccggggcatggaacaggcgatagcggaaaaccgtcacgattttctgttgcgactggcgcagtctttgcgggataagggggtaacacgtctggtcgggcagttgacgccgttgttagagcggccgccgataaggctgtcgggcgtgacgttcagtttaccgctgccggtgccgtcaggcatggtggagcatggctggctggtggatgccagctggaatggggtgctggaacaggtgcgtgatagccggggacaggcggtgggttttccgtgggagaaaagtgcgcagtggggtgtgatagcgctggcagcgttgtggggaattggcagtgtgacctcgtttggggttaaccgtcatcagatagcggtcagccgtgaacgcctcagcgcggccggtgaccgtcagggagatgtatcggcccgtttgctgagtcagcatgggctgcaacgggagattgaccggttgcagtctcagtcagcgcgtggcacgccctggtacagccgttttgggttcaatcagaatgaagccttgttgaaagcgatgtggccggtgtatcagcgcaacaatgccgaactgatacgtgatgccgctgcccggttgctccatcagcgcctgaccgaactggtgaacctgccggcgggcagtgcacagcgtcatcagcgtatcacaccggcgtataaccagttgaaagtgtatctgatgatggcgcggccggagaaagcggatgcggcggtgatgagccgggtattgatggcggactggccgcaccgtgccggggtgacggacggtctgtggcaaaacagcggcgaggcattactgactttttatgctgagaatttaccgcgccacccggagtggaaaatcagcgtggataacgaactggtcagtgaagtgcgtcagatattgctcaatcagctcgggcagcgtcatggggaaacgatgctgtaccagaaaatgctgcaacaggtggcccacagttaccgggatttaaccctggcgcagatgaccggggctacggaggcgagtcgcttgtttagcagccgtcaggtggtgccggggatgtttacccgtcaggcgtgggaaggtcaggtgcaaaaagcgatagcgcaggtggtggcgtcccgacaggaagaaattgactgggtactcagtgacggtcgtcagccaatatcgaaggcggcttcaccggcggagctgaaagcccggctgacagcgcgttattttaccgactttgccggggcatggctgaacttccttaatagcctgcgctggcataaaacccataacctgtccgacaccatcgaccagttaaccctgatggcggatgtacgccagtccccgttgattgccctgatggatacgctggcttatcagggagaagccgggcaaccgggcacggcgttggcggattcgctggtgaaatcggcacaaaacctgttccagaacaataaaccgtcagtgattgacccgacccgccttccaccggggccactggataacgcgtttggcccgttattggcgctgatgggcaaaagcacagaggaaaacgggctgacggcggacccgtcactgagtctgcaaaccttcctgacgcgggtgacacgggtgcgtctggcgctgcaacaactggcgaataccgatgaccccccggcggtgatggaagcgctggcacagagtgtatttcaggggaaaagcgtggaactgacggacacgcggacctatggcagcctgatagcggcgagtctgggagcggaatggaacgggtttggtcaggcggtgtttgtgcaaccgttaaccgaggcgtggcagacggtgttacagccggcggcggccagtctgaatgcgcaatggcagtcggcggtagtggcggactggcagaccgactttgacggccgttatccattcgtggcggcgcaaaatgaggtctctctgccgatgctggggcagtttattcgggccgacagcgggcggatagagcagtttctgcacaatcagttaggcggcgtgctgcataaagagggcaagtattgggtggtggataaggtgaacagtcagggactgcatgttaacccggcctttttaaccgcgataaatcaactgagtcaggtcgcggatgtgctgtttgctaacggcagcgaggggatacggtttgaattgcgggcgaaaccggtgggtgatgtggcggaaacggacctgacgatagatagtcagcagttgcgttactttaaccagatggagcgctggcagcgtttacgctggccgggggacggggataatcccggggtggcgctgacctggaccggggtgaatagcggtgcgcggctgtatggcgactatccgggggcgtggggattcattcgctggctggaggcggcacaagtgcagatggtggatgaaagccgttaccggctgaactttgccacgccggaggggttagcgctgacctggatattacggaccgaagtcgggaaagggccgctggtgttattgaaactgcggggttttaccctgccgaaaacgatttttgaggagaatacgggaaataaccttgttgaatcggggataaataacaatgacgacgaagaagaatatcgccagaataggtaactgaattctgctgttcattcatttttgatattttataagtatatcatcatgatattcctatttttctgtaatgctttattctgaggcagaataatagctgccctgaatcagggtgaggctattatcgatgatattattttaaataatgcaatctgttctcattcgcataatataactgagaatcattcttttttacgtgtctgtaacatattgatgataatgaatattaatcatggtgtggatggcataataatgccttgacgtatttgtatatttggtaacatattgaaaataaagtaaaagtatattttattgttatggttgtgagaaatgtaaatatcagtatgatgagttgctatcatattatttaaatcaatgcgatctttttatataaacaaatggtattctgtttatgtttggtttaaatatgatgaactttgccgttgacattaaacattttgtgctgtttgacaaaaaaatacttgattttaatatgcacccgcagggaggattgaattattcagtaaccgtgtatgcagttaatgaatcgattaattcgaacgcatgtgtcaggctatatgattattcttctcccggttaactgctgagtcaggaaataccggcatcgattgactgttccccggatttaccagggatgaaaaccgagaatgtattcggttggggttttaatcacgtcaccgatattggtgatattacccattcaataatagaggagtcatgggtatggcaatccctgcgtatttatggttgaaagatgacggcggtgccgacattaaaggttcggtggatgtacacaaccgggaaggcagtattgaggtggtggcgctggaacatgcgctacatatcccgacggataacaataccggcaagctgaccggcacccgtgtgcatgcgccgctggtgtttactaaagaggtcgatgcgtctagcccgtatctgtataaagcggtgacaacgggtcagaccctgaaatcggcggaattcaaatggtaccaaattgatgatgctggtcaggagaaggtctatttcatcactcatctgaacaacgtgaaggtggtgaaagtggcaccgttgatgcatgacatcaaagatccgactaaagagaagcacaaccatctggaacgtgtcgaacttcgttacgaaaaaatcacttggacgtacaaagacggcaacatcattcactctgatgcgtggaatgagcgcagtcaggcgtaatgggttgacgggctggcggttataccagccactttgaatctaacaggcatcggtatgattgcggtgcctgtcttccctcggaagaacaggagatgttgtgatgaatcgatcattatgttggatgtgtgagtccactggaccggcgttgctgccggtgcgttataccgtggtgccggataatgtttcggaaaccttgccggcgtgggtggaaacgccagaaccttctgcgccgggctatcattatgcgctgcgtgccttacggcagggatttttatatgtctattacgttaatgccggattaggtgaacgggagagctgggatacctggagcgtcagcgaggatggcgcactgtggagaaatctgaatgccccttttggtatcttccccaagaaaaccgcagattgtcatgcgccgacccatcagagcgctaatatggaatttattacgctaagggatattgccttgcgtcaggagacctggctggctttctctccctcaatgtggagccaggagaccatcgagtattatcacaacaaccgcgaagcacgggaaaggcggatgcagtgcgtgaaaccgtggcagtggcgcggggtgccggaaggggtggggattgctcaggcgacgatagagaacctgaatatcgtcatcgattacggtctgggtgacaatgattccggcaaatatgttctgccttgcaaccggaaagtgtcgcgtatcagccggacattagaagaggcaccctactacgaagtttatcacggtgcgttgagaccgaagagcaccttgtatccgtggagtagcaagcgagcgggatgtgcggacattacggtcagggcgatgcaaaagcggggcttggccgcagatggcacgccggtatcgccggtgttaatcgcgttgcatgatccgatagggatagcgcatgaattagcgggctggggtgatgatattgccggggtgcataaaacctttttggatgagttgtcgatcgaatttatgaccgacagttcattgaatggggtggaaaatcaactgcataaattgaaagccgcggatgtgcaagggcaggttgataaagcgctcgaagtcactaagcagaaggagtatggggttttttccgatcaggataaggctaagctcaaagagtatgttactcgtgacatggcggcagcgggtaagaaagctgttgcccgtgattggaagaaatatactgcggagctgaatctggctaaacgacaggcatttaaccaatgttatgccgatctttgcaccgacgtggcgaaagcgctggaacaactggctcagttgagggtgagttggctgaaacagagtgggtttatcacctgttgtcaggattttcattccacccgactggaggacaatctcaattatcgtgaggcagtggattatgccatcgcttcgcttaatgtgaccgaaaccggttgtgcctatttagatgctttaattgacgaatattccgcgttgtcgccggaaaatattgtctggcgctcgttattgctgaataacccggaagtgatgaaagagatggacgggtttttacagaagatgaagctgaataaggataaccatcaaccggcggctccctcggattttatgaaagcggtgtcagatctgagtgggaaactgattgaagcctacgataaagcgaatgaagcgctggaaaagccgccaaaatccaacagtacttttgctcgtgccatgctgcattgcgaccggcgactggtcacgctaggggatcggttcttgaattttactcgcttagggaaagtgctgaatagcatgaatgaaatgctgagtaaaacgctgttatcggtgatttcaggtgtgccgcttgatcagatggttgaactgtcggtatcacaacttaaggacggtaatgcgtttcgacagcaggtgttggagcagcttaagaagccgggttctgaggcgcggttgaaaaaaagtaataaatatcagtctgattttaaaaaatttgctgacagtgctgaaggagagccggtattaaagaaatcccggattaaatggttagttttggcttccaatgttttggaattttccaatcagctacaagagagtaaaggggatgctaagagtcaagcgcaggtgacctcagcgtttttaagtacgctgagtacagcgatggagattgtggagccaatagttaaacacggaatggaaaatgtgattgctgccaacaccattaagtttattgggacgaatgctggtgtggcttcttctgcattaaatctgggagtagatatcggtgacctttcttctgaatggcgtggcagagggcgctggcagtttattggcctttacggtcttaaaagtgcttatgattttatgcaagtagtaaaagcattaaatggtttattagaagttttaattgatagagcattactttattctaaaaatttattcgttgagggggtagcaaagcttttagcgtgggaaactcttgcttggttgtgcacttgggaggcgatgctgttaatttttgtggttgaagcgttagtaacctatttttctgataatgatttacaaaaatggtgccggggttgtgtttttggtttggagccagtgaaaaatttgcaatccacgcaatggattgaccccgaatcgcaacgaaataagctgtgcgaagaacaacgtaacagttttgctaatgcaattaagggcggcatatgagtacctgtcgttcttttaaagaggctattgattttgatgaaatcaaaaggcagaggagcagccttgatacatggattgaggttaatcttgattggataataagccacccagaaagtaaagaagagtcagaaaaagagattgagaaaacaaaagaaaaaatccccgaactggatgccatattagcaaaagaaccaccaccgccagaattaccgccgggtaaaccattaatcaaagtgagcggtgtattggaggagttcgaaactctgtgtgttaaaggttattttaccgagcgtgaatatgatccggttgcctttgcccgtcaggaagaacgggaattgtatggcgggttgttaatgtcgttagcaggaaatacgtctggatctaattcgcaaaccaatgttcggtggggtgatgtttgtgattttgtgcgggggaaaatcaatggcgttcccttccacggttggtttgggtttacttccgcaaaggtaggtgattatgttgaattagcggcaattgagcaggaagggaattatgtggtttatgcgattgcgcatcctgaattaagggtggtttctatgacgccgcgttgtgatcctgtctcttgatcagatctccaaatcaactgatttagccagcaaatagccgtctatcagggtttgcagccgaaaccagccttcccaaagtcgttcccatccgactcgacccgtgcgtttggaatcgtaccagccggccagttttcccagattgatgaaggcccaatgcaaactcggggcttttttcggcacacggcgtttttcttgttttgaccacagtaatttccacgccagggggcttaatactgtctcacagctctctttctctgcctcttctttgttcagacccataaaacgcagctggtgtattcgtaccgcaataaaggccagcagcactatcatgcgctccagattatctttgctttgcatacgcagcgcttctacctgcgtgccgcccgttttccacgctttgtgaaattcttctatcagccagcggcgctcgtaataactgaatattttatgggcgtcttcctgactgttgacgggttcggaggtcagaagatgccagcaaagcccatcctccggacctttttcgtagcaaccgacataaaatatccgcaccgcctcaccgctttttccttcggggattttcaacgtcacttcggcataactgatatcacaatgcgcgacacgcgcctgacgcccgcctttctgtctgacctgaactaatcgttctccagcactctgtaaccggctaataaagtcataaagtttatcctgactttcctctatacgccggttttgcatcgaacggatgacgaaacgttgtttttggctcgttttataacgcagatattcgatgatatcggcttcacggtcacagacagaaatcacgttggccatctgctcccctaaccggctgtcgacggcttgtgaggcccgttcccacttataactctctttcccttcataagggcgtgtatcgcgttgtcggcttttgccataatcactgacatctcgacaccagcgctgttgctctatcaaccccacgacctgttgttcttcaggcgcaaataacaacaccgagtgtgcctgcatgccccgggatttttcctttgaggtggtatagccgagttcatcggcgaccgacgcatgggaaaatgacagggttgtcgtgtcttccagcgctaacaggcaatgataacgttgagcgtgagcgacggtggcggtaaatccggcttcggcgatggcctgaggcgcaatggcggaatttcgggtcagtcggtaggccgcttcaacatcggcaggagagtcaagagattgcacgagcgattgtcctatatggttagccaacgaacaggccactttcaccaggcggttggtacggcgtttatcacctaattccgcatgttgaaacgtgtcatttgcccattgttcggcgctggttgaaaacataaagattacctcaagtcgtgttttttattgagatcaatctatgagggaaaagttcaataacgcgggggcgggttaaaatatttgtgtaggaaagacaggttgtgatcagggcattcatgcagatgccaaagagcagatattcggtactttctgtatttttgggggattcctgcttatttttactgtttctgtttggacagatgctttggcgtttctggaagatatgctgccattttttgctttgctgatagcgatatttgcccccagcacatattatcgccgcctaaaaaagcccagacctacagttaaattggccgaggagatttttacggtattaggtttccctgatcctacgaatctcaatattcgccaattcacaagaaagagactgaaagaaataaaggccaattcattagatgaggaagtcggtaaagagagtgaaagagttttgccagatagtggatgtttcgcaagccattattactattactgattcaagtaattaaaaataggaatcaactgtatgaaaaacaaagtaaaagttttgttgaagcaattaaggacggcatatgagtacttatcgctcttataaagaggctattgattttgatgaaataaaaagccagagaagtagtcttgatacatggatcgaggtgaagcaagaaagaattcaacgtcgtcctgaagatagagaggaggtagaaaaagcgatagaggagcttcaagccaaaatctccgaactggatgcgatattagcaaaaaagccgccgccaccggaattaccgccgggtaagccattaatcaaagtgagcggcgtattggaagagttcgaaaccctgtgtgtgattggttattttactgatcgtgaatatgatccggttgcctttgctcgtcaggaagaactggagttgtatggcaggctattaatgtcgttggcgggaaatacttcggggtctaatgcgtcaactaacgttcggaagcgtgatgtctgtgattttgtgcgggggaaaatcaatggtatcccattctacggctggttagggtttactgtagccaaagcgggtgattatgttgaattagcggtaacagaaaaagaagggcattatgtggtttatgccattgcccatcccggattaaggattgtttctatgacgccgcgttgtaagcagggtattcattcaaatgccaaatatcagatacgtggcacttggtatggttctttagtgcttttctttgttttcatgatagggggaatttttgatgggaaagttagagaagatattattgattatatgaaatgtatctcttcatttttgggtttgatggcaattgtcctttcaccgttaatctatttttcctgtatgagaaaacctaaaccgacatttaggttggctgaggagattttcacggtattgggtttccctaatcctacggaaattaatcttgagaaattcacaaaaaagaggttgaaggagatcaaggttaattcccctgacgggcaatcaggtaaagagagtgaaagagttttacccgataaagattgttttataagttattactactattactaattcaagtaacaaagcagaagagggaaattaaagagagcgtatatggggagttcttaagattatctataaagagttatcgagatattaagagattgcttgtcttcggaaaattcagtaacgaattatccaatgtaaagttttatctatttttatgcgattgatatgtaattttgtgtaaattaaggtttttttgtgaataagatctataaaatggtttgggtaggtttggctattaatgtattaacctactttgtctcactggctgctataaaggtagctagtgctggttattttgctctttcttatcaagagcaatattttgttgctaaattaccaatattcaatgctttgatgttgatttttattttgctggaggtggttaatctgtttgttattctcaacgcgccaaagtatgcgaaaatcagttcgtttattgcatcttgtctttttccatttggcgcggtttatttcatcgggtgtttattgtcaattcaacgagttgcattatctcccttcgctgaatatcaggatgatgatacggttccaaattccgcggtttattttgtccgggataggtattggaaaaggatgtgtatttttggttgcataacgctggttatgtcatttaagggtacgagtaatatttgtatgatgatgacggctatgcattgtctctcatatcggaaaacagaaggtcgttatttctttgccgagacagaaggaggctttttattaacgccaaccgcgttgagtaaaactattttcttgccttattgctgtattaatagagtggaggagcgtgaagagagtgtgctgcttgctgttaatttaaataaaaaaatcaacattgtattttcaaagaaatttgttgaaagaggcgatctgatacaagtcatcaagcggctttcacaggcagcattgaataatccgaagcataatattatcacgttctaaatgtgaaaaatttattcttaataatatagggatcataatgtttcaaggtgtcattcgcttgagcaatcagctcaatagcgatggtgaagctatttctgtctctttattaatgagcagaattccagtggctgacagagatattcagcgtcaaaggagaatataaagatgctgcaacagctaattgagagttgttttgttgaacgtgatgtccttgcggaagcacggcagaacgcggcgcggtgggaaaactggttgttacccattagtaccgatgcgcctacaggtaatgatccggtctatgaagacgattttcagtgtatgcgggaggaggttaataaaatcagtggtgttgatacttccctgatttgtcaactggcggagaagttgttgaccaccaaatgcaaagatgtccgcgtggcgacctactatgtgtgggcccgtctgcattgtgagggggaacatggtctggcagaagggttggcgctattagccggattggcggatcggtttggtgaagccctgttacccagtcgggctagcagccggaaagcggcgctggagtggctgacaggtgcaaaaatgcgggacagtttatcacgctatccagaggtaaatcggaccgattttgaccacattctggccgcgttggtgttactggaacagtcattttcctcttgggatgaagaatctcgtccaagcttggtcgggctggcaagaacactggagaaccgattagctcagtccggtggcgtgagtgcggtagtgccacaaactgccgctccggtactgccatcggcgggacagagcaaggcatcagcatcgggtaagtcaccggtatggcgtcaggtgcaatctgggcgtgatctgctggatcaggcgcgtgaactggtgcgttatctgcgtgatcaacctcagggctggctctcttccgcccggctgatacgtagtatccgttgggataccgtccatcaactaccaccacaggatgctgatgagcgtacccgtctggtgcctccccgcactgaatctcgcgctcagttaaagcggctctaccggcaacagaactggcatgagttattggaacaggccgagcgcatgtttgccgaaggggtgaatcatttttggctggatttgcaatggtacctctgtcaggcattaagccgattgggctgcccttacgaaggttgggcggacatcatgaaacacgatctgagaatactgcttgagcggctgccggggctggagagtatggcctataacgatgggacgccctttgctgatgaggtgacaaccagttggatagcccaacaggtgcatgacaatcagtcagattggcagtttgagcatttgccggcgcaacctcgacatgatgatgacgttttggcgctggaagcggaggcgctgcaactggcggacagcgaaggcattgatgcggcgttgcgttggttggggcaattgcccggtattaatggagcccgtcaccgctggttacagcgcttgctgatggcgcgggtcgctgagcaatacggcaaaaatgaaatggcgttgcatttgttgactgagcttgatgccgatgagcaattcaatcttggcgaatgggagccggaactgatgtttgaggtgaaagcatgtctgcttaagttactgcgcatgaaagctcaacgcagtgaacatgataaagcgaggatggcgcaacggatggagacgctgctggctggattggtggcgattgatccggtcagagcttcggtgctttgcggttaattgactctgcttaatcaggtggaggcgcaactgtatgccttctcaacttgttttattttaaccattaagagtgatgctatggatgatttaattctccgctattacgaagcggaaatgcaatatctgcgtgaagctggcaaagagtttgcgcaggcgcacccggaccgggcagctatgctgaatctgagtgacgatcgggatcttgatccttatgtggagcgattgcttgaaggcttcgctttcctgatagggcggatgcgtcagaaacttgatgatgatttgccggaactgacggaagggttggtgagtttgctgtggccgcattatctacgcactattccttcactctccattgttgaattggcacctgattatcagaccttgccaaaaagtgaagtgatcgccaaagggtttgaagtgatatctcagcccgtaggaccaagccagacccgctgctattaccggactacccgtgatatacagattacaccgctgcatatcacctctgcgacgttgcaaaatgaagccgacggccgttcagtgatccgtttgcgttttgactgcggtcagttgaccgagtgggataaagtggatttggcacgtctgcctctgtatctcaaagcgggccgtccggtgagttctgccttacatctggcgttgacccgacagactcaacagatttacgcgcgcttatccagtcaggaagagcgctctcgccttaagaatggctgtttttccccgatggggttcgacaatgatgatgttctgtggccgaaacaggagagcgcgttcagtggttatcagttgttactggaatattttactttccgtgaaaaatttatgtttgtggcgctcaatggcttggattcgttagagattcctaccggtacgccttggtttgagttggatatcgtactcagtgaattgtggccctatgaattgaagttttcagcggaaaatatccgattgcattgcgtgccggtaatcaatttattccgtgttgaagctgatccgatgcacatttcgcggctgcaaaatgagtatctactgcgcccgatgcgcattcaggatggtcataccgaaatctattcggtggatgaagtctcctcttcccgccgaggtgatgctcagcgttttgtaccgtttagcagctttcgtcatcggggcggcatcatgcgtagttccgcaccggagcgttattttcatacgcgcgtctgtcgaggtccttcgggtttgcacgatacctggctgatcctcggtggagaatcgtttgaaactgacccagagcttgatgatgaaaccctttcactgcgtatcaccggaaccaacggccagttacctcgtcaggcattacgtaatacccaacttgaacagacactacactccgccgcgggcacgctgcgcgtaagcaatctctgttcgccgacgttgccctgttatcccccagcgaacgaccgtttccactggcggatattaagccatctcggttctaattttcttagcatgatggataacccggaggtgctgcgcggcacgttagggctttataactggacaaatgatgagatgaactgccgctgtctggatgccattgttggggtgaaacacgctttgatcgaacgttttgaaaagggcttcctactccggggcgttgatattgagattacgctgaacagcaatggctttgccggcgaaggcgatattttcctgttcggtgagctgcttaaccgcttcttctcgctgtataccgatattcatctgtttaaccaattgacactgatccttcaaccttctgggagatgtttgcgatggcaagaaaatcacaatcagcgtattcccggttaatgcagcaactggcaccgaatatttacgattttaacttttatcgcttctgtcagttgctggagagtatgcgggatgggtgcccgccgttgggcagtacgatgtcgcccggtgatgatccgatccgtttccggcctgatcccggtatgggttttcctgccggtgaactgaaaaatgtggagtgggatgagcaacagcctgaacagccaccgacagtacgcacgacgtttctcggcttgtatggtgtggattcaccgctgccgacggcttatctgaatgatatcgttcagctgagtgaaggctatgaaggcgtagcagactttctggatatttttaaccatcgaatgatgacccagtattaccgtatctggcgtaaatattcctatcccgcgacttatgaaccgagtggtcaagatcaaacctcgcaatgcctgcttgggctgattggtttggggatcgccggtagccagcaacatattgctacgccggcttctcgctttctggcgctgctcagtatcatgcggctgccaacccggatagccgaaggggtgatggcgctggttaagctattggcccctctcacgcaagtacaggtggttccccatgattgcagacgagtacggttgacccaaccggctcgcttaactcgtcaccatccggttcagctttctcaacgtccagtactgggcaaagtcgggacggatgttaacagccaaatggtgctggatctctataccgaagatactgatgaagctcaagggtggttaccacagggggaactgcataccgacctgttggtgttgctacgcgtttatctgggttggcgttgcagcgtgcgattacagctcactttacccaaatgggtattgccatcggcgcaactagggaaacaacgcgttcggttaggtcgaacaggcatattgggattgaaaccgggctcacaaacggtttcaggcatggtgaaaattaatctggggcactatcaagggctcttaccgagttatcaatatagggaggccgagaatggcagctatcaatgttaaatccgtcatgatgggcggcatcgtttgtctgatgttgcagggattagtcggatgtggtctgacgcagaccgtaactgacggcacggtagccgtgacgcaatccattttccataagcaggtgaaaacgctgcgtttggatttcagtgcccgcagtgcgcttaacaccaccgacgcgcaaaccccgttgagcacggtagtgcgtgtttatcagcttaaagacaataaagcatttaagcgtgccagttatgcggacctgttgaaaggtgatagtgaagcgctgaaggcggatcggctgacacagcgggatatcagagtggcaccgaaggggagtgtgtcgctggatatgccgatggagaaagcggcacggtttgttggggttgtggggctgtttcatacaccggatgccaccaataatagttggcggttagtgatccgacgtgatgagttggatgcagataaaccgcgcacgatcgagttgggtagtggcacactgacactgaatgcggtgaaggagtgatcaatgaaacagctaagaccttcgctttacgaaatgttgatgtttaactttaacggtgggctggatctcaatcagatcgatgaacgaaatcaagtgattttatccgtgatggataatatgcaacgtatcctgagcagtcgagcgggttcgctggctcatttaccggattatggtctgcccgatttcaacgtcattttgcaagggctgcccgcgtcgtcacagagtctgattgccacaatcgaacacacgttgttgacctatgaaccgcgtttgaaacgagtctatatcacgctactaccgcaaattgaaccggggcatctgcggtatgacattaacgctgagctaaaagacataggattagtgcggtttagtacggaatttatcccggaagggaaggtattaatccgccatttacgtcaacaaggccatatagagtaaccctctgtttcatcaggctaactctgaaatagcctgataaggataactgttatgactacaatatcatccggcaacacgatacataccggggatgatccacgtgcactgccggaattcagtgcactgaaagaagaaatcggtaaattgaaccatccggctcgacctgatgttaattgggccagagttgaacaactttgtctgtcgttgtttcgattaaatggcgtagagctacaaagtgccgcttggtacacgttagcccgagctcagcgcaccggattagccggtattgatgaaggattcgcattgattgatggattagtgagccatcaatgggcgcagttctggcctcagccgacgcatgcacggattgaaattttcgcttggctggttgcacgcttacagcaggtattgcgtacttgcgtcttctcttatattgacttgccgctcatttaccgggtggaaaaggtgcttgagcaactgtgcgaggtgcttcaacgtctggagctgaaacatgtgagtaaacttgacagcctacgtgtacagcttcacaacagcgcccggcgattagagtgtctggagcaggaaaagggcgcggtaccggtatctctcgcttcggcgcagtctgttgggggcaatgctattttgctgcctgaagaaccccctccgccgcaactgatctatgtggtgcaggagacaatctcgtcggtgcaaccgcaagtcaaagttgctcaggttttgacgacttcgcgctggaaagtttggcgaggttttgtggcggggattgtattttgtgcgttggtggtgacaggcggttggctggtggacaagatgcgacaaccgtctccattagctgaggctttgttggcaacgacctatccattaccgcagacactgcttccggctcaacttgccgaattacaccaatcggacaatgcgacgctactgagccagttacaggataaaacgttggatgcgagtcgtgcgcaactgacaaatttaaccactttgccagccttttggcctttgagttatggttctcagttattacaacagctacgtacattgtggccggccagccaagcagtacaggatatgcaaaatcaatggttacaccagcgtgaggcggcggcactgccgatgcagtcattggaaaattaccatctagctcaattacgcctgcaacatctgacagaacgacttgatgcattggatgaaaaacgcggtcgttatctcaccggttctgaattgaagtctatggtgtttggcattcggcagccgttggcgaatactccgccattagaggagttgctgcgtcaactggcggaacaaaaaaagagtggtaccgtatcgctggcattactgatgcaaattaacacccgttttaatcaattgctgaatcgctattatttgttgctgaaagtaggagagtagttttgtggaaagtaagaaattaacaaaatcgggttgacatgctgatcatgaaggggagggagtgttttatctatttttataggtttaaaacagtcagtgcagaggacatgaggtaaaatcagatttcgttgttgctcagtggcgtatcatttacactgaacgaaattcactatccagatacgataatgctccaacaactcgacaccgcagaccgtgtgcgccgcaagattgctccccggattactaagaaacgcaaggctgagttcggtcaattcatgacccctgctaacgtagcccgttttatgacatccctttttccacctagtactctgcgtacctgccgcctgttagatgcgggcgcaggggtggggacattatcgtgtgctttccttgatcgatgggtgaccggcggttttgattttgagtccgccgcggaaaacccgcttttgggcatcacacccatcatgaactgggtgcgagagttctataacaaagaatatgcgccgaatacccgcgaggcatttcgccgtcagactatgcatcagttttgtcatgcgagtattgtgctgtataacccagataagcctgactgcattcgtgggattcattgcgtcatcgaaaatatccttcccgttttatgttgggggaggatattccaaaggagagatggtgacctataaaatgattcaagagtacggtttaaatcggataaacttggtggtagttgttgtaaatcaaataataaaaatctcataaattaataaatatttggtaaataacttattagaataaagagttttatcaaatgatagttttttacttgtttaacgcatagagatcatttcaatctttctaacttgacagataattactgaccagtgaataggtttttatatcagttgttgtccgtgatggaagttggatgctattattaaatacaattcagttcggtgggggattttttgaattgggtaattaatttgaacgtttaattcaattgaatgacttattgttttaaataaatggattaagatgttttttatgaatttatagagagaaatgtatttttaagatctataagtaagatgtagtgatttgttttatttttaaatctggaattatttttttcattagaagtggattcgatgttttttaataaacttggtgaatgactatatgttaattaatgagtggttgttatgaaagatataatttattggaatgctaaagttcaggaagaaatagataattaccctgatgcagtacgtgatcgaattaactttgaactcgtagccttacagtgtgactatcctcattctttcgataattttgatttttatgaggttttatctgatggcgatttacttaaagagcgaaaaatggagtatcctccagctcaaaagaaatccatgagagaaacgattggtcgctatgctatgcagttgacaattaaaagtactgactcataccgcatgatttatgtcactaagtttgaagaagcgatttatgtattgcatacattcaagaagaagacagagggagtggctagaaaggattacaaaacggctgctggacgttataaacagctcgaagagtatcgtaaaaaaacgtagaataacttgcgtatatatcaaatttgatatattattcctgtttgatatcgttttcttatcggttttggtactgattttaaggtagagatgatggaattcacagtgacgaaaaacccttatgcttcatccagcaataatcctaacgaagcaaatgataaacatattcgcgctcaattaatggtgatcatccgcaagatgattcaggagcgcggtttaagtcaggtaaaagcggcggagcttttgggaacgactcaggcaagaattagcgagatcattaatgggaagctggaaaaccacacgattgataaattattcaatatgctaaatcggctcggttggaatttcgaatttagttatcaggaaggtatggtgaccgtcgcggtagataaaataataaaaatcgcgtaaacattatataccttatggatttcaagatgcatcgcgacagcaaaggagcgaatccccgggagcatagagaacgatgtgaccggggtgagtgagtgcagccaacaaagaggcaacttgaaagatgacgggtataggcaaggcttgtattaacaagcgaattatttgttataaaattaatatctaaactattattataaagaatattgagaaattatgatatttatatttaattccttttaataacgctgttggaatatatttcttggttatatttaatataaccaaaagttatattctgtagggaaatcaggcatacattaaattgtcacataagccagccggtgattaatgttggtagatcgccggttttaaacggtctgacctactgaaggtaagagtacgtgtttggaatatgtctcgtcatcactctatgccaacaatagggttaattgggcgtatcagcctgtttaagaaataggtaatagaagctttcaggttttcctatattgtattttgtctcatctatcaattgttactccatgaaaaaataacccaatgattaattcataacatattgttttttttagtattttttaatgcagaaattattgctgaccctttattttattttctgattagtcagaaagtatgaatttgtatagtgacatgataaagtgttttggtattataagttattgtaaatgtaacaccgatatattattgttctttacgtgaaaaggttaatatttttcgtaaatgctgacaaaaactgtcactaatttatgaataatgcttgttaggggtaatcgtgtttttccgtgaatagcaataatatataccctatagatttcaagatgtatcatgacggcaagggagtgaatccccggtagcatagataacgatgtgaccgagtgcggccaacaaagaggcaacttgaaagatgacgggtataaataacgataggaatagttcagatgaaatatgcctttattaccggcgcgacaggagatattggtttcgcaattacagaaagattatctgatgatggctttgaaccaatattattatcgcgtactcctgagcgtcttgatagcgcaattgacaagttacgcaataaatatggtagtcaatttgcaaagaaaatagtttgtgatgtttctaatcatgaaaatgttaaaaaagcgtttgaccaactagagcttgaagataataagctggcggtgcttgtgaattgcgctggcatttctggtggcggtattactgctgaaataagcccacgaacttggcaaaatgtcataaacgttaatttaaatggcacttattttgttatatatgaagttttgaaaagaaaattaatgtcatctggcggcagaattatcaatattgcctccaccggcgggaaacaaggtgttattcatggtacgccttattctgcttctaagcatggtgttgttggcctgactaaatccttggggcttgaattagcacgtaatggttcaggtgttacggttaacgcagtttgtccagggtttgttgagagtgagatggcggagcgtgtcagagaacattacgccaaaatttggggcactgatatagcagaagcgaaaagaagagtagaagagcgtgttcctattggaagatatgttgaacctaatgaagtggcagaaatggttgcttatcttgcatctcctcttgccggggctgtaaccgctcaagcacttaatgtgtgtggtggattaggtaattactaatcatggacgatatttctttatcatctgatttttctgatctttggattataaaaatcgacgatattgatttatcttctattgaacagttaattcaccggtctgatatcgttcgccataaccaaatttgtttagcggatagaagaaaaaaatttatatttagacgggctgcgttacgttatgttttaaatcaatatttatctgattatgaaatcataacgaatgataacggtaaaccttatatatccacggagcaagacttcaaatattatttttctctgagtgcatcaggaaactattgcgccatcgggtttagctcaagagaaataggtgttgatattgaagtcactccttctaagataaaattttctgaaattattgaacgttttattaaggataaggagttggaatatataaaaggtataatgttaaaacaactatcaggagtgagtcccggatttaaaaactattatcacttaatgtcattatactgttgggttagacttgaagcatatattaaattatttgcttcgactttacatgagaaattattggctaataactctgattctgttaaagatatgaaagaattagaggcgagcacattattgattcatcatcagcaatttgtttgtgcattatctcaaaagaaggtaatttctacaccaaatatcaaggaaataaactatttcgagattataaggaacaaagatgagtaatattattgacttaagtgttcctatagattgtgatttttgggaacctgagaaagtaactagaggagtcgttgatcataaagagggcgctaataaattaggtgaaagttatttatatttccataccaattcatggtggaaaagagcctttgtaaaactgtttaaacgcaaaaagtggatcattgatcacaatgattttcctgatggtatgggattatcactgatgtattatcgattgaccacgcatactggaacgcatattgatgctccctatcactatgggtggcataaagggcaagatcagccagcaacaattactgatattcctttggattggttttatagccacggtgtattacttgattttagtcatgataatcaatcaattgataaacaggcggtagaaaaccaattaaagaaaattaattataaaataaaagaaaatgatattgtcctgatcaatactggagcggataaactcctgggggaaaaatcctattttactcactataaagcgattgaaagcagtgctgttcaatggttagtagagcaaggggtaaagattattgggacagatgcatttagctttgatcggccattcatagagatgattaacgattataaaaaaacggggaataaagattgcttatggccatctcattttatcgggcgggatcacccttatttacagatagaacggctttgtaatttaaccagtattcctaaaccttatggatttaaagtgtgctgttttccaataaaattagagaaagcagatgcttcatggagtcgagtggtcgcaatattataataatatgtcattatagggtcagacggggagaatatgagcagaaaagagatttcatatacccaatggatttcaagatggatcgcgacggcaagggagtgaatccccgggagcatagataacgatgtgaccggggtgagcgagtgcagctaacaaagaggcaacttgaaggataacgggtataagctagaaaaagatatattatctttgctatgttgtttggctatattgtactgtgagtgaatatatcagttctataataataaatttgtcatctcctttctggatgatttttaagagtaaattgagtcattaagaaaacgcttagttactctatccatatgtagatcgaagggagttaacttagtttggtttaacctgaaacattcatattattcttgcagtttaaatagatgaaaaatcagtgaaataaccaaatggatattaaagtggaattatggtttggtgcttattttcaagaaatttggttaggagataaaaatcaaatatatatgacaaatataattttatagataaagtagtttaatatcactacttgcagataacgattttcttaaatgaaaatgggtaagttttatattaataaaatttgcctgagtaaatgtttattctatttctatcgagataattattgtgataataaataacagaaatgaatctcaaccacgtagagttgtggtgacagggctaggtgttgttgcaccgacaggtgttggcgttaatgaattttggaacaatattcataacgggaaatcgggagtgagtaaatatgagtggggaagagaaagatttggctttaaaagcggagcaataggacaagtttacggtagtgatggcaataacaaagagtttgttctgaaaagtgagcgtaaatatctccagtttgcgctagatgccgctgagatggcgatgcaagatgcaaatttaagaccctcagacattgatggtcgacgttttggtgttgcgatagcgacagcgattgccgatgctgcgggaatggaagagtgtttactcagaatcaccaaagggggcaaagagaatattcaccctgatttaattaaatcagaagattacgacagctttgatttcagctctgccgcaacctctgttgcgaaaaaatatggtgcatctatgtccgtcagtaacatatcaaccggatgtgcggcagggcttgatgcattaggcattgcgatggagcatatccgttatggcagagcggatattatgctggctggtgcaagtgaagcgccactttgtccactctctatcggctcttttgaagctttaggggcgctatcatcaagagagttggaaaatcagcaagcagcaacttgtcctttttcccttgagcgggatggatttgtgattgcagaagggtgtggaatattaattttagagtcttatgaacacgctaagcagcgtggagcacatatctatgctgaattagcagggtacgcatccgtcaataatgcttatcatatgactgacttgcccgcggatggcatggcaatggcacgatgcattgatatggcattgaaggatgcccagatatcgccatcaacggtaaattatattagtgctcatggcagttctacagcgcaaaatgatattaacgaatcaaatgcgattaaatttgttttgggtgaaagtgcatttggtattccaattaactcattaaagtcaatgacaggtcatgctttagccgccgctaatgcgatcgagtctgtagcattatgtcttgaaatagaaaagcagtatgttcacccaacaattaattatcaaacgccggatcctgattgcgatttagattatattcctaatcaaggttgctcatatccaattaagaccgcgttaaaattatcaagtggtttttctggtattcacagtgttattgttatgagggcagtagacaatgcgtaaaagagttgtcgttaccggtgttggtgcaatacatcctgatggcaatgatgtcactgccataaaatcaaaagtcattcagaagttattgggacaagaatcgaaaaacaataccaccgcaagttctataataaggacattgagtgatttcgatggcgcgaaatatatcaataaccgcttaagacgtaaaattgatgaattttcggtttatggtatcgttgccgttgaaatggcattaaaagcgagtagattggatgtcgataagcttgatcctaatcgcgttggcatatatgtcggaaactgttttggtggatggcaacatattgaggatgaagttaaagcgctccatattgaaggcataaagggaatggggccttatgttgccacggcatggttccctgcggcacttcaagggcaattgtcactgctttatggttttagtgcgcaatctaaaacgttttccacctccgatgtggcagggatgcaagcaataggctatgcggcggaagcaatttctaatggtgttgcggaagtgatgttatgtggtgcgtcagaacatctttccagcccattagttaaaaatttactggagaaaacgtcaagccagaaacactctgaggtttttggcgaaaaacagccaggagacttttccgaaggcgcggcatttctggtgctggaagagagacaacatgctttagaacgtggtgcttcgatattgtgtgaattaaccggctttgttgattattttgcaccggataaaaatactagaaataacaccttagaatataccgctgaactgttcaaccataatgaaaatgctgtatttattatggatggaatatatgatgatgaaaaagaaataacgagtaaggctttctcaaataaagagataaaaacatcatttataaatctgaggccctatttggataatcaattttcagtcagtggcgtgattgattcagtcctggcgtcatcattcttgtcagaaagtcatggggatgaggaacaacaatctaaaaaaatcaatgagttttcaaatactaaccaaataatcattcagcgctttagtaatcaaggtcatgtgtgtgcgttgagtttttcagctatttaatctctaaaatatgtaagtacgcgaggaaaaatatatgaataatcatccagaagtaaaaataaaaacgattttgtctctttttcttaacattaatattgatgatttcaatatggatgcaaaccttgctgatgcctatgatatggattctacggaattagctgacttggcaaaagagattgagaaagagttcggtatttccgtgacgaaaagtcaattcagtcattgggaaacaggaagagcagtccttgatttcgtctcatcaagtttaaacgataaaaattaactgctaattaaagggaaacagaaatgaaactaatctctatgttgttacattcagggcgtgataacttacatcatgattgtattatcactaaggattatcactatacaagaaaagaggtaatatcttctgtttcccatttaattgatgatttacttagtcgaggtgttcaaaaaggtagtaaagtcattgtcatatttgaacatgatgaattaggtattttctttttagctgcggctagtgctatggggttgcatttattaatgccctataatttatcatcagcgacaatcgatgaatggattaattttaccaatgaagtgcaatacgattttgtggtttaccttaagaaagataaacattttgttggaagattaaaagaaaacaacattaatgtgattgatatttcagatcataagatccgggtcagtgatgatatcgcggaaatcccaataataacttattctccgcaatctattgctaactttattgtcctgttcaccagtggtagtacaggtaaaccgaaagccattagtatttcagaatcattagtttgtcgacgaatttattcggtgacagagaaattaaaattcactcaagatgctaaaatatttatgtcaggtttgttgaataatacaacgggagtgattttttctttcggttcattattacatcaatcaacactttttataccggaagacagaaatgtagagagatggcctgattatctttctcgtaataaaatcactcatattatgttacgcccagagtcgatgaagttattcgttaaatcaaccgcagaacataatatcgatctctctgacttacaagttgttgcttatggtgccgcagcgatgccgcctagcgtactggagaaagggcgtcaattaattggctgtgaatggatgcagggatatgggttaagtgaaacttatggtcctttttgttgggtagatgagcaagatcatcgtgataaaagatatctcaattcaatttattgtgttggcaaaattgataatacattggcggtagcggttaaacctattataggctcatctgataatattggagaaattataataaggggtgaaagtattatggaaggatattatgatgtcctttctggagaaataacacctcctgatgagtggtttgccactggtgatctcggttatatagatgaagagggttatttagtcttaaaaggacgtaagcaaaatacttttatgagtgctaacggacatagaatttatcctgaagaagttgaatctattttatcccgaatacccaatgtgaatgtggctacggttgttggtttttctttccatgaaaatggtgttgctattgatcaaccggttgcctgcatgagtggcgagatatcgaagaaatcattacctgaaattgaagatattatttcatcatttttaagtcgtaaactcagtagagaaaaatggccggattggttctatgttactgatgaatactttccaaaaagccataatgataagatattgaaagcagagttaattaagtcaatcgatcctaaaaaactatttacattgaggaatcaataatgaattatgtagaatcacattcaattatttgtaatgctcagatagaagatgtatatgaaattattattaattctgataaatggccaggaatgtttgaaccttgccaggaagtaaaaactctctttagggataaagaaggtgaaaaaatagaaattaaagccttaattaacggtatattaatgcagtgggaatcaaatcgtaaattttatccagaaacattcagtataaaatcaaaactgaatcccccaatgacattagttaaagaaatggaaacgtcatggcgcgtaattaaaatcaattctcagcaatgtgtactgttgttggagcatttatatgatcttgagtctgaagtagccgggttaattgatggtgttgaaacaatagagcaggcgcaccaatttattagtaaagctattgataccaattcagttaaagagctcaataatataaaaaatatcgtcgaatcaacggagggatcggaaaaagtattaacaggaacgattactcattcagtcgtatgtgaggtgccggcacagcaggtttatactttagttaaagatgtctcttgttggacaggtattttttcattctgtgatggtgcagaagttttaaagagatcaggtaatgaagaattagttgaaatcaaagcaaaacaaaataataaagcagtaagttggcaaacgcagcgatattattttgatactatttaccgggttgattatgttatgcctacaccgatgccattattaaaaacaatgaatggcagatggcaaattattcctattaatgatcaacgctgtattctaacggtacaaaggaactggggtttattagaagatgtcagtggtatcgttgatggtattgataatcatgaccaggctaattcctttattatctcatttatcaatgataatactcgaatggagatggatagtataaagagtcaggtagaaagtcataaaaaatcaaatttattaactttctcagcgggatattatattcctcatcaggttgatgatgtttataagatctttttaaatatcgatgactggagcaagatattaccgcattgtgattcagtaaaagtcatttataatgatgataaacatcaagaatttaatatggaagtatcaacaccaaatggaaatgagactttccgtagtatacgattctgtgatgtggataatttattgattgaatattttcaaccagagccgcctttagtattaaagtctcatagtggttcatggcagatattgagtaaagggagtggttcgtacattgtttctagccatgatgttgagttaaattatgaattatgtgcagttaaatttggtacggaagataaagaaaaacaacgagagatagtaaaaaatgctatttcagaaaatagtaaaaaaatggtttttgcttgcaaagagtggttagacactcgtatttagtaacttaaaggaaaataagatgaataataaaaataaacccaatagaatttcgccagaacttcttgctacttgtggttattttatgccaagaatattcttcttaaattctcaatatgctccccaagttcattggggagatgttgttgcggcattgagtcattttccagcgggaaacttagacttatcctctgaagagttttggtatgaatggatgattaattggtcaaaagtgggtgatagctatattaatatcgctaactcggctaagagtgaagttagtcatgttcgtgctttgaggagtgccgctgcctgttatcattgggcagaatttatgtattttagtgataggagtagaaagatacagctcagagagtatattcgttcatgttttttatctagtataaaatatagtgatttgctggttgaccaccaatatattgtcgtcgataaatttcatatgccgttcttccttatattccctaaagggtataaagaagaagagaatcatcctttgccttgtgttattttatccaatggattggattcaatgactgaaattgaaatattatctttggccgagtttttcttagggaaaaatatggcggtagctatatttgatggaccagggcagggaataaatcttgggaaatcaccaatagctattgatatggaattatatgttagctctatagttaaattattagaagatgatgcccgaattaatagtaatcttctttgtttcttaggaattagttttggtggttattttgctctacgcgttgcgcaaagaattggcgataaattttgttgtatcgtcaatttatccggtgggcctgaaatagcagagtttgataagttgccaagaaggcttaaagaagatttccagtttgcatttatgcaagataatagtcatatgcagtctatttttgacgaaattaaattggacatctctttaccttgtaaaaccaaggtttttactgttcatggtgaattagatgatatatttcagatcgataaagtgaaaaaattagatcaactatggggtgataatcaccagttattatgttatgaatcagaggctcatgtttgcttaaataaaataaacgaatatatgatacaagtttcagattgggttagtgaacaattttggctaaatggctataaaaaaggttaattgattttatacccaatggatttcaatatacatcgcgatggtaagggagagaatccccgggagcatagagaactatgtgaccggggtgagagagtgcagccaacaaagaggcaacttgaatgataacgggtatagatcataaagttattaaccaattgagatattgttattcgatattaaaaataaattaaagataagctagggattattcatcttgtctaaagaaatttattttttcaacagaagttaaggttaaacctatttgggtatgccttttagttccactgctattttacattagtaataaaatcaaaacatcttcccaggcattacgaagcgatatgtcagaataataaagccataatttttctgctgaggtattaactggcagtatgaaaattgactttaatatttgtgttttcttatatcattaatacatagtaaatttacttatgataagttatcttgttgagtgtaagttttattttttgtattaattagcagtatattaaaattttaaatatttgcgctatgtttgatgttcgatatttactttaaccttgtttcggcgtaatgcattgaacatttactcttgacagagtttggtaattatgtaagacggcaatagcattttcgtcaatcctgacaattgaggtctatattaagtataggatttcgagttgatggttttatagagaaatctcgatattgttccataatagataattaagaatagatagttataccctatggatttcaagatggattgcgacggcaagggagcgaatccccgggagcatagataacgatgtgggcggggtgagagagtgcagccaacaaagaggcaacttgaaagatgacggatatattgggtaactagctagtaacgcaatattatttattcagtaaaaccttatcctatttaatttttattaaaatgaggagttcggaaatgtcaagaaccgaaagacttatcgtattattgcaatacttgagacagagaaggtaccctgtcagtggtaaattactcgctagtgatttaaatgtaagcttgcgcacactttatcgagatattgctttactaaacagtcagggggcaaatatagagggtgagccaggtttgggctatatattacggccgggcttcatgttacctcctttaatgtttacgatggatgaaattgatgccttagttttgggcaataaatgggttattgaacaaaatgatgttgttttggctaaatctgctcatagctttatatctaagattgccgcagtgttgcctgaagaacagcgtgatcagctatattattcgccaatgtttgtaaaaacagaaggttacagcaaagttacaaataataacttaatgttatctgatatcagaagggcgatataccataaatcaaaaatagtgataacttttattgatttaaataatacacatattgtgaagacgacctgcccactgtcgatctttttcaataatgaattctttttagtttcttggtgtgaattcagtcataattttcttaagttacaagtagggaaaatagagaaactggaagtattgtctgaaaaatatatccaagatagaatattattactaaaaaaatggagtgagaaagagggattgtctgataataatttatcctaaataaatgattacggatgagtaatttatgtgagtatttatcctattcatgtttaattgttctttctattaagtatagagttgcaaatatagagtaaattctgatggttatctgaactttctacttttatttatactgagggttcgaaaagtttagtgattttattaggtttgctaagattcggttttatttgctaaaaattagggacgagatcccttaaaggatcgagtggacaagaataattattaggaaaaagccctagagtaccgattgtgaatggtagtatataccctatggatttcaagatggattgcgacggcaagggaacgaatccccgggagcatagataactatgtgaccggggtgagtgagtgcagccaacaaagaggcaacttgaaagataacgggtataaatcacttaatttggtaatctggggtaatgaacaacatagggtgggtttgagattgtggataataaagttcaagaattttttcagggtaagattttaattcgattaaacaaagatcgtgatgccatcacgatctttgttttgtcgacttgcgagcttgtctttatgtaagagtgctattaatattttctacatgatgcatgtttcttacataaataatgaagtggaagaaaagctaccatttccatgcatccgggctggtgccagtgggtaatacactaatgccaaaatcgctaattacaacagcgacatagatatcattgtcataacaatttaattgatatctcctcccttttgccgtccattgccaataatcatttttccaactttctggatagaattcttggataagtgaagcggttgctggatttaacccatcaacattgagagtgctcgtatttccagagctgctccaaatcacatcaccgattaagttttcattggtaagattaatgacgaaaaaataatgattattaatttcaagcatttcccctttttctttttcctcagattctctcatctttaactcctggttaatgggtaaaatgggtgatttttattgatctattagtcacagtattttattactattctggatggtttgttgtctatgggttaatttcatttatgatgagtaatagtcagaaattatatataatatgtttttatattagtgtaaaaatacagaatataaagtatatcatcatgaatgttttacatgaatattaaatgaaggttaattgtgaatcggaaaatggtttgaatagctattttattgggttggtatctcaggcaggaaaaataggccattatgagatgaatttttataatatgttgattttaatgatttaattaatttttcgtctttagggggaggaaaaattttgtgatatttatcacgatttatgttaaaaaacgcgcacaagtaaccatattgaactaaaaataaaaagcaatgtgataattttgtatggtgattattttgagttgttaaacgtaatggaaatacaaatagagggcatgtggcagagttatttgagaggttatgtttttaattatgtggcctgaatataggttagaacggttttattttttatacccgttatctttcaagttgcctctttgttggctgcactcactcaccccggtcacatcgttatctacgctcccggggattcgctcccttgccgtcgcgatgcatctcgaaatccatagggtatatataagaataagaggtgagtttatatcagtgtgaggtcagccattaatggtaaaaaaggtctcttgattataaatggattaacagactaaaaataatagccggtgaaatatcttatggtttttatacccgtcatctttcaagttgcctctttgttggctgcactcactcaccccggtcacatagttctctatgctcccggggattcgcgcccttgccgtcgcgaagcatcttgaaatccatagggtatagatggcaataaatatatttattgtcaaatagcgtgagaatttataactcaaagagatgaaatttacataggcgcatctgtgatgaatgttttaataaatgaatataagaagaaaatggatagtgtaagattaggtgatcctgagagaaagggatttttttacgatgcaaagcaagcaatatggcattgctattcatatgatatctgctcttattttctgaactcggattatgtgactaaaaagaagttgagcattccgctggaaatattttctgcgtcagatcagagtagagttgccagattcattctttatcttaataattctctcatttttaatgatgataaatataatactgatgcagtaagttttatacgtggaaaatttaatgagatgaattttgaagtcatcgctaatgatcttttatctcctttaaaacagtgtgatcttttgactgcaaaacatctaaggggagtgaataacttattggctgcttctttagtggggttgaaagcttcggcgttcttttctgctcatgccctgaatgtcggtatgttctttgatggtagcatgagtgggagagcgcattttgtatcgattgcggaatcttttattgctatatatcagcaagttttacggcaaataaccatcaacggtggggcagaggatgtgatccatattgaaaaatttgtggctgatctatcggtaacatttattgccgctcatgaaacgacgatgcaattgatcattgccacatttctttatattaaaagccatgtaatcacggtgacggaaaataatattaaaagtattgttactgaaacttatcgtttatctagcccagttcttgcggtaaatagagtatttaaagagagattgatatataaaaatagctgtttcaataagggcgatcgagtcctgttttataccggattagccaatttcgatgccacggtttttgaccatccttaccaatttcagcttgatcgtgaaggctgcccactttcatttggtgtaggagtgaaaaagtgtattggtatgaatatcgccatacattttacctgccagttgataactaaaatactctcttgttatcaacttgatgatgttgaaattcatgaagtcactgttggctcgttagccatcggttgttcaaagtttacattgaaaatatcgaagaaataaaagattttatagaaaataagaatttcacctcttttttctttctcactatttttcacttagttttccgtcagatattcccaagaataggacggcaacactgcgttatatccgttatctttcaagttgcctctttgttggctgcactcgctcaccccggtcacatcgtttgctatgctcccggggattcgcttccttgccgtcgcgatccatcttgaaatccatagaatatatatggttttttgagatgacgcttcaaactcttactttagtcataaatctcagttattcctttcagattagagattcatcaggataattattgtctcctcatcgttcctgtcataaccctcgttggccattgcaatatacctgtacaattaaaacatgcagtgaattctttccctttttctttagttgtaagacgctcagtaaaaatatatgaatcaagcatgtctatttcataactccgtttacttcttgagccgatttctaccttactatccaaatcaccttttataaatctaaaattcattgcctgaacttcagcatgtagacccgcgattcccgccatcattggtaaaacctcttcatttttaagaatgtgttttttaattaatgatgatgtaaatggatgtaactctactccattatttttgtaggcggattcaatcccagaaataaattcgctaacattctgaactttatagtgctctggattatccggcaggagttcgacaccagggaataattttccttttcctaaggatttttctttatcttttaagttaacaaattcatctttataattaaatgtccatccttctttctcgttatcggatatcgggtgcaggttaaatgcgatcccggcatgtgccgcttgatcttgtaattttgttttcgcatatttgaatttaccatcaggagatgtctcatttaactttttgttattatattccatttgttttttgtgttttaaatttccatattctgctgaggcggaaagtattgtttgtgttttatcactgactttgtttccccaagaagttgccgcaaaacttcttttaagtgtagataaaattgcttctttatcgttgacattataataaactccagctaaatccagatagtaaagtggatgatttcgttctagtccattgttattactatttggatgtaatccgttattatcgtgataggaaatgggattattcctgaccatccgatataaatttagcccatctatcgttcctgctggatcagcacttagccatcttcccacccacggctgataataccgatagccgtaataatacagtccggtggcatcccgctctttaccagaataccggatcgttttgtaactggcttctgtctggtttcttgcggcccagagcgctgtaccgccaaatggatagtactcttcttgactgataatttgcccatcactatctagctcaagctggctggagccaatgagattgccataactgtaacgtacctgattattgttgatgttttccggtttgccgctttcccaatgtagaactcgcacttgcgcacgacccgcttcacccacggtaataatctgcaactcttccttcgtgatatcaccgttttgtgttgtacgtagttctaatcctgacaggtaaacgactcgtcgttgctggaggatattctgcatttgctgttcactgacttttaacagccgcattccgtcgttgccatagcgataccactctatgtcgctgtcacggtcagtgaggttatcccgttttaccggtgtcatctgttgtagttcacctcgtgcattccagtttaggttttgtcccggtagtaatgtctcctgatgaccacctgcctgaaacaatgcatccactttggtcgggtcagtggtcaaggtactcagtaccgcgcggttgctgcggttcgagacggttatgtctgtggtgtagttgttttggctcgcgggtgagctatgccggatttgggtcaggttgccaccacggtcataggcataagtgcgggtgtaattggtataagtgttgttatcggaagggagtgctgtagaggggagattctgattctgctggccgatattcgccatttcgcgccctgttgcgcttataagctgatacagggaatcgtaggtatagatattctctggcaccattttctgattgcgccagaagcgggtcgcttctgcatcgttacggagactgattatgttgccaaccggatcatattcataacgtaagtcttgtaaagccttgctatcagttgaacgacgggttgtgatgcccattagtcgctgggtttccggctcgtaagtatattcggtgatgataccgttaccgtgctcttcgcgtagtttttgtcctgcggctgaataggttagggatttaatgataatctgctctttttggccttttaccgttagccagcttcctttcaattgtccggctacattataggccagatgctggatgtttcctttggcatcggtttgtgtcaacagagtgccggtagcatccgtcttgttttcggtggtgtatacatcgttacttaatttcttatcccagatctttttatcatcgccgaaccaatccgcttcttggccatcaaccagtagctgacgggattgtgataaagccgctccggttagggaaaggtgattcagttgggtcgctcctgctgtatcgtagtgatgtacatactgaccagcaagattttgctctttttctgccggcgtgtttccagcccagatgagacgttcggtgatatgggatgccctttcgtctggctcttgttcggttacggatagcagacgaccaggcagagaattatcttcatattgccgggtctgcttgacacccgttgccgttacagtcaggaccagacggttttcaatatcatgaagagtgacagtattacccgcatcggcactctctgtacgtaggacgctgcccgttaaatcatactgccagagaaaattgggttttaccgagctatctttctgccaggcgtcatacaggcgtgggtcaatactttggtgcaggtgtccgagaacatcatactgatgacgggtgatacggatatcactatttttttctgcggtagctcggtgataatggatttcacggacatccagcccacggttatcgtgaacagtgatagtgggagtgtgttggtaaattttggggtcaaagttgttcataatttccctctttgtggtgttaactcattgtggtgttaaataattttttatctgcacagcagcgaatgaatgttaagttccatttctccatataatgaggataacctttctattgagatactagcggtatgcaagatttcaggggataagcaggaatatacccgttatccttcaagttgcctctttgttggctgcactcgctcaccccggtcacatcgttatctatgctcccggggattcactcccttgccgtcgcgatccatcttgaaatccattgggtataatctcattcagaagtatgctgctcaacggcgctgctgtaaccgagcaacagtagcaagtataggtagacgtacacaagtatcgtagaaaacagcgttgggattttttgctatcgcttatggctgttttttctgttaataggtgaatttaacaaaatgaaaagcaatttatctttatttaacatttagttgtgttttgggaatattaactataaatatagttatctgttgtaaatatgagttattttattggctaaataatttttgatattcgtccatattcgaaactcggatgagtttgtctggcagatattttaatcagtatcactgatttaaacctttgcttggaatatacccgttatctttcaagttacttctttgttggctgcactcattcattccggtcacattgttatctatgctcccggggattcgctcccttgccctcgcgatccatcttgaaatccatagggtataaataatgtgattatttcatcgggttaatattgaaatacattatgagtcagatattagttaattttattttgttatcttgacaaaataaataatattttattgtaattattggttaaattgtaaagcaatgcatggatatcggcaattataaatataaatgttatatttatagtgttataaatggaggttgcggctaaaattaagtgttatattttgtgtattttagatatttgcaaaataaaaacttttggttttttattgaaatatcattatatataatattgcttattggcaattcttattttggttgttattgaaatattttattctttccgggagttataatggttgataaagaaatattaacatgaatgattagtaagataggtaaattaattatataaaagcaaatttctatcatgggtatagaaatgtgttttttatttttaactttttgatggttttacttcaagtttagagactttacctgttgggaaattgacgagaataaagaaataacgttgttgattattatactaaatattaattgcgtaaatatcatggagatctcagcatcctatttgtttttcaaatgttaaatattgactataaattcatatttgatgagtgattatagacttttttcacctgttatttacgcataaataatgatgtccaaattcgttgataaggttattaaatataaaattttttattacattagtgtttattaattcataattgttatgtttttattatttttcttacaaggaattaacaaatttaaatgttagttttaccagaacggtgacctgtttttatttggttaaggcgttgtattcaacatgtcattattttttcttcggcggaattgatttgccggaggttgaaataacgtacctattattttaagggagtaaatgcccttttttctttaatttctggagacgacttttgacctctcttgcttatgttgacgccctttgcgcgcttgatcatccttatcgggtcgatagcgtttgcgaccaattatttgatgctgccatgcgtgagttgacgctgtaccactgtgaaaatactcccggttattctcagtggttgaaggctaacggtctggaagtggaaagactggagaaactggacgattggtcgcgtttgccgcctattttcgctaattatttcaaacgccagttgttgctcagtaccacgggtaggaatgcattggaactgacctcttctgggacaaccggccaaaagagccgtatgcgttacgatgcacgtagtatgcgtgcagctcaaaatatggttgaacggattttcgagtattacggttggaatacgccgcagcagccttgtaattacttgctgctaagctatgagcctgccggtatggtgacgttgggaaccgcgtataccgatcaatatctgtgcaaatatgcaccggtaaaccaagcctgttatgcactgcgccacaatggaaaaagcaatgagtttgatccttttggtgtgatccgatccttacaagaatttgcggcacaagggctgccggtgcggatcttgggctttcctgcatttttgtggttcacgctggaacggatgcaggacatggggttgccgccggtgcagttgcatcctgaatcactggtctttttaggtggcggttggaaaacgcacgcggataaagctattccaaaatccttactgtatcagcgtttaggggaacaactgggtattcctgacgagcggtgccgggatggttacggttcggtggagcatccggtgccttatgttgaatgccgaaatcaccattttcatgtgccggtctatgcccgaacctatgttcgcgataccgctaacatggcggttcaaccctatggtaagccaggttttctgcatctggtatcaccttatatcacttccagcccggcacacagtattgtggtgagcgatttggcggtgctgcatcccgctgctgaatgtggttgtgagttagctaccgattggtttgagttactgggtcgtgccggtaccagtaaaagccgcagttgtgcgattgccgcttctgagttgataaaggagtcctgaaatgtatttagtgaatggtaaggttatctctgacttggagcccgctagcgtattggcggaactgaaaggtaatttggctgagacgctggcttgtcccccaagtgtacaacaggtattggcgtgtgctgagcgcttcgttgatgatctcgataatgttgctgttaagcttgcgctggataccgccgccctcactgcgttacgtcacttctgccatcgcgattctttagaggcaaagttgcggcacgaattgggagaacagcccttttctctgcgtcgctttgactatacacagccccgttttgaaacttggcaaccattgggattggtggtgcatattacgccggccaacgcgcctttactgccatttatggcggtgttagagagcttgctagtgggtaatgtcaactggttacgtcctagtagcagtgatcacggccttaatgcgcagatactggctgaattcctacgtcatgacctgagcggcacgttggcaccttatatctctgtgttgcctttgccgtctgatcaattatcagaattactggcgtgtgctgatgccgtatccgcctggggcagtaatagcgccctgaccgctatccgtagccaattgcggcccggttgccgttggatagattggggacatcgtatcagttttgcttattttgacccgatggctgccagtgatgctgattacgatgcattggctgatgatgtttgccgttttgaccaacaagcgtgttccagtccacagtgtttgttggtcgatagcgctgacgagaacgttttacgggaagtcgttagtgctgtggccgccgcattggcacgacgcgcgacaatatggcctgccttacagacagacatacaggaagcggcggaaatcagcagtcagatggcatttttgaagttggatcacacttttgctgaactccgcggttcggtagaagagggcaatggctggcgagtcgcctggatacagcgtcaagagcttgctccatcaccgttgtaccgtactttgcaagtccgtccggcaccacgtgcacaattggttgagattttgttgccgtggcgcccctatttgcaaagttgcgctctgatagtgaaagaaaaagagctgccgatgttgagtcgtcagttgttggccgccggtgttagccggatatgtcaggccggagttatgcatgatggctatgagggtgagccacatgatggtgtttacgcattgactcggctggcgcgacgcgtctccgtcagcttaaaacctgagcaactgccgggacatgtcgcattagataaagggtcagccaatccgccggaactggcagggattccagtgatggataaagcaaagtttcagaacggcggtgtgacggcaaaagcacaggtgttttttcgtagcggtggcagtagcggcgagccaaagttggcgggtttcagccatcgagattatcacagtcaaatgcaggccgcggcagatggtttgttcgctgctggtctggagccatcccaagaccgggtaatgaatttgttttatggcagtaacttgtatggcggtttgacgagtttcttcactgtgctggataaattatccgtgccgcattacccgatgggcggcccgatagacgatgattttagccaaatcaggcactttattgtcactcagggaatcaatacgctggcaggaatgtcaagcactatccaccgactgtttgaatgtgaagaggctgcgttgcgcgcctatggtgggatacgcaaaatttttactggcggtgagcatattggtgaagagcggtgtcggtttctgtccagttttggtgtacagataattcgctcggcgatttacggttccgtggatgccggtccgttaggtcatgcttgtgcttgttgccaagagggggagttccatctgttatctgatattcaatggttggaaatcttggctcttgatagtgatcagcctgttccgacaggggaaagcggtcgactggtgtttacccctctggcgcgggaagggcaggtggtccagcgttatgatataggcgacttaggttattggctgccagatctctgcgactgcgggttaccaacgccgcggtttaaactgggaggccgtcatggggtgttgacgcgggtaggttctatttttctgaacccaaccgaattatccgccgggttgccgtttccggtgcagtggttggtagggaacagctccagtggttgtgattatatccatatattagccgacggggatgctgagcaggtacgtatgcatctgttgcaacataggatgctgaaccaggttgtcagtggtggattgcttcaattggaagttatcccgacacctgttggacagttccatcgtcacccgcaaagtggcaaaacgccgctggtgctggatagccgattctgagaccaataatactactttttgggtaaatcatgacactatcattacacgatctggttgaatacgcccgcaatcatgcacctttttttaaggatctttatcgtgatctgcctcgatccggttgggcgctaactgatctaccattgatcaatcctgatgactattggcagcaatcgcaatcgctggaaaactggccggtattaaccggtccggttaacggtggtcatgtttttaaaaccggtggctctaccagtgatggtcgattgtcggtattcagttgtagcgaatggcgtgctttcgtgcgcgcatttggtcaagggcttgcacagcaattacagcccggtgatcgcgttgctaatctgtttgtggctggtgatttgtataccagtttattgtttattcacggtgcgttgtcctattcaccagtgccggtagtggagtatccgtttacttggtcagttgatgatcgggcactggccgatgcgattgtcagcttgaggattaatgttttggccggcgtgacggcgcagctattacgttttgccagtaccttgcagcagtggggccagtctattcccggcattgatcgtctgttgtacggcggtgaaagcctgtttccagagcaattgacactcttgagtcaggtatttcctaatgcgcgtattggttcagttggttgtgccagcgttgatgcgggcctcattggggcggcgtctcccgattgctgttacggcgaacatcgggtttttgatacggataccattgttgaaattattgacgaatccaatggtcagccgattacggtgcccggccaaaatggcctgttggttgtgaccaatctgcagcgacgcttgatgccagttatccgctatcctaccggtgacatggcctgttggtgtgaagagtcagggcagccgagtcgcaaattcgctttgcaggggcgagcgggcagcgctcaccgagtgcgagttttctcgctgtccatttttcctgaccatattgcgcgtttactgcaacagcaagagggcatactggcttggcagttattgctgagccgtcagggtggcatggataagatagaactcttgttagcgggcgattcatcactggcgtcatcgacaacatcagtgcatcagacattgttggcggcacaacccgcgatggcaaagttatgtgatcagggatttttgcatgtggaagtcacttactgcgctttggaaaatatggtcactcatccacgctccggtaaattaatgcgggtggttgatcatcgtggttatggtgctgaagagaaggcagcatgagcatgaatctaggaataccattagttcgattattccgggaagaggattctaccggtattagtgcgttatttcgggttgtttacggcgaagattatgtctacccggaagtctatttacctaccatgcttggccgttataacgcggcaaaacagtggtattccgctgttgcggtacaggatggacacgtgttggggcatgccgcactgtggcgggatgaacactgctcattaagcgctgaactggcgttgatcgcagtacatccacaggcacgtgggcagggtattgctaccgcgcttggacgatacttgtgtgatcaggctaagaaaatggggttaagtatcctcacaattaagcaagtgtcgtcgcataaccatagtcagcgtctggcccaaaatctggggtttcacaccacgggattgctgccggactatgtaacatcaccgtttgatcaggcacgcccggaaagcatagtactgggttgtttacctttacaaagctggccgtttccagaggtacattggccttccggttggcaactgtggttgacatcggtgactcaagtgtttggtcaagagcctctgcaaccggaggagttggttgatgcagatatccgtataaccaatcatggacgtcggttggaagtgtggatagaaaagcagacaaccgagcgggtaaaagaggtggcagagttaccggcacacaaactgatatatgtgagactgccggtaggggaagggacgcttcaggcaatggaaattttgcagcaggcgggatttgcctgtacagggtttgtgcccggtcatcatcaccattgggaagctttactggttcgaggacatagtaggaaagagttgaccttagattgtcagtttgctcgtcgtttgcaccaacaaagcatgtttgcttgtgcaggagcatagcccacctgcgattatcagaggtaatctggtaaagcccatcaaagcttgaatagttttgcagatttttgacaaagtgttggtcttttggtcagcactttggacggatagcggttaaccgtctgaccataatttgaaaaaatctgcggtgtacttctgccaattcgtcactgctgcttgaattctcacttttgataattaatagtaataaaagtgttgcaaaatatgatgaattacaagcatcaatcgacattatttctctaactttcagaatattcctatatatttttaagtgaaattcattgcactattgaacatttattaatccataaatggcaaaagcatgatgatgatttcagttagattcactcttcatgttgtaactcattggagaagtgaataaatggcaatagggtatttcctgctcgttggtgataaaacaacctgtggtggtcagattattactggtgaccacaccatgacatttaatgggcgagcaaccgctcgtgaaggggataaggttacctgtggcaaacatcccggtacttacgtgattgttggtggtgtatccgatgtgtttgacatggggcgcaagttggctggcacgttggatagtgtcagtacttgtccctgtcgggctcggtttatcaattcggagatggacagttatgagaagcaagataagactgctgaccgggttgccgctcccacgaatatggcgcaacagcatttctcttctccggtaaaggatgtgggaagcccgcctgcaacgcaggtacctccgccgccgataccggtgtttacgaagtcctgccagcggggtaaagggtgtactgacgctggaactgagcctgaatcggcaaataactttggcagaatggcgatatatcaggtgccgtcatctcctgcgccagccacggcgcaaaagcctgaaccacccccgcaggacaagaaacacccgccggaaccgggtaagccgcgggataaaaaattaccgtggtataagcggtggtttcgtagtggaaaagataatgccgaagcggcggctaccgctgtggccgccactacccgcagcgcggtagcggaaggggaaacgctggtgatgcgttacattggtggcggtgctatcagtgctggacgttggctggcggcaccgaatccggtaacggttgggttgatggggctgttttattcaccgtcgttgaatcagggggaagaggattacttagatccgtatcgcctgagacagatagcggaacagtatggaaaagcaccaactcgtgtacgttttcgctggatcagagatgaaaaaagcggcaggatgacggttcagggatatcacgtcagcccggaaagcggcttggataaagtgccggtttgcatgatgacgctcaatcggaccaccggtaattacgagttctgggaaccgggagaaacccggccgacgattttatggacgccgaatgaacaggaattcaaggctccagcccataccgggaatgaagaacagccgtttattccgtcgcaaataaccgtgttgccgatcccggataaagtgggcagcgatattgaatcgttgccaatgccggaagagaaggatttccgcgattatattctggtattccccattccgaatatgccgccggtgtatgtgtatctgagtaaaccgccggtgaaattgtttgaagtggatttatatagaaactttgctgggcggctgaggaatggaacacacgcggatcatatgccttcggcagcggctgttcgagcgaaattaaaaatgttatatcccgatttggagatggatgagttaagtcttattgaaaaaaatgttgcagcaatcattatcccggcaaaggttcaccagaagttcagtgcaacttatggcggccggaattctcagacgcaaatagaacaggattctaaagacttaagagcagctgtggagcgtgatttcagtacgatagagccagaattgagaaattacggggcaacaaaagcacaacttgaaaacgccagagccaaaatacacaggcttaaccaagaacaggggttatacaaatgacagtcaacatagatgcactcataaatagcttaggaaaatcttatcaggaaatttttgatgacgggctaattccttataaaagtaaaccaagcggtccccttggggtacttagtattggcattgatatggtgaaagaggggatttttttatcgtttgaacggagtagtaaaatattaaacgaaattactttaaggttgcttagggacgataaagcttcatttatattcccaaatgaattgccatcaccattgaagcactctatggatagggtatgggttaaagaaaatttaggtgatccgattaagtcaataccaccaaggcaaattttaagaaaccaatttggttggaaagatttatatcgtttcacagacgaaatcagtatgcagatttcttatgacatgatggaacgagtaaaatcggtaacgtttttacctacctcagaagttcgttggtaatcaacaatagatgggagattatttttaaaggccagttcatttgcgggtagtttgaaaaataaagtcgtagatgaattggctgaatcaagaatagaggttatatgaataatgactatcaacgttgaagcgttaattaatagcttgggggaaacctatcaggaaatcttcgatgaagggctaattccttataaaaccaagccaacaggttcttctggtgatgaggtgatatttttggatatggtaaaagaaggggtgtttctagctttttatcgggatggtaagcgtttaaaagagattacgttgactttgcttgatgaaaagaaacctctatatcagtttcctaataagcttccctctcctttggtgcctctgatgtctcgacagtgggtccatgagcagtttggtgaacctaagaaatcacagcaaccccaaatggttatgaaacgtcagtttggatggaaagagttatacacattgcttgatttccacattcctacaagtatgaagatttcttatgacatgatggaacgagtaaaatcggtaacgtttttacttacctcagaagtacgttggtaatcaacaatagatgggcgattatttttaaaagccaattcatttgtgaatggtttgaaaagtcaaatctccaatgaattagctgaatcaagaatagaggtgatataaataatgactatcaacgttgaagcgttaattaatagcttggggaaaacctatcaggaaatttttgatgaaggattaattccttataaaaccaaaccaacaggataccctggagctccagatattactttaagtatggctaaagagggtattcatttagcgtttaaaagagatggtaagattttatttgctgtagagctttttctgcttgatcagaagagaccttcataccaattccctaatgaattaccttctcctttggagcctttgatgatcaggaaatgggttcacgagcagtttggtgagccagaaaaggctcttccgccgcgaaaatttctaaagaaggatgttggttggacggaactgtatacgctactggattttcggataccaaccagtatgcaggttgattatgacctgtttgagcgtgttgattctgtaatgtttttacctacctcagaagtgcgttggtaatcaacaataggtgggcggttatttttaaaagccaattcattatcgaacagtttggaaattaaatcttagatgaattggctgaatcgagaatagaggttatatgaataatggtgatcaacgttgaagcgttaattaatagcttggggaaaacctatcaggaaatttttgatgaagggctaattccttataaaaccaagccatctggttatcccggagactctgatatatctcttgatatggctaaagaagggactttcttatcatttgatcgagaaactaagacattcatagagatgactttaactttacttatacctgagcgtcccagttttgtttttccgaacaacatgccatatcccttaattaaggaaatgaaccgccaatgggtagataagaatttaggtaaaccaattaaatcagcacctccatttgaagcattgacatatagatttggttggacatatctttattactatcagggtaagtcggaaattagtatgcaagtatcgcacgatgttctagatcgagtcagtcgagttacatttctacctacaagtgaagtgcgttgatagttagcagaaagggaaggttcttttgagagctaattcattaatcaacagcttgaaaagttaaatctcagatgagttggtttaaccaagaatagaggtcatgtaaataatgatagatgttattgaaattattaatagtttggggaagaccgcagatatgttagttgaaaataaacttattccagaggaaaagtttgagtttgctttcgaaggttattctagatttagtgttgaaccagagacgggtcttactttagttttcgatattatatcaacagtgttgatttctgttcaattcacattaatcaacactgttgatgatactggtacatatagtggtgatatgcctgctccattccttcacaaaatgaataaagctattgtcagagcatttatgggagaacccgattacagtagtggaccggagagaattccggtaattggcttagtaggcggatttgatgcctatactcgtaaactaaatgatcagtacccaaatacagaaattcgcttcctttatcaaactgatcttcgtgtggatgcactgttatttgaacagtcggtaaataatgattgatgttcttgcaatcataaatagtttaggacagacaaccgatatgttggttgaaaaacaatttatcccaaataatagatcatgagtatgaataatgacagtcaacgtagatgcactaataaatagtctaggaaagtcttatcaggaaatttttgatgaagggctaatcccttataaaaccaaaccaacaggataccctggagcttcatttattgctctgaatatggctaaagagggtatgcatttagcttttaaaagagatggtaagattttatttgctgtagagctttttctgcttgatcagaaaagacctttataccaattccctaatgaattgccttctcccttgaagcctttgatgactagggtatgggttcatgagcagtttggtaagccagaaaaggctcttccgccgagaaaatttctcaagaaagatgttggttggacggaactgtatacgctactggattttcggataccaaccagtatgcaggttgattacgatctgttggaacaagtgaagtcagttgcattcttatccacatcagaagtactttggtaatcaacaatagatgggaggttatttttaaaagccaattcatttgcgggtaatttgaaaaataaagtcgtaggtgaattggctaaatcaagaacagaggtgatataaataatggctatcaacattgaagctttaattaatagtttaggcaaaacttatcaggaaatcttcgatgaaggattaattccttataaaactaagccatcaggttatcccggagactctgatatatctcttgatatggctaaagaagggattttcttatcatttttgcgagaaaataaagtacttacagagataacgttaactttcattaatcacaaacgacctaattttatatttcctaataaattgccttcccctttgataccgctgatgtcccggaaattaattcatcagcattttggtaaacctgaaaaatcacttccaccaaggaaaaggttaactaaagaaattggctggactgaattatataccttattggatttccgtattccaactagcatgcaggttgattacgatttgcaggaacgagtcagactagtgacttttttacctacctcagaaatccgttggtaatcaataaagagattcttatttagaactttaactattcggatatgcggaatttgacttattcacttctcattacttttcaataaactatttttcttaaaaaaaacaatgaacatacaccaagaatattcattgtattggtttttttgtaaattaatcatcaatataagtaaatgtttattataagtaattatataaaggtaaagttattttattgtctgtattttgttttttaatgtaagcaagttttgtgatttattatatttttcatcacacatcatcactgtgtatggcgtctttggaaggtcgtgctaactgatgttctaaaggcgtgtgtttgttctggtgcctttcttacacataacgatggtggttgttttttgcacgaaaaaacctgtttctcataataaacctcaattcaggagtccgtatgaatcaactcgccagtcccctgatttcccgcaccgaagagatccacaacctgcccggtaagttgaccgatcttggttatacctcagtgtttgatgtggtacgtatgccgcgtgagcgctttattcgtgagcatcgtgctgatctgggacgcagtgctgaaaaaatgtatgacctggcggtgggctatgctcatcaggtgttacaccattttcgccgtaattctcttagtgaagcggttcagtttagcttaagaagtccattctctgtgtcaggtcccgattacgccaatcagtttcttgatgcaaacactggctggaaagataaagcacctagtgggtcaccagaagcgaatgatgctccggtagcttatctgactcatatttatcaattggcccttgatcaggaaaagagtggtgctagtgccattatgaatacgctggtggagcgccgacccgatatcggggctttgttgattaatgataaagcgatcaatgaggtgataccgcaattacaattggtcaatgaaattctgtccaaagccattcagaagaaactgagtttgactgatttggaagcggtaaacgccaaactctccaccacccgttacccgaataatttgccatatcattatggtcaccagcagattcagacggctcagtcggtattaggtaccacgttacaagatatcactttgccacagacgttggatctgccgcaaaacttctgggcaacagcaaaaggaaaactgagtgatgcgactgccggtgctttgactcgcctgcaaatcatggcgagtcagctttcgccagagcagcagaaaatcatggtggaaaccgtcggtcagaatttctatcagctaaattatggtgacagtttgctgacggcgaacagtttcagcgacatgaccgtactgactgatagaacaagtttgactgtacctcaggtagagctgatgttgtgttcaacggttggcggttctacggtggttaagtctgataatgtcagttctggtgacacgacagcgacgccatttgcttacggtgcccgctttattcatgccggtaagccgcaggcgattactctgagtcgcagtggagcggaggcgcattttgctctgacggttaacaatctgaccgatgacaagttggaccgtattaaccgcacagtacgtctgcaaaaatggctgaatctgccctatgaggatattgacctgttggtgacttctgctatggatgcggaaacgggaaataccgcgttgtcgatgaacgacaatacgttgcgtatgttgggggtgttcaaacattatcaggcgaagtacggtgttaccgctaaacaatttgctggttggctgcgcgtggtaaccccgtttgccattacacccgcaacaccattcttagatcaggtgtttaactctgttggcacctttgatacaccgtttgtgatagataatcaggattttgtctatacattgaccaccgggggagatggggcgcgtgttaagcatatcagcacggcactgggccttaatcatcgtcagttcctgttattggcggataatattgcccgtcaacaggggaatatcacacaaagcacactcaactgtaatctgtttgtggtgtcagctttctaccgtttggctaatttggcgcgcacattggggacaaacccagagtctttctgtgctttggttgatcgattagatgcaggtacaggcatcgtctggcagcaattggcaggaaaacccatcatcatggtaccgcaaaaagattctccgctggcggcggatattttgagtttgctgcaagcgctaagtgtgatcgctcaatggcaacaacagcgcgatttacccattgaaaccttacttttactgttgagtagcggttctaccttcaccgctcaaggcactgacgatcaattgaattttatccgtcaggtgtggcagaacttgggcagtacatttgtgagtgcaacattattatcccgtagtggtgcaccattagttgataccaacggtcacgctattgactggtttgctctgctctcggcaggtaatagcccgcttatcgatcaggttggtctggtgaccgatgcaggtatagaaagtgttataacaatggtggtcaaaacacaaagcttatctgatgaagataagaagctggcaatcactactctgacgaatacgttgtatcaagcgcagcaaactcagcaaggcgtggctgtcagtctgttggcgcaaactctgaacgtgagtcagtcactgcctgcgttgttgttgcgctggagtgggcaaacaacctatcagtggctgagtgcgacttgggcattgaaggatactgttaaaatcgcggctgatattcccgctggctatctgagcctattgcgtgaagtggtacgccgctccttgttgacccaacaattcacgctaagtcctgcaatggtacaaactttgctggactatccagcctattttggcgcttccgcagaagtagtgaccgatatcagtttgtggatgctctataccttaagccgttacagcgatctactgctccaagtgggtaaagccggtggtggtacggaagatgatgtgttggcctacctgcgcgtggctaatgctgctacgccgttgagtcaggcggatgctgcacaaacgttggcaacgctactgggttgggagacaaacgagttgcaagccgcttgggaagtattgggcgggattgccaaaaccactccgcaactggatacgctgctgcgtctgcaacaggcacagagccagactggccttggcgttacacagcaacagcaaggctatgtcctgagccgtgatagtgattataccctttggcaaagcaccggtcaggcgatggtggctggcgtatctcatgttaagggtagtcactgagcatggcagaagctcactacctgagtggatttgatttttccgtatggcccaatgaggctatttctaaaccgccatttaagtaaggcagataattatgttatcgacaatggaaaagcaactgaatgaatcccagcgtgatgcgttggtgactggctatatgaattttgtggcctcgacactgaaaggtgtcgatggtcagccagtgacggtggaagacttgtacgaatacttgttgattgacccggaagtggctgatgaagttgagaccagccgagttgctcaagcgattgccagcatacagcaatatatgactcgtctggtcaatggttccgaaccggggcgtcaggcgatggagctttctaccgctaacgaatggcgtgacaatgatagccaatatgctatctgggctgcgggggctgaggttcgaaattacgctgaaaactacatttcccccatcacccggcaggaaaaaagccattatttctcggagctggagaccacgttaaaccagaaccggctcgatccggaccgggtgcaggatgctgttctgggatacctcaatgagtttgaggcggtgagtaatctgtatgtgctcagcggttatattaatcaggataaatttgatcaggccatttactattttattggtcgtaccaccaccaaaccatatcggtattactggcgtcagatggatttgagtaaaaatcgtcaagatccagcagggaatccggtgacgccaaattgctggaatgattggcaggaaattaccttgccgttgtctggtgatacggtgctggagcatacagttcgcccagtattttataatgaccggctgtatgtcgcttgggttgaacgtgacccggcagtacagaaggatgctgacggtaaaaatatcggaaaaacccatgcctacagcataaaatttggctataaacgttatgatgatacctggacggcaccgaataccaccacgctgatgacgcagcaagcagatgaaagttcagaaacacagcgatccagcctgctgattgatgaatcgaagactacactgcggaaggttaatttactggctaccactgattttagtattgacccgacggaggaaacggacagtaacccgtatggccgtttgatgttgggggtatttgtgcgtaattttacggggactccacatcaaaaccgtcctgctgtgtatggttacttgtattgtgactcagccttcaatcaccatattctcaggccattgagtaaggattttttgttcagtacctatcgtgatgaaacaaatgatcagaactgcttgcaattcgcggtatacgataaaaagtatgtgattactaaggttatttcaggcaagccaaccgaagatcccgaaaataccggttgggtaggtaaagttgatgatttgaaactgggtactaccggggcctatgtatatatcgaccaagatggcctgacactccatatccaaaccacgactaatggggattttgttaatcgtcatatatttggatataacgatattgtatatgattctaagtctggttatggtttcacgtggtcagggaatgaaggtttttatctggattaccatgatggcaattattacacctttcataatgcagcgatcaactactatccggctggatatggtggtggatctgttcctaatggaacgtgggcgttggaacagcgagttaatgagggatgggctatttcccccttgcttgatgctcaccatactattactgtgcagggcagttatatcgcttgggagggggagacacctgccagttattatttacctatcccagacggtacaatgttgctagattggtctgataaaataaattttgctattagtcttaataagcttgaatctgtatttacgtctccagattggccaacattaaccactatcaaaaacttcagtaagatcgccgataaccgcaaattctatcaggaaatcaatgctgagacggcggatgggcgcaatctatttaaacactacagtgagcaaactttccaacttgccagtggtgcaacctatcctacgacttatactttgtccgaagcggatttctctactgatccggataaaaactacctacaggtttgtttgaacgttgtttgggatcattatgaccgaccatcagggagaaaaggggcctattcctgggtcagcaagtggtttaacgtgtatgttgagttgcaagatagcaaagctccggatgccattcctcgattgatttcccgttacgatagcaagcgtggtctggtgcaatatttagacttctggacctcatcattacctgcgaaaactcgtcttaacaccacctttgtgcgtactttgattgagaaggctaatctgggattggatagtttgctggattacaccttgcaggcagatccttctctggaggccgatctggtcactgacggcaaaagtgagccgatggactttgatggttcaaacggtctctatttctgggagttattctttcacttgccgtttttagttgctacacgctttgccaacgaacagcaattttcgccggcacaaaagagtttgcattacatctttgatccggcgatgaaaaacaagccacacaatgctccggcttactggaatgtacgtccgttggttgaagtacacagcgatctatcacgtcacttgggagatcctatcgatccggatactcaggcttatgctcatccggtgatataccagaaagcagtgtttatcgcttatgtcagcaacttgattgctcagggagatatgtggtatcgccaattgactcgtgatggtttgactcaggcccgtgtctattacaatttggccgctgagttgctagggcctcggccggatgtatcgttgagcagcacctggacaccgcaaaccctggataccttggccgccgggcaaaaaacggctttgcgtgactttgagcaccaattggctaacagtaatactgtcttacccgcattaccgggcaataacattagccacttgaaactggcagataatggctactttaacgaaccgctcaatgttctgatgttgtcccactgggatacgttggatgcacggttatacaacctgcgtcataacctgaccgttgatggcaagccgctttctctgccgttgtatgctgcgccggctgatccggtagcattgttggctcagcgcgctcagtccggcacgttggcgaatggcgtcagtggtgccatattgacggtaccgccataccgtttcagcgctatgttgccgcgagcttacagcgctgtgggtacgctgaccagttttggtcagaacctgcttagcttgttggaacgtagcgaacgggccggtcaagaagagctggcgcaacagcaactgttggatatgtccagctatgccatcacattgcaacaacaggcgttggatggattggcggcggatcgtctggcgctgttggctagtcaggcgacggcgcaacagcgtcatgaccattattacacgctgtatcaaaataacatctccagtgcggaacaactggtgatggacacccaaacgtcagcacaatccctgatatcttcctccaccggtgtacagactgccagtggcgcactgaaagtgatcccgaatatctttggtttggctgatggtggctcacgctatgaaggggtaacggaagcgattgccattgggttaatggctgccggacaagccaccagcgtggtggccgagcgtttggcaaccacggagaattaccgccgtcgccgtgaagagtggcaaatccaataccagcaggcacagtctgaggtcgacgcattacagaaacagttggatgcgctggcggtgcgcgaaaaagcggctcagacttccctgcaacaggcgaaggcacagcaggtgcaaattcgaaccatgctgacttacctaacgactcgtttcacccaagcgactttatatcagtggctgagtggtcaattatccgcgttgtactatcaagcgtacgacgctgtggtctctctgtgtttgtccgcccaagcttgctggcagtatgaattgggtgattacgccaccacgtttattcagaccggtacttggaatgaccattaccgtggtttgcaagtgggagaaactctgcaactcaatttgctccaaatggaagcggcatatttagttcgtcatgagcgccgtcttaatgtgatccgtactgtgtcgctcaaaagcctattgggtgatgatggctttggtaagttaaaaactgagggcaaagttgactttccattaagcgaaaagctgtttgacaacgactatccggggcattatttgcgccagattaaaaccgtgtcagtgacactgccgacgttgatcgggccgtatcaaaacgtgaaggcaacgctcacccagaccagcagtagtacgctgctcacagcagatatcaatggtgttaaacgtctcaatgatccgacaggtaaagagggggatgcgacgcatattgtcaccaatctgcgggccagccagcaggtggcgctctcttctggcattaatgatgccggtagctttgagctgcgtttggaagatgagcgctatctatcgtttgagggcacgggtgcggtctccaaatggacgcttaccttcccgcgttcggtggatgagcatattgacgataaaacattgaaggcggatgagatgcaggccgcactgttggcgaatatggatgatgtactggtgcaggtgcattataccgcctgcgacggcggtgccagcttcgcaaaccaagtcaagaagacactcttttaaattaacttttaactaagacttcccactctggtcgccagagtgggaaaggatctgtcatatctaaaatcaatcttgcgatctttctccatttcattggaagggaagctttaaaacaaaataaaaggaatatgatatgagtacgcctgatactgctctttatactcaaaccccaacagtcagcgtgttagataatcgtggcctgtccattcgtgatatcggttttcaccgtgttgtgattggcggggatattgacacccgcgtcacccgtcaccagtatgatgcccgtggatacctgaaccacagtattgacccacgcttgtatgatgcaaagcaggctgataactcagtaaaacctaattttgtctggcagtatgatctggccggtcatgccttgcggacagagagtgtcgatgctggtcgtactgttgcattaaatgatattgaaggtcgtccggtaatgacgatgaatgcgacaggtgttcgtcagactcgtcgctatgaaggtaataccttgcccggtcgtttgttatctgtgagtgaacaagtttttgatcaggaaacttctcaagtgacagagcgctttatctgggcggagaacaccacagcagagaaagaatataacctctctggtctgtgtatacgccactacgacacggcgggcgttacccggttgatgagtcagtcactggcgggtgctattttatcccaatctcaccaatggctggcagaagggcaggaggctaactggagcggtgacgacgaaactgtctggcagcggatgctggcaagtgaggtctatacaacacaaagtacaaccaatgccatcggggctttactgacccaaaccgatgcgaaaggcaatattcagcgtctggcttatgacattgccggtcagttaaaagggagttggttgacggtgaaaggccagcgtgaacaggtgattgttaagtctctgagctggtcagccgcaggtcataagctgcgtgaagagcatggtaacggcgtgattaccgagtacagttatgaaccggaaactcaacgtttgatgggtatcactacccggcgagccgaagagagtcaatcagaggcgagagtattacaggatctccgctatgagtatgatccggtggggaatgtcatcagtatccataatgatgctgaagccacccgcttttggcgcaatcagaaagtggagcctgagaaccgctatgtttatgattcgctgtatcagcttatgagtgcgacagggcgtgaaatggctaatatcggccagcaaagcaaccaacttccctcacctgctatgcctgttcctgccgacaacagcacctataccaattaccagcgtacttatagttatgaccgtggcggtaatttggttcaaatccgacacagttcacccgcgactcaaaatagttacaccacggagatgaccgtttcaagccgcagtaaccggacggtattgagtacattaacgacagatccaacccaagtggatgggctatttgatgccggcggtcatcagaagacgttaataccggggcagaatctggattggaatatgcggggtgaattgcagcgagtaacaccggtgagccgcgaaaatagcagtgacagtgaatggtatcgttatagcagtgatggcgtgcggctgctaaaagtgagtgaacagcagacgggcaacagtactcaagtacaacgggtgacttatctgccgggattagagctgcgcataactggagtggcagataaaacaactcaaaatttgcaggtgattacggtaggtgaggcggggcgcgcacaggtaagggtattgcactgggaaagtggtaagccggcagatatcgacaacaatcaggtgcgctacagttacgataatctgctcggctccagccagattgaattggatagcgaagggcagattcttagtcaggaagagtattatccgtatggcggcaccgcggtatgggcagcgaaaaatcagacagaagccagctacaaatttattcgttattccggtaaagagcgggatgccaccggattgtattattacggctaccgttattatcagccttgggtgggccgctggttgagtgctgatccggcgggaaccgtggatgggttgaatgtgtaccggatggtgaggaataaccccatcacattgactgaccatgacggattagcgccgtctccgaaccgaaatcggaatacattttggtttgcttcatttttgtttcgtaaacctgatgagggaatgtctgcgtcaatgagacggggacaaaaaattggcagagccattgctggcgggcttgcgattggcggtcttgcggctgccattgctggtacggctggcgcggctctccctgtcattctgggggttgcggccgtaggtgcagggattggtgcgttgatggggtataacgtcggtagcttgctggaaaaaggtggggcattactcgctcgactcgtacaggggaaatcgacgttagtacagtcagcggcgggcgctgctgctggggcgagttcagccgcggcttatggtgcgcgagcacaaggtgtaggtgttgcatcagccgccggggcggtaacgggcgcggtgggatcatggataaataatgctgaccgggggattggtggcgctattggggccgggagtgcggtaggcaccattgataccatgttggggacttcctccacccttacacatgaagtagccgccgccgcggggggagcggctggtgggatgatcaccggtacacaggggagtaccagagccgggattcatgccggtattggcacctattatggctcctggattggttttggtttagatgtcgccagtaaccctgccggacatttagcgaattacgcggtgggttatgccgcgggtttgggggcggaaatggcgatcaacagagtaataggtggcggattcttggggaggttattaggccgggctgtcagcccatatgccgccggtttagccagacaattagtgcatttcagtatagccagacctgtctttgagccgatatttagtgttctcggcgggcttgccggtggcattggaactggtctgcacagagtgatgggaagagacagttgggtttccagagggctaagtgctgctggtagtggtatagatcatcttgctggcatgattggtaatcagatcagaggcagggttctgaccacaaccgggatcgccaatgcgatagattatggaaccagtgcgataggtgccgcacgacgggttatttctttgtaataaacattgccggaaatctccgtccaatattgggcggagatttcgaggcgggatgcggctgctttaatatcaaaaacaatttaattttttagtgcgctcataatactcatggcttgctctttatcttttacccccattctgaatgaaggatttaaagaagtttgaatagtcgctgtgacaagatgagtacctttaaatgatattgtcatttgggtgccgatgtttttattgattaaaggtaaacgtccggtcatctcaccttgttcttcctctccggcccatgcacgctaccgcttccttatcttcacctggagactgacaccatgagccgtagccgatataccccggaacaaaaacaacaccatgtgacccaatggcgccacagtgacctgacccgaaaacagtattgcgaacagcatcagctgagtttttccgctttccgcgactggattgccgacagtaacaacatcccccaacctctcagccagacactgcccgccctcttaccggtttcactccagcctgacgacgcgcgcaccgtcaccctgcataccccagacggctatgccatcgcctgtccattgacgctgttgcctgacgtgatgcgggtactgacccgatgctgaaaccgcaacagctctttctggtgcgagagcccgtcgacatgcgccggggcattgatgccctgacccagcacctggaggggctgaatttgcgctggcaggacgaagccgcttttattttctgcaacaaggcccgctcccgtctcaaggtgttgcgctgggaccgacacggcgtctggctgtgtacccgccgtctgcaccgggcccattttgtctggccgaagcagggcgagcgcagctgggtgatgacgcccgcccagtttgactggctcatccgcggcattcactggcaacaggtcgagggagatgacctgtccggctggcgaaactaattccgctaccccggtcacacttttaccggataacgacggggaattatccggtacactgtcggcatgacgctcaatgacttaatcgcgctggatgaccccggccagttccgcctgcgggcactggcgctgcttcagcaacaaggtgattatattcgccagctggaagaggccctgaaacaggcgcaacgctggcgttttggcgcgcacagcgaaaccctgcctgccggtcccaaacgcagtcagtttgaggaagatgccgataccgatatcgcggtgctggaaacccggctgtcacgcctgcatatcaaggaaaacgcgaccccggcccagcctaaacgtcagcctttgccggcgactttaccccgtgaagatatccggctggcgccggagacggagagctgcccggattgcggtcatgccctgcgctttttgcgtgatgaaatcagtgagcgactggaataccgtccggccacgtttatcgtccggcgctatatcagcccgcagtacagctgcgcgcgctgtcagtgtgtgcatgctaaagcccagcccgcccatcttattgaaaagggccttccagagccggggttgctggctcaggtggtggtcgctaaatatcgtgaccacctgccgctctaccgtcagcagcaaatctatgcccgcagcggtgtcaccctggcccgcagcaccctgtcggactgggtggggcaggtggcggtggcgttgcaaccgttagccgatgccctgaagcagacgctgctgacgtccccggtgctgcatgccgatgagaccccgttgccgatactggccccgggaaaaggccatacccagcgagcttacctgtggacgtctgtcaccggccccgatacctcgccggcagtggtatactatgagctgcatcccggccgcagcggccgttatgcccagagcctgctgaaagactggtcgggcggcacgttggtgacggatgactatgccggttacaacgcactgcatgcccgggcggatatcaccgaagcgggttgctgggctcacgcccgccgcaaattctttgaccaatacaaagcgagccaaagtccggtggcgaaacaggcgctggatggcattcgtgacctgtacaagctggagcgaaaaatcaaacaccggccgccggataaacggcgtcagtggcggcagcgttatgcccggccgtggctgaatgagttccggtcctggttgcaaacgatgcagacccaaacggcccccaactcggggttacgcaaagcgatagattacacgctgaagcgctggtcggcgctggtgtgttatctggatgacgggggggtgccgatagacaacaaccgggcggagaatgcggtccggggtgtggcgctcggccgaaagaactggctttttgcgggttcactggccgcggggcaacgggcggccatgataatgagcctgctggaaacggccaaagccaacggacatgagccctgggtctggttacgtgatgtcctcagccggctgcctgtctggccgaacaatcggttgaatgagctgttgccctggcctgagaatcccttccgttaacatcccattttgtggttatctgaccacgcaaggtgagttcaccggaacattacgattaaagcatcaaagtgagcaaagcattgtttatcgttttttatcgctatttctatctggtcattccccccttcgtctggccctaaataatcgattttatcggtacaagcgtgagttaagataaaattgccgccggatgaaaatgcaaatttcaatccctcttctgcttgtgtttgtctgtttgggttatttttaccggagcacccggttattacggagagaagtaacataataacaaacaaatttttcatgattctaaccctgttatattgaataatcaccttcaatataatctatacccgtcatctttcaagttgcctctttgttggctgctctcgctcaccccggtcacatagttacctatgctcccggggattcactcccttgccgccgcgatgcatcttgaaatccatagggtatatacccgtagtcattgaagatgcttgattttatccgaaatggagatcattcaagttgcctctttgtttgctgcactcactcaccccggtcacatagttatctatgctcccggggattcgttcccttgccgtcgcgatgcatcttgaaatctataggtatatgcgctggttttattgacatatttttatttactataatccaaaactcgcttaggagtaattattacaataataccgataataatgtgaattaaataatttaagtttttcttctacgttaatgaaggaaattcgctgaaatctgttcattagatgagtttgacaaaaatatcgttgttgaataactcctgcctggttagggagcgttacgtattcggtacaattaaggttacctaattagcttacaacgcgggtttatgcaggtatttttcgctaatgtttaatatttacaggcaggttagaaagtagaatttgttttaaacacatcgtagacgctatatgataattccttattttccacgcaattaattttatcgattcagctaacagggttatgttatgagtactaaagttacacctatcccatcatttggtcgtgatatggctatcaacgagtcaactgttctgattgatcaggagcacatcaacacgctaatagaaaagatcgatatttcgcaacctgcggcggtgatcggctatggtgctcagcctatgggagggattgcccgttttgctgatacgttattggagaatgtaaaaaccaaagaagctgatgaggtaggccaaaaactctcggatttggtcatgtttattcgtgagcatgatgcgctgtccccagaagagaaaagtagtcgctttctgagaaaattaccgttgatcggcgggatttttaagaaagttgaacgcactatgattgatcaaaagacgctaacacaacaggtcgataccattgccactcatttggatagtgcaatgcttaatttgctgcgtgatatcacggtgttagatcaactctacgatcgcaatctaggtttttataaagaaatatcgctctatgttgaagcgggcaaacagaagttgcggcagattaaaacggtggagttgccctcattgcagagaaaggctgagacgtctcaagatatgatggatgcgcagagtgttaaagatctgctggagaatattaatcgttttgaacgccgtcttcacgatttggaactgtcaaagaccattgctatacagactgccccacagatccggattgtacaaaataataaccagcaactggcggaaaagatccaaagtagcatcctttctacattaccaatctggaaaagtcagatggtactcaatctgtcactgaaagctcagagtcgagcggctaaattgcaaaaagaggtggccgatacgaccaacgaattattacgcaaaaatgctgaaatcctgcaacagagcagcattgcaacggctactgaagtggaacgctctatcgttgacattgaaaccttgcgcgatgtgcagagccgtttagtcaatacgattgaggatacaatgcgcattgcgtcagaagcgcgcattaagcggactgaaattgagaaagagctctcctcaatggaaggtaatttacgtcagcgtttaactgcggcggctaatgcacaatattagcgaccttatcaggtgctttcctgacagtaatggataatagtaagaggagtaaaataccctatgcctacacctcaatcatcgtctgaccgtgatgcggcacaacagcaggaacagggagtaatatctctgttcggtagcatcaagcggtctctatcacgtgtactgtttcatatcaaaatctttgtcctcgcttttatactggcttgtgttgttctgtatactccttggtcttttttggtcttgcctgcgggtgatggtcatatttccagcatagtggtgttatcagtctatatcggattattggctctctatccgtcacgtccacataggcccgcgactttggccggttggttggtggtggtgttgagcccgctggcggagctgtgggctgccgcactattgtttggcgggctggcggctttgctcatcacgattatcagacaacgtaaactagaggtaagcaggttcccattattactgatgacagcgagtactattgtcgcgttgtttagaattgatgcccatgcgattcctgtttggtttggtgtcgtattttttgtcgtcgtgctggtaacggtgttgattgagccttggaataattttcgacggcagaaagcgctgcaacagcaacaacagcttgttgctcgtcaacaggcagaggagcagcgtcggcaagatgagacacaggcagagtttgctgaatactatgaacaattggctcagatcaaacgttataagtctggtatggcgtatgagatgcaggaattggttaacctgattgaggagaaaacgcaggcgatcattgactgtatgcaggctgatgccagggatgtcactcccggtaagttatttctcaaccgttatttgccaatgattgtcaaagcattggagcgttgtgtttcgttagaggagcaaagtgctgatagcgcccaattcgaagaggtgaaatccctgacttatcaagggataaaggaaatgagcgtagtatttagcgaaatgcaccagcgtctgttagataacgatattgacgatctattggtagatctaaaagtaatgaatcagttggtccgttcccaagggtttgctgctaagtatgatcaaaaaggctgaaaaaatttatgggaattattgcatgagcttgtaaatatctgaattcttgataaaaaaattgaattaagcgcctgttccaagatcagaactttcgaccaagaaaaaaagatctaaataaggaacaggcatggacaaattagttgtattagtcgaatttttctttgatatcgacgatttttctcgtgttttcattccacaatggttctctgtttcttcccctaattttactcttgggtaccagcgcccaaattgtgtttctagctcaccgtttaatatggctgttcgcgttgcactaaacaaccacctactaaagtaggtgggttagtgattaacggactgaaagtccggatacgcgtcggctaaacgacgcgtcaattatccatcctgaaattatcattcggattgggttcaaaatgatgttctaaatagcttttgatcatttcctccgttaactgccccaccgttgcacaaaaatagcctcgcccccaaaaatgttggccccagtaccgctttttcaaatgcgaaaattcttcaaacagcttactggccgttctccccttcagccttctcatgatttcacttggcgctaatgttgggggactgctgacgagtatatgcacgtgatcttgactcacaactccctttaatattctgatttcaaaggagccgcatgtctgacggattaattctcgcactcgacttgccacttctcctgtcagcactttgtatctgtatttcgttacccacacaaaatggtattcaatctgaaataccgtgtggctgccatatctgtaatccatgttgcacctccggtacaacacagtatcgcagctaaagctgaccggctaaagccggtggttttaacctttcatttggaagaataaataatgaacaccatattgactccattgcatttgttgctttttatccattcgtttagtaatgaattaattgattttatttatatataatctaactcaaaatgggtgttatcactatgtcagccgttgatcatgcttgatgtttacaatatgtcaggaaaaaagagattgaaacacagggatgtttatataaattatttttattaattacgcctcagcaacaagccaacaattaaggaggcgctctcaagatataacccatgcttaacataccgtttgccttaatagatcattacattggagccaaatatgaataatgaaacttatgtggcaattaacgaatctctgtttgaactatctgaacacggattaacagatgctgaacgagggcaggccctggcagagttagattcgtatgtaaagaaaacgcgagaaaaatttcttggctatcaagccaaccaagaactccactattcatcggaatttagcaagtacttagatgttcagttaaataatgttggcgacccgtttatggcgggcaatttcagacttaactcaaagtttgttgagcgtgccgtactggattattttgctaaactttggaacgctcctggcagagatagcaccactccgggcgaggcatactggggctatgtgttgtcaatgggaagcactgaggggaatttatatgcactgcgcaatgcgcgtgattatctagctgcaaaagttctctgggttgattcgaatgcgaacagctcccttgaacaaggggagttcgtaggtggtaacgagaactcgcttacacccgtacttttttattccgaagatacacattactcaattgataaagcaaaagatattttggcgctctccactttctccaaactaggggagtctctttatccagggcaatgtcccatcaagacgagtgatggaaaatggccgacaaaggttccgtccctcccaacgggatctgttgatatagctaagcttagtgtattggtggatttttttgcatcacgtggtttccctatagtggtaaacttcaactatggaacctcttttaaaggtgcgcttgatgatgtaagtggcgcgattgatctgctactaccgatacttgagcggcacggcctcaaagagcggactcttgaaattaccttggaaaatggcaaagttattaaaagccttcgtaatggctattggttccacattgacggtgctttgggggctgcgtatggtccgtttttagagaaagcgagagagcagggaatagatattggtgagggacatcttccttcatttgatttcagaaacccagttcattctatcgtgaccagcggacacaaagaaatgggtgctccgtggcctaccggcatttattcttccaaatgaaaggttaaaaccaccggctttagccggtcagctttagctgcgatactgtgttgtaccggaggtgcaacatggattacagatatggcagccacacggtatttcagattgaataccattttgtgtgggtaacgaaatacagatacaaagtgctgacaggagaagtggcaagtcgagtgcgagaattaatccgtcagacatgcggctcctttgaaatcagaatattaaagggagttgtgagtcaagatcacgtgcatatactcgtcagcagtcccccaacattagcgccaagtgaaatcatgagaaggctgaaggggagaacggccagtaagctgtttgaagaattttcgcatttgaaaaagcggtactggggccaacatttttgggggcgaggctatttttgtgcaacggtggggcagttaacggaggaaatgatcaaaagctatttagaacatcattttgaacccaatccgaatgataatttcaggatggataattgacgcgtcgtttagccgacgcgtatccggactttcagtccgttaatcactaacccacctactttagtaggtggttgtttagttaacaaaacaaaaaatatctcctgaatttcctaactgtagattatataggcgctcaggattccacattagcgggctcgcgaaatggtttttcggccttgattctttggcactacctgactaaatactcccataaagaccagattgaaaaaatcgtacatcaactccagatgagtgagagcgcttatcagaaactacaggcattgagtgcggaacttggtcgtgatctttacgtccatcgctcgccactctctctcagtatcctgttcctttgtcctaacaacgacattgttgaagagttctctctctctactgagacaaaaaatgggattgagtatgcacatcttttcgttatggaacatgtgacggatgagatgcttaacttgctcatagatgcattacgccagccgggtgcctttgacagaacaggagctctaaataatctgtcgcaactggtcaacccgggaactggattccgataactttatacggggttcaaacctaattaattcactccaaatagtgaattaccagaaggaaactcagtccgaattgtgcaacaaaattttaccaatcggactgagtttttattagtggtgcagagcactacaagggcttctccgctgacacaagttctacatcatcggtgttttccaaaatgcttcgctgcttggcaggtgcaagtgagaaggtgaaggactgaggtactacaaccggtcatcttaggggttgaagtccaacggaacgaatgtggcgattttttcgctgcactgtttcatactcttcaattgtgtgattgtgatatcagacatttgttacattctcagatgaactgctctgccaataagagtactgcgatgataatcatcacagagccggatacccggctgacaatgtgcgcggcctgtgcgcgggtttttaggattgctcgggaaccgtatccgactatcagataaattacgccacaacttaaaatgtgaagcagacccagtgccataatttgtaccgggatcggccaagcggctgttggattggtgaactgcggcaacagtgccagaaatagcaggaagacttttgggttcaggctactgacccagagtccctttatcgcccattgggacctggaacctacctcccgctcattgcttgctgtaggtacggaaggatgacggatcatgttgatgccaagccacagcaggtaacccgctccggctactgttaacactgtcagagctattggcgtaccagcaacaatcgctcctacaccagctgccacaacaattgtcgcaatgaggtgcccgcacagtaatcccatgaccgcgggaagtactgcgcgaccgtgcatacccgcagagatggtgtaagcccaatctgcacctggagtgatgataaacagaacggatacaatccagaatgcagcaaacagacttaactccatagttttaccccccaatcagattgcagggttacagcttctctagtcacaaattttagcgtcttccagtctgaaagattcctgcaacatgaggatatacacatattttttccaccttattattctcactaccggattaccattttgatgaaaaatataagtacatccgggctgtttacgtcagtggaaagaatatccttctatcgttaaaatgtgtttccaactttgattgttttgatgcagataaaagagagatccttccaaatggataagattgatcgcaagattcttgctgagctacaggcggacggtcgtctttccgtgaccgaccttgctgaacgggtaggtctcagcctttcaccatgtcatcgccgggtacgatcactggaacaagcggggattatcagaggctatcgtgcccatcttgatcccagcagccttggttttaacttttccgcgattgtgttcgtaaccttgcgtgaaggggacaggttggcaatcaggtcatttgaagacgctgttacggaaataccgcagattatcttggcgcaaaggcttttcggtgatcctgactatctcatgcacgtcgttacgcatgatctgccagcttttcagaagctctatgacgaacggttgtctagtatgcccggtgttcagcgcctaatatctacactcgtcatgaaaaccgttatccaagatcgccctcttccgttggcatacggcatttaattaaaggatgaagagaataacttgatgaggcactcttctatttagattacaaggtaagctgagcttaccttgtaaaatttctttaaaacaattaaggaattaaatcaactacagcatatccagaacgtttcggtttattcttttgcatgacctggacaagacattgcatccgctggttttgttctatggggctctgatacgttgctgtatataccctattgatttaaagatgcatcacggcggcaagggagtgaatccccgggagcatagcaaagacgggtataaactgagaaatcaccttcttctttgtagcttacatccgttatgctccctttcttcggataaatctcccataaattaccttcaaaatcttcactttttgttgtaaaggtgacttttttctgtggagtaatatttaaagcgtatgaaggcgtcactttaaactcagctatcgtattttgactagccaggcagacaatggctcgcgtttcttctcctgacggcaaactggcaataatactgacaaaatggtaaccaccctcgaacttcttcggcggagtatataatccgctgtcgctgactgtttttgataatacattaatttattatatttaaagatgtgaactattagattatggttaagatttattgatagtgatatagtagttaatagttaggttattggaatgggttttctatttttatagtatattaaggtagtgttaatgttaatatttaatcgttaattgaatttgtcggaagtgttgagtaaatcatccgggggattaaactaaagagggtttatttttatcgcctaatatttatattgttgggtgtttttcaggtgggctattaattttctatgaatgatttattcataaaataatgttgtatggagtaatgacttagattttctgtatctgggattgttaatttattgataattagtggcatgggtagtctctatttaaattgactggccactattaactatatttgttatttaaatagatggaggatgtaatgagtaacgcaaatgatataattaactctttaagaatgtgcagtgttgcgttgggttgggatgccgttgttgcttatgatcgaaataaagttaatcaattattgcttcagcaatatatagaaaagagagctgcgggggtgcaatatcctcctataagttttgaaaatgagaagtatggaataaaactccaggatgtcgttttaggtgtgccactcatttcatttgaggattccaaaattacggccagtcaggccacagcaactatgaaatttatttctggttcgattgtctatacaaactctaatggtcaagttattaaatgggaaaagatcagtccagcgaataattatgctatcaagcttaatgtaaatctggaatatggtaatggggttgttgagaatatcggtaatggggtctctgagaatagtggtaaggttgtcatcaaatttgagaaaggtactttactggatatagaaggattaaatgatgctccagcagagattgtgcagtattttaggcaatatattcagtctaatcctaatgaatatattctaggtgtattaaagcctaataatggtaaaaatagactttatcctaaaaaatttattgttcgcacacaaccagcccctagcggaacattacgagattctaaaaactatggtgatggagctgtactgctttttattgccactaattataatgcaggtgggggtaacctgccaggagataactatccttacattattccagaaggaaaatcggcagctctcattattgggaacgcaaccctattcggtaatatatttgctgaacattttaaaaaatatattgatgatgctgcttttacaaccatcaattcagggcagaatagtcctgtaactttgcagtttactggaggatatacaccgacaaatgaaattatagatggttctgtaacttttttagactcaacgactagatataagagctgtgatgagaaaggagaggtgcaggttgctcacctgccatttaataaatttactatagctgctgatgttgaagataatgaaagtaagcatgttgttttacaattccctgagaaccatacttataatcatcgattctcagcatcttgggattattacggcccggcagggtggatacatcaagattatttaaatgattacacttttagctgtgatgggaaatgcaaggctgaagtttctctgaaggaaaataatattatttcattttcaacggttggcaagataaccgttaaatgtattaagtcagaacatagtagattaagtcttattgaaagtaatggaacagagaagatggcaaatcagctcacagataaaattaataagactggttttttcgaattacctgatatcaatacattttatattcagcatattctgtttccgaactcggaagttttggaatttgatcagattgctgttcctggagatttggtcttattcggcgatattagccctaccttgacaggtctgaaagttgaacccgcagagatacttctgtctgccaataaaacccaacaatttactgtgaccccagctaagaatgttaaatggtcaatcagccctgtagatctgggtagtatcagtacttcaggactttatacagccccttcagtggcctctattggtgagtcgaaaccgtgaaagtgacagcatcaaacagcgatggctcaatctcttcaacattcattattctattttcgatctaaaaaaagttattcctctttatattacaaataaaggtactatcaacacgcaacaaattgcagtaaaaggaaaattaacaaatccaccagcaaggtataaggaatattctacgggtgttaatggtacgcccggtatggaaagttgttgttagtgtattgggatctattgactattcatcaattattcaaactagttagctacgaatttattttacctcaggtaagaggtgaggctttaggatagaaatctgtcaacgatagtttgaatgtaaaggtgactaatatatatgggaatagtgggattattaagtgaacttgggatgatgaagagcattattatattcccatgattagttaattgtagtttagtcggtggcaagaatagtcttgccactctatttaaaatagagacgattcgaaaaaatacaaggtggaacctgtgtttaatgaattcaatactcaatcgtcaaattttaataattctatacccaagaaacttcaagatgcagtttttagcacctgaaaatggtcgttaattctagacatcagcgagtccgctatatccggtagcgttgtggtgaaaaatttgaagacgttgtctcgaaattcatgtttatccgcaaaataacggttatttcgaacctgttcattcatgaccttccataatcgctctattgggtttaaatttgggctatagggaggaaggtaatgtaactcaatattgctaacataagcccactccttaacaagatgagctttgttgtaacccgccccatccacaataagatgaattttttgatgatagtcaggataagactttcttatttcattgaaaaaacagcaaatgttgtagtcattgatggtttgatattcctggaacaccgtacgaccaatggcattcaggttgagcgcgcccaatatattcaggcgagtccggcttcctgttgtttttactgtttttttctcgccttttcgcatccagccataaccgagtttggtgccttgagtcgggtgaacagcatcaagaaaaaggatgggttcgtctttcgctgtgactttaagattctcataatattcaataaattgtcgctgtttttctgcgtcgaatttatgagggacgccacaaggttttttataagaaaaaccctgacggtgtagccatttattcatgccgggaatgctaaaggtaatattccagagctgagcaacataggccacgatttcatgggtgtgatggaaaagatgttgagataagtgattgattaaaaaatcagtttgttcttgagaaagcaaactatcagaccccccattatcagatttaagtttaccttgattaaggtaatcgctgatatgacggttaacggtcatttcatgaagacgcagggcctgagcgatcatcactgaactccagccttcagaggccagcaggaccgctttgatgcgatcacactccctcttatcacggcaggtgtgatggagatgttcaagttcggctttttgttcatcggtaatgaatattttcatagcgaggataatgatctccatttcggataaaatcaagcatcttcaatgattacgggtatatacccgttatctttcaagttgcctctttgttggctacactctctcaccttggtcacatcgttatctatgctcccggggattcgctcccttgccgtcgcgattcatcttggaatccatagggtataggcaattctttaagaacgtttgaacaacctataattgaagtaaaaccggaggtagaaactaagattacacacaagcacgtgtgaccagttttttatataaacgacatcgatactatgacaaggaaaaattaacagttgttttttcccatatattgactatcgagctggtaatatttgtgttattaggggcttaattagcgatgttgttagtgttggcataaatcaagcgatgggaagaaaatcgcgactcgcccttgtcaacgtgaaaactcatttgggattctggctctataaggtaagaaaataaaacgtatgactgcaaaatttgaacgattacaacagctcgcccggcacgtcgatttttcggctcttattccccctttgttggcatttcctgccgataaagcgtttgccatcaccgcggtttctccacatgctgatgctgagctgttacgcaccatctacagcaaatatattacagagcatcacgattgggtaaaacaagtagaggaagtatgtggtccacctctctggattgttcgtagtgcaggtctggaagatggtgatattttcgtcaatgcgggtggctatgcgagtgtcatttgccatcgtacagcagattttgccgacactgttgctgaggttactttcagtggttttgaacctcaagctatcgcacaacaacggttaatcaatcctgattatcagccacagccagtcacttgttttgttcagcggttgattcaaggcactccacctcaagtggaacttttacaggcaccctatctgacagctgatgtatgtcatagtttgtacaaaattatcaggcagttacatcagcacttttctgaaattgcgttggatactgagtgggtattggaaacagatcatggattggtatcggccaccggactgaccttagccggttctaatggtgttcggggagaactggcgtttggttttggctttgcggcggcgcaatcgcccggttcaagggtaaactcggtcgcctatcattggccaacattagccgctcccttgtggtatggcacacaattacgtcaagtgaacgtagataaactttggttagtacaggtgcgtcctgctcctggttacacgcttgaacgtcgtgttcaacggttaaccgccgaagtacgcaccgagctggcgcattgtatgcgagcagtaccggtggcagcgctattacccccttcttttccctctttaggtagcttcctttctgcatcgacattgaacgatgcttggtctcgttacctgcgttttcccctgtctgtgcaaacggctcttaccgctgtcttcgttgaatctggggtgggcagtgaacatgctggtatcatgttccgacaacaaaatttgccggtttttcttacccaactaacggatatacccgctgttccttgggtagtcattgatagtatgggggaattggcctactttagtgcacaaaagccacttatcgaattgaaaacggaaactgccgaatcggttaatttgcctatctcagtacaacgtgtgtttgacgacagtgaatccttgcgaataacggagcttacatctcaacgtgttaccgatattctgcaaaatgcgttgattggcttacctgtgttaacggaaaagacctacaccacacttaaacgacgcacggttttcccaacagacacttggctacaaaatggtaatgctatccgaagccccagtttaacaggttggctcctcgcacaggcaggagagagagctattgagtttttcccctctgattggccgacaactgatgcaacggcagattatctctgtgctcttaccgctaaaagcaatccgcaatctgtgttaccgcgcttatgcaaagctatcccaacgcttgcaggcaggctcacccgattcaatgatctgtgcttaattatgcagttaattaaaactgaagcatggattgaaaaattgccgtctatccaattaacgtcattggtcgatgctgcgataactgcaccgtatagcgatgcacgcttgttgttagaatgtatactccatgtacttgcagatacagaaattctgtccatttacgaggatactgaacggttaaatattgtatatactctggtcaatgtagcagaatctacgctttctccggcctctctattagagataatacatcacggccaactagcaccgactgcactcgctagtttggtgtgtgccccaaaagcatgtgctgcctatctggcgtttttaactcctttgagatgttttaaggctgccgctgcattagctggagccagcgaagttgctgatttactgcaagccaccgctagcctaatggagactctacataaagcaaacttaccgacattgcagggcctttgtcgcattgacttggtggatacttatgatcaagtgcttaaagcggtattaatcgatgtggtcgatcggcgtgatcccagtacacatcagcgttacttggatttgctaagtggttggattgcatttgcccaactgtcgactctttctgccacggaggcggcggcattgcgttctttcctaaggtggatagagcatgttcgttatcaacccatgccagacaattttttgcttgagttaaaagaagacatggtggaatgtttgggcgacgacttcttgcgctggcaagttttaatacccattgctggcaatatgatgcctgatcaactgcctatggaaaatgctcatcaactacataatcttttacatcagtggatgttggctcactttcgagctcactccggttctgaactgcctgctcccctacgcaaactgataaatatcgcagatggttttggtgatgcacgctcttgcctgctgaggttaacacggaacattctagagatttcactcccctttgtagtacataaggccagcttcctctttaatgagaaggaattgatcgttgaatttgccgaactaccgaacgctccggaagaggacattggccgtttacatgtattcgaagcgttggcattgcgtattgtcgaatggaaacccatatggcgagtatcaccgaatcgagtctgtcagttaggaacttggacgcttttcttgcgcatgcagcgtactgatggtgcccgttggcaagctgaggatctccatcaattggtgctctggttacgagtgctgttcgatacagcttacgacttctcgtatgttcctaacgatgaagtttcacatgtatatgaaatggttggtcattctccttggcgtgacctgtttcgtgcttatgccgcttaccgagcagcggttgatttttctattcaacgtatcacagtctattcattgccctttgccacaactctagcagcactctgcctgaaccagtttgtacgtgatgaggtaattggagcttgcattgccggttttgaaggtgcctggaaagcttttcgttgtatggctgaagaattggagaaaacagaagctgaccaaaatcaatggcatgtccttcacaccacagcagggcaattgggattgctgctttcagcgatgtggccggaacagacactgttgaggatggtacaagtgccgctatcacctgttgccgctgagcgaataggtgtaagtctgttgcatcgtcgtgacttgactgccacattgcaacagctaattgcagagccagaaaatgcagctttgcgcgatttggtattacaccatgtacctgaaatcgctgtgaatgcaagctctgccgccacgattgcagatgaagttgcaggctggcaaagtaaatttaagcgctgcaaggaatacctactcgcttatcatgctaatttactctctgacagccaatgccagcaatgcgtcaaacagcttgggttggtgccttatggcataactgaggaaattgaaacctatattcaacgtgctctgattcacaccgcagcagaggagaaaggtcgttttaaactggatgaagttgaccctattgctattattcgtgccataggcacggaggcttgagtatgacttttcaacctgatgtcaatatcagccagcctatcatgcagaaagattttgggagaaatcatgtcaatatcagtgaattacattcggcaattaattatcaaagtcgcctgcgatacgacaggtgatagtgtagaagaattaatcgggcgcgggcggctggagatccctccacgtgatgcaattgaatttatggtacgcctggaagcactgttcgactgtaccttgggatgtttgcgatacgagcctttgtcaatagagatcgatgaattttcggcaatcgtgaacaatgcccttaacgtgcgcgtatctactgcatcaacattttgttgctcgtcaacaagcagaggagctgcgtcagtgagatgaagcactggcaggatttgctgaatactatgaacaactggtccagatcaagcgttataagcccggcatgatgtatgagatacagagagtgaaggttgaaaaatttatgagaattactgcatgagcttgtaaatagattttgccgcggaaggtttgcgtttatttgcaccggatgataagtcgtttgcggcagtggctgaacaacctatctctttgcaggaactggttcagctcaggcgtttggcagtacgtagcaatggcttcatcataacgccacccgagttgagtacggtagtggttgctccagtgaatgaagcagagttgcgtctcagcactttgcgtattcatccatgttgccctttgctgtgtatgaatctcggcagccggcaggcactattgattaggcgtagagtgatctgggggcgtcctaatgagctcttcgcaaccttgtgtgaactgttgaattctggtgagcgagtaccctatgaggtactggagcgcagtgttgctggaaagatcagtcccgcggctgtggctgaactcgtcagaatgatagttcgtttgggtggcctattaattgagcccttatgaggaccctaatgcaatccatttttcaatcggcctggcggcatagcattgctcgcttggcctctttagatattgccaagccaaaggcgattccgcttgaacagtcaggtaacagtatatatcagtacattcgtgcagcaatcttggcttgtgccccggtaagtaccattatcatgattgtcgctaccgtgctgggtactgtatgtaatgttggccaatcttatgtgctgggtgggttgactgcgctagccttgcaaggtcagcaggaacaagtgttgatgatgcttgccattattatctcactttgggtgtctgcgccactgttgcaagctgttcacagcctggcccttttgtattcaagccaaaacctgcgtattggtgtgacagaccatctttctacccggctaatgcatgctaagccgatgaatctggcggagaactctgtcggcaatcttgtcgaacgtgttgagttagcttctaatagcctagaagacgttgtgggtttggtggcgcagacagtggtcaagttactctctgtggcgcttctcactacattggtgttggccagcgtatcagcacctatggcaatggccgctgggatatggatgataacggcattattactttctagttatttagcctataccggtatgaatattgttgaggacgccagcgatgctcatgccaaagtgatctcagatctggcggagatagtgactaacgtacctttgatcaggagctttgttgcttatcgctcggagcgacacagtttcagtcaggcattgcgacaagatctttacgcctgtcggcaggtacgtagctactgggtatttgtgttgctgattgaaagtacctacaaatggttatttggaatagctatcttgctctatattggtctgcaatatgggcaaggtcaactgacactgccccagctaatcacgacctgttcccttatcatttcgctatcctggcactttgagtccgttgcattttattttgttgatatttttgactctttgggggtgctgcggtccagtttacgagaattatcctcaattccggtggacattgaatcaaacgagtcttcaccaatattaccggtacccggacaaattgtgttatccaacgtgtgtagcagttatggtgcaacatctgtacttcgtgatgttagcctgcgtatcgaaccgggtaccaaagtaggcattgtgggaccttcgggatcagggaagtctactctgttagctgtgctgcgtggtgatatggtaccggattccggtacagtggaactgcatggattgcctttagccaagttttcgatgagcagtttgcatcgagtgtcgagtgaagctttgcaatctgctttgatgttcaaccgttctgtacgggaaaacgtaacctatggttctgctgtcagtagcgctgaagaagtctctcatgcgctgacaatggcgcaagctatgatgttggtggaagggttgcctcaggggctggatactttggtcggagagcgtggagcatcaatttccaccggtgaacggcagcgtctgagtgttgcgcgcgctttgcttaagaaatctccattacttatttttgatgaagcaacatcctcggtagatacaatttccgaaactcgtatcctcaattatttgctcgataaaatgccagaacgtacggtgatagttgtaacccaccgtgttgcgacattgagtcgctttgatctgattgtggtcatggaacaagggcagattgttgatataggaacaccgagtgaattggaggcacgcaatggcctttttcagcgtttactgcatcgtgaagaccaatctgtgccggaactaatatcaatggatcctaagaatgagtgaaatgatattgatgtcacctattttgctaaaaggagtcactttggactggtctgctcaccggcgctggagttgggaattctttgcagggatgcaggaacagaagctagcactgagtaatgcaaatggcgagttcgaggttgaagttcctgtgtgtgaatatattcaggctttgaaaagcggtgaagggcgattggctaacttgtatgcttccgggtggcgattctttgagcataacccagatatgttgcaggactttaatgagcctatacctgctattggtgatctgttacaaggcattccggagaagttgttcaagcctcttctatggatattcatcggtgctgattgttcgggcacagctctccattacgatgtattggaaactcatgcttggctggccgtgattgagggcaagaaacggttagccttacatgcgccagtttgctgggaccatgagtatgagcaacagagagctcaagccttacaagtgctcgaaacccgttgcaaccaaggagagtggtgctacctggaggtcaacaaaggtgatttgttatacattcctgcaacttggtggcatgaggtggtgaatgaagggccgacgattagcttgactaggaactttgtatcgccagagattgctcgcacagtaaccagttgtgcacgagccttagagtttcatcaattacgtccttggttggaaggagggatgacctcatgaaggatcgcgtaaaccttagataccgtgttcaccctggcctgcgctacgatcctgttgaacctgggcgtatagagatcagtattcccctaggcactaagcgactgcgtgtgtctagtaaaataagatcattattggaacaaataaagtcagaggctgttctggtcggaacaattatagtccagcgtctggggatttctgtgtttgaggctatggtgaagtaccattttctgtttccggaagatgcgagtaccgccttggaaggcggactttgtatacctgtttcggaaccggcgggacagtcaattagcgtctttgattttgatgaactccaggccgatgatgccgtgttattacatgctcctatcttgacgacaactggaggagagatatcggttgcaggtggtggtcaacacgtgcgttcccagttggtacagtgcttgagacatcctctgggtacagcgggaaagggtgttttactggaccttgatttcggtactcggttggagccagaacgtctgtgtctgttcgatctcggtgatatcgtataccgccctagtatggatagtgctaccgatgttggtgaacggcttacctatgtgtgccgtaatattgtggagtgggatgcatgtccaataatcctagggggagatcatgcccaagctttctacagcataagtgctttaagcgagcgttatccacgtctgggggtgttgcagtttgatgctcatcctgatttgtatgctatggggactccctgcgatttgcagcttagccatgctaatgtcatgcactgggttcgtcgtatgccccatgttgcatcaatttggcagattggtattcgggattatttttgtcaacctactgaaaacctccagttagaagtggatcctaagttccatatgctctcggcttttgaagcagagaccgtgggctacgagcgcctattcaggaatatggatcgttctttaccttggttcattagttttgacgtcgatgtgctgtttggtacggaagtaccgcagacagcaacccctgtactgggtggcctgaattactatcctctgttggcttgttttgagcggctgttaagcgagttccgtattgttggtatggagtttgtcgagattggtgatgcttcgcaaggtgcccacggggcagccgcagtggctgctcggttgcttagtcgctatctcttccatttgagtaaggcgatggtggccggccattgtatctattcaccttttcatcaaaggtgatcgttggcgcttttgtttttgtcacgaagaaacataggcgcaggatttttagcatgtgtatctccttagtttttgggtcttaatattgaagcgtgagttgattctgtatatcgatgttgagctggaaagaggagaatattaatcagacaatattgattgtccttgttgcctgaatttgctctttctatataaattccttaattgcagatagggaatttttttgaggttatgcaaatggtacctctgacggtttttgataaataaggaggtatgttacttaaacacaggtatctaatcgatcaatcgtaaaacattatattaatttgggttgcttgacagttgcagtagaacttttaaatatcgcgctctaacgcaaaaatcagatacaacaattcactaataaataaccttcctaaaattcattattatttattcaacgtcttataaaaaacgcaacaatataattaaaaaatattttcatatgtaactaattcatattgttgataattttaatttaaatatacaaaaaattaattatatttcaatgtcatcactcatgtgatccacaatataaacgaaaaataaaggggataattatgactacaactacagagcaaataaatgttgactatctaatattcacgaatataaataacaatgatatgtaactatcacttaaataaagtaatgcaaaatgacatctgccttcgactcgaccgtatgtgcgggaatccctgcggtaactgaatacgttcgtacctaaagttatggtctttaggtcgggaagaatgtcaaatctgtatcgacaaacgacaaacgacaaacagcttttcgcagcgcgaagggtttcgcttaaaaacaggcaaaggagcattgcaatggtttctatatccaaagacttcacgaacctgctcaataccctgatcgatggacagattgaggcagcaagtcgtcagaccgaatggtttaatatgaggcctgatgagcgtgccgactacatcaggcaggtagacgagcggttacaggaaatgcagcagagtacgctgagtgtgctggctgctcagcattttcagatgcaggacagccccgtttctgtcggcgaccagttgcagacattgcagcaaagacggcagcagatgaacgatgtgcccggcacacctgcgatcaacgcttacaagcagcaactggaccgcgacatcctgttatacagccgacagcagatgaccataacgcattttgacggcacttggcgtaaagctttgaccatgctcaatcccggcggctctaagaccttgaatacgacgactctgagagagaacgcggcaggcaagcaggttaagctggatatcaagatcaaacgtctggaacagcaactgactatgcaggtggctgcctccacgttgttcggcccaaaatacgtgatgctgttttccgaattacaggcctacaaggaggtcaatgctcgctacaacgccttactaaaagcatcctctacggaagaggccgcagctctcggcgggctgaccacggtgcctccggcctccgatgatctgccggtaaatatttcgttgctgatgatggaggagcgtcctggctacatccgcatgaacgtcgcactagttaatgccagcaccgatggccgcttcaaagatttcttcctagagaacggcagattagttgtgtcggcggacaaggtattcaacttctccttcggtaccgcagcccgctccctagcctggcaacaacaataccggctcaagagtgagccaccatcctttcgctcgccgacctatgcgccaattcgctcggtgctggtcaaaaccgaattcgtcgagaagtacttcgccaactacctagtttcggaaagcaccttgcgtgaaggcttcaaggcgcagttgctgggtaacggtcgcaaaatgctgctgaccagcgttgaccgtaaggtgccgaaccaggtcgggattcagatatccggccaggtttcgaataccaccatcacccgtgaggtaccattggcaagcgccttgagtgacctgatcaaccagaatgctgatatcgctagcttccagactatcggcctggaggggtttcgacagaacggttaccatccggaccgtgacgggcttttcgttaatatccatgagctggaacgttcagtcggttttgccagtcgtcagtacttgttggaaatgccccagggcaacggttacctatccgcgacgccctttggggtgatgaacgttgacgacaacaaggtcagcagcagccacttgagcaaggcgcagaccgacacactgtatcaatacaacgccgcatttttcgagaagctggaacaactgcgtgacggtggtacgaaggccagtcgtctgttcaaaggcagcgaagatcgcaaggcgttcgagcagcagctggtgcgtttgctcgaacgtaaccacatcacccccgcaggggtgttggcaccggagtacttccgtaacaacatgcgcgatatcaagggtaataacctaaacaaagcactgtgggaacaggcgttcgccgcttcggtctggcgaagcagcgataatgacccgctgctgttcgggctggcgacgagactggtgaagaacccggctgtggttaaggtcttgcaaaatggctatgtgcaaagtgacattgtccaggctagggggctattggcaccgttgtacgaacaatggcgcattcgggccatcgaagtggaaatccagcgggttgccagcgccaatgcggcacagcatccaagcaatccgaaagtacaggttttcgatcaggctgcggttgatcgatcgctggacgacaaactgctcactctgttactgactggttcccagggacttgagagcgccgatgcgcaactgcgtccggcggttgaggcggtgctgttgagcaatgagggcaggagcttacgcaaacaggtcttgttccatgctttgcgtccagtagccgatagcttttccaaggccgcggtcccggtcaatcctcacgctgcgctgggtgacggcaaggtcatgattaataaccggctgaatcagcccgatccgtatctgatcctcaataccagctctgaggagcagacgtatcacgaggattcgtacctgatcaaggacgataaataccgcagctacaaccagttccgtccggacccgaagaatgacgctacacgctacatgaatgacctggacaccccgttcgtggggggaatttccgggaccacccagaccgtcagtaatgccttaccggaattattcggtggcgcgttgagcgtcaagcaatattggcaattccagatggccaatgcggccttcatgatccgtaacggctatcactcgttcttcgaaaccctctatgtcgctgcgcgttacgaaccagaaggtgcggacagtatcggcaaggacatgttgcagatgttcgacaagtaccgcgccgaaggcagcaagagagagttatggggtgaactgtatgacggagtgatggcgcgggtcttaccgatcattaatcagggcttgccagcggctgacgaattccatccaccgcgttttacctacatgggtccaaaaccggcgctgctggggcaggcggtgaaggatctcgaactcaaggctgggctggtgtctgtaggtgatggatttgagccccgacaaggcagtgctgacatccatcagtttgccactgatcctgcactgttcgccaaaacccacaccatcagtgctgaggtgctggtcaggtcggggcacctcccggcaaaggggagtgcccagttggtgaaggtcaggtcaggcttatacgagatcgagtacactaaacaaaatgctaatagcatatcttcaagtagcgtgtcggcgtacttcctcggctacaatggcctgaaccaggccaatgcggtacccgcttatgtggacattcctaagcatgtggccgcagggagctttctgttcaccgggacactatcgggcggctcgctagtggtgaccagcctcgatgacaatacctaccgggtctaccacgatggccggttcaacagctcgctgctgtatgacaacgtggtgatggcggtcgactacaaagattaccagatatccgataccgctgggggttttgccgcagcgtacatgcagtacgtcaatggtgagtggcaactggtgttccagcgacaggaatatcaacgagatggacagatggtttggccgaaactgcgcggtgatgtggagccgctctcaatccaaatcgccggcagtcaggtggtggagcgtaaccaagccgaattcgccacttaccgcgagcaggttcaccaacaactgaagacggtggcgacgcagtttggggtgtcggtcgaaggagttaccgacggcgtctacaccgagggggagttttctcctgagcatccggcgattgccgcatggacccggttgcgtgaagcggttcaggccaaggtcaaagccaacatggacccggtggcagataaactctaccagctccagcaagcacgacgtacctcaagtgatacggccttgatcgaccagcagatcaagcaactcaatcttacacaggactactacagggcgcagtatgatccaatattgcgtgaagccagttctgtcgaaaagacctggctctggcagcagatcaaggccaaagatggcagcgttgcggtggtacagattgatgatacggccattcaaggcgaggagcgtaccagcagcgtgggagaacgttacgcggcctccgaggtctatcagcgcggggcacagggtaccgggttcaatgatggtttgcgtaacttccgtgagatcaagatccccggggtggatgacaaaatgtcggtcttggagatgaagcgacggtttcttgagggaaaactcacccacgagcaacgggaagccttgagcgctcgcatcgccgaaatcagccaagccgagtacattgacaaggtactgcgacagaccgcaatgttcagtgaggacttccatgatgccggcagtgtcttcaaccgcttagtaccacaggacttttatctgtcgctggtcggtgaccgaaccggtggccgttgctaccctttggtcaggaccatggctgtggcattggcgggtggtggggaggccggcatcaacagcttagtacaaaagctgttcttcgcttccgccgacccgcaggcgggcagctccacgctgctcaagaacagcctgatcagtctgcactacaatgtcgaagccgttcaggcttccacggagctgggccagttcaatttgtccgaggtggtgtcgcgactggccgcaacaaccggcacttcgatgtttgcactcaatacccagaatcactcgatgatggtagggagcactgtcacggccgaaggccgtcgctactacttctatgacccgaatgttgggatctttgctttcgacaacaccaagagtctgtccagagctatggagcagcacttggtagtgcgcgggctggccgcgcactatggctcgttcggcagcaagtcagtgccggccttcaacttgattgagatcgatacccgcaagatggcagaggtacctgtaggcaatggcctgaacgtggccgacctgacccggttcgaggaattggctagtgttatcgggcaacggcggcaggtcgaacaggtggtgagtgtacaagagtgggtcatggaagacttgcgactgagccctgcactgaagacctttgatgccgagcaatggggtgcacggttcgaagtcgccagtgcccggctggcgcaagagcaccaactggacagccgctggctaccgattatcgctacgacggaagaccagggggaaggtcgctaccgggtccagttcattaaccgtgaccaacccgagcagacccgttggttgatcaccagcgatagcacctttgtcgaattccggcgcttcattgatgagcacatggctgtactgaacgagcactttaccctagagcatggccggatgcggctccgcggtggagttggcgaggctgctccggtggatgggttgaacgctgggtttgcggttcagacgctgatccagtggtttgccgacaagaaccgccacgatgcggcaagcggagtgatttcgcctgatctggccaccgcgctcaaggtccatagctacctcaacttggtccagatggctcacggtggcgtacaggatatagctaaggttaccgcgttggtgcgtacggcgctgcgcggtgaagtggtggccgctgaaacctcgttaaaggactttgcttcgaatctgggccacactgtcaatgaaggtgccggtgtgttgtttggaggagctatggtcggtttggatgcttatgaactggcccacgctgagaacgatgtgcagaaggcggtgttcggtacccagttagcgttcgactcggcgagcttcgtcactggcgcagccggggtgggggctgggttggtcggtgcttcaacggccggggcggtactcggtggggccagcgtaatccttggtgggctcgcggtgggctttacggcactggctcaagcctttggtgcggtcgctgaggatgccaaggcggtaggccgttactttgatacggtcgacaaggcgtacaaaggcaacggctatcgttatgacaacaagaacaaggtgctggtgcctcttgccggggcggtgatcaagagccttgacttgcgcaagcaccagatcagcttcgacagccagtacatctaccgcacccattcgggttctaccggttcgggggaaatcaattacttcttctgggtcggtgactttccgcgaatggtccatgaccgtggtcaggcgattgaagtgcgtagcggtattggttacaaggatatctcccggcctcttgaacacagtgacagcaatgtcgtgatcctgccgggtacacctaagtcctacatcagctacgaatacatgttacttcccggtgctaccacacgccatgatgctggcttcgacgtgatccgcaggcttgaggaagacaaacgattcgactacgacttctatatctttccgggtgaggagacaatccgcaggattcatcatgagtacgtcgacaccccaatcgaggtggtgctcgatcagcgcaaccggcagctggtggtgcccgagctacccaaagagctgcacagctttttacgctacgagatcaagggagcgggtggcgagtacctgattggccttaacgaaggcacccaagttaagctcacgagcgatagcgccagtgcattgtcgcgctggatcattgatagcagtcaactcgccagtgacagcatcagcgtgtcgaagaaccaactggtggttggcggggtggtagtcgaacttgacccgacccagaacgggcaggtattggtggtcaacggcaagggcgaggtacgagaagttgactttgccggcctgacaactcaggtggtaagcgaagatgcgggcaagtggcaggtgcccggccagcaaatcgagcagcacctgagtgatctggccaaagcgcatcagttgcacgggcagtacgtagtggtggagaactacagccacaacggacgagatgttggtcgagcgttctatgatgtaggcaaggagcggatgttgttcaccaacaccacccacgagcagaccagacatgcccaactgggtgcggtgatgggtgaccatgcctatttctacgacgccgacaatgcggcagcgtggcgggtagacatcgccaccggacaggtcgacgcgcaatttgagccttggtttaatcaaaatgcgggccagatcagtcggctatggcaggagggagatgcggtctacctggcacgccgttatcgactaaaagagaaggaggctgaattagagaaggaagctgaactgtgctatcggatcctcagtgatcgaatggagttggtcagtgcggtgggtgatgatgcgctgatccagcttttagcacgtaccagccagcatagtgatgtgcttaaggctatactccagggctacgagagcaaaagtatacagcgtgagacgccgatgtatacgttgggcacacggctgctccagccgaccagtgcggcgctggtcacggtgttcggcgtggatgcggctggcgtggcgcaccgttactggatacgtaccggcgatgggactctaatcaagccgaatctggcaccaccggcagatcagaccccgcactttaaagagaacgaacaaacccgcagtgcctggccgatcccggccgacttggtgttagcggggagcatgccgcagcccggcggtaaagaggtgtttttcttctacagtaaagagcaaaaggttctgttccgacaggaaggtcccgggcaggctgttctcgacgctagccatcccactgcattgcgcatcagtactccagcgttagccaacttggtcaacctgaacggtagcctgcttgccatcaccgaggatgggcgtgtggctcggctcgatgcactggggcagcttaactacgaagcggttaatgagcattggctcaagggacgtacccactggtggcaggacctggctagcgtcgccgacggcagagctactttggcggtgttcggaatcaagggtaccgacggcaagagcctgctgccagtgtggtaccacaagggtcaggtaatagtggcctcggctcctctgcaagacaaacgtttgcagttcttgggttttgaagtggatggctccggtgcgcggctgttcgaacccgccagcggcaagttgtatcgtcagccgcctatgactgccgatgcgctggctgccgcgtttggtaccgacgaggtgcttgaagtctcgtcacagcttcccgccgccggtgagctggcgtctggactgcacctcaaggcggtggagcaagtcgatgtcgggctacgactgaccaccgtcaaaggtgagatcctattgcaaaccaatgacggcaaattgcagctagtcgccgtcgataaaggctggcagcaggacaacttcgctcgtctgccacaggcacttgctgaggttgctgataagtggcgaaccaaaggcgtgctgaccttgcaaggcgatgacacacaaggttggttcgatgtcggcagtggtcaagtgttctcctacggtagcatccaggctaaagacaatctgcgtttcatcggaattgctgccgggaagaagggcgcgtatgtgtacagcccaacggaccaggcactgtaccgggtcaaggatgatagtgtgcagaagctgaatcattacactagtgtcgagcgtattggttcgtcgctgttgattcggggcgggggtacgggtggtcgccgggacgacttgaccccaccgctgatcaccggtgtcgacagtgtggtgttgcatggcggtgctgataacgatacctaccgcctcagccaagagatgtggtcgcattaccgcacggttatcattgacaacgatgacccgggccaggctctggaccgcttgatcatgccgatggttgatgcggaaaaaatcctcgttagtcgccatgaggataacttgatgctgactgactcggccaatggcacgaccttggtggtgcgcaaggtgttcggtagccaggcggtgacgcaccagcatttgcaaatcgaactggaaggttcttcgtcggtgatgggagtggaccatctggtcaagaactttatccagaagagttacattaatggggagctggtagaactgtcttgggccagtagacagcccgtcatcgagcctcatgtgattcattccgttgccgcagtcccggacacgggagggccgagcctagcgaagctgagcggggctatggcttcgttccctgatatcggcggtgcccgcgagcacctgccgcaaaaccgtcagtccgcgccggcggcgctggtgccaccgctgtcttgagttagccggagaaactacaggaggggcgcaaagcccttcctgtctccggactctggtcgaatcattcctcttgtagtagaagcagatcatgatcaaatccaccaaaggcttacggtcaagttattgcaaggtggtgaatacattcctgatgttttcgggtgtgaacaatcggcctgcttaagtgatcctccggcaggtattggcattgcgtggatatgtgttgcatcaggtcgggctgaaaggtgttacaaacgtgttacttggaatagtaagattgcgtatttgctggagtgtgaattgatgttgagctacagagagaagaatgttaataggataaaacagaatattctcgctgctggctgaacctgtcttttctacataaattccttgttacaagatgaggaatttttttgaactgaggcaatctcttataactaaccctattctgattaataataagaaagccgagcaaccaataaacaatattgtgttaattgattgattgattgattgattgattgattgattttagtttggatgggttgacagttgcaatagaacttgtaaatatttcgttctaacgaaaatagaacatctgatttctcagatatcctgaatctagaacccctttaattaacatcaaaatattgcatgattgaataatgccacgcgatgcatttttaggtttcattatcgaacgtccgttgagcgtttttatctctcaaccaacgcactttgaatggtgcccggaggcggaatcgaaccaccgacacgaggattttcaatcctctgctctaccgactgagctatccgggcaacggggcgcattaaaccgtattcagcctaagtcgtcaatgcctttctgataaaaaatgataaaagcggattgactgccttctttttgctcggaatttgtgtggttgttcatcttaggctgatttttgttaacttaacgcaccatttttgcgacataaggcaatagctaaaacatcttctgctagcagttttgccgtagtgatatcaccaatatcccgtttgagtagtagcttactcaggcagccttccagaatcagctccatctgtttagcaacgagttcgcaatcttcaatatccagttgatgtaatagctcagtagtgtaacgagaagaactctgtttttgtaattcagctaattgatggatagggtggtcaggttcagggaatgcgctacaggctgcgataaataggcagcctgggtagcgtttctcttttactttttcatcaagggctgtgtaacgagctagtagcttctgttctggtgtcagattttcatccagtaatatctgtcgctgccagacttcaatctgttggccgtgataacgtagacagtcataaagtagagcttcccgatcgggccagaattgcttgagatattcgatatccatgttaagcgagccaaaaagtacctcagttgtgatggataagccatgttgctccagtaagtttaaggcatgactaagaacttgttctcgttgcatggtgttctccttctgagtcattttggcagatgttgcaaatgttcattaaagcgggtggcatccataaagccatttacccgtgaatcggggatctctttcccctgagaatcaaaaaacaaaatagtcggcaatccccgaacgctaagtttttctaaaagctgcttctgctgcgggctgttgttcgtgacattggcctgtaacagtaaggtatcacccagttgtgactgaacttgtggatcgctgaaagtatatttttcaaattctttgcaagcggtacaccagtcagcatagaaatcaagcataacggttttatggctgttttgtgtcattatctgttctaattcctgccagttatttatctggcggaaatttaggctgtgttgcgactgttgtgtgaccgttgtaccccaaaaccaatcctgcaatgggcgagtagctatcagcatcagaattaacaatatcagttgtatgactcgtacccaaccgttttggcttctaatcgtcagaacaaatccccatcctagaaaactgactgccagcaggctccataatcgtattccccatgcatcaccgataaccctttccagcaggaaaacgggtagtgcaagaataatgaagccaaaagcttctttaacatactgcatccaaggcccactgcgtggcaggagtttgtggccaaatagggtgacagcaatgagcggtaatcccattcctaaagcgtaaagatagagggttaggccacctgccacggtattaccactttgagcaatgtaaagcagaatcgcacttaaaggggcggtagtacaaggtgagcaaattaatcccgctaacgcccccatagcgaatacgccgaaaagtgaaccgtttttttgctggttactccagttgactaagcgcgtctgaacagcggaaggcagttgcagagaatagaggccgaacatcgacagtgccagcagtataaacaatactgataagccgatcagtacatacggatgttgcagtgcggcctgaaattgtagacccgccgctgctacaatcaatccaagtagtgtataggtgactgccatgccttgaacatagcttagcgctaaccaaaatatctgttttaggcttttagggcgttggctgccaagaataatgctggaaatcaatggatacatcggtagtacacaaggtgtaaaggcgataccgatgccaatcaaaattgcccagagtggtgagaaaggcaaatgttgttgatcattcgatgcactttctggcgttttgtgaacaggttcagcagatatggcgtcagttgtttttgatggaataactgcactcaatgggacaaggcgggtttcaggtggatagcaatatcctgcggcggcacagccttgataagtgacaacgatattagaattgttgttcgcctttgtaacaggaacattgacgatgagttgttggaaataaacttcagtttcaccaaagaactcatctcgatgagctgtaccttgtggcaacgtgattttacccagtgtggcctgttgcggctcaatatgaagttgtttgtgataaaggtaataacccggtttgatctgccagtctaacgtcaatttgtcgcctttttgctgaaaatcaaacatgaatgcctgatctactggcaaatatgggttttgccccggctgttcaaacagtgcgtttgctgccgccggggtaagaagggggctgcaaagcagcaaaaatagcatcagagtacgtttaatcataaagataatgatcgctaatcgaatgaaacagactcagcactataaccgaaggcggccagaccagaaagtgttctggttaagattaaaacagttatcgaaggttttcagagaaaatatatcgtttgggagaggggagtcaggggcggtatacgcccctggattaagtggttattggcagccagaattagaggatcatactgccgaataggaaaccgaaggcaacagctagagcaaccccaatggtgccagggataaagaatggatgattaaatacaaaacggccgatacgggtcgtgccggtgtcatccatctgaactgcggcaaccaaggttggataggtaggcagaataaacaacccagaaaccgctgagaaagaggcaatggcggtcaatggtgtgacgttaagagccaaagccatcggcatcaacgcttttgcggtggctgcctgagaatagagcagggcggaacagaagaagaaaatgatcgctagcaaccaaggttgagagtggattaagtctccagcggtgcctttaatccaatccatgtttgcctgaacaaaagtatctcctagccatgcaacacctagaatacagatacatgcgctcatacccgctttaaaggtactggagttcagaatggcgtcagtatcaactgaacagaacatcgttgtgatagttgcgacactcaacataatgatcagaatggcgtgagtggtgttcatcagaggttcttcaaccagaccgatgcttgggctattgacgatagcgtaaataacaacactgataacaccggacaggaataacagaacggaagctttagcccttggtttaatctcaatttgtttgctgccacgcagagttaccaagttgtcttccaagcgctttaagtaaatggggtcatcagacaacttggaattaaacgcccaggagatgatgaaagacatcagaacgatagcggcgaaagtggatggtaatagcaccattaacagatggatatagctaacgccgtggccttccatcagagaagacatataaacgaccgccgcggaaattggtgaggcggtgatgccaatttgggccgctacaaccgcagtggaaagtggacggcatggcttaatgccttgctctttcgcaacttcggtaataacaggcagtgctgacagggagatgttacctgtacctgcaaacagtgtcaggaaataggtaacgataggtgcgagtatcgtgatgtattttgggtttttacgcagcagtttttcagtttgctgaaccagataatccagaccaccggcaacctgcattgcagagatagcggcgataactgccataatgatggaaataacatcaaatgggatatgccctggtttaacgccaattacagccagcaccagaacgccaagaccaccggcaaatccaatgccaattccccctaatcttgcacccaggaagatggccagcagaacgataatcaattctacggctaacataatagtgactccttgaaataattaaaaatttgaaaattttaggttaatactttgtgcatgtagggaagtaaaaaggcacgctatccagttggagttgcgtgccttgttgctaagagctattttttattatattcaacaacttaatcgtcaaaacgttttgccttgtaagatgggcattttaggttctctacagagaagatgtcatccaattgagtttcggtcagtaagcctcgttccagaacgacttcacgaacacttttaccggtttcagcacaaattttaccaacaatgtcaccattatggtgaccgatgaatgggttcagatatgtcacgataccgatcgagttgaatacgaaattttcgcaaacttctttgttagccgtgatgccattaacgcatttttctaccaggttgcggcaagcgttgcttagcagggagatagattcaaacatggcctgaccgatagcaggttccattacattgagctgtaactggcctgcttcggacgccatagtaacacaaatatcgttaccaataactttgaagcaaacctgattcacaacttctggaataaccgggttcacttttgccggcataatagaagagcctgcctgtaattctggtaggttgatttcattcaggccagcacgagggccagaagaaagcaaacgcaggtcattacaaattttagacagtttgacagccaggcgcttcagagcaccgtggaccataacgtaagccccacagtcagaagtggcttcaatcaggtcttcggctggtacgcaaggtaaacctgaaacttccgccagtttttcaaccgccaatttctgataacctggtgctgtattcaagcgggtaccgatagcagtagcgccaaggttaatttccagcagtaattcagaggttcggttgaggtttttaacttcttctttcaacaggatagagaatgcgttgaattcctgccccagtgtcatgggaacagcatcctgtaattgggtacgacccatttttagaatgtcattaaattctctggattttttatcgaaacccacaattaacagctcaatagactcgatcagtttcaggatggagttataaaccgcgatgcggaagccagttgggtaggcgtcgttagttgactggcttttattcagatggtcattgggattcaggtactcatattcgccttttttatggcctaacagttccagaccaatgtttgccagaacctcattggtattcatgttgagtgaagtaccggcaccgccttgaaacacatcgaccggaaactgatccatgcatctgccggtatagagcacttcgtcacatgctttgatgatgatgtcagcaatttttttaggaatagtttgtagctctttgttagctaaggctgcggctttttttaccatcaccatgccacggatgaattcgggtacatcattaatggtgttgttactgatatggaagttttcaatcgcacgtaaggtgtgaataccataataggcttcagcagggacttctcgtttacctaacaggtcttcttcgatacgaatgttgtttgacatgagaaccttcttattagatgacgtttttactgtctaattatgcgttcattaaatcattatgttgccaactgcaatagttgtgatatgaactttttatcaccggattgccggcgtgatcatatgctggttagcaataaatgccttgaatctggatcactttatagtggtatttgtttagtctgatttgatatatgtgatatttatcacaattttgtgtctaattagaaagattttcagtggattgaaaacgataactgtgaccccaattatatctttaataaactgaaaaaatattaatttggttgtcccttggattttgttgatatgatttattcaggatacaacctgttcatccaaatcaattgaaggagcaccaagtgcgttggttgccatttatcctgatatttttgcttgtctatatcgagtcagccttatttgtgcgtgttgcctctgaactaggtgtactgttaactctgttactggtgttgtttacttcttgtatcggtatctctctggtacgcagtcagggcataaagaattttatccagatccagcagaagctgattaatggggagagtccggctgcggaaatgataaagagcgtctctcttttactggcgggtttcctgttactcctccccggtttttttacggattttcttggattgctgttgttattgccaccggttcaaaaaacattagtgatgaaactgatgccacatatcaatttctatcgtcctcataatagcggtgggtttagacgggatagtaatacttttgagggggaatacgagcgtaagcaggatgacccttcccgaacgttgaaagaccataaacccgatgacgacgagcataagcctcattgataagcggccattttctgaatgtttggtttaatcatcggtttttttctgtgggcaagaaaaaagtaaaatatttttttgcctgcccttgaagtatcataaataggcccccatttaatttattatgatactggtttaatgaaagcgtactggtatcaatcctcttacctgatatggactttcttataggagagctatcaatgaatattcgtccattgcatgatcgtgtaatcgtcaagcgtaaagaagttgaatcaaaatctgctggcggtattgtgctgactggcactgctgcgggtaaatccactcgtggcgaagttttggctgtgggcaatggccgcatccttgaaagcggtgatgtaaaagcactgtgtgtgaaagttggagatatcgttatttttaacgatggttacggtgttaaatcagagaagatcgacaacgaagaagtgttgatcatgtctgaaagcgacattctggcaattgttgaagcgtaattgttgcgcttagatcttcttaactgaacgaatttaaaggaaagaaacaatggcagctaaagacgtaaaatttggtagcgatgctcgcgttaagatgctacgtggtgtaaatattcttgctgatgcagtaaaagtaaccttgggccctaaaggccgtaacgttgtgctggataaatctttcggtgctcctgcaatcactaaagacggcgtttccgttgctcgtgaaattgaactggaagacaagttcgaaaacatgggtgctcagatggtgaaagaagttgcctctaaagcgaatgatgctgcgggcgacggcacaacaacagcaactgtattggctcagtctattgttactgaaggtctgaaagccgtagccgctggtatgaatccaatggatctgaaacgcggtattgacaaagccgtggttgcagcagtggcagaactgaaaaaactgtccgtaccttgctcagattccatctctattgctcaggtaggtactatctccgcgaattccgacgaaactgtgggtaaattgatcgcagaagcgatggataaagtcggtaaagaaggtgtaatcaccgttgaagaaggtactggcctggaagacgagctggatgtcgttgaaggtatgcagtttgaccgtggttacctctctccttatttcatcaacaaaccagaaaacggttctgttgaattagaaaacccatatattcttctggtagataaaaaaatctccaacatccgtgaactgttgccagttctggaaggtgtagctaaggcaagcaagcctttgctgattgttgcggaagatgttgaaggtgaagcactggcaactctggttgttaataccatgcgtggcatcgtcaaagttgctgcggtcaaagcgcctggcttcggtgatcgccgtaaagcaatgctgcatgacattgctgtcttgactaacggtaatgttatttctgaagagatcggcctagagttggaaaaagcaacgttggaagatctgggtcaggcaaaacgtatcgttatcaacaaagataccacaaccatcattgatggcgttggtgaagaagatgcaattaaaggccgtgtttctcagatcaatcagcagatcaaagagtccacttctgattacgaccgtgaaaaactgcaagagcgcgtagctaaactggctggtggtgttgctgttatcaaagttggtgctgcaacagaagttgaaatgaaagaaaaacgcgctcgcgttgacgatgctctgcatgcaactcgcgcagcagtagaagaaggcgtggtagctggtggtggtgttgcactggttcgcgttgcagcggctattgttggtctgaaaggcgataacgaagatcaaaacgtaggtatccgtgttgcaatgcgcgcgatggaagctcctctacgtcagatcgttgacaactcaggtgaagagccatctgttatcgcaaacagcgtgaaagcaggtgaaggcaactacggttataacgcaacgactgaacagtatggcgatatgatcgcaatgggtattttggatccaaccaaagtgacccgttctgcactgcaatttgcagcatctatcgctggtctgatgatcaccactgaatgtatgatcactgacctgcctaaagatgataaagctgatttaggtgcagcaggcggtatgggtggcatgggcggtatgggcggtatgatgtaatagccgcataggtcgctagccgagcgggttacgtccatcgtggtcaccgattaatatcatggtgaatattcccaccccgctaaaatagcatttaaaaaaattcgatatccgggctgaggttcaagcttggatatcggtctccgggtctgatttcagataggggtgaaagcctcctgtatttccgtaatatttatgaaaaacgtacgttgaagtggtgttgctcccagtgatgttgctcccaatattgtgatgaaacggcatcgtgtttaccaagtaataagtccactaggatagctgaagtactttcccgtcaactttatttttgctgatgtttcaatgaacgatacaagaggctgctcttgctataacgttctcttctcctatttccttctgtagtgctgctatactcgtgattaaagtttgtgcaatgctgcacttgaacctgcaccatgtgaaactgcggttttacaaagtgattgccctcttcattagcttaaaaagcgattcaaggtgttaagtaattaaagatgatttggcataggggaaattcttaaagaaaaaaatatttccttaaacttagaaaaaatgagcttattagactaaaattcatttatccataggactttggaaaataattcaaatatctatgcacaaatttaatcgatccaccgaaatggctgtattcgttcaagtaattgagtcggaaggtctctctgctgctgctcgtaagctcgatatgacgccgtcagcagtcagtaagcttattaatcgacttgagatgcgacttggtgtacggctgctgaatagaacgacacgtaaacttcagttaacggctgaaggttctgttttctatgaacgtagtgtcagaattttggaggacatcatagccgcagaacaagaagcaaatcagggaaccgcgctacgtggacggatacgtgtgaattgtcatgttgcgtttggaaaacattgcttgatgcctttactaccggatttcctgcaacgttatccagagatcacactcgacatctcattatgtgacttgatagtggatttacttgatgatcgtagtgatgtggcgattcgtaccggtcctctggacgattcatgtttcatggtacgcaagttgggggcaagtcgaatggttgtggtaggatctccttcataccttgaaaggatggggataccctctatgcctagcgatctagggcgctacaatcgacttggttttggttttacccgtcatatgaaagcttggcctttcatcgattcggaagagtgggggcaacaattgccttcagggaacttgctacttggtgatggagaaaccatgcgtaaagctgcaatagcaggacttggcttagcacgattagctcgtttccatgtggatgctgatattcggagcggtttgttgctacctgtacttgagaactataatcctggcgataaggaagaaatatatgcagtttttgtcggccaaggtaggcagctcccatcacgggtacgggtatttctggactatctgacagagcgtatccacattggtgatggatggtgatagtcggaaaatatgatgccacgaaaatgtttgatggcccattatcgtggtgtcaatggaggtatttctatccaaatggggcacggtttcttgaatccatgttaaaaaagtatcattatttacatacaacaaaatccacatgaaatttaaccctattaatatgtggcgtttttatgggatataacgtcaaataattgctcaataaaaaattgtcgtgagatattatcgaatcacaactgttgatagatgttctaatagtgttttgagcgagatggtttaaatttaatatcattcgcaacatgggaattgaatttatcagatggaaaaataaacataaatatgccaacaggaaatataccctatggatttcaagatggatcgcgacggtaagggagtgaatccccgggagcatagagaactatgtgaccggggtgagagagtgcagccaacaaagaggcaacttgaaagatgacgggtataataatatttttagtgttctatctgttagtcaatatcatggataaaaggcttttttgatagataatttatgtattgattaatgagtgatgtttttttgaagataaagcatttatcaaacttattcatgttatttattcgattatttttctctattttcttactgcattcaccttggcataaaatatttttgacctaaacactttattgaaggatgactttataaattattttttgcgatattggtgtacaacaaggtatattgatgattaattgtcgaatttccaacaatgggtgaggaaaaacatgcgaattaaagttttgctcagtgcttcagtattgttactattggcagggtgtacaacgactaaccaattaacttctggtggttcacaggttcgatttgttgatactaagccaggcagcgagtgccagttattaggtgaagtaaccggtactcaaagcaattggatgactggtgtaagtaatgaaagcagctcaatgcgtggggcagccaatgatttacgcaataaagccgcagtcatggggggaaatgtgatttatggagtcaccagtccgagtgaaagtctgttatcgagctttgcgccactggacagtaagatgatcggtcaagtctataaatgtcagtaatgacattcagaatttgaatggtatgcccggctgaaaagtatccgggcatgaattttttgttagttttgccttaatcccagatcaagaggtgtcttactcggttctccgccgatttcccttgcgagacgtggtactaaataacctgaaatttttgtcagcaattcccggataagccccttggcttcttcatcattgaccataaaatgagcggctccttgtactttatccagcacgtgaatgtagtaaggtagaatacctgcatcaaacagagcattgctcaggtcagccagagtatcagaatgattattgataccgcgtaacagcacactttgattgagtaacgtaatacctgcttgtttcagcaatatcatactgttccgtaaggattggtcgatctcattagcatgattgatatgtgtcaccatgatcacctgtaatctcgattgtgccagtcgatcgcaaagcgttgttgtgatccgggcaggaataactacaggcagacgagtgtgaatacgcagtcgtttaatatgagaaatcttttccagattgctgatcagccagtcaagttcatgatcttttgccattaaaggatcgccaccggagaagataatctcatcaagttcaggatgttgctgaatataatctaacgcttgttgccaattgcgtttattacctttgttatcttcgtatgggaaatgacgtcggaagcaataacggcagttaatcgcgcatcctcctttaaccagcaacagtgcgcgattacggtatttatgtaataggccggggacagcactgcgctgttcatccagaggatcggtagaaaaacccggcgtaagcgtgaattcttctggtgtcgttatgacctgaagtagcagcggatcattaggatcgcttacttgcatacgcgtaacaaaagctctgggtacccgtagtggaaacaggcgacgtgcgccgctccccttggtcaaggtcgggtgtttatctaaagataataattgtaataattcatcaggatcggtaataacatctgtaagttgtttcaaccagtcttctctgatgatgatctttggggttataatgtgcgccattttttggctaagccattttgtttaaaagaggatctccatggctacttatagtaccaatgaattccgttcaggtcttaaaatcatgttagatggcgagccgtgcgctattcttgaaagtgaattcgtgaagccgggtaaaggtcaggcgtttgcccgtgtccgtattcgtaagctgatttccggtaaattgctggaaaagacgttcaaatctactgactctgtagaatccgctgacgtgatggatatgaacctgacttacctgtataacgatggtgagttttggcactttatgaataacgaaaccttcgagcagttagctgctgatgaaaaagcagttggcgataatgcgaaatggttagtagaacaagctgagtgtatcctgacgctgtggaatggtcagcctatttctgtgactccaccaaactttgttgaattagaaattactgatactgatccaggtctaaaaggtgataccgcaggtacgggtggtaaaccagcaaccttgaacactggtgctgtagttaaagtacctctgtttgttcaaattggtgaagtgattaaagtagatacccgttctggtgaatacgtttctcgcgtaaaataattaccgacgatatttgataaaagccgcagttctggaagcaggctgtggtttttcttatacagagggcatggctagtcatgtcttttgagctcacgatattgtgttattgatactgccattttacacgactataatttatcactgtttctaatggttatccgggacgacctggatatactgccgttttctggggacgactccacaacactattatggggcgttgatatgtcctggtttgttcttgttattgctggtttattcgaagtcgtctgggcggttggcctgaaatatactcatggtttcacccggttgataccgagccttattacagccagtgctgtggcgctcagtatgggattgcttgcttatgcaatgaaaggtttaccaataggtacagcttatgcggtctggactggaataggtgcagtgggtaccgctatttttggcattatagtgtttggtgaatctgcaagctttgccaggattttaagttttgctctgattatcgccggtattatcggtctgaaattgtccagttaatattgaactgcactccaaaggtttcacattttggcagtgcagcttctatacctgtcatctttcaagttgcctctttgttggctgcactcactcaccccggtcacatcgttatctatgctcccggggattcgctcccttgccgtcgcgatgcaccttgaaatccatagggtaatataacccgaattctgcttaatccgtcattgaaaaatcgtcttctgagtagaaaactttcagtgatggcttcttcaatttaaggcagtaagcaatcaatccacctaaaacgcacaacagaaagccttttatacttcggtggcgggaatgctctatttgagaaagagtttttaattgcccattaatcgtttcaatgataaaacgcttttttaacattatcttatcccactcagcttgcatactcgctttcatgttacgccgttttttcgtgatgaaagtgacatcggttttagctaaatcgtccgccaattcctggctgaggtaacctttgtcaccgtaaagagaacccgttaattcttttgataattcacgaacaggttcccgatcatccacattacccggagtcactttaagcgcgagaatttcaccctgatgattgacaaccaggtgtaatttgaaaccgtaaaaccagcccattgaattttttccgcgctttgctatccccgcaaagaccttatgtcgagggatgcgaatgttatggcagacactcaaacgggtggaatcaataaaagcaatgcctgtgggtttcccttttaattgagtcagatagctgcataatggcaccaaaacggaaggagccacactgacaaaacgaggatagctaagcaaggttggaaaatccttatggtgatatttccaaatatgttctagataaaaatgtttaaaatcacggtaatgcgacatatgaaaaaggatcaaaatggtcatgatttcactgggatacatatgaccttgtcggcggcgtaaacgatgcccgctatcgagacaaaattgttcccattgagggatgaaaaaacggcaaaaatcatcgacatcacagaaaatttcaactaagttgtccatagcctgttcccccctcggagctgtttttggtgcacaccaaaactttgctcctggaacaggcttctcgtcaatttcttatccagaattcgggttaatataggatattctttatcaagaaataccgactttttgtagtcgtttcatgcctcttctccagatgccgctgcattgcagaaatagtgttcagctcgttgttgttcgactacagagtaaaaacgccgatgatagcgacaacactcagaatcgctgccaagccgtagaaaatccatttactcgcagggatatgaattttcaggtcatgcataccgtggtggatacggtgtaaaccgcaccatagtggtagaataatcatcagcaataggaacgcacgaccaataaggctctgacagaaagccagaattcgtgcgtagcttaacgcttccggcgcgacttccaatggcaaaaggatggcgacgagtaaaataatggctggagccacaattgcgccccacataccaccggcaccaaataatccccaaaaaatcggctcatcggaacgtttaggtatttgattcattagatcctccttgaggttaaagtaaggctatacctaagataatcatggtgacgataatagtgacggcccatagcagtttgattactggcccagaacccatcttttcgccttttatcacgatgttagctgctttcggcgctagctcaaaccaggttttagtatgcagcagagcacctagcagagtgatgatattaaccagcaggatgacgggattttgcaggaacgtgacaaattcatgccagctttgggtaccaccttttagagcgaatagaccgtatatcagtaagatactgaaccacatagtcgtcactgcggtactttcacgcaggatatagaagcggtaaaagcccagtttctgccaccagttgggagccatgctgcggatataaggtttgcgtttagtcgtcattactttctttctccccttattgtggttttagcatggcgatcatgaagtctttcgcgctttcgatcttgccttgttggatagccgcggctggatcgacatgtttcggacagacctcagaacagtaaccaacgaatgtacagctccataccccattctggctattaagttggggcatacgcttcttcttaccgtggtctcggttgtcgaggttgtaacggtgagccagcgtgatcgccgccgggccgataaattcagggttcagaccaaactgagggcaagcggcataacataagccacagttgatacagccggaaaattgatgatattttgccatctgtgctggagtttgaatatttgggccgtcagaaggtctacggtcattcccaatgatgtatggtttgatcgcttccaggctttcaatgaagtgggtcatatcaacgaccaggtcacgttcaatcggaaagttagccagcgcttcaactttcattccttgaggataatcacgcaggaaggttttacaggccagtttcggcacacggttaaccatcatgccgcaagaaccacagatagccatacggcaagaccagcggtaagagagatcgggagcgagattgtctttaatgtaacctagggcatcaagtagagaagtctgctcatcataaggaatctcataggttataaaatggggtttatggtcactttccgggttatagcgcatgacctccattctcagggtgttcatatcaaccattctcctgctccttatactttttctcttgtgctgcggcttcaccgccatatacacgttttgcggggatggatttggtgattttcacatcactgtattctaggtgaggaacactttcagggtcatagaaagcgagcgtatgttttaggcatttttcatcatcacgttcggtacaaccttcatccagacgttgatgagcgccacgggactctttacggtttatcgcagagtgaatcatacattcagctacatccaggctaaagccaagctcaatggtgtacagtagatcagtgttgaacacattgctgttatcggtgattttcacccgtttgaagcgatcttttagttcagcaatcttatcgatcgtttttagcatgagttcaggggtgcggtagataccgcagccttcttccatcgagatacccatttcatcacggatcttcgaccaactttccgtccctttttgtttcagcaagttgttcaaacgtgcgactacatcacatgcctgagcatccaatgtgcggtcattaatgggtttggtttgttgaacatgttttactgcttcttcacccgccagacggccaaagaccaccaattcagccagagaattggaaccaaggcggtttgcaccatgcaggccaatggaagaacattcaccaacagcgaacagccctttaatgcgagtttcacatttctggtcagtttcgataccacccatagtgtaatgtgcagtaggccggaccggaatgggctctttaacgggatcaacaccaacatatgcctttgccagttcacagatgaagggtaggcgttcaagtaatttcttctcccccaaatggcgtagatcgagataaaccacattgccacgtggagttgaaatagtacgaccggcacgccattcatgccaaaaagcctgagaaactttgtcacggggacccagttccatatatttgttttcaggtttgcctaatggtgtctcggggccgaggccataatcttgtaaatagcggtagccatctttgttgaccaaaattccgccttcaccacgacaaccttctgtcattaggataccggaacccggcagtccggttggatgatactgaacaaactccatatcacgcagtggtacgccgtgacggaatgccatgcccataccatcaccggtcacgataccgccgttggtattgtaacggtatacacggcctgcgccaccagttgccataataacggcattagccctgatctgaattttggtgccttccatcatattcagcgcaactaggccgcgcgcttgtccttcatctaccagaatatcgaggacaaaatgctcatcaaagcgttgaatttgaggatacttaagggaggtttggaatagcgtgtgtaacatgtggaagccagttttatccgcagcgaaccaagtgcgctctatcttcataccaccaaaacgacgcacgttgacggaaccatcttccttacggctccacggacagccccactgttctagttggatcatttctgtcgggcaatgttcgacgaaatattcaacaacatcttgctcgcataaccagtcaccaccggatacggtatcgttgaaatggaagtcataggagtcgtgagcttgggtgactgctgctgatccaccttccgctgccacagtgtggctacgcattgggtaaacttttgagatcagagcaatcttcatctgaggattagcctcagcggcggcaattgcggctcgtaggcctgcgcctccggctccgataatcgcgagatcggcattaaagatttgcactgtgcttctccattatttgagtgaaattaattagtaagcaaaattgtcgtaactttcctaaatgttgttgttatttttcatatgcaaaattctgtaggtaaaatctggtgatttaacggtcaagggaagctgtttattactgtttacattgaattaagtatagcgggttctaagtgaggtaaatttgatatgaaagggtattttgtcggatttgatcactaaaacttgatctaagacaggaattagtgactttaatttatcattgaccgacagagctattacctaggggggaaattgagaggatcacttgtagagctgactatcaaggccatacaatatgaatttggcttgaatggtatttttttatcgatattagaaattatttaaatgcagcgagatttaaaatttttattttaatttgataatgttgtagttaataattttaaattatttttttattttctatgattgttttttaaattaaatatagaaatgacttctgtttgttttatgaatattataattgaaaataaaataatcatgataaaattaatttagacgcgtattgccgttttaaagtgaccacattaattgcataaataatgatttttacttgagttttttatggtggacaagtaaaactggccactattattttttcttattttcacactaataatatcagctatttaatatatcagataaaaacctgttacttatttcaagataattaggtaataatggaatttaaggctatttataatgttgaagttaatgattttaaataattttttattttatttatagtttgtggttttatagtttaaatgtgggagttattcatgcttaatgaatattataattaaacattaaataattatacccgtaatcattgaagatgcttgattttatccgaaatggagatcattatcctcgctatgaaaatattcattaccgatgaacaaaaagccgaacttgaacatctccatcacacctgccgtgataagagggagtgtgatcgcatcaaagcggtcctgctggcctctgaaggctggagttcagtgatgatcgctcaggccctgcgtcttcatgaaatgaccgttaaccgtcatatcagcgattaccttaatcaaggtaaacttaaatctgataatggggggtctgatagtttgctttctcaagaacaaactgattttttaatcaatcacttatctcaacatcttttccatcacacccatgaaatcgtggcctatgttgctcagctctggaatattacctttagcattcccggcatgaataaatggctacaccgtcagggtttttcttataaaaaaccttgtggcgtccctcataaattcgacgcagaaaaacagcgacaatttattgaatattatgagaatcttaaagtcacagcgaaagacgaacccatcctttttcttgatgctgttcacccgactcaaggcaccaaactcggttatggctggatgcgaaaaggcgagaaaaaaacagtaaaaacaacaggaagccggactcgcctgaatatattgggcgcgctcaacctgaatgccattggtcgtacggtgttccaggaatatcaaaccatcaatgactacaacatttgctgttttttcaatgaaataagaaagtcttatcctgactatcatcaaaaaattcatcttattgtggatggggcgggttacaacaaagctcatcttgttaaggagtgggcttatgttagcaatattgagttacattaccttcctccctatagcccaaatttaaacccaatagagcgattatggaaggtcatgaatgaacaggttcgaaataaccgttattttgcggataaacatgaatttcgagacaacgtcttcaaatttttcaccacaacgctaccggatatagcggactcgctgatgtctagaattaacgaccattttcaggtgctaaaaactgcatcttgaagtttcttgggtatatattattcaaaacaggtgccaaaatatattttgatatttaataattatatcggttgtatatattcattgaaaatgctttatatttacaggaatagtaaaatgtggtgtttaaattgatgatctattaataacatagttgaccaaaatgaattatatatatacccaatggatttcaagatgcatcgcgatggcaagggagcgaatccccgggagcatagataacgatgtgaccggggtgagtgagcgcagccaacaaagaggcaacttgaaggataacgggtatatttaaataggagaatattatgggattatcaagtagtcctattgcattacaggcagataatgggttctatttaagtcgaattgttcgaggaggaggttttgattttattgaagttaataaatctattattgatatttacacaaaatattctgcaacacaacttagctctaataagatagcacttcgtgcaagcaatggcctctatttaagtcggatatctctggctggtagcgattatatagtagcgacaaaatcagatattgatgtttattctatttttactttagaatatatcgatgataatgtgatagctttgtgtgcagataatggaaaatatctgagtcgaatcaatatcgggggtatttttaactatattaaaccggataaatatgacttggatatatattgccagtttaaagttataaaattgtaattggacaattgtgatctttgatgacatcttattatggtggtcagttttacctgaccactatttttttactattaaaataggattagttacttaatgcaccagataaaatgttaattatatttcataataattttattaataatgtatttttagtgttactggttatattataattatcatctgaaattatttttcagtttacttataatattttacttttaatttaaatatgataattgattcaggttgtttaataattatgagtgataattgtctatatcgcccataataaaaagagaatatattttattgtttaacagtagtcgtatatattcagcaagggagtgaatccccgggagcataaataacgatgtgactggggtgagtgagtgcaaccaacaaagaggcaacttgaaagataacgggtataagacaagctaagttgttccgggatgatcagacggtaataatttgtctgatatgtgtgatgcaggtagactgcacgtttggttttattttggagtcatttacatgagcgaaacagcaaactggcagccaagtgcagctatcgccaacttgttgaaacgagcgactattttagcagaaatacggcgctttttcgcagatcgtggggtattggaagttgaaacacctgcgatgggtcagtttacagtgactgatatccaattgttttcttttcagacggagtttgttggcccaggtgccgcagatggtatgactctttatctgatgacaagtccggaatatcacatgaaacgcttgctggcagcaggaagtggccctatttatcaacttggccgctgtttccgtaatgaagaggcgggtcgttatcataatcctgaatttaccatgctggaatggtatcggcctcactatgatatgtatcgtttgatgaatgaagttgatgatttacttcagcaaatcctcgactgtgaaagtgcagaatcactctcttatcaacaagctttcttgcgttatttggatattgatccgctatcagcagagaaagaaaagctgcgtgaaatcgccgccaagttggatctgagtaatattgctgatatagaagaggatcgggatactttattacaacttttatttgctgttggtgttgaaccgcacattggtactgaaaaaccaacttttatctaccattttccggcttctcaggcttctttggcggaaatcagcaaagaagatcatcgagttgcagagcgttttgaagtctattttaaaggcgtcgaattggcaaatggcttccgtgagctgactgatagtcatgagcagtgccagcgttttgaacgggataaccgtaaacgtgcagcgttgggtttacctgttcgaccgattgatgaaaacctgattggtgccctgaaacaaggaatgcctgaatgtgccggtgtggcgcttggtgtcgatcgtttggtgatgttggctttaggggctgaaaaactcagtgatgttatggccttttcgataactaaggcgtaattattaagcaacaggaacagggcgctgattgaggcgccctgtttgcatcttatttctgttgatgctgtttttgcaggaatttcacacccaagtcaggaaaatcggtgaatacaccgtctacgcccgcttggttatatatgatatcgaaaagttgatcgccgctggtggcgtatttaggcagttgatcaactcgaatcgtgtatggatggacttccagattgttggtgtgagcctcttttaccagattagttaacttaatattggttggtgtggaatacttctccacaagcatatggtaatcagggccgataccatcagcgtattgtgccacttctttcatagcaccgggtttgaacatccagtcatagctgtaatttgtccatttgccgtctgattgtttttcataagtttcattccagtcggtgtaggcaataagttgaaccagtttcagatccatgcctaacttaggttccagctcgtttttgatgcgtttaagttcgttggtatcaaaacattgcagataaattttgtcgcttttcttggtgtaaccatacgcttttagcacggctagtaccttagtagaaatatcttttccttccttctggtggaaccacggtgctttgatttcaggataaataccgatgtttttgccggtagatttatttaatccttgcacaaattcaatctcttcctgaaaagtatggattcggaaatcagatttccatattgggaaacgattggagaaattttgtatttgtcggtcgtttttaatatcgaaaccttctgtgaattttaatgacttgatttcggacaaagtaaagtcgatggcatagtagcgtccatcttggcgagcacggttagggaatttattggcaacgtcagttacacgatcaaggtaatggtcatgtaagactatcagttcatcatctttagtcatgaccagatcttgttccagataatcagcaccttcggcataagccatcgctttagccggcagagtgtgttcaggtaagtatccacttgcgccccgatgggcgataacaatcttatctgctgcttgcgcgatgcctgacatcgatgaagttaaaatgataccaattatcattgtcttaattggagtttgcatgtgtgtttctccgttttagcgatgatataaactctatctcattaaactgtgagtttggttgtgttaataacacttactgacataatctcttagcttagagattaaaaaaagccgcaacgtatataatgctgcggcttaattaatattatcagtgatatatcacagtttaatgacagaggttagccatattggtgggctatttcctgtttatgttttttttcggtaatcataacgattagcaatagaataacggacaagatactaccaccaatcattaccataaagccgctgtcccaaccgaaaaagtcaacggtgtagccgatgatagcacttgcagcaacagagccacctaagtaaccaaataagccggtaaagccggcggctgtacccgcggctttctttggagctagctcaagggcatgtaaaccagtcagcatcactgggccgtagataaggaagccaataatcaacatacaagccatatctacagtagggttacctggtgggttcaaccagaatacgatagttgcgatagtaaccagcgtcataaagaacacaccggttgcaccacggttacctttaaatattttgtctgacatccaaccacatagtagcgtgcctgggataccggcatattcgtacaggaaataagcccatgaagatttatctagtgcgaaatgcttggcttcacgcagataggttggtgaccagtcaagaataccgtaacgtaacagataaatgaatacgttagccatagcaaccatccacagcagtttgttcggtaacacgtattgcatgaaaatctgtttagcggttaactcattttcatctttctctgtataatcagaaggatagtcatttttatactcttcgattggtggcaagccacaggattgcggtgtgtcacgtatcagggcaaagacaatcaatgcaacgagaatggcggcgaaagccggcatgtaaagtgcggctttccagtcattgaaccacgccatgcccaacagaaatagcaatggtggtaaaccaccacccacattatgtgagcagttccagatagaaacgataccgccgcgttctttctgtgaccaccagtgcaccatggtacgaccacaaggaggccaacccatcccctggaaccaaccacataagaacagcagaacaaacatgatagtgatactggacgttgcccagggtacgaaacccataaacagcataacaagagccgcgaggatcagacccgcaggtaagaagactcgtgggttagaacggtcggatacggagcccatgatgaatttggagaagccgtatgcgatagagatccctgatagtgcgaaaccgagctcacctttggaaaaaccttgctcaaccagataaggcattgcaagtgcaaagttttttcttaccagatagtaagctgcataaccaaagaagatccccataaaaatttgccaacgtaagcgacgatagactggatctacctgttctgttgacagccgggacctatgaggtgccggcttgaaaatacttaacatattttgcctccgatggcatttttggtgttataaacagcttgccggttgactaatgccaccggatgggaaaatgaaaggttttgtaagtggttattttccataacgaaaattatgatagtcgaaatcactcaacctatctgtgaaacaacactcagttgttaaagttgttttgccctggcgataattctgagtgatttgttaactttttgaaatgtgctttaccaatgaaattgtgacaattgtcacaataacgatctttacttaattattggtgagcgtttttggttcgtttctgttctttatcaaacaaaaaccacagttttcatacatcttctatttgttattctatatgtatccgtccagatgaaaggctcttctcaatttatggcgaatgggctgctaatcgattttaacgataaacatactgttttgacggtgtgctaataatctgccagactcataatttatacagttgtatagctgatatacccagtggaggaaccatgacgacccgttataacagtgatttttatggttggactcaggagcaagccagtttgcttcgttccggtgatttgagccagttggatagggaaaacctttcggaggaaatagaaagtatgggaaatagccaaagaaacgagctggaatctcgtcttgaggtactgtttcttcacctcctaaaatggcaattccaatctgaacggcaaggtcggagctggaagcttacgattgaagagcagagaagaaaaatagcccgtcgtcttaaaaaaaatcccagcttaaagtcagaacttagcgaaatttcctctgatgcttatggtgatgccattattgcagcagagagggaaactaatattaggcgtagtgtatttcctgaaacttgtccttggacatttgagcaaataatggatgaaaatttttggcctgaatagactcgataaatttatttcctaacgcactgattttgaacagtgcgttttctcggttgcttaacaacgtggttgattgattttcacttcacagcaagcagtattaacagaaattatttttttcggtggatactcattggattagctaagattatcctttttcattttcatgacctttgccgtatcaataattacagaaaaattcattgtgatcgctgtggctatactcaaggcaatagtcggagccaaaatagtaacggaaggaaaatgctaacagttttaatttattatcgaaaaatataataataaagataaaatattagaaaattattaatttgatttttttatataaatttataaaatttccgtagtgatgttgataattatttctatttgcagtaaattttattttatttatcaaagataatcatggaagttttcaataaggaaataactatgccaagtaaagactatgggttagttgataaagtttttaacgaaaattttaaaggaatgcatgtagaaacaataacagtaaaaatagcatcttcaggtactaaatatactaatgcggcaggagacgttagcaaatctacttttggacatgtatgggttgaatttcagggtgaatcaatcggatggggcttgggtgataataagcaagtaggaggagttgagaacataacttttagagattcaatcgcatacgataaatcaaaaatttccagtgttacatatccaatatattcagaaagtgtggttaataatatgagaaattacatttctgatttaaaaaatggaaatttctatgattttaagccgaattataacctccttactaataactgtatagattttgtaaactcaattcttcgagtttcacattatgataatgataaaaatggtatagatttcattcaggagttacggggaatgagtccaaatgccgtattagataattttgaagaaattgttgaagatcagaagagtacagagacaccacttattattgatttaactggcgatggtattattaccatagcggaaaatggttctatatattttgatcatgataatgatggtattgttgaaagttcaggatggatagaagccaataatgcatttctggtatgggataaaaatggagatggaaaaataaataacggaaatgagttgttcgggaataattctatattaaaaaatggagtcaaatcagtaaatgggtttgctgcattagcagatcttgacgataattttgatggtatttttgatcaaaatgatagtctatggaattcattagagttatggattgatgccaataaagatggtatcactgatgatggagagttgtataaattaagtgaatcaggaatctctgctataaatcttacctataaagaaaatggattcaaggatataaatggtaatattcatgggtttgaaagctcagtactctggaataatggggatacgactaagatagtggatgtgttttttgctgtggataaaaacatacagatggagtcactaaattcaaatattgacataatagggataaataatacttttagcgagattatattatgagtcatttttttgtaaaaaataagaaatattttctctactcaatgttctttttttcttttattgttcagagttcagacatgaacatacaagataccccatcgattgtcttcaatcattcagatgattttttatcagaattctctattccaatgcctaaaaatgaagatgaatatcatgcattagtaaagaaagcaaatagtggtaatgtagatgcaaactggatgcttgctgtaatacaacaaacagaaggttatcgtcaagaagccagtgaaaaatataagttatctatatcaagaaatgataaatataagttaagatctatggttaatttgggatttattttagaggatgaaaataaatactcagatgcgagagcacttttcgaattggctgggaaaagtggatattttgagggctatcgcactattggaacaaattatttaaatgggattggtgtaaatcaagattttaataaggcaaaagagtattttaataaaggaagtcaaattgggtgtcatgaatgcacatttcttattaataattggagtgatgttattaaattgaaaaaatcagaatagtgaatttatatttttggatgctagtacttaagcaagatcttttcaggaagaaaaattaggggaagtggggttcttaaatatggcggcaggctccgtttgataaacgaggcttcattaaaacaaatgattaaataaaaaatcagtgttttgtcaacaaattgagcgggcaatttgcccgctcttgttaaatttaatacaaccagtcgcgtcccatccggtcagcagccataatagcggcgtacactttttccggtgtcacttcaaaaggcatgttgtgaatggtttcgtcctcggcacaacttgctgttgccactgccatcactttttctttcagtttttcaccatccttcacgccaagttgatccagagtaaccggtagtcccatctgtacacagaaatcaagtaaagtatctaattcttcatttgggctattttccagtattagttgaactaatatcccgaaggcgactttttcgccgtggtacatgtggtggcattcttctaatacggtaaagccattgtgtacggaatgagcggcggctacacccgtattttcaaagcctaggccgcttaagtaagtaatagcttcgatgacattttccaccgcaggtgtactgacgtcggtttcaacagccagttttgctttatagccctcttctaacaaagtttcgtaacagagatgagcgagggcgactgcggtacgggatatcccaccctctgtcattcgaggtttatagccggctccacaaatgcgggcttcgaagtaagttgccagcgcgtcgccaattccggcaatcagaaaacgggttggggctttagcgataatgctggtatcgattaggacaatatctgggtttgttgggagaaacagatagtcttcatatttgccatcatcgctgtaaataacagagagagcactggttggggcattagtggaagcgatagtgggggcaatcagaacaggtaatctggattcgtaagcgaccgcttttgccgtatcttgtactttgccgccaccgataccaataacggcttggcattcatgttttttaagaatgtcagacaggcgtttaatctcattccgactacattcaccgccaaacacttcaaaatgacgagtaatttcgtattgttccaggctgctatgaaccgtatctcccaccaatttcatcgcggaattaccgatgataaccaaaacgtgatcggcgatggttttggtatattgaccaatatggagcagggcatcaggtccttgaatatatttggatggggattgaataattttcagcataaaaatattccttttgtggaaactcaatatttgtatctgtttgttgtataaattttcttaacaaacagggagcaaaatgtgacagcccagtaaactgtcttcggatgaaaaaagtacttaagttacttagcagactaataccacctataaaaattaatggttggctgtggataaataaagttgttatatccattttatggtgggaaatgtgtgtttttttgatctatgcccggatctctgtattggaacaagcccttcttctccattaggcttggggaatctggcttctggagtgcttgagtggatcagacagtttttctggcaaggtattcccccttcggaggcttatcttaaaatgatccatgaagctttatccgttcctcccggcgctaataacttaagaatgaattgtcgtttgttaacctccgaggcaggatgatgtggaataacgttgaatactgaacgacgtcatttttatcgtgctgcattagaagcgttggggtatcaattaaaacaaaacctatcccttttagaaaaaataagcggatttcatgctcaagaattggtgttagtgggaaggaggtagccgaaattatctttggaaccaaataaaagcagatattttaaacctacccataaaagtacttaatgaagcagagacgacggtattaggcgcttctttctttgcttggtttggcgtcggttgctatgagtcgtctgaaaaagcccgtgaacagttttcttatcactatgaaccttatacaccaggtgaacaccaagaagcttatgattcattagttcaagattttatacagcagtaggtaatcctatgctgaaaacgatttcttcattcatttctcctctctgtctcttttaaacatgctggctgaaatagtaacgtttttgctatcgtcgtcacagagaaaacggttaactatagaaatatattgctaaaaaaggcgtgattttttaattctgatattggttagaataatcctattctgtcccaatataaaagggattcctttatgagaaatgaacgtcatcaaaaaatcatggatcttcttcaccaccatgaatcttaacaactgctgaacttgccgtagttttacaagtgagtaaagaaacaatacgccgagatctgtgatttcttcaacagcatggtcgccttcttcgtttgcatggaagagcgaaaagtttaaacagggaaacgcagggtaatggtgactcttttaacatgcgggttaagagccatttttcgagtaaatcgcttatcgctcagcaagccgtgacttggataagagaaggaatgataatcgcacttgatgcaagttcaacatgttggtatctggcaaagcaacttcctgatattaatattactatttttaccaatagcattcgtatttgccatcaattatcaaagaagaaaaatattcaattaatcagttcagggggagttttacatcgtaaatatgcttgttatattaattcatcgcttattacacaattaaaaaatttagagatcgatctatttattttttcctgtgacggcattgatgcaaatggcgatttatgggattcgaatattgataatgcacaatttaaagaaattaacccgaattctgcttaagccgtcattaaaatatctttctctgagtagaaaattttcagtgatggctttttcaatttaaggctgtaagcaatcaatccacctaaaacacacaacagaaagccttttatacttcggtggcgcgagtgctcaatttgagaaatggtctttaattgcccgttaatcgtttcgatgataaatctcttttttaacattaagttattccactcagacagcgcttgtgctttcatattacggcgtttcttcgtgatgaaagtcacaccgattttggctaaatcatcggccagttcctgactgagataacctttatcaccgtaaagataacccgttaacgattttgataattcgcgtacaggctctcgatcattcacattaccgggagtcacttttagcgcgagaatttcgccctgatggttaacaaccaagtgtaatttgaagccgtaaaaccagcccattgatgtttttccgcgctgggctattcccttaaaaaccttatgacgcgggatacggatgttatgacagacgcacaaactcgtggaatcaataaaagcaatcttggtcggttttccttttaattgagtcagataactacatagtgggaccaaaacggaaggggcaacactgacaaaacgggtataactgagcagggtggggaaatctttgtggtgatatttccaaatatgttccagataaaaatgtttaaaatcacggtaatgcgccatatgaaaaaggatcaaaatagtcatgatttcactggggtgcatatggccttgccgatgacgctggcggtaccctttttcgaaacaaaataattcccattgaggaatgaagaagcggcaaaaatcatcgacatcgcagaaaatttcaactaacttgttcatagcctgttcctccccggagctgtttcggcgtgcaccaaaacattgctcctggaacaggcttcatgtcaatttcttatccagaattcgggtaaattattataaaacgatcattacaatcaattttgctaattgataagagtaaaattaaccgaaaaagcgaaattaaaatagaaaattgtagtaatatcactgatgtaatatcgaatgatttgagccaggtggaaggctaattgccttgccaatctcttaatcaggcaatctgattaagagaccggtagttgctggacatataaaaatcagcgaacttgaatgtggctattgttagtttgataggcaaagaagtactttaaaattaggttcaataaaatgccgtaagcgggtaggaaaaagagtaagcagattaatagcttaaagcagtaatcgactaacccaatctcgatccaattagccgccatgaaagcatcggtgctacggtagaaagcgatagagaaaaaggctaggctatcaagtaagttgccgaaaaacatcgctgctgcgggagcgacccaccaattgcgtctccggcgtagacgattgaagacgtatacatccagtatctgcccaaggaaataagccataaagctggcacaggcaatacgggcaacaaagagattgaattcaagcagcgcggtaaactcttgccactcgccttggaaaaatagggcagaaataatataagaagtcagtaatgcggggatcataacggtagtaatgatccgtcttgccagtggtgcgccgtagatacgaaccgttaaatctgttgcaaggaaaataaatggaaaagtaaaggctccccacgtggtatgaaaaccgaaaatagagacgggtagttgcaccagataattactggaaataataatcagaatgtgaaatagcgaaagccaaattaaagcggtagcgcgctgttgtgtaattgtagttgataaaaacattcttgtacctttttggaaaatggggtgagggaacccaataaaagatctaccgttttaactgacggtgcctcacatgatacgtcggttgtgcacgaattcaaaatgcctgtatgtaaagttaatttttgctagcttttttataatataattcggtctaatagactgactgaagtagagataagttatgcccgatgtgtttactcatccagacaaaacccttgatacacaagggcttcgctgtcctgaaccggtaatgatggtacggaaaactgtgcgtcatatggaagcagggcagatgttattaattcttgctgacgatccggcaactacgcgtgatattcccagtttctgccgttttatggagcatcaactggttgctcaagaaacagaacaaatgccttatcgctatctggttcggaaaaaagagagtcaactctgaatataacagctaagttgagaaatgaacgtttttgctttttaccatgtcttcgaacgttaatgggctttcaccactgaattcatcttactatggcacaggatatgagccgcgaataagactcatatccttaaatagctagacgattttcattatttcagtttaatcctcaataaccttaccgcgtttgccgtcacaagagcggttgcgccagaatctgccagtactgccatccacaagcctgtgatacccaataggctggtaacaaggaagatcccttttagccccaatgcaatagcaatgttttggcggatattattgtgcgttgcgcgggaaagggtgatgatttccgacaaaccggtcagacggttgtgagtcaatgctgcatctgcggtttccagagcgacatcggtaccgcttcccattgcgacaccgatactggaagctttcattgcgggtgcgtcgttgatgccgtcaccaaccatcattgtgctgtgatctttattcaatgcaatgaccgctttgactttatcttccggcattaacccggcgcggaaatctattcctaactgaccagcaattgcagttgctgcacgtgggttatcccccgtcaacatcactgatttaataccttgatctttcagtaaacggatagcatcaatggcatcttgacgtaacgtatcttgcatcgcgataaggccggcaaattgttcatcatgcatcacggcaacaacggttttaccgcaatcttctaactgaacaattttttgtttccaacgatcagataacgtgtttgctggcagttttccgggcgcgctgacaagaatacgtttatcgtttaactgaccttcaacaccaacccctgccagcgctttacggtgttcggcttcggtaatattaacgtttttactttctgcgcattgcaaaatggctttagccagtgggtggtgggagccgctttctactgcggaagccaaagctaataactgagattcgctgatattttctgctggttgtatatctgtgacttgtggtttaccggcggtcagcgtaccggttttatcaaaagcgatagtggtgatgagtcccaattgttccagcgccgcaccacctttaatcaatgcacctcggcgggttgctgttgcaagggcagaggtaatggcggcgggtgtggaaatcaccaaagcacaagggcaaccgatcagtagcaaagtaagaccacggtagatccatgtttcccaaggttggctgaatacagtcggtggaatgatgataaccaacgcagagaacagcataatcagtggcgtgtaaattcggctaaagcggtcaatgaagcgttcaatcggcgcacggcgttcttcggcttcttcaatcagttgcagaatacggtcaatggcattgttgccctgttcggacagcactttcatttggattgcacgatccacggataaacaacctgccggaactttttctccctgcattcgttcaaccggaatagattcgcctgtcagcgcactttcatcaaagctggcgaatgaattgagtaattcggcatcagtgggtaaacgtccgcctggagcaatttcgataatatcgccagggcgaaggtctgaaactggaacaatttttttctcaccgttttttaccagtagtgcctcttccggcaccaatgccattaatgcactcacccctcgacgagcacggccggcagcataagattccagcatttcaccaagcataaacagcagtagtaccattgctgcttcagcggtggcatcaataaacagtgcacctatggcagcaacactcattaatgtttcaatggcgaatggcgtgcctgatcgtatgagctgccaggctttggtaacaataggtaccaatccaatcacggtggtgatgataaaggcaatacggccaaatgagggattgatgtgagagattccccaacttatcagcatcatcagtgaaagagtgatgattggtgcaaattctttccagcggctgcttttttctgctttctgacttgaatcggaattgcgtagagtaaatccagcctgattaacggcttgaataaccgctgaacgtatatctgtatctgcatccacaactagtttttctgttgcgaatagaaccttggcttgtttcacttctgcaattttgctgaccgcggtttcaattttgcgggcacaacttggacaatccataccattaaccacccaactgaaacgttggtttgccaaaagctcaggtgcttgtgtctcttgtgtatcatgggaagggtgatgcttatgtgagcaagccttaccatgttcatgttcatgatgatgtaaatgttcactaacttgtttagcctgatctgaacaagtcgtcgtcgcgcagcagcttccatgctggtggttatgttgatgagcactatttttgtttgaatttgagtacatggactccccctgaatagagttaactcaaagataatgattaaactctacactttggagcctactccagagtcaataaaaagaaaaaataaagttgttaaattgtacgattgagtgctgatatccattttcaacttagtctttttattaaagataaatagaacgaataatcaaaaaatggccgataaaataacaggttgcaacaatcgccttagaagatttgaactggaaacggtaatggttaatcaaccagacactatgtgacagtaacaacaagacagtgccagctaatagggagaaaccatacgctgtattaagggagaagtattgttcacctgccatccacaccattatcaggagcatgacaactgaggcaacgaccagccagcgcctttcttccagtttattccaaataaccagcagaataatggagccaagaaccagtaaaattaatggcagcgggaagaagaaactgaaattcatctgcatgataaagcttatcgtgtagagcagataacagaggaataatgtgcttagagagaatagtgaatacttactggggagcatgcgcagagcatctgatattaaagcagtaaataacccaaaacagattagataacctgaaatatgcagctcaggcgcttgccatgcccacaataacaacaatagcagagtgactggcctgaatagccatctttgccagtttgggccacggtaagctgcatcaacatacaaccaaccagaaagaaatactgcaataaatggccagctcatctttgttccttaaataagtgatggataaggggtctactcttttactatcaaaatatagacttaaataatagagattggtttaagtatctgtgcggaaataggcagtgaattaagaaatgttgatccggttattgatctgttcaacaaagaaaggagtacgaagccatgctcagataaacgtgacagcttttgaatacgaggaatgaaatgaatcattcctcacataattgtatgtatttttcgggtgcttatgtgcgctgcccatgcccactattttgggtgatgacttttctctttccgttgttttttctgcattgacagtagttcaaagacaccaaaaaagaagatcttggtttgtatcaggctagagagtttttggtctttgggctgactggcttttagaagcagcatttgaaatgcatgcatgaccaccatgaaaatcatggcgatatccataaaatacttcaatggttttggaaatggatggatcaggttaaagatcagaaatccccaaacgcagatcattaacagtttgcccaattgaataagcattagtgtgtactccaaagtaatcgttatgcaggtaagtaacggatatagagccggtatgcgacttgtccggcgactttttcacgatgaagttgccagttaacagggacatcaatcgccgttgattcggattcagcctcaacataaatccagctttcatctgccagccaattttgttcttccaacaattttatggtttcgctaagcattcctttacgaaaaggaggatcaaggaaaacgacctcgtaggatgttcctggttgagataaataggttaatgcactgtcgttaatgacttcggcattttgggcattgagcagatccaaattagcggaaagttgtttagctatattatgttcatattcaatcagggtaacctgtgctgcataacgggaaagtgcctctaatccaagcgctccgcttcctgcatagcaatccaggcagtgtgcttcttggataatcggggctagccagttaaatagcgtctctctgacgcgatctgtcgttggacgtaatcctggactatccggtacaggtaattttcgacctcgccattttccgccaataatgcggatttgtcccatcgattgccgttgtggtttctttgccataatttgcgtaatagttgttaagacttacaggcactaatttaccatgaaatttatgattgatatgtgttgagctattacgaaaatgttagaatgcttctaaatttcgttattattccctgttgtaacgccatgatttaaccttgaggagtgtagtggctaatggcaaaagagaaaaaaagaggctttttctcctggttcgggcgtggccgtcaggaagaacagcaaaaagaagagcaattagcagtggagcaggcagaacagcagcgtgttgctgaggaagctgcaagattggcggcagagcaggcagaacaacagcgtgttgctgaggaagctgcaaggttggcggcagagcaggcagaacagcaacgtgttgcagaggaagccgcaaggttggcggcagagcaggcagaacagcaacgtgttgcagaggaagccgcaagattggcagcggagcaggcagaacaagtacaaaccgaacagccagttatatcaaaagagcaagagcgtccgactaaagagggctttttctcccgcttgaaacgcagtttggttaaaactcgtcagaatttagggtccggttttcttagtctattcagtggtaaaaagatcgatgatgacctgtttgatgaattggaagagcagttattgattgctgatgttggtgtcgatactacccgtaaaatcattagcagtttgacagaacatgccagtcgtaaagagctaaaagatgcagaagcgttatatgccaaactgaaagaagagatgtctggtattctgactaaagtgaataagcctctggacattgaaggaaaaacgccgtatgtcattctgatggttggtgtaaatggtgtgggaaaaaccacgacaattggtaaattggctcgtcaatttcaggcacaaggtaaatctgtcatgctggcagccggggatactttccgtgcagccgccgttgaacagctacaggtgtggggggaacgtaaccatattccggtagtggcgcaacatactggcgcagatcctgcttccgtgattttcgatgctattcagtcagctaaagccaaaagtgtcgatgtcctgattgcagataccgcgggtcgtttgcaaaataaatctcatctgatggaagaattgaagaagattgtccgagtgatgaaaaaactggacgaaaatgctccacatgaaattatgctgatattggatgcgagtaccggtcagaatgcgataagtcaggctaaactgttccatgaagccgttgggttgacaggcatctcattgacaaaattggatggtactgccaaaggtggggtaattttcgccattgctgatcagtttgaaattcctattcgttatattggggttggtgaaggaattgaagatctacggccatttaaggcagacgactttatagaggcactttttgcccgagaggattaattacctatgattcgctttgaacaggtcagtaaagcttatctggggggacggcaagccctgcaaggggtggattttcatttgcgccctgcggaaatggcatttctaatgggtcactcaggggcaggtaaaagtaccttgctgaaactcatctgtggcattgagcggcctagcgccggacatatctggtttgccggtcatgatatcagtcggttaaaaagccgtgaggtaccttttctacgtcgtcagattggtatgattttccaagatcatcatctgctgctggatcggaccgtatacgataatgtggcaatgccgctgattatttcaggtgcaagttctgaagatatccgtcgtcggacttccgcggctctggataaggttggtctgctggacaaagcgaaaaatttcccaattcagctttcagggggagaacaacaacgagttggtattgctcgtgcggttgtgaataagccgactgttttattggcggatgaacctaccggtaatctggatggtgagttgtcagaaggtattttacgactgtttgaagaatttaatcgggtaggggtgacagtgctgatggcgacccatgatatggcactgattgaaagacggaaatatcgtatcctgactctgagccagggccgtatggcgggagagtataatggttaaaaatgtgcgtaaggcagcggggaaagtaacacgatcgagaagtaaagttttacaaggaggatggcgtgagcagtggcgctatgcttggatgaatacgttgacagatatgtcacgtcagccgttggcaactttgttgaccgtgatggtgattgctatctccctgacattaccaagtgtttgttacattgtgtggaagaatgtcagccaggctgcggaaaaatggtatcccacccctcaactgacggtatatctcgataaatcactggatgatagcagtgcgcagaaattaataagtgagttgaaagcgcttgatggtgtggacaatgtcaactatctctcacgtcaggaagcaatgacagaattccgcgcttggtctggctttggtggcgcgttggatatgttggaagagaatccgttgcccgcggtggctattatcacaccgaaaatcgattttcagagttcacagacgctgaccacgctgcgtgatagagtttctcaggttaaaggtattgaagaagttcggatggatgatagctggtttgcccgtctggcggcgctgactggtcttatcggtcagattgtgacagtaatcggtattttgatgatcgttgcgctgtttttggtcatcggtaatagtgtgcgtctcagtattttcagtcatcgtgatacgattaacgtgatgaagcttattggtgcaacggatggctttattttgcgcccgttcctcaatggtggtgtgttgctaggggctttgggggcaattttatcgttaattttatctgcactattggtgtggaaactttctgatgttgtaacagaggttgccagcgtgtttggtacgacatttaatttacatgggctttcatgggatgagtccctgctattagttttgctctctgcaatgattggttgggtcgctgcttggttggcgacaactcagcatttgcgtcattttacgccagaataaaacggtaattttctcaacaggctgagcgaaatcagcctgacaacgcgataaccatctctttttttcctaaggtaaaagtttcttattcattgacttaaatccaaaatcacgattttctgctatatagaattaattaaaaaggcgcttgtactttcccagtgaacctagcggatacttttgtgggatggagttaatatttatcggggatagtacaaataaagttaattgcataaatataaaactatctgttattttttgttctgcgatcccattatagggatggtcggtgctaaaattattacttttccacggatctgtagcttgaatatgcacattctggtgatagactgtaccgctgtatgttgaacgttggttcatatacactgatgtaatctaatccatactaacgatttgagccttatttgagaggatttgaatggccaaagaaatgcaaaccttagcgttagttcctcaaggaagtctagagggctatgtccgtgcctctaatacctatccaatgctgacagcagaggaagagaaggaactggctgaaaggctgcattaccagggagatctggatgcagctaagaagctgattctgtctcatctgcgcttcgttgttcatgtcgctcgtagctatgctggttatgggctacctcaggcggatttaattcaggaagggaatattggcctgatgaaagcagtacgtcgttttaacccggaagtaggggtgcgtctggtttcttttgccgttcactggattaaagctgaaatccatgaatatgtactgcgtaactggcgtattgttaaagttgcaacaactaaagcgcagcgtaagctgttctttaatttgcgtaaaactaaacagcgcttagggtggttcaatcaggacgaagtagaaatggtcgccaaagaacttggcgtgaccagtaaagatgtgcgtgagatggaatctcgtatgtcagcgcaagatatggcgtttgatatgtctgccgatgatgatagccaggaaggtcaaccggttgcgccagtgctgtatcttcaagataaagcttctgattttgcagacggcattgaagaggacaattgggaaaaccatgcggctgataaattatcggtggcgatagaaagcttagacgagcgcagtcaggatattatccgttgccgctggttagatgatgataataaatctaccctgcaagagttggcggataagtatggtgtttctgcggagcgtgtacgtcagcttgaaaagaatgccatgaaaaaattgcgtgtggcaattgaggcataaatagagtgattttgcgttaacgcattcataattaaaaaaggcgataatggtttatcgccttttttgtttcatttttcattgttgtcatctaatcctatgaaaattgttattgcgcctgattcatttaaagaaagtctcagcgccttacaggccgctgaagcgatagaacaaggatttcgtgaaatctatccacaagctgaatacattaaattgccgatggcagatggaggagaagggacagttgaatcgatggtagcagctactggaggaaagattgtacgtctgttggtcactggtccgttaaatcagccagtggatagtttttttggcgtgctaggtgatggagaaaccgctgttattgaaatggctgcggcttctggcttacatttggtgccgatggaaaagcgtaatccgttgataactacgacttatggtaccggtgagctgatgttggctgctttggatcaaggtgtcagaaagataattttaggcattggcggtagtgcgactaatgatggcggtgccggtatgatgcaggcgttgggagcctgtttgcttgattctgatggtaaagcgttggggcttggcggggctgcgctaagtcggcttgctaaaattgatctttccggtttggacgcgcgtttgaatcgaactgaaattatcgttgcctgtgatgtaattaacccgttatgtggtgagtttggtgcatctgccattttcgggccacagaaaggggcgacaccagagatggtgaaagaattagatgcagctctgcgccattatggtgaaaaaattgaattactgaccggcattaaggttattgacgtacccggtgcaggagccgctgggggaatgggtgttcctttacttggttggctggacgctaaattgcaaccgggaattgatattgttatctccacgctggaattggcaaaggtagtacaaggcgctgatctggttattacgggtgaaggccgaatagacagccagactatttacggtaaaacgccgattggtgttgctcgtatcgccaaaaagtatgctatttcaaccattgcattggttggcagtataagtcaggactatagcattgttcatgagcatggattggatgccgttttctcaattatgtccggcgtctgttctctttctgacgctcttgtttgcgggcatgagaatttgagggtaactgcccgcaatgtggctgcggtctggaaaatgggtcagctagaataagaatttgacttggtatcgtagtaaaaactacaggcgctcataaaaccttttaatgccggttcgttagcatctgagaacccttcaaggcttaacttccattgattaacagtgggatgctgagcttttatttcatttatcaaatataaacccaccccccggcggcgtgttatttcacggacacataaatctttaagcaggccggattgatcactgaaagtcacttttactgcggccagtaatctatcattaaagcgagcagcgaacagtttattttcattttttaaccaactttgccattgctctggagcctgttgaggccagattttctttagatcaataatatcttgtgctgacaaaacagtaagttgttcaatagttagcttcatggttttcccatatcaattttcaatggagtgttatgtaaccgcttttatacgttactggaaaaatgtttttaacatggtcgatctttcgagttaaagattgctttactaatatttaaccagaacatcacactatgttttgtctaaattccaatcaactttggcggtattttattctgtaattaatgcttttagctaccttgttaatttgattttaagcatgaaatgctattttaataacatgaaaaataaaattttattaataaaaattactttatctaatcagtgatcacaaaagatcacggttatcccattagataatcggagatctaaaaggtaaacacaataaattagaccaatcacaacaggggataaacttaaaatgaaaatcatagcaggtaaaacgctattagcaggctgtattgccatgatgatgagtcactcactgtgggcacaagagatcaaagtggcgattgtaggagcaatgtctggtccagttgctcaatatggtgatatggaatttactggcgcacgtcaggcgattgcagatatcaatgctcatggtggtattaatggtaataagctggtgggggttgaatatgatgatgcgtgtgacccgaaacaggctgtggccgtcgctaataaagtgattaatgataacattcgttatgttatcggccacttatgctcttcatctactcaaccggcatctgatatctacgaagatgaaggcgtcattatgattacacccgcggcaaccaatgccaatttgacaactcgtggctaccagatgattctgcgtacgaccgggttggattctgatcaggggccaacggcagcaaaatatattgctgaaaagattaaacctcagcatatagcgattgttcacgataaacagcaatacggtgaagggttggctcgatctgttcttgataaattgaaaaaagcgggagccaatattgtcttgtttgaaggcgttactgctggtgacaaagacttttcggctctggttgcccgcctgaaaaaagagaatgtggattttgtctattttggtggttattaccctgaaatgggacaaattctgcgtcaggctaaacaggctggtctgaatattcgctttatgggaccggaaggtgtaggtaactcctcgctatccaatatcgccggagtcgcttctgaaggcatgctagtcacattacctaagcgttacgatcaggtaccggtgaataaagctattgttgaagcgatcaaaggaaagaaaggcgatccgacaggtccgtttgtctggaccacctatgctgctctgcaatctctggctgcggcaatgaaccgtaccggtagtatggaaccgactgatttggtgcaagacctgaaagcgaatccagtggataccgtaatggggagactaagctggaatgccgttggcgatctaaaagggttcgaattcggtatttttgaatggcatgcagatggttcttctacttctgtgaagtaaggtcatcagaacggtcgtcagctcctgtttgtcaggagctgctattccggaggtacaacgtatgtcggagcaatttctctattttttacaacagatgttaaatggagtgactctgggtagtacttatgcattgattgccattggctatacgatggtttacggcattatcgggatgattaatttcgctcatggtgaaatttacatgattggtagctatgtctcctttatggtcattgcggctctgatcatgatgggaattgatttgggctggttgctgattactgctgcttttttaacatcaattgtcattgccgctgcttatggttggagtattgagcgagtagcttacaggccagttcgccattccaaacgcctgattgccctgatttcagcgattgggatgtctattttcttgcaaaactatgtcagtctgtcacaaagttctcgcgatctggcattgcctggcctgattaccgggcagtgggtattaggcgaaagtgatggattttctgccagtattagcgcaatgcaactgaccatctggatagtgacatttcttgccatgctgatactgacaatgtttatccgctactcccgcatgggacgtgcctgccgtgcttgtgcggaagatgtgaaaatggcgagtttgttgggaatcaatactaaccgagtgatttccttaacctttgttatcggtgcagtaatggctgcaatagccggtgttttgttggggcagttctacggtgtaataaatccgtatatcggttttatggcaggcatgaaagctttcaccgcagcagtattgggaggaattggcagtatcccgggggcgatgattggtggtttgatcttgggaatttctgaagccctaacttctgcttatctgagtacagaatataaagatgccgtttcctttgctctgctcattgttgtgctgttgtttatgccgactgggattttaggccgtccagaggtggaaaaggtatgaaacatgctaattgggtgaatgccattatcgcctcagccgctttatttgtgttgtctgtctttatgatggggatgcagttatcgctggatggtacgcagttggtcgtccatcatgccgatgaagtgcgatggttatggattggtattggctgtgcggttgtgtttctgttccaattattgcgtccggctgttcagcagataatgaagaaagtaccgattaaaagctggtcattgccggatttcgatggctcaaccaaaggacaaaagttactggcaatattggtcattattgctgcaattatctggccgtttattgtctcccgtggtagtgttgatatcgctacgctgacattaatttatgtcatgctagggctgggtttgaatgttgtggttggtttatcggggttgctggtacttgggtatgcaggtttttatgctatcggtgcttatacctacgctttgctaagtcactattatggattaggattttggcagagtttgccgctggcggggttaacggctgctttatcggggttgttgttgggttttccagtattgcgattgcgaggtgattatctggcaattgttacgcttggttttggtgaaattgttcgcattctactgttgaataatactgaaataaccggtggtccgaatggtatcagtcagatcccaaaacccactttcttcggactggaatttaatcgtagtgtgaaagaggggggttgggatactttccacaacttctttggtttgaaatacgatccaagtgatcgggtcatttttctctatctggtggtgttactgttggtaatactgacagtattgattattaatcggctactgcgtatgccattaggtcgtgcatgggaagcgctgcgtgaagatgagattgcttgtcgctctcttggtttaagtccaacccgaattaaactggctgcgtttactatcagtgcggcatttgccggttttgcgggtactttatttgctgcccggcagggttttgttagcccagagtccttcacttttgctgaatctgcttttgtgttggcgattgtagtactcggagggatgggctcacagactgcggtgattctagcggccattttgttggtggtttcccgtgagatgatgcgtgatctgaatgcctacagtatgttgctgctaggggcaatgatggtattgatgatgatttggcgcccgcaagggttgctaccgacaaaacgccgtcatgttaaattggaacgacaggtacagggaggaaagcaagcatgagtacaacaccattattgcaagtttccgatctgaccatgcgcttcggtggcttgctggcggttaacaacgttgccctgaggttaaatcagagggaaattgtttctcttattggccctaatggtgcagggaaaaccacgatctttaattgtctgacaggattttactgtccgactagcggtacgataaagctgcgggaaaaacatctggaagggttatctgggcaggctattgctcgtatgggcgttatcagaacattccagcatgtgcggttgttccgggagatgacagtgatagagaatctattagtggcgcagcatcagcatctgaaaagaggtctttttgccggtctttttaaaacgccggcattccgccaggcagaatctaaggctgtagattgggcgataacttggttagaacggattggcttgttaccactggcaaacagacaggcaggtaatctggcatatggtcagcaacggcgtttggagattgcccgctgtatggtagctcgtccggaaattttgatgctggatgaacctgctgcggggctgaatccgaaagagacagaggaacttaatgctttaattgctgaactgagggaacatcatcaagtttctgtattgttaatcgaacatgatatgaaattggtgatgggaatttcagatcgtatctatgttgttaatcagggaatgtctttggcgcaaggacggccagaagagattcgtaacaatccggatgttatccgggcatatctgggcgaggtgtattaattatgttggaatttaagcgggtatctgcccactatggggaagttcaggtgttgcatcaggttagcctgaatattcagcagggagaaattgtcactctgattggtgcaaatggcgcaggaaaaacaacattgcttagtaccttatgtagtgaacccagagcaaccgaaggttctattatttttcgtggtaaggacatcacccaatggccgacatctcgtattatgcgtgaggacattgcgattgttcctgaggggcgcagagtgtttgctcgtatgacagtggaagagaatttggcaatgggcggtttttttgctgataagactcagtatcagcagcgcattgagcgggtttatgatctatttccgcgtttacaggaaagacgtcaccagcgggctggaacgatgtccggtggtgaacagcaaatgttggcaattggccgtgctttaatgagtcagccacagttattgttgttggatgagccttcattgggattggcgccgatagttatcattcagattttcgatactatccagcagttgagggaagaggggatgacaatctttttagttgaacagaatgcaaatcaggcgttgaaattggctgaccgaggatatgtattggaaaacggtcagatcgtactagaagacagcgggtctgcattattggttaatgaagctgtgagaaatgcgtatttggggggatagagagatattctttttcacaggaagggaattcagatggttgattatcctcgtcgtactgggaaggtggtttttcccaaggtgaggacgccattacgccattaatagtgctttaagtttggtattatctgagattggggcaacgagtgtggtttcaaatactttgaaatctgcccttattttttctgtgttttctcgtcatattttaagcaatatataccctatggatttcaagatgcatcgcgacggcaagggagtgaatccccgggagcataggtaactatgtgaccggggtgagtgaagtacagccaacaaagaggcaacttgaaagataacgggtatagtttattggtggagtaatgaaaggtaaatgaattgtattcagtataattttagtggctaaaatctacagttaaaattattttgctattaatttaattttctttcattagaaagagaatgtttttaagaatattcatccgttatcttgtagaggatataaccaattagtaatgaaaaatattattgatgcggatataacggaaatatattcttgggataccagactattttatttattgtcattttaacgttgtgaatgaatttggtgaattattatagtccactggataaagttaaatttataaaataaagaatagaattatatagcgctacagtaactaatattaatattataaatccaggttaataacgtaatggaaataatttatatttaaattttttatatatgtttttatatgtgttttttatatatcatataattccatcaactcttaaataatagtaatttcattgaagcagagcgttgacatgaactatatatctgctatagttttgtattattgtgacttgctttagatatgtctcattaatgacattacttatagtgtgtatatcttaatattcttgtgagttattgtggtatgtaaagtccatgtaatatattggggaattaaatttcaaaggaaatagtggttctataatggttaaagagcatctttaattaagtggtaatactgtgttttgaaaatatttatatgtaagttgagtgaattttatttaaattttaatgaggaaaataaatatgtctagaataaccattgttgttgattcagatgagcagaaagcagagttttattctaattcccctgttccagtacataaagacttaaatgcagttggtcctttgagtgatgtgactatatcacctcatgctagtgtggaagtatttagaatagatacaccaataattccagaatccagaagatctctgagagttgtaaataccgggctatcaaatagtgtcacggctaaattttactggtctcatagttttacctctgaatggtttgagtctggttctatagatgtaggattaggagaagagaaggtgttaaacgtgcctaataactctttttattatagtaaatttgttatctataataatacggataaagttgcttatgtgacggcaaatttggtttaaacatctcattttaattaaagggttccattatgcatacagaaaatgttttagacataagaaccattgtggctaatgaatatgccgtaaaaacgagtgcagtagagtgggatgttactgatattgtaaaaaatgcaatcatcgggggaatatcttttataccttcagttggccctgctatatcttttttagtcggtttattctggcctcaatcgaaagaaaatatatgggaagggattgtcaaacaaattgagaggatgatagaggagtctgcgttaaagacgattaaaggtatccttgctggtgatattgcatatatacaagagcgaatggcaaccgttgctgaccttcttgataagcatccaggatctgaagaagcgaggagtgcttttaataatctggcagaaaatatagatggttatcacaaaaaatttaataatttttcggatgatgttaactatcaaatattacccatgttttctactacggttatgatgcagataacatattgggttgctggtttagagagaagaaatgaaatcgggcttagtgatattgatattgaaaaagtccgaggattaatcaaaaagacggtagaacaggctaatagttatattaataatatatatgatagagagcttaatgatgctcttaataactcgacggctgacactgttgcaaataatgttatgtctgttcatggtcactgtcgtttacatggggttgaatatatcagtatttgggataaattaagtgaagccgagtcggtaaataatagaatctatgttgatgttttaagttattctactttctttgatcgtcaaacagcaaaagccagaattcaggcattgactccagagaaagatatggctccacctctcaaaccggctcttaatggaggaaaaagaagaaagatagattcgttaacggggcatattgtgcgtattggaggggctccgagagtcggagggctgaccgttgtttttgatgatggtaatagccatcgattaggtacaatatctggtgagacggcatctatttctctgaatggcagtcgaattaccagtttggaagtatggggcaatggtgctgttgatcaagcggtctttactttgagtgatggtcgttcattgtcatttggcgcacctggaacatctcgatataggaaattttatgttggtgaaagtcactatattgcagggatatatttgtccagtgattacagcccattagcaggtcaggcagcaaatatcgctgtatcttatcagttaataaatgatgatgaaaaataatagcttttaacaagtatattttatgtacgtagaatgttattagcttttatttaattatttgatgcacttgccgacgtctatgtttatatggtgaatggttcctttgatgtcggcaatttttgtatatcacctcaataactatttacttcaataactatttacttcaataactatttacttcaataactatttacttcaataactatttacttcaataactatttacttcaataactatttacttcaataactatttacttcaataactacgttccttataagcagacatatattctcttggtgatcgaccggtcattttcttgaaaaagattgcaaaagcactatcactggcaaattctaattcgctagcgacagatgacaaattaccctgttttgctagtaattctatagacttgattaaacgccactgttgtcgccattgttgatagctaagtcctgtttctcggcgaaatatccgactgatggttttttcgctggctccgatattcattgccagtattttgagtgttggtggcagtgtggtcataggaatacgggccaaacggcggtcaaaagggagtggtaataatgtcggttctctttttgccagatggatttcgtcaaaacaaacagccaataggttagcagcagatccttgtaaccaatctgtattaaagggagccagcgctattctctctaatacttcgcgtaacagaggtgtaacttccaatacctcaacgtgttctgctaaatatccgatccgatttacatctaaataaatcgaacgatacccgacggagccttttatttctgctctatgaataatacgcggtggaatccaggcaacccgagttggtggaagtatgcataagtgatctgccagggtgatattgatgcacccttgctgggtaaataataattgtcccatttcatgttgatgaaatcctgagtcatgctggcctagttcagccgcaatccctactaccggtactccaaagctatcaggatcaaaactatcatcacgagaaagccatgtcatatttatgtcctatttaataaataaattgtctttattattgtaatgcgacaattgagagcatgctaatttacgttttatggtctaattgattaagaaaaatacaatgcaacgtaaacttggacttacgctggcaacagcgctaatgatgtttccacaaattgtagaaaccatctatagcccggcattaaccaatatcgcaaaggaatttaaagtgagtgctgagcaagccgctcaaactttatctttatattttttcgcttttgctatcggtgtagtcgtttgggggcgtatgtgcgatctcataggaagacggccaacgatattgagtggattattactctatagcggtgcttcattaatggcattgttcagcgtccaatttgaattattactggccgccagaatgttatctgcattcggtgccgcagtaggctcggtaggaactcaaacaataatgagagattcttatcaaggaagtgaattagctcgtgtgttttctatcatgggcgtagctttagcagtaagtccggcagttggcatggtaagtggttctattttggtgtacttctggggatataaaggtgtcttttccggcttatctttacttgcggtattactatcaggttggtctgctatttgtctgcctgaaacccgcccagtgtcaatggtaacaatatcgttaatagatactttgattatcatgcttaaggatgtagcaatttggtgcaatgcgctgttaatagcgttctttaatctatgtttgtttagctattatcaattggccccattcgattttgaacggttgggactttcctctgagatgtttggttataccggattgcttttggcgctgggagccggtattggtgcctttttaaatagattcttgttgaacaaaaggtggcattcatcgaacttaatgttgcttgcttctattatcaccctgataggaggggggatgataatggttctggaagatacctggttgtttatcttgcctatggttttgattgttgtgtcttacggaattgcagtccctaatatcttggcttctgcattgattaattatacggatagattgggaacagcaggagcgctattaggcttgctttattatttgatgttaggcataggtcttgcgctagcgggttggagccaacatcttggtgttgtcttgatgtgctgtggttgttttattttattgttagttataatcaattttttcatgttaataaggactgaaaataatatatcagttacggaataagctgacgttggacggattctggattgtaagtagtcagccatcagagaagaatattggtaaattacggttaaaagagtatttaaaataaaattttatgtctgaaaaggacactaacatactctaaccaaaatggaattatagggtaaggcaataagtaacgaaaccgttctataccctatggatttcaagatgcatcgcggcggcaagggagcgaatccccgggagcatagataacgatgtgaccggggtgagagagtgcagccaacaaagaggcaacttgaaggataacgggtatatatcgctgtgagataggcaagaaagaggcttgatgcagattttaggattgccaggcaacctaataatctgcattttgttgcgtaaggcccccaaaattcggcattacttttcttggtttggcaaaaaaggcactttaccaagaggtacagcgccttttttaatgaactaactttagtgattagttcatgccatattttttcaatttcttacgcagtgtgccacggttgatgcccatcatcagggcagcacgtgtttggttgccacgggtgtattgcatcaccatgtccaacaatggctgttccacttcagccaataccagctcatacagatcattaacatcttgaccgtttaattgagcaaaatagttcttcagtgcttgtttaactgaatcacgtaaaggtttttgggttacctgatcttgtgaatttacagtagcaacggttagtacgtcagaatttacgcgttgttcgaacatagttctgtcagctcttttctttatattacgcaaaattttcgaaatatgcccccaacacctccagctgttcgctggcatcctctatggtgttgaatgtgcgccggaactggtcatcaggagcatgctcccggagataccaggatacatgcttacgtgcgatacgggctcctttgcttggaccataaaagtcgtgcaattcctgtatatgctcgttcattaaatgctgcacttcgccaatcggcatcggtgacagcagttctcctgttgccagatagtgctggatttcccggaagatccagggtcttccctgagcagcgcggcctatcatcagggcatcagccccggtgtattcaagcactgctctggctttaagcgggtcagtaatgtcgccattggcaataaccgggatggcaacagtctgcttaactgtccgaatattgtcgtactctgcctctccgttaaacaaacaggaacgagtcctgccgtggatcgccagagcttggataccacaatgctcggccaattgggcaatctttacacagtttcgttcttctggcgaccatccagtgcgaatttttagcgtaacaggaacatctactgcgtttacaacggcagaaaggatcttttcgaccaattctgggtaacgtagtaaagccgaacctgctagcttacgattcactttcttggctggacaccccatgttgatatcaatgatctgagcaccattagcgacgttgatcttcgctgccgctgccatttcatcgggatcacttccagcaatttgcacggaacgaattcccggttcgtcactgtgaaccatacgtagccgggatttgtctgtcttccagacctgagggttggaagaaagcatttccgatactgtcatacctgcacccattttgtaacatagtgaccgaaacgggcggtcagttatgccagccattggggccgcaataagacagtttttcagctggtattgtccgatacgcatagacgaagaaagagtggccatactgtgactgcaagggcgcgtatattacgcatttttcgcaaaatatgaaaggccaaactttgagcaaatcgtcatttgttacaacttttttccaacttttctgctggggtaaatataattattcataaataacatggtgttatatgttattggtaaagtttatcacttaggatttttctatcagtaagtttgctgatagcacggattaccatcaataagtgattgaagtttacactttcgattataacaaaataaaataatttcaatttgttgctatttttaccccagatatccgacaccattcttcccgttccgcaacaggatcgattacgaatttatcagtataagcctgaataacactttctgcttggttcgttaaaatacccgacaaacctaacaggccacccggttttggtaatgcaccaatcacaggggcaagttcacgcagagggcctgccaaaatattagcaattactacatcagattcaagatcggttggtgtatttttcgccaaatataacgttaaatgctccagaacgccattacgctctgcgttgtctcggctggcctgaatagcttgtgggtcgatatctatgccaatagcgtgcgttgcaccgagttttagcgccgcaattgccagtatgccggagccgcaaccaaaatcgataaccgttttaccttccagattgagactgtctagccattgcagacataacgatgtggttggatgagtacctgtaccaaaagccagcccagggtccagcataacgttgacagcatctggatcagggacgtcgcgccagcttggacagatccacaagcggttgccaaagcgcattggatggaagttatccatccattcacgttcccagtctttgtcttccaactgctcaattttatgaataaatctttcacccaactcaggaacttgttcgagctggctgataactgctttcatatctgtttcagcatcataaagcccgatgacatctgtgtctccccataaacgagtctcgcctggtaagggttcgaatacgggattatcgtggctgtcttgaaaggtgactgatactgctccattttccattagagcatctccaagggattcagcgagctgtcctgtagtatttaatcgaagttgtatccagggcataaaaaattctccttaattgaaaatagattaaaagtgaccaacttagtgtggtctgacggcttttggcggtaatcgctggccgatggcattgcccatccagaaagccaataggctaagtagcaatgatggcacgatcggatggaagcccaatagatggatattgaaactagcaagcagagtgtagcttgttgcccctgtaatcatcgaactgatagcgccataggcattggccttttcccaatacaagcccagaactaatggccagaggaatacggcctgtaagccaccgaaagccagaagattcagccagataatcatttcgggggggtgccaggcggctaaaagtagcaataaaccaagaatcagggtagaaaaactggaaatccgggctaattttttttcctgcacgatttgttgtggaaacaagtttagatagagatctttgacgatggttgcagaagattgcagcagttgtgcattaattgtggacataatggcagccatcggtgcggctagaaaaattccagcagcgaatggtggcaatacggtgatcatcaatgttggaatcacctgatcgggaatggtcagatcaggaataatcgctcgaccaagtgctcctgctaaatgcataccaaacatgaggatcgtcatgacgatggttccgatgatgatcccacggtgaacagctttgctatcgcggtaggagatgcaacgaacggcggtatgaggtaacccaattacgccgaaacagaccagtacccaaaacgatgccatgaaaggcccgttgaggatatggtctgcaccttgtgcggaaaccagctccggattaattgttcgtaatgtggtgaccgcttctgacagacctcccgccttatagataatcgctaccagcagtagaacagtgcctaacaacatgaccagtccttgtagggcatcattgaggacactcgctctaaagcctccaaatgcggtatagagagcgatagagataccgaaaatcattaatccagtaccataagggatacccgcagcagtttccagcaggcgtgcaccgccaataaactgaacggtcatcgcgccaacaaaagcgactaaaaggcttaggctggcaaaccaaaccagaaaacgactgccataacgggcatacaacatgtcattaagagtaacggcattatagcgacgagcgagaatggcaaattttttacctaacacacccagggaaagccatattgccggcaactgaatcagcgacagtaatacccatcccagaccatatttataggctgctcctggcccgccgatgaatgagctggcactgatataggtggcagtaatggtcattgccaatacaaagccgcccattgaacggttgccaaggaaatattcggtcaggaaggggcctttctggtggcgttgataagcgtaaactgacaggagaaataccagtgcaagatagccaagcagaggtaagataacttcactttgcattctcatcctccagcgggacttctttgaaaataaacttcaccattaaccagcagaggatgatgaatacaactggtagtaacaaacatgccatttcaaaccagcgaggtaagccggtgacaccgggagcattgctgggtaaataggctgtcaatagccagccaataaggtaagcaagcgttaggaacacagcccaaagtgcttctttatgggattgaacaaatcgtctgtccattcgttcttccggtaattaaataaattaggatgggaagggaaggattgtacggcaagatgcgaattcattcaggaaatatttaagccgcagagtcaacgtcttcaaaggtattgacgttaactacggtataatcgcgaccgttaatttgactgatgacaacaggcgctgctccgtactgacgaatgatgtccagacagcattgtgcttggtacaaaaagggcaagtacatgttcgtgctggaatttcaaaatgatttttttagtattatatgttgtgttttgtgttttttttattcatttttgaacttaaattctatgtttttttgtttgctaaaagtgatgttggtgttactatttttttaattaatatttacatgaatttatttttgtaaaagttaattattaaagaagttgtgtaaaagtatctcaatacttggagggggtatttatagagtaaaaaattattaatctaaagcatgggtgggattttgtctttatgttgttataaagagttcttaattcttgcagcacaagataatatgcaaagtaatttgttgttcttacatgcaaggtattggttttttcattaaataagtgattgtgtgcatttaatgtaaatttaactggtacatgacttttattttatacggaatttattcagggataatatttattatattgattggttatggtccatgaaaaataaatctttattatttatcgttttaatggcttttctttctatgggggggttggtttcatcggatatatttctacccgccttgagtaagatgggaaactattatcacgttagcgaatctagtatacaaagtacaataactatatttctatttggtatagccttttctcaacttatttatgggccattaagtgattgtttaggaagaaaaacggttcttatttctgggatgattatatggttgatttcaacaatcggtattttttacagtacacatattagtgagttactattattgcgtttatttcagggaataggcgcttgtgctggtattacattaagtcgtgccattattagtgatctgatggagaaagaagaggcagccaatttgtatctgattattttcccttttgtgggaatgtcacccgctatcgcacccatgatcggcggtatgttaagtgaatattatggctggagatcctgttttttatttcttactttatttataacagtcacgcttatattgtgcttgctagttctgaaagaatcactaccaataaataaacgccaaaaattaagtattaaaaatgtattggttagtacttaccaagtgataataaataaagaatttctttactatgcagcaataccttgcttcgcttatacggcatatttttcttatttgattgaatctccatttattcttaccgctatgggattaccagaaaaatatgttggttacacctatataatgctctctttaagttatgtgttgggtaatcttattgctaaaaaattaagtcgtcgtcagggcgtgagaaagacaatttctcatggttatctcatctttgttgttggaggtattgctttcacgatacaaatgttttttagttcctacccattgataacttctgtgctaacaatatcagtattgactttcggtaatggttttttattgccactaggtactgcatcggcaattgccacgcattctcaagcggctgggacagcttccggcgtaatgggaacattgcaattaggtagtgcaggactggcatcattgtttattggttatatatctcaccatgaacctattaaagtggcatctatcatcacagttgtttctttggtcggtagtattatttatataacgggtaatagaggcggtaaagaaaataagtaagtaaaaacaaataatagaaactaaaataggaatgaaaaatggttaataatatagatgtcacattacgtgatggtggatacctgaataattttaattttacaacagaatacgctataaagcatgttgaagcgttgactaaaagtggcgtggaatggtttgaaatcggttatcgcaatggttctttcaaccgtcattccgcaccgtatttctgatttaaaaataatgtgatcttacacaggttttttgtattgatgacatcggtggggttgacggtaatcgccaattttgatctattacttttatttgccggaaagcgaatatgtccacacctatacctgccattaaacgtctcgatcatcttggccttatcgccgctttttgtcatgaagccggtttaccccgcatgattgatgccattatcccaaaatattcatcgcatactgtctctcacggcgacgcttttctggcgatgatccttaacgggctggggtttcacagccggacattgcacatgttttccggcttttttcaacataagccgattgcgcgtttaattggtgctgacattgaagctgaacaccttaatgatgatgtgctcggccgtacactggatgccttatatgaagcgggggtgtcggaagtttatcaggtgcttgctgagcaagtggttgataaattagggttaaatcccgattccgttcatttggatatcacgagttttcatgtcgatggtgactatgacagcgcattgggagatgacacaaaacgtattgcactggtgccgggttatagccgggatcaccggcctgaactgaaccaggttgtccttgaactgatttgcgaaaatcaggcaggtatccctgtctatatgcaggctatgagcgggaatacgaatgatgccaaagcctttgcccagacgatcaaaacccatattcaatgcctgaaagcagcacaaaacagccgctactttgtggccgatgccgccctttatactgaagccgcgatcgcttcgcttcatcagcaaaaacaacgatttattacgcgtgttcccctgacgatcaaggaagctaaacagtctctcctgaacgtgacagcggagcaattcagccccatcagtgagggctattcaggctgctgggtgacgtcatcatatggcggcgttcctcagcgttggttactggtgaacagtacggcggcagaaaaacgtgaaaaccagactttccggaaaaacacactcagggaaacagaaaacgagtctaaacagttcgacaaactgggcaaaaagccctttgcctgccgggaggatgccttacaggcactgcatgattttgagtctcaatgccagtttatcggcatcgcctcgccggaaattcaggcgattaccgcgtatgcggggcgcgggaaacccggcaagcatcaaccccccaaatcggttcattatcaattagccggtcaggcttatacccggttagacaaggtgaagcaggccagattgcgggtcgggaggtttattttagcgaccaatgaacgggatgaaggacggcttgatatggcggcgttactggctaattataaggcacaacaaaaggtggagcggggttttcgcttcctgaaaagtccggaattcctgacgtctgccattttcctgaaaaaaccggagcggatagaagcgctgttaatggtgatgacatgttgtctcatggtttatgcggcgctggaacataaaattcgccatgaattgaaacaaaatgtgccgtttttccccgatatgaagaacaaaccgacacaatcccccaccgcgcgttgggtatttctggcctttgaagggatcagcacctttgaatttcaagaacataaaatggtgacaggaatgcaatcttaccaccatgagcttttgagtttattaggtgcacaatataaagcggtttattcctgaattaggtgcggaatgaaggtttcaaacctatctctaatattggcctaacaggtatgtctccggatagttatatccgagatattcatcaatcggtacctgaggcaagattggtagtcattgctcatcctcacaatatcaatgctgatgatatttatgcaatgaagatgaatggcgttagtttgcttaggttatgtattaaagctgataacccgcagccatgcttagggttgtgcgagattgctcgaactactggaatggctgtgggtattaattttacacgagtgagtcagctctctatcagtaaaattattgaagttgccaaacagtgtgaacaagcgggtgctgatattatttacctggcggattcaaatggtagtttgctccctgaacaggtagcgcagatgttttataggttaaagtctgccacgcaattgcaattgggattccatcctcatgataatttgggtcttgccacagcgaacagtattgaagctatgagagctggagtcaattttattgatagttctctatcagggatgggaaaaggtgccggaaatctcaatttggaaagctggctatcatttctcaatctgagccaaaatagtaaacaatatgaccttgaacgagtatttaatcaactcaatgaactgcaatcccattgtttttttgccgcctccaggcgcgatcttatcgatataatgatgggtatgtacaatttgagtgtggagaataaaacagctctcgaagaagggttacgaaatggtattaattatgcgtttcaggttgttaaatctttgcgaggagcaacgacatgatacagcataataaccatgctggatgtttcagccttgaagcggtaattctcgcacctgtgatgccgttttgggatcatggcgatttttgcactccattgcgcatattattacagaaaatgggatatcaggtgtctattattgatacattatccttaattaattcatctgatcctgactacgctattaatattattgaatctgaacttaatcaacgttttttccagccttatttgcttatcggttttgcgatgtcaggtactctggcgcaattgcttgcgtcgcgcctgaaaaacctcacgggagtaatctcagtgagtggtcctgggtatgctgattcgttactgactaataagctggaacaattaatagcattactgaatagaaatcagctagatgaagcgatttctgtgttacatgactttgttattcctgaaggtgggactccacttcctaaaatgcctgcgatacctggtcatttaagaaatactgctcgggaacgtatgatagtgggattttcactgttgctacaactggatgccagagcaatattgtgcaattacaaaggaaaatttctgagcatagttggcggacgttcgcaattagccacagaatgtaatcaggtggtcaatactaatcctacgcactgttttgttgtcgtggatggagcaggaatgcggccttgggaagataagccgttatttattaacaatgtaattaacgattggctaaaaatcttatgaataaaaaaattcttattttacctggtgatggtattggtcaggaagtatgcgatgccgctcttcccgtttttcaggctctaaatcttcctgtgacattggaaattggggatattggttggacttgttgggaaagagaaggtaacccagtgcctgccaatacttgggaaaaaatagcttcagtagatgcggtgttactcggcgctattactagtaaaggtaaagaagaagcacaacaagcgttgccaccgcatctgcgtgtgaaaacgagaaattatgtgtcacctgttatccaattacgccagcgtttgggattatatgcaaatatccgcccagtacgttatgtagaaggggaccgtaaaccatttcgctgttgtgttatcagggaaaacagcgaaggactatatgcagggttcgattttaaaggaattcccgctacggcaacgacttggttacagcacccaaatatagataaatatggtcctgaagaagctgcatggacagtccgtctacaaacccgttttggtttagaacgtttgtttatcactgcatttgagtatgcaaaggaaaataactactcccgtgtaacctttgcggataaaccaaatgtaatgagggaaagtgggcactttgcaaaaggtattttcgataccgttgcggcaggttaccctgaaataaaagcggatatccacaatgtagatgcaatagctttatggatggtaaaaaaaccgcatgaatttggtgtcattgtctctgagaatatgttcggtgatattttgtctgatttggcagcgggcgtaatgggaggtcttggtttagcgcctagcgctaatattggtagtgatattgcatactttgaacctgtacacggtagtgcgcctggtatggcaggtaaaaataaagccaatccggcagcgatgttttacacaatagcattactactggaacatcttggctttgctgatgcagcacagcaaattaactgtgcagtagataatgtgatacgtgaaggacgaactgttacttatgatctgggtggtagcgcaacaacccaacaaatggcgcaggctattattagtactctaagtaaaaaatgcactagctattctgcatcggttattactgttggtgatgagctcctgagtggaaaatatcctaatactaatcttcaggatattagtgaatatctcacggagcagggatataaagtgaagcaacatcaggtttgcgctgatgatattaaccagattgctaccgcagtggttcgtaggctagggcaggatactctcattgttgtgtgtggcggtcttggcccgacactggatgataaaactcgtgaggcgatagcaaaagtggcaggtagtcctttggaaatacgtgataacgtctgggtggaaatacagaaacaattggaaaaactgggagtatattgtgatcactctaatcgattccaagccatgtttccgtctggagcaaaggttattcccaatgttacaggtacagcacctggcttcagtcttaatgttgatagtagcaaaatagttgtgttgccaggacctccgtcccaaatgcgattaatgttgtcggaagaacattctatccctccagtagctggcatgagagagcgaaactaccattggacactaatcggcgttagtgaaagtaaagtcggtacgatggtgaacgcattctttgatggtgttgagtgtgatattcactatctgtggaaagcgccttatgtagtagtacaagttattactcctgctgatgcccctctttccgtacggcaattggttaattttggtgccatgtttgaaaacaaattggttagtgattgccagatgactgctatggaaaaactcagtgagcaataccgtattaactggttcacagatgatgatgaattaaatacatatctacacacaacatatgcagtaaataatccttcaaagtctctttcggtgaatattactgcgtttccttctataagttcatttttgtctggtgaagaaatgcttgggcagatgaccctgacaaccatagatgatgaaggacgacaacattcggtggattttccatgtaataaattgctactgcaacaatctataccagaatatgccgcttggagtgtcctgtgcgcacgtgcatcgaaagaggaaatgtaatgcaaactacacaaattgatcaaattaaaaagcgtttaatggagcttgacagcgcggccatatcggatgcaatggatagtttgcatattcctgctggactggctggaattatgccacgtagtaatgtcgggattaaaatggctggacccgcttttactgtacgttatgaacctatcattccggaacagggcaagtttcttaatgctggaaactacattgatgaagtacctgctggatatgtaatagtggttgataatcaggggcgtacggattgtaccagttggggtaatatcttaacttttaaagctgtacaaaaaggaatcgcaggctctgtaatttatgggtcagccagagacttgtctgaggttcgcagattggaatatcccttatttacgacgggggtttatatggtatccggaaagaatcgtgccaaggttgctgcaacacaatgcactttagatattggcggtgtagttatatctccaggagattggatttttgctgatgataatggtgcgttagccatcccgcagcagtatttgctcaccgttattgagcgtgcggaaaatgttgacaaaactgaacaagctattattgaggctataactaacggagaagatctggttaacgcccgcgaaaaactgggatatgccgtaccttggaaaactgtgcaatgagtcagatgtttatagaatactgggagagaaaacttcgttttctggatgtacattatcatgctcgccccgatagttacattcggaggtacaatgtgcttgaagctggaagggaatatgtccgacatggtggtggagttgtacttaaaaaccatttggggagtgttactgcttcgtcgtcactggctcaggaagcaggacttccggtttttggttcggtagtattgaatgcaacctctggagggctggcaattaactctgttatccagtcactgagtcagtaccagttctgtaaagttccgcggttgctggttcatctgccgactattgtccctacaagccataaaagtgtaatgaaacgtacttgggcaaatgctttcgcacaaactttagcacagcaacctttgtctgttgtcgatagcaatgggcggttgcataacgagatccatgagttaattagttttgcgcagcagcataatgttgtgttgtcatcaggccatgcttcacgttatgaagttacgcaacttattgatgcgattaccgctgctggtggttgtaagttcatgctgaaccaacctgccagtcctatgacaggattaaaagcaaaagatcttaaggcgttgggtaaacatgattggctttatgtggagcaaacggcattaactgtttatcttggttatcagacaactgaggatttttttgaagtgttatcggaggtgaataatgttgtctatagctccgatcttggacagccagttcagccagatgttaagcaatggttgaacgatagtgaacgctggtttaaaaccgctggccttggtgaagaacacatccgagatatctgtttactgaatccactgcggatgttggctccggattagatattagattcatcgactgagaagacgataattatccgttgttggttgaatatggaaagttgcaacaaagatctatgaaactagctgaaattatttgactacaacaccactagaacataatcatgctcgcgctttcaaaaacgatatagcaatatccaaatcatttgtgaaattgacgggcaatggtttttataaagaggaacggtttaatcgaattgtagaaaagccatattattggcgagttaaaatagtgtaaagccagtttaaattacaggctccactttgagttttatcatgagcaggttttaaactgttatttaaagtcactgttttaatttaggattttaatcagtatagtgttttgacggtttgtgatcactacacttttaccacttgatttttattaagtttaatcactataggatatcttattttacgttaaaccaacgttaatcataccctttattgatgctgttttaccggcaattctgagtcgttttaataaatcactacccttgatgttttttcagatcatccccctttttttcagggtgttaatcctgccagattaatcgttttatccattcttttattgcgttgtttttatggttttcttcataaaataacgatgataaagcgcgttaatacccatctgttcggataatattcttttgcatgctgatttcttttcgactttctattcatggttgatggcttcgattaaatataattaactctccttttgaaaagttgcatgtatttagttaaatccgcctccgccttttatataaaagctttaatatctctgtattttcgcttttaaatggtcatgacagatttggtaattgatggataactgagttaatcatctttaatgcttttatacccgtcatctttcaagttgcctctttgttggctgcactcgctcaccccggtcacatagttacctatgctcccggggattcactcccttgccgtcgcgatgcatcttgaaatccatagggtatatacctgtgctcattgaaactgcttgattttcgcccaaatgaagctcatggtatcagtcatgaaaatattcattaccgatgaacaaaaagccgaacttgaacacctccatcacacctgccgtgataagagagagtgtgatcgcatcaaagcggtcctgctggcctctgagggctggagttcagtgatgatcgctcaggccctgcgtcttcatgaaacgaccgttaatcgtcatatcagtgattaccttaatcaccgcaaaatcaagcccgaaaatggcggctctcagagccatctcagcgaaacacagactcaggaacttatcgcttatctgaccgcgaatcttctgcccaccacacaggctgttatccgccttgtcaaagaagcgtgggatatcagttacactgttcccggcatgaataaatggctgcaccataatggatttagttataaaaaaccgaccggcgtgccacacaagttcaacgcggagcagcaacgggcctttatggaaacctacgggaaactcaagcaggaagccggagaccatgagcctatcctgttcattgatggcgtccatcccacgcaagggacgaaactggcttatggctggatgcgaaaagggcagaaaaccgcagtgaaaaccacgggaagccgtacccgtctgaacctgatgggggccctgaatctggccgatattagcaaaacggtagtacgcgagtatgaccgtatcgacagttatcacatcgccgagttcttcattgccatccgtgagacctatccggtcagtcagaaggttcatattatccttgacggagctggttaccaccgaagcaggcaggtgaaagactgggcttatgtgatgaatattgagcttcattacttgccgccatacagcccgaatctgaacccgatagaaaggctgtggaaggtgatgaatgaacaggtcaggaataaccattatttcgccttgacggccttattcaggcaggcaatacatcgtttttttacggaaatattaccggaacttgccgggaacctgtcgtgctgtattaatgacaacttccaggttatgaatcctgcatcttcaagttaagcgggtataaacgtttttgttcttttttccatgtttaatctaaaagcttctcagctttttttaacgattatcttcatttttggaaaacgtctttcagtcatgcaaaatcttttgtttgagaaaattttcttaatgcggttaatagatttaaaagccatttttcctgatgttttctcttctaatatcagtatagtaccgagtttttttacctgctttaaaaaatctttaatcactttcggttttacctttaatgactaacgtttttaccggttttttcgtgatgcgcttgccctttttccagattttaaaaccatactgattttacctcaaggtgggttttaacgtggtggtaaattccgtttggagaacagaacttgattaaaacaaagtgtcggctaaaaagccgcactttgtcagcaatccgaaggagcgtttaagcgctccttcaaaggtattgatgctattaaacgggttttaagtttcctgtaaccccagttttttctccagatagtggatattagtaccgccattctgaaagttttcatcattcattatcgcctgttgaagctcgatatttgtcttgatgccatcaatgatcaattctgccaatgcatttttcatgcgggcaatggcattgtcacgattttcaccgtaagtaatcagcttaccaatcattgaatcatagtaagggggaacggtgtagccagcataaatatgcgattcccaacgcacaccaaatccacccggcgagtggaagcgggtaattttacctgggcttggcaggaatgtgttcggatcttcggcattgatacgacattcaatagcgtgaccacgaataacaacatctttctgcttaattgaaagtggcatacctgcggcaatccgcaactgctctttaatcagatcaacaccggtaatcatttccgtaactggatgttcaacctgaatacgggtattcatctcaatgaaatagaattcaccgttttcatacaggaattcgaaagtaccggcaccacgatagccaatttcgatacatgcgttagcacagcgttcaccaatactgcgacgcatttctggcgtgattcctggtgcaggggcttcttcgacaactttctggtgacggcgttgcatggagcaatcacgctcagccagataaattgcttgaccttggccgtcagccaatacttggatctcaatatgacgtggattctcaaggaatttttccatgtaaaccatatcgttattgaaagcagcttttgcttccgcacgggtcatattgattgattgttccagatctttatcactgcggacgacgcgcataccgcgaccgccgccgccgccggatgctttgatgatgacaggatagccaatgcgtttagcgaaggctttgtttttctccgtgtcatcagacaatgggccatcagagccaggtacacaaggaacgcctgcttttttcatcgcattgatagcagaaactttatcacccatcaggcggatcgtttctgcttttgggccgataaaaataaagccagaacgctcaacctgttcagcaaaatctgcattttcagatagaaaaccgtagccagggtgaatagccacagcacccgtgatttctgccgcagaaataattgccgggatattcaggtagctttttgcagaagctgccgggccaatacagatagtttcgtctgccagcagtacgtgttttaagtcacgatccgcggaggaatgtaccgcaacggttttgatccccaactctttacaagctcgtaggatacgcagggcaatttcaccacggttagcaattacaattttatcaagcatgggaacgcctcgttattcgatgacgactaatggctcgtcaaattcaacgggttgaccgctttccacaagaatctttttaaccacacctgctttgtcggcttcgatctgattcatcattttcattgcttcaacgatgcatagggtgtcacccacattgacacgctggccgatttcgataaatggtttcgcatctgggctaggtgtacgatagaaggtacctaccattggggaacgaacaacgtgaccgtcgattgcagccgatctgctgctgatcgcttctggtagagcttgagaaggcgcaacaacattagccagcgcaggttgttgtgcttgaacgggaatatattgttgagctgccggaaaactctggggagctaatgcgcggctgatgcgcactgactcttccccttcagaaatttccagttcagaaatgccagattcttcaaccagctcgatcagtttttttatcttacgaatatccatgagtgtgattccgtactcttctgtttcatttagttgaattttgacaagcggtttaccgctgcctgtaatgcaaagctatagccatctactcctaaaccgcagattacaccaacagcaagatctgaaaggtatgagtgatgacgaaatggctcgcgcgcgtgaacattggagaggtggatctcaataaatgggatctttactgtcagcaatgcatcacgcagtgccacgctggtatgcgtgaatgcagcagggttaatcaagataaaatcagtattaccctgtgcagaatgaattctatttatcagctcaaattctgcgttggattgcagatggctgaatttaacccctgattgatgggcttcttcagacaatttgctgacgatatcatcaagcgttaagctgccatagatatcaggttcccgggttcctaacatattcaagttagggccgttaaggagtaaaatgtgaaactttcctgccattgtgctggtatctccggcaatttgtcaacaactgccccaacataatcctatattaacgagttgtcatctttttataacagccacaagttcatttcggcgacaaagcgcgacattataatgatatcgtagcatttagcagctaaatactggtcttatcagaaaaaatgtcaagaataaaaccactgtactttagaggctaatcacaattcttaacgaactcttaccaatgtacgtcctgtaacctggttagctatcaatttattggcgtattccacggtttgttccagcgttatctctgtggttgcttgctgataaaaagaagcgggtaatagcttttgcaggcgttgccacacggcggggcgtttgactgatggaacagtgacggactctatgccttgcagacgtacgttacgtaaaataaatggcatcactgttgttggcagatttgcattaccggcgaggccacaggcggcaacagtaccgttatagtgagtttgggccagtattgttgccaatacattaccgcctacagtgtcaatggctccggcccaaagttgtttttccaatgggcgaggcggttggctaaattcatggcgtggcaaaaccttttttgcccctagggataacaaatattcatgattttcttgtctaccgctaacggcaacaacggaatagccaagttgtgagagtagtgctatcgccgtacttcctacaccaccactggcacctgtcacaataacatcaccactttctggcttaacatcaccttgttccagggcgataacgcacagcattgcggtaaagccagcagtaccaatgatcattgcttgtctgctatccaaaccggcaggtaaaggtgtcaaccattcgccagaaactctggcttgttctgccagtccaccccaatgattttctcctaccccccagccggttaataatacatgctgaccgatatgaaaacggggatcttcggtactgtgtacaataccagagaaatcaatacccggtatcattgggaattggcggacaattttccctttacctgtgatggctaatgcatctttatagttcagggttgaccagtgaatatcgacggtaacgtctcctacgggaagatgagaagcatcaacttcttctatggacgttgataattgattctgttgttgcttaagtaacaaggctttcattatcgttctgttctctgtaattgattttgtcattaaataaggatagataaaaatgggtaatttacataaggtatataagaaaaaataaagtgttggtggattataaaacagaatttattcgcatttttacctgtagtctcgttgtcatattccagtttagttgcatatggcgctctatttcagaaaattctgttttttattattttttagcagaaagtattgtattttagtcgcagtttattacatcattaatttgctcactacacagactacatacttgtagttaagtgttggtcatcgtgagcagaggcatgggtctgatgtgaacttaccggaataactactggtcaaaaagcggtaattggtaaaattaacccatttttatgcagtttttttctgctccgtttgggagaagtaacgtagaatatcacgttgttgatatgaataacgtagccacttttttattgaagcaggtgcttgtgcgccttgtcgctgcttcatgtggttggtagagtagacgggtttcgttccgtccccagcttgcaggattatcctttcgctatgtttaaaaaatttcgtggcatgttttccaacgacttgtctattgacttgggtaccgccaatacccttatttacgtcaaaggtcagggtattgtattgaatgaaccttctgtcgtcgcaatccgtcaggatcgtgcaggttcatcgaaaagtgttgctgccgttgggcaagaagcaaagcaaatgctgggtcgaacaccgggtaatattgctgcaattcgtccgatgaaagatggggtgattgccgatttttatgttacagagaagatgctgcaacactttattaagcaagttcatagcaacagtttcatgcgtccaagcccgcgagttttggtttgtgtaccggttggtgcaacgcaagttgagcgtcgggcaatccgtgaatctgcactcagtgctggcgctcgtgaagtgtttttgattgaagaacctatggctgcggcgattggtgctggcttacctgtttctgaagccacgggctcaatggttgtggatattggtggtggcactacggaagtggcggttatctctttgaacggggttgtttattcatcttctgtacgtatcggtggtgatcgctttgatgaggctattatcaattacgttcgtcgtaattatggttcactgattggtgaagcaacggctgagcgtattaagcacacgatcggttctgcttatcctggtgatgagatgctggagattgaagttcgtggtcgtaacttggctgaaggtgtgccacgtggctttacgcttaactccaatgaaattcttgaagctctgcaagagcctttaacgggtattgtcagtgctgtcatggtcgctcttgagcagtgtccaccagaattggcttccgatatttcagaacgaggtatgatcttaaccggaggtggtgcattattgcgcaatcttgaccgtttactgatagaggaaactggtattccggtcattgttgcggaagatccattgacgtgtgttgctcgtggtggcgggaaagcacttgaaatgatcgacatgcatggcggtgaactcttcagcgaggagtgagtgttaacttgcaagtgagggggggaatgacgggcagctcagacctccttgcgattgctgtctgggaattccattgtttatgaaacagtacagtttggaatagcgcagcttatgaagccaatttttagcagagggccttccctgcaattacgacttttctttgctgttattgttgccattgctttggttgtggcagacagccgccttgatgctctcagtaaagtccgtaattatatggatacggtagtcagtccattttattttctcgccaatggcccgcgtcaagtgcttgatggtgtgtcagaaacccttgcttcccgtgaacaacttcgattggaaaatcgtgctttacgccaagaattattgatgaaaaatagcgatatgctgttgttaggccaacttaagcaagaaaattcccgcttgcgtgagctattgggatcacctttacgtcaggatgaacacatgatggtgacgcaggtgatctccggtagggctaatccttatagtgatcaggtcgtcatcgataagggatcaagagaaggtgtttatgaagggcaacctgttatcagtgataaaggcattgttggtcaggttgttgctgtcagtcagtttactagccgggtattactgatttgtgatacgactcatgctttaccaatccaggtcttacgtaatgatatcagggctattattgctggtgcaggttgtactgatgatttgcagtttgagttattaccaagcaacacagatattcgggttggggatgtgttggtgacttctgggttaggggggcgtttcccggaaggttatccggttgctgtggtttcgtcagttaaagtcgataatcaacgggcttatactgtgattcatgctcggccaacggcagaattacagcgtttgcgttatttgttgttgttgtggggggcggataataatccatctgaaccattgccgccatcagaggtttatcgtgtagccaacgaacgtttaatgcaaatgatgcctcaggtattgccacatgcaaatgaaatggggccaccagcaccatcgtctgtttctgatgaagcaaccaagacaacagaaagagtaaaagatgctgaatcgacaataacgtcggctaaatttataaattcgggaaatcgttaatgaatcaataccggagtcatgggcgttggatcatttggttatctttcttgattgcaatggtgctgcaaattatgccgtggccggagcaaatttatatgtatcggccaacttggtcggcactattgttgatttattgggtgatggcgttaccgcatagagtcagtgttggtaccggttttatattggggatcatcgtagatttgattcagggagcgacactgggtgttaacgctttggcttacagccttgtgagttatttggtgtcatttaagtttcaattatttcgcaatatggcactttggcagcaggctttggttgtcgttgctttatcggtactgatggatttcagcgttttttgggcagaatttttgttatcaaatgttgcttttcatccagaagtgttctggaacagtttggtcaatggtattctttggccgtggttgttcctgttaatgcgaaaaatccgtcgtcagtttaatgtacattagtggtcggattgctgtttttaatgtcctgacagagcttattccagcaggcgttactgatgcaggccattctttccaaataacttgaggatatgagtagtgtatataacctcaaaatggcaaatgaaatagcctaatgagataggtagtagtaaggacgatatcatcatgaaaaccctttatctggcttccggctcaccaaggcggcgtgagctggttgaattattggactttaaatttgaaattctttctcctcaggtaaaggagcaacggcaagagggtgaaactccgcgtcagtatgtcagccgattagcaaaagataaatctctagcgggagtggctattgcaccggaggattttctggtgttgggagcggatactgttgttgtattgaatggtaaggttctagaaaaaccacgtagcgagcaacatgccgttgcaatgctcagtgcactttccggtcagagtcatcaggtgattacagctattgctatatcagatagtcagcgtactttaagtgatatagttattacagatgtaacctttcgccaattatccacacaggaaattttggattatgtagcaaccggtgagccgatggacaaagcgggggcttatggtattcagggaaaagcgggttgctttgttaaaacgctgaatggtagttatcactcagttgttggtttgccattggtggaaacacacgaattaatcacaaagttttttgcgttagttgatgggaaggggaactcatgacagcagagttattagtcaatatcacaccatccgaaacgcgcgttgcctacattgatggtgggattttgcaagaaatccatatagaaagggaagccaaaaggggaattgtcggcaatatttataaaggtcgtgtaagtcgggtattaccaggaatgcaggctgcttttgttgatattgggctggaaaaagccgcctttcttcatgcctcagatattgtgcctcatacggaatgtattgccggtgaggagcaaaagaactttcatgttaaagatattgctgagttggttcgccagggacaagatttaatggttcaagtagtgaaagatccccttggcaccaaaggtgctcggctaacgactgatattaccttaccttcccgctatcttgtatttatgcccggcgcatctcatgtcggggtttcacaacgtattgaaagtgaagaagagcgtaatcgcctgaaaaatattgttgctgactattgtgatgaacatggtggtttcattattcggacggctgccgagggcgttggcgacgaagaattagctcaggatgcggctttcttgaaacgattgtggagtaaggtgatggagcgtaaaaagcgcaatgtcactaaaaataaactttatggcgaattggctttggctcatcgtattttgcgtgatttcgctggagcagcccttgatcgtattcgtgtggattctcgtttgacctttactcagttacaggaatttattcgcgaatatattcctaaaatgacagccagattggaactttataacggtaatcagcctattttcgatctgtttgatgtagaaaatgaaattcagcgagcactcgatcgcaaagttgaattaaaatcaggtggttatttgattattgaccaaactgaagcgatgaccacaattgatattaatactggtgcatttgtcggccatcgcaatttggaagaaactatttttaataccaatattgaagcgacgcaagctattgccagacaattaaggctgcgtaatctagggggtattattattatcgattttatcgatatgaatagcgaggaacaccgccgacgggtattggcttctcttgagcaggtgctgagtaaagatcgtgttaaaaccacgattaatggtttttcacaactcggactggtggaaatgactcgtaagcggactcgtgaaagtatcgagcatatactttgcggcgattgccctacttgtaaaggaaggggaaccgtgaaatctgttgaaactgtctgttatgagattatgcgtgaaatcgtgcgtgtgcaccgggccgttgacgcagatcgtttccttatttatgcctcacccgcagtgtccgaagcgctgaaaggggaggaatctcatgcactggcggaagtggagatttttgtcggtaagcaggtaaaagttcagacagaacagctctacagtcaggaacaatttgacgtagttatgatgtaaccatctgatttgctgacataacagcattggtaaccaaggagatgcgtgtgaggcgactgccgggagtattattagcgacagccgcaatagtcattatcattgtggctttgcttgttagtggattacgttttatcctgccacatattaatgattaccgcccacaattattcgctaaaattgagtcaattattggtgtacctattgatgctggatatattgcgggagaatgggaatctttcgggcctgtttttgaattacgtgatatcagtgtaaaaaccgcaaatgcagatgtgaaagccaaaaagatcacggttgcattggatatctggttatctttactaagaatgcgttggaatttccgcgatcttactttttatcagttacaagtagattactatcaaccgctgtttaatgatcaaaacggtaatatgttttcccaatcggatctattttctgatctgtttctggagcagtttgatcattttaatctgcaagatagccgttttactttccttactccttctggtgaacgggctgatcttctattaccacaattaacctggctgaataaagataatcgtcaccgagctcaagggaaaattagcctctcttcgatcaataatcagcatggggatatacaagttaaatttgatttgcatgacactaatggcgtattggataacggtactatttatttacaggcagataatgttgatgttcatccgtggttaagccattggttgcaggataatactgggctgaaggatgctgagtttagtttgtctagttggattatgctgaaagatggtcggattgatggtggtcaactgcaactccgtcagggaaaagctaattggaaagttgctaacaaatcccacaacctttctgtcagtgatctggtgttacggatgcgtcgccaagatggtggttggttgtttgatgcacctgaattggcaaatttaatcactgatggtcagcaatggccgtcaggaaaagtatctgtgctctatttgccggaagccaagagagttgatggtcatgatcattggcgtgtccgggcaaaaaacattcaacttgaacggctaagtagcattttaccgactttttcttttttgacccctgatattgtgaaggattggcagcatcgtcagccacaaggattggtaaagtatcttgccctcgatattacacctaaaatggcagatgattcccgaatcagtatgcaatggcagaatgtcagttggcagcgttggcaggaattgccttctattgataatttttctggtgcttttaatggcagcttgcggcaaggcaaactgagttttacattgaagaatagtgtcgttgattatcgagatatgtttctggcaccgtttgagatatcccaaagtcatggcgaaatactctggcggcaaggtaggcgaggtttacaactttggagtcaaggattggatttgcaggcgaaatcattgtgggtcaatggtgattttcgttatcaacagcctaaagaacagcctccggcgctaagtattctggcgggagtacgggtttatgacgcaggtgatgcctggagatattttccagaacctttgatggggacaccactgactgactatctaacagcttcaattattaaagggcagatagaaaacgcgacttttgtttttcaaggcaatccaaaagatttcccatttgcaaagaataatggccagtttcaagtttttgctccattgcgtcatgcgacttttcagtaccaaccaaactggccggcactgctggatttcaatattgatcttaatttccagaataacggtctatggatgtttgctccgcaaacggcacttggtgaagtgaaagcgagtaatctttcagcagtaattcctaattatcgtagcaagaaattattaatcgacgctgatcttttgggagatggcaaagatattcatgaatattttacccgtagcccgttagcaaattctgttggtgaaacgctggatatattgcaggttggtggtcagattgcgggtaatttgcatttggatattccactcaatggtggcaatgtggatgcccgtggcgaggtgactttaaaaaataatcacttgttgattaagcctctagatagcgaaatgaaaaatgtgagtggccggtttcgctttgataatggtaatttacaaagcggaaaattatcggcccaatggcttgggcagcctgttacagttgatttttctactaaaagtttacccaaaaactaccgagtcgatgttggtctgaatgcgcgttgggctgtggcaaaattatctaaattttcaccagcgattgctaaagcgttttctggctctgttgattgggaagggaaggtcggtgtcagtttgccgtttcagggcaagcctcaatatgatatgaaaatcgacgttgatttatcacaagtggatagttatttatctgtcctgaaagcggatgaaccgcgtgctcttcatattctggctgatggtgatatggagcagttgcaagtaaaaggcactttggataaacagtatgcatttaatactcaatggcgtctggcagggaaaagcactcaactgtcacgtggaattttacaaggcagcgataaaattcctgaattgcctgaaaaatccctattggaattgaatcttccggcagttgagggggaagagtggttagggttgattgcgcctctgacttctggttcttcattggcaggtatgtcaatgttgccacagcatctgcatatatcacttccatcattggatgcggggggacaacgttggaatcagttatcgttggatgtggaaaaacagctttggggaacgcagatcacggctaatagtcgggaaatcaacggtaaacttaatatccgtaatagtggctcttggcaaatgaatttgagccatctgtactatagtcctctgcaacatagctctcagcaagctgaatcggatttacctaagcaatctcagacaggcacaactctgcgttattcgttgaaccaatggccttcattagacatcatctgttctgaatgttggattatgggattgaaacttgggaaggtgtctggctccctgattccagaaggtaattcgctggtattaagagatggaatagtagaaaacagtgtcagtaaattaactttggcaggtcgttggcaagaaggggctgtagggaataatactcgtattatggggcaattttctggtgaaaagtttgatgagatggcatcttaccttggtatagttgtaccgattgttaattcaccgtttaccttcggttttgattttaattggtgggatacaccgtggaaacccaattttcagacgctgaatggcaatcttaagagtgacttaggcaaaggtgctattgaaaaattgggtgggggaagtgctagccaattactaaaattagtcagttttgatgctttgttacgtaaattacagctcgatttcagcgatacctttagccaggattttgaatttgattcaattcgtggtgatgtttcagtaaaaaatgggatactcaagactgaaaatttacgagtcgatgggttgattgcggatgtaataacgaaaggtgagatcgatcttgttcgccaacagatcaatatagaagccatcgtcacgccggagatttctgctactgtgggagtagcgacggcttttgtcatcaatccgatggcaggtgctgcattattcgcagcgaccaaggttttggggccgttatggaataagatatccgttattcgttaccggattactggtaatcttgaacaaccgaaaattgatgaagttctgcgtcagcttaaggagaatagaggaacatgagaaacgttaatgttgcactcttgcagttatgtagcggtgagaatatcaaacataatttggcgcaaattgaacaacaaattaagcagttgccggatactatcaagtttgtcatgaccccggaaaatgcattgttgtttgctaatgctgatagctatcgtaggcatgcagaacagcaggggcatgggcctttgcagcaagctgtcagtgagattgctcgccgttatggtgtttggttattaatcggttctatgccgcttatcagtcgtgaaaatcctgaacgacttaccagtagtagtctgttgtttgatgatcagggtaagatttgcgcccgttacgacaaaatccatatgtttgatgtcaatattaatgatgaacatggatcatataatgaatcatctgttttccagcgtggggaacatattaccgttgtagatacacctgttggtcgtctcggaatgaccatatgttatgatctgcgcttcccagggttatttcaggcgctacgtgagcaaggcgctgagttgatatctgttcctgcggcatttacccgcttaacaggaaaagcacactgggagccactgttacgagctcgcgctattgagaaccagtgtattctgttagcgccggctcaggttggtgtacatggaacccgtcagacgtggggtcactcaatggcagtggatggctgggggaaagtgattaagaaaaatcccgatgcagtcagtgcactacaactgaatgtcagggcagatagcttgaagattatgcgtgagcagatgaaagtggtgaaacataaccgcttccggccgcagttgacttccttgattgaaaaaataccgcaaattaaagagtagcaattatgagtttaacttctgtcagtgaacacttactggctgcaaataaattaagccatcaagatctgttttcagtactcggtcaactggctgaacgtcgactggattatgccgatctctattttcagtccagttaccatgaatcttgggtgttggaagatcggattattaaggatggttcctataatattgatcagggggttggcgttagggcaatcagtggtgaaaaaacgggttttgcttatgcagaccagatcacgttgaatgcgctgcaacaaagtgcacaggctgcccgtagcatcgtccatgaaaatgggaatggtaaagttcatacctttggcgaagtgacctattctcagctttatgcagcaattgatccgctgcaaagtttttcccgtgaagaaaagatcgcattattgcagcgtgtggatcaggtggctcgtgctgaagatccgagagtacaggaagtcaatgctagcctgacagggatctatgaacgggtgttggttgcggcaaccgatgggaccttggctgctgatattcgtcctctcgttcgcttatctgtcacggtactggtggaagataacggcaaacgtgaacacggcaccagcggtggtggtggccgttacggttatgaatattttctggaagtggctagtggtcagatccgtgcagaacaatttgcccgtgaagctgttcgtatggcactggtgaatctttccgctgttgctgcacctgctggtactatgccggttgttctaggggctggttggccgggagtattgctgcatgaagctgttggtcatgggctggaaggtgattttaaccgccgtggtacttcggtgttttctggtcagattggtgagaaggtcgcgtcagaactctgtactgtggttgatgatgccacgataaaaggtcgccgtgggtcattggcaattgatgatgaaggcgttcctggacaatacaatgtattgattgaaaatggcattctgaaaggttacatgcaggacaaaatgaatgcacgtctgatgggggtcgcgccgactggcaatggtcgccgtgaatcttatgcccatttgccaatgcctcgtatgactaatacctatttgctggcgggtcattccacgccagaagagatcataagtagtgtagaaaatggtttatatgcgccaaattttggtggtggtcaagtggatatcacttccggtaaattcgtgttctcgacatcggaggcttatctgattgagaacggtaaaattaccaaaccagtgaaaggtgcaactcttatcggttccggtattgaggcgatgcagcagatctctatggtaggaaacgatcttgatctagataaaggtgtcggggtttgtggcaaagagggccagagcgtacctgttggtgttggtcagcctactttgaaactggacaacttgaccgttggaggaacagcctgatttttggctgtttatctgagatagatcattataaggatagtcatgaagaagacttggctagcaggtgtgttactgactgttttggctgtgacttgtggtacttttgctaaaggtgttgataagacactgttgcaggagccagaaacaggtaggagtacctcagcaatacaacggattgaagggctaactgaacagaataatgtggtggcttacttacgacagaataataaattgcccgatatttatattactaagaagcaggcccgcgatcttggctggaatgcaaaacagggaaatttatgtcaagttctgccgggtagagcaattggtggtgacaaatttactaatcgtgaaaaaaagctaccaatgaaaccgaaacgtcagtggtttgaagcagatgttaactaccgttgtgggcaccgagggagtgacagattgctttattcatctgatggtctgatttatctgacgttggatcattacagaagttttaccttaatggagtaattctatgcataaagtggagtttgattttgaccgtatccctgatctgaaaatgttctatcagcagttttctgaacaatttgagttaggagacgagtttggtagtaatttggatgctctgtgggatgttgtgacaggcggaattgagttacctgtagaggtcaatttcatccattttacgcagcagaaagaacgtgatttctcctcgttagtgcttttgtttgaagaagcagaagaagaactggaaggggaacttagttttaatattttcccctaacagaaattagaaccttccgggttttaggtcgttaagcggattcagccatatctttaagatactggaaaatctgacgataagatttaggtggcttatttgccgccttttcttttttggcgttgcggatcaaagtacgcaattgctggcgatcggtttgtgggaataacgccacaacctcatcaataacatcgtcattgccatcaatcaatttatcacgtaattcttccagtttatggagcagagtgatttgctgattatggcgatttttcagtttatcaagcgcaatggtaattggctcgacatcccgggtacgcagcagtttgccaataaattgtaattggcgacggcgcccctctctttttatcttctgtgcaagttcaatggcggccagcagatcttcatctaacggaacgcgttcaagcgcacttttgctgagctcaaccaattctgtacccagctttttcaatgcttcggcatcacgtttaatttcgcttttactgacccagattatctcttcttcttcctcttcagcaggataatcattgagccaatcttcaggctgcttcgccatagtggttttccttttaaaaaggccggagctggcaggttgatttttggtgcatgacctgtagcccggtgggtgttaacatcctaatattgtgtattgtaactgggaaaaacgccggattaccactcggcattggctgtgtggataaaaaggtcctgttttcccgacagattttccctttattcatcaaattacgggtaagtaatgaaaatcacggatcaaattgcggaacaacgcaaacaactggaaaatgcagtttcacaggcactagagctggcaaaagcgggttgtgatgctgcggaggttgcggttaataaaacaacgggtattagtgtcagcacccgctttggtgaaatagaaaatgtagaattcaacagtgatggtgcgttggggattaccgtataccatcagcaacgtaaaggtagtgcatcatcaacagatttaagcccggatgctattgctcgcactgttcaggctgcggttgatatcgctcgttatacctctcaggacccatgtgctggcccggcagataaagcgctactggcatttgaagcgccagatcttaatttgttccatccaacagagttggatgctgataaagcaattgaactggctgctcgtgcggaacaaactgcattacaggccgataagcgtattaccaatactgaaggtggtagttttaacagccattatggtatcagagtgtttggtaacagccatggtatgttgcaaagttattgctccagccgtcattcaatgtcgagttgtgtgattgctgaacttgatggcgatatggagcgtgactatgcgtataccattaatcgccgttttgaagatttaaaatcgccagaatgggttgggcaggagtgtgctcgtcgtgcattatctcgtttgtcgccacgtaaattaccgactatgaaagcaccggtgttgtttgctgcggaggttgcaacgggcctttttggtcatttggttggtgctatcagtggtagcagtatttaccggaaatcctctttcctgcttgatcatttgggcaaacaaatcctgccatcatggctgacaattgaagagcggccacacttgctggcggggctggcatcttccccatttgatagtgaaggtgtttctacctgcaaccgggatattatcaaggatggtatattacagacttggcttctgacgagttattctgcccgtaagctaggaatggcaagcaccggccatgcaggagggattcataactggtgcattgcagggcaaggtcaagattttgcaggtttactgcgtcagatgggaactgggttagtagtcactgaactgatggggcagggagtcagtgcagtaaccggcgactattcccgtggtgccgctggtttttgggtagaaaatggtgagattcagtatcctgtcagcgagattactattgcaggcaatctaaaggatatgtgggccaatatggtcactattgggaatgatattgaaacgcggagtaatatccagtgtggttcagtcttactgccggaaatgagtatcgctggtcaataagagatactcgtttccgatgactttagtcagcccggatcaaatgggctggctgaattaacggtggagctcgccggcagcttctggttggtaaagtaattctaatcctgtgaataccataagaaaatcaattaaatacatatttatcaatgaattatcaataactgtacggaagcacgaaatacggttagtcaaggaagtgatctgtatttagatgaattctattacggttggcatcaaatgagtgagaaggaaaaaatacagcgagttcatgaatcggcaaaattacagagtttggcgatgagtgatgtgctggcacgttcgttactggagggggggagtatgaccatagatggacagcgttattgtttatctatgttcggtcatctacataaagttaaaaaaacgcatactgaaacaacaaaaatgataatgagtaggttaagtgaaaaattgggtatcaagattgatactaatgaaattattcgtgacccaaaaggccattatctgaacatgttgaagaaaatggaatcagaaatgatagaagtcacataacacactatttcataacataattacttcacttgttaattatatttatatatactgtataaatatacagtattgtgggattaagaggatggcaccggaacagcaaacgcctatttgttgctggattctggggttatcagccagccctttattgaggcggtgaacgattacatcacccatcaggggcatcatgggcatggggatgatatgcagtgtctgccgatgcccgaaacgcaccatgaattattggtcacgctgtttgtggcaaatttggcgaactacagccaggaacaggtaacaacattaaaaacggatgttgaaaacctgatccgctgcgcctttcgggaaaatagggaatatcacgtgaaaaaaacctggccgtatgcccgattttccttttccaacctggggcgagaaatacaccgtgaatttgccgagattgaatcactgactttttcattgggtgacattttgagtgatttaagtgtgcccaggctgcaatcactgataattgaggtgaagcatgtctgagttcagggaacgactcaagcggctggccttgccgtcatggatggataagggagaacccgccaaactgctttgggccgtgcgtgagttctagttaatgatttaccgctggctgacatggccgttagcccaattggacgcggaaacttgttcggcggaattactgccgatgttggcctatcagcgggatatccagcgctttaacggtgaaccgctgacattatttcgtaaacgggtgaaatacgcgtttattaatgccagagaggcgggcagtgtcgcgggatttatcgctatctttgaacgtttaggtgtcggccatgttgaagtattggaacgacaaccggcgatagattgggatgtgattattttgcgcgtcagtgacggacaagtcgctgaaaaccctgatttgctgatgagcatcattcgtcagtatggccgcacttgccgccgctaccgttttgaagtgatggcgaataataaactgtttatgcgtgtgggcagtttgggcgcggaatattgctgttattacgcggccatgtcctcgccgcctttgctattaaaagtgggttacatgtcgggtgagtccgtttttgatagcgccagtttaaaggcgattaccgtacctaatatgacctacggtgcatcattataaggaaataatatggcgtcagtgattacagtagactttgaaaaatggaaagcacagcaggccgcggcgggaaagcccgtggtgttggatgagtttgtttttgcttatgtgccggatttagatcccactcttgccatcaatcgcgatgagacattacccgcagaaagtcatattgtgcatcgtcaggctgtgaacaaaacagggttagcgagtgaaaacgcggtagcctacagtgtcacattgggaacggaagtcggtcattttgattttaactggattggcctgataaataaggcttctggcattattggcatgattacccatgccccagctcagaaaaaaattaagaccgcgaacggattacagggaaatgtgctgacgcgctcttttttactggagtttgaaggggcagccaaagaggccgctattatgaccacggcggaaacctggcagattgattttaccgcccgtttatctggcatcgatgaaatgcagcgtctgatgaataccgacagttacggtgaggcggcttttttcggtgatgggttttccgtggttcgtcgtgatgaccggtacacgatcaaaaaggggctggcttatatcggcgggttgcggggtgagctggcgtttgaccaaacacttaaccgcctgcgcgatacccgcgtttatgcggattttagctatcaaggcaatttggtgaatcagtggaaaaccgtcgttcatatcgtcgccgtcaatgatcttaaaaactacatcgatgcggcagggtatccgcattatgtctttgcggttgcgggggttgatggtcacggtgatgtgatggatttgcgtattaaagggtcattgaatgaccgtaatatttccgctattcatcaagagattgatagcgtgaaacgggaatatgtgactcagcaggcattggaaagcggcctgcatgggaaacagccgaaaggggattatgctgttaatgcggcattaaccgttgtcagggaaaacgccgatagtcgcctggctaaaaaccagaacggcgcagatattcccaataaaaatgaatttgtcaaaaacatcggcttagtggaaaccgtcgaacaggcaatgaatgctgtaccgaatgacaggagaattaacgggaaatcgctatcgtctgatatcagtttgatggcgagtgatgttggtgcctatcaccagactacctatatgactgagctacccggcagacattattctgggccattttcttgtggtcgggaaaatggatgggccaaaggggtgagtatcggtgtagggggtgacacggggcaaatttggattgatgccgatgcacagttgcacaccagatttctcaatgctaacggtgccgtagagcaaaagattacggttggtgtcccgattggcgccactatcgaatggcattcgactgcgccgatacccgccggatatgaacccaatgagggacgcgcattccgtgcggcagattaccctgaactcgccaaaatttttcccgatctgaaattacccgatgacagggggctgtttaagcgtggtttagatagagggcgggggctggactcgggtcgttcgctagggagtgttcagggggacgcgatcagaaatatcacgggatcattaggtaagcccactattgagagcgggagcaacgcgtctggtgcattcagctaccagtataaggcaggcggtcgggcagccggtgccggtggtggggtgattgcatggacatttgacgcatccagagtggtgccgaccgcaaatgaaaaccggcctgttaacaaatcagtgatttatattacgagggtaaaataatgtctaaatatagtgcaaatattcaaatggcccggtttgatgaggatgggttagctattgttagcggatgggttgcggtttatcgttgtcatcctgaaacacgggaatatattggggccgatatggatagcgtgccccgcggtttttctgttgcggctaatgcgtatctggatgcgcctgaattacctgacacgcatgatgttgcgatttgtcgtagcataaaaaatcctggcgacatgtgcctgactatcggggtaaaacggcgtatgtaaccgatacaggccagccgatcaatattaccgccatcggcgcgttgccagataatcttaccctgcaatcaccccaaaccccctttgataagtgggagagtaagcaatgggtcacagataaatcagccctaaaatctcatcaaactgaacaggctgaacagcaaaatatcgcgcgacagcagcaggcagatgcagcaattaaacccttacaggatgccattgatctggatatcgccacggatgccgaaaaatcagcactcgtggaatggaaaaaatatcgtgtgcgggtgaacagagtggacctttctactgcccccgatatcaactggcctgagcaacccgcgtgatgaattggcaacggaaattgatgcgcatctccccgaatatgacggggatgcattgctcgatgctacccgtccatccgttcgtatacggtatcggtcagaaagcagacagcggtcactacctgagtccggcaaacgccatcaattatctggcaaataaaatccggggaacgggaaacatgagcgccgtggtactcatgatctgcgcgaagacgcataatgaatttatccagcatttaaccccattttcggcggtgttgccgttgtcggtattttctcaggtcactcgtatggcaaagacagcggaacgtctggcgatcaccaaaatgcaattgcctgggaaaccggacagcggtttgcctccatttcaaccgttttcaacatcaaccagccgcatggccgtgaatgcgcgattgattgcacaggctgaaacacaggttagcgccggcagcagcattgcgggattgaaatcacaattaacaaacttcacgacggtaagacagaacgccttacaacaagtgactgccgctctgaatggcgtcaggaacaaatcggcctgtgtctgggcattctcagggaaagggaatggcgcattactggccgaaaaactgcgtcaggatatccctgaacaggacgccgtttacacgctggcgacattatttgccggggacgatattcgcgcattagaaaggatgctacacaatgagccaaattatcacactggcccttgatggcgaggccatcccattaaaaagtctgaccgtaaccccatcggtggtatttcaggacacagaccaaagcggccagtcatccagtaccgccgtagcggagcaaggtattaagcccaaggagttacgtgttacggggatcattccgtttactgagcaaaaaacgctgtcacgcctgtttgcactggcggaggccaaagataagggaagtctgaaacgttatcgtgtcgctaacctgaccgcaggtgctatcaactttcgcatcgggacattcacccataccattgatgccagtaagatcgacggtaaacaggcatggcaggtcacatttactttacgtgaacatttatctgttgctgagaaacgtgatgcccgtgctgccgataatattcaggccagaaagcaaacaggtcagggggccgccgccgcaaaagaagcgccggaaaaattaagctggtttgaaagcaaagtattgaaaccgattaatgacacaataggaccggctaaataatgacaccgattaaccggctctatctttccggtgatgaaattcacctggttgacgccaatattatgctggagctggcatcctgtggtcgtggctttatcacggcggagacgacaacggactacaccggaaaactggtgcggctggacgtgggttacacggatttggtattacgctggtttacgggttatgtggcacgctcacagccagcccaaaacggttatcagcgtctttttgtgcgtgaactggttggtgtgtttgaccgattatggtcgtgttcatttcagcatccaacactgagccagattgcggactggttgcaggagcacagcggactgaccttcatattgccggatgccccttatacggagacacccatcccgcattttactcatcatgggaccggctatcagttgctggctaatcttgggcaggttttttcgattgaggattatctctggcatcagttgccggagggttcggtttatgtgggcagcggggcgcattcgatgtttgcggggaaaccggtagagatccccaatgcatttagccagtgccagtccgcaggcaatgcgatgaccattcccatgatcccatcgttgcgtccaggtgtagtgatcaatcagtaccggctgaacaaggtcaatctgaacaatgaaaacatggtcattacatgggaagccgtcaacaaactgaccggtcagtcgcagaccaaaacgccaatgcagcgtcagattgatgccgcctaccccgaattatcggcagggctgcatttacccaaatttgcccgcattgaggcacaccctgaaaatacggtcagcggcgatatctccgactcattccggccacgctatgcggttgatgtgcaattattggctgatgatggtcaggatgccgcggttcctgtttatcatgctgtcccgctgcctttgccgatggcgggcagtgaatccggtatgtttcaatatccgccagtcggaacggtggttgaaatcgcctttgaggcaggcagaccggataagccctttatccggcagacattaagccagggcaataccttgcccgatatcaagccaggcgaacaattgcagcaacagcgggcggaagtttctcagagggtaactcaggaaggaaactggattcgtcagactgaccagaccattaatgaatcgtctatgcaccgtgaagtcagggcagacacggaaacacgtaacgtagtcgcacgggaaaccacgatacaggccacggataaaaccacggttttgggcacgtctacgctattggcgggcgctgtccggcaaattgcagacggtgactatagtatggcgacctcatcaaatttcgttgccagcgtagggaaagaggccagtatcgaaatcggacaaaagctgatagagaagatgggtctgcttaagcagagtatcgccggtgccaggcaagaaatcatcgcgcccgtggtttgggtgggcagccagcaaatcaatgtcatgaccttgatgttagagacgttggatgtggttaaagcactggcggaacagactgccgcccatacgcaccacaacacaggtgcaccggagaacgccagcgcgataaggaacacgggctataaatcggatgggctgaaacagaagtattcgcctgtgattgggtgaatatcattccatttgtatgagcttttttacgctatgacataggttgataacaccttttttaaggtgtagactgattatgttagcaggagaatgtcgcgctagaaccgaggctaccaatctcgtatagcacaaagacaaactgccctatccaagggttaaaataaaaaaccaacctcaccagttggttttttatttttatctactcatcattttaattgattgaatcatttgaaaataaacctataatcaacggctgttagtttggggtagcgttctggcctgtgtatctttgacgcaagttttcttaagtcctggctgagtacaggtggtgctgattcagtgcctcggtcagagcgcgatattctcctgctaacacagatgagggccagccggacaggcagcgtaaaggcaatggctggttaagtcgtgctcctaacgggagcaagcgggtgaaagcatttattgacactgctatcatcgttctcaaagcgttaatcgcgcttttagagctgatccgtgcatttctgaaatagataacggaaacgtagctaaggccatcggggtaacctcccggtggcctttaacatttaccgcctttgatcaagtaagccacttttgtttaagtgggcttagatactgatctaaaagctcaaatttggtaatccctattggactttaacctgtgttcaagcgattattgttccggtagtatggggaaatagacaacagattagtatagtttaccgcgagtcatacacataataacgctaggacgcctttttaaatgtggtatcaatcagcgctacgggttcgtgttctgatggtctgaaatacaattatctcgcccgcaacatgcgggcttttttatactttcatagagcttgaatacaattctgatattaaagaatgggcagtaagtgtaataaaaaaatgataattcagcgtgttatattagcttagtggtttaaaagttgtcgttacttttttggatatagaaataacttatgtgatatcagaattgtttggtaaatcatttcggacggttcgtttgataggctgcttattttcgtcgaagtaccgactgggccatatttcagcaggggtgacaccaatttcctgagcaatcagtaattcccctttaggctaggggcgcgttaaagcatttgctaatgttgaagagcttaaaccgtgctctctggataatgatgccagcgttttattcttcttacgtatcgcagcgataatatcggcggtatgccagtcttttttcatattcctgcttccctctttgatggtggcaagaatcaaataaacaccctggtggcggtttgtctcgctgcgcttatgacgaaataaatgaacttatggcgaaaacggcactacaccgcacccgcctgcatgctttggatcaaaaaattttttcagttttaaaatcctacaaggcaagctgccaaaccgtgccagcaccggagaagtgagaggaatcacaaactgaaatgattgaaaagattttcaggaaatttcagttttcggatcaaaagaggatcacgggaaaaatatcaatataatgatattaaaggaaaaattctattttacgtgggagataggatcatgaccagaagccgcgctgattttaagaattcaagtaggacgcggccttactgaacacatagagctgaaattagttgttaaggaatgaaacctaataaaactgagtgaataggatagttatctggatttgtaccacttgtagcagaaagtattatccaacctccttgaagatattgattcatctatatcagagccaatgaatatttaagtgtctcttatttctttaagaattgacagattgttattattttcgaacattataattacctcataatgtatagtggttagttgaaaagtaattgaagatataaaattcctgtcgccattttgtcgctatttggttatcaaagacaaaaaaccacttgtgcgatagtggttttttgtattgatttaatagggttttatctgtgatattcaccggcagcttctggttggtaaagtaattctaatactttgacgcgggtttcttcgccgtttggtaattcccaactgatttcgtcaccgatacgaaggcccaataatgcagcgcctaaaggagccataacagaaagctgatctgaactgtcttgcagtgacgctggataaactaaagtacgtacccgttcttcattgcttgtcagatcaataaaacgaacccggctgttcatcgtcacaacatctgatggaatttctgctggcggtacaatctctgcacgatccagctcctcattcaaagcgtcagcgatactagtatctgcaaacgctggctgttccaacagggaatctaaacgttctgcgtctaattcgttgatgataattgctggtttagtcataccacactccaaatggattccaatacaaaataacaccccgcaccatgaggaggggggtgttatttaaaatgattaacctgatagtaggctgttcttactggaaaataaagagatcatgatcacgaactgttttgtgctgctaatgaaaacagtgaaggacatgataatcctcaggtgagtgagcaacgttattcttcgtcaaatcccgaattaaatagatcaataatagctgcgagagcttgctcttcatctgggccactggcttcaacttcaatatagctgcctttttctgaatccagcattagcatagcaattacgctgctggcctcggcttcaacatggctatcattgcgtaaaatgacatgagattcaaagagctgtactagatcatacagcttcattgctggccgggcgtgcattcccagccgatttttgatttcaagtctctgcttgacagtcattattttcgcttttcgagagtacggtggcgcgactgtacgttttttcctctggaacgaaaataatcggccaactgttctgccacataaacagaacggtgtttaccgccggtacagccaatagcaacggtcagatagctgcggttattggtttcaagcatgggtagccagagttcaagataactgcgggtttgatagatgaagttatgcacttccgtatgacggtcgaggaaagcggctacaggacgatcaagaccggtcattggccgtaatttggggtcccagtgtgggtttggcaggaaacgtacgtcaaaaacatagtcggcatcaattggaatgccatgcttgaagccgaaagactcaaagaccattgtcaactcacgttcccgtttgccgagcagacgcgttcttagcatctcagccaattcatggactgacatttcggaagtgtcgataatcaggtcagctcttgaacgaaggggttccagcagatcactttcttgatcaatcgcgctttccagagaaagatttttgcttgatagcggatgcagacggcgagtgtcgctataacggcggatcaatgtattacgttcagcatcgaggaataataattgcggtgagaaactcgctggtagtttagtcagagcttcttcgaaaacttcaggtgattccggcatgtttcttacatcaatactaaccgcagcagaaatatcgcggtcagctagcgtatttgctaattccggtagtaatactaccggcaagttgtctacacaataaaaacccatatcttccagtgcgcgtaaggcaacggatttacctgaaccggaacggccactgactatcatcagcaccatgaggcaactccccttaattttttagtggttattatgagccactcttatctattgcttctattgctatccatgcattgcaacagttattcagtgataattgtgtatagttcttcatcactttgtgccgatcttaaacgacggcagagatttttatctgcaagacgtttggcaatcaatgacaatgtgtgtaggtgtgtttggcattgatcgtttggaaccagtaaagcaaacagcaaatcgactggttgattatcaatggcatcgaaagcaataggttgttccagatttaggaaaacgccaaccgcttgatctgagctttcttcatctaacttaccgtgggggatggcaataccactgccaattccagtagtacctactttttctcgggtcaatattgcttcgaatacgacattttctggtaacttaagctgctgagatgctagctcactgataatctctaaagcccgttttttgctcgaacaatgtacattattgcgcgtacatgcgagggaaagcaccgaacttagtagtaaatctgcttgattattcattttcctattcacttaggtgcttattgatacaggatgccataggttatctgtggcatcctgtatttgcgcactgttttacagcaatactctgctgttgttactacattttttgttaaataactgttaatgatgtttcagtttgtctttatgcttggttaattgacgcgccagtttatcgaccagtccatcaattgctgcatacatatcttcatgttctgatgatgcgtgcaactcacctccgttaatgtgtacagtagcttcggcgatttgttgtaccttttccactcggaggattacctgagtcaggttgatcctgtcgaaatattgatccagtttgctgcattttgcagtgataatgtcgcgtaatgcatcagtaatttcaatattgtggccggttattttgagttgcatattgtcttccttctctgttcatttcaaaccagacgcctacgttggtttgatggcggaatggataacgactctcgatattttgcgacagttcgtcgggcaaccatgatgccttgatcggctagcatgctcgtcagtttgctgtcacttaatggtttggcggagttctccgctgctaccagttttttcaccaaagcccgtattgcagttgaagaggcttcgcctccactttctgtattgacatggctggagaaaaaatacttcaattcaaaaataccacgtgggctgtgcaggaatttctgggtagtcaccctggaaatggtggattcatgcatatcaacctggaaagcaatgtctgccaagaccatcggtttcatatattcttcaccatgttcaaaaaattcctgttgctgttctacaatacaacgcgcaactttcagcagagtatcatttcggctttccaggcttttgataagccacttggcctcttgtaggttattgcggataaactgactgtcactttcattgcgcgtatgttgcccaagctctgcataatgctgattaatgtgtaaacgggggatactatctgtattcaattctacttgccagtgttcactttcttttcgaaccagtacatcggggatgacatattctgattcgccagtgtttattgccaggccaggctttggtgcaagtgactggattaaacttatggcctctttcagagtatcttctgtcaagtggctcagacggattaaattgcggaaatcccaatgacctaatagctccaaatggttgcaaacgatcagttttgcctctttcaggtaaggtgtttctggcggaaacattgatagctggacgagtagacaatcttttagatcacgagcggcgacaccgataggatcgaaatgctgtatctgcttgagcacagtttccacttctgccagagtgagttggttgtcgccgaggctggcaaggatatcttctagtggtacagtgagatagccagtgtcatctacggcatcaatgattgatgtcgcaatcgccgcatctatttccgtgaaaggggtcaactttgcctgccacatcaaatagtcttgcagggtttgaacggtttcaccttggtaaagtggcagttcgccgtcgtcgttatagtcattgcgtgtcccggaaggtgtgccagcggtgtaaatttcatcccaactgacatccaggggtaactcatctggcatatccttttgttgcaaggcatcaagcgtatccatagcttccgtttcgttatcgggaagttcctgattgccaatttcctgatgttcttcatcctgttcaagcaaaggattcatttctaacgcttgttgtatttcctgttggagttcaagcgtagaaagttgcaacaaacgaatagcttgttggagctgtggtgtcatagccagttgctgactaagcctgagttgcaaactttgcttcatagcgttaaatcaattctcctggccgaattagagccggaaaccttcgcctaaataaacgcgcttcacctgttcattattaagaatatcattaggtgtgccgtgagcaatcagatgcccttggctgacaatataagcacgttcgcatacatccaatgtttcacggacattgtggtctgtgataaggacccctagtccataatctctcaaatgctgaatgattttcttgatatcgatgactgagataggatctacgccggcgaaaggctcatccagcaaaataaatttcggattagctgccagcgctctggcaatctctacgcggcgacgttcacctccggaaagtgattgaccaagattgtcacgtaggtggctgatatggaactcttccatcagctcttcggcacgttctttccgctgttcttgagtcagatcctggcggatctccaatacagccatcaggttgtcgaatacgcttagccggcggaaaatagaagcttcctgaggcaaataaccaataccacggcgtgcccgttcgtgaagtggcagtaggctaatatcttcattatcaatggtaattgtcccggtatcccgtgaaacgataccgacgaccatatagaaagtcgtcgttttccctgcaccgttcggaccaagcaggccgacaatttcgccggagttcacgtttaggctgacattttcaacgaccttacggcctttgtaagcttttgccaggttttctgcgtttagtattgccatatatcgttatttactcttgttgttagcccctgggccttcttcttgtaattgagaaggtagtaggacggtggtcactcgtttacctttgtcactaaacgcttccatctgctgagttgggactagataggtgatacggtcgccttttatattgctgtctaactgttctaaataggcattgccagtgagtgtaaccagctctttatccatttcgtaacgcattttggcaccgcggcccttgattggtttgccattgtcctgtaattgatagaaggttaccggattgccaaatgcttcaataaccattttcttagaatcgccatctgggcgagtcacaacaactttgtcagcgcggatatcgatagaaccctgtttgacgatcacatcttctgtaaatgtggcagtgttccctgtcatgtcaagggcttgtttagcagaatcgatagaaatgggtttctgtgtgtcatctttcagtgccatagcgggaagactgactacaaagatagcactggcaataaaagcattacggattctgtttttcatgttggatttcatagtaggtgttaaccttttcaatcagttcagcggttttgtttctcaggttgccacgcattttcataccgacggattttagcccgacaccaatcagtgtgacctgatcgtcagatgaaacatcctgagtggtcaggttgatgatagcgttctctgtagtaatacgttgtaattgtgacgtattagttagactgtcaacctgtacgtctccgtaaagatagagcattttgtcattagttagtttggctttgttagcacgaactgtccatgtagcaatggcatttgagtcataagtaattaataccggtttagtaaaccaagtaagttttgactctgcatagttttggacgtcatcagcgaccagtttatacgtcagtttccccgtagggtcataaacaaaagttatagcttcctgactttgataggttggctgactgttatctgtggcagaagatgatttaatctcatctgaatcagacaagttccagccaattaacgccaggatgattaataccagagttatcaccaaccaggatttgattctatccattctcgtttcacttcaacctactatattgataatcctttggcttcttccagcttattctgagcaaaaagcaccaaatcacaaagttcccttaccgcgccgtgcccccctgcaatttgggtgacataatgcgcttttggtaagagcaatggatgtgcatctgccacagcgacagataaccccacttgttccatgaccggccagtcaatcagatcatcgccgatgtaagcaacctgttctggtcttaatcccagtgtatctaacaatttttggtacgccaaaaccttatcactttgtccttggtaaagatgtgtaatacctaaggtgtttgctcgatcttccagcaattttgctttacgaccggtaataatagcgacttcgattcctgaagtaattaagcagcgaattccgtaaccatctcgaacattaaatgtttttaattcttcaccgttattgcccatatagatccggccatcggacataacaccgtcaacatcgcaaatcagcaagcggattttacgggctttttcaataacgtctttatcaactggaccataacaggtgtccaaataaactaattggctcattaaggcgttttctccggttacaccacacccgcttgtagcaggtcatgcatatgtaatacaccaagcaatttattgtcctctgcaactaataaggacgtgatatggtgtgactgcattaagttcaatgcatcaactgcaagggcatgcggtttgatgcggataccgcccgttgtcataacatctgaaattttgacattgtacaaatcgacgcccatatcaaatactcgccgtaagtcaccgtcagtaaaaataccatcaatatacctattttcatcgcaaatgacggtcatacccagtttttgccgggtgatttcgagcagcgcttcgcgtaaggtggcgttacgattaacctttggaatatcatcgcctgtactcatcaaatcactcaccagtagcagaagtttgcgcccaagagtgccgcctggatgtgatagtgcgaaatcttcagcagtaaagccgcgtgcctggagcaatgcaaccgctaaagcatcgcccataaccagtgttgcagtagtactggttgtaggagccaaacctagcggacaggcctcctgtgggactttgatacacagatggatatcggcggcttttcccatactactgttgcaattgttagtcatgcagataagcgggattttttggcgttttaatgcgggaatcagcgacaaaatttcactggattcacccgaatttgagatggctaaaacaatgtctttaggtgtgatcatgccgaggtcgccgtggctggcttctcccggatgaacgaaaaaggatggtgtaccggtgctggcgaaagtggcagcaattttacacccgatatggccggatttgcccatccccatgacaatcactttaccttcgcagttgaacatcagttcacaggtacggtcaaaatctccgtttatatgttgttcaagttctgttaatccatcacgttctatgtgtaatacttttttacccgcttgctgaaaatcaatcttaggcatttctttttcctactcattctgtgtttattcaatgctgtaattggaaataaacagtacgataaaataagcgataaagcagcttaataacaggacacctttaaatcggtttaatcggtgtttacgacccagacaaaatgcagtaaatattatgctggctaccatcattacccaaaagtcacgatggaaagattcaggtgaaatggctgctggtgagagtaatgcgggaaggcccaaaacaattgatatattgaatatattcgaacctataatattcccgaatgcaatatcatcttcgcctttgaatgctgcggcaatagaggttgctaattctggcaagctggtaccgaccgcaagtacggtaagcccgataactaattcactgatgccataaatgcgggcaataacagttgcattatcaataaccatacgagttgccataggtaaaataagtaaccctaatagaatccaaagtagggcaatgtgtttattgccttcgaccggtaattcggcagcctgttcttgcgtataaatatccgcttcggcgcggcgcggtagagcaaccatttttatcatcagtaagatatacactatggcggaagcgagtaataccaacccatccatccggctgagatagtgatcactcatcaaataaccacagaagacggtgagcagtagcatcaacagcagttcctgccgcaggatatctgattttacttccattgggcgaataaatgcagcagcaccggttattagtagcagattggtaatgttggagccaataacattacccacagccatatcaggttgactatctagcattgcagtaactgaaaccattaattcgggtagagacgttccaatgccaacaatggtaataccaataataaatggcggcagtcccagagtacgggcaaaaattgcagcgccatatactagtctatcggaaccatataccagtaaaatcaacccggtaattagaagtaaaaaggtcagaagcatgaagcgtcccttgtaaggtatattccgaattgatgtcaacgctggttgattttctaaacaaaaattgtctgcccagttagatggggtatattctgacggcggtggatagaaaagtaaaatttgtcatcacattaatagcgaaaattttcccgtttttttgtagtatatatgattaatatatgaaccaaatattaaagccaatttattaaccgttaagggctatcaataatgaatcaacagacagcaaatctcatcgaggtccgtggtatgtatttttcccgtggtaaccgtttgatttttgctgatattaatctaattgtgcctagaggaaaagtcacagcaattatggggccttctgggatagggaaaacgacactattacgattaattggcggtcagttacgtcctgaacgaggggagatctggtttgatggcgacaatattcctgctttatcccgttctcacttgtatgctgctcgcaagaagatgagcatgctgtttcaatctggggcattattcactgatctcagtgtgtttgagaacgttgcttttccgctgcgtgagcatacgaatctgcctgaagaaattatacagaccacggtaatgatgaaattagaggccgtagggttacgtggtgctgctaatttgatgccttctgaactttccggtggtatggctaggcgtgcagctttggcacgtgccattgcacttgatcctgaactaattatgtttgatgagccttttgttggtcaggacccgattacgatgggggttttagtgaagttgattgatgagctgaataaggcacttggcgtgacctgtgtggtggtttcccacgatgtaccggaagttctgagcattgcagattacgcttatattatcgctgaacaacaggttattgctgagggtacagctcaacagttgcactctaatcctgataggcgagtacggcaatttttggatggtattgctgacgggccggtacctttccgtttcccggctggggattacaaaactgagttattaggataatgggatgttaatgttaacacaggcgctggcggcacttggccgacgggccattgaggtgtttgcctcttttggccgtgcaggttttatgcttttccgcgcgataattggcaagccagaacccgccagacaatggccgttactccgacagcagctttacagcgtgggtgttcggtcattattgattattatcgtttcagggctgtttattggcatggtgcttggcctacaggggtatctgatcctgacaacatacagcgcagaagccagtcttggtatgatggtggcgatatctctgttgcgtgaattggggccggtggtcacggcactgttgtttgctggtcgagcaggatcagcgctgaccgcagagatcggcttgatgaaagccacggagcaaatttccagcctggagatgatggcggtagatccattacggcgtgtgatcgcgccccgtttctgggccgggtttatcagtatgccgctattatccttgatttttgtggcggtaggtatttggggcggtgcgatggttggtgttgattggaaggggattgacagtggcttcttctggtcttcaatgcagtctgctatcgagtggcagaaagatttgcttaattgttttattaaaagtgtcgttttcgccattactgtgacctggattgctctattcaatggttatgacgcgatcccgacttcggaagggataagccgagcaacgaccagaacggtggttcatgcgtcgttagcggttttaggtttggattttgtgctgacagcactcatgtttgggaactaagccaatgcaaagcaagaaaagtgaaatttgggttggattttttgtcttgattgcactggctgcaatcgtctttttatgcctaaaagtggcagacattaaatcggtaggcaaccagccaacttaccgtttatacgcaacttttgacaatattggtggtctgaaagtgcgttcaccggtaaaaattgggggggtggtgattggccgtgttgcaagtatctctcttgatgaaaaaacttatacgccgcaagtggcactggatattatgaagcaatatgaccgtatccctgataccagttctctttccatccgtacttctggcctattaggtgaacaatatattgccctgaatatcgggtttgaagatcccgatatggacacccgtattctgaaagagggtgaccgcgtacaggataccaaatcagcgatggtacttgaggatctcatcggccagttcttgtataagagtggtgataatgtccaaagtggggcagagcacacgccgacaccctagccagcaactgaatatcattaagaggaaccaattatgttgaagagattattaatggtggtgctgctggttattgcgccattagcgagcgcggttgatcaaacaaatccttataagttaatgcaggatgcggcggaaaagacttttactcgtttgaaaaacagccaatcacaaattcgtcaaaatccagattatctgcgtaaagtggtgaaagaggagctactgccttatgtccatatcaaatacgcaggggcattggttctggggaaatactataaagatacgactccagagcagcgcaagatttattttgctgcatttgaatcttatcttgagcaggcatatgggcaggctttggcaatgtatcataatcaaacttaccagattgacccggaaaagccgttaggggacagcaatgttattgctattcgtgtcactattatcgatccgaatggtcgccctcctgtccgtcttgatttccaatggcgcaaaaacagcaaaacgggtcaatggcaggcattcgatatgattgcagagggcgtcagtatgattacgactaaacagagtgaatgggcctctatcttgcgtcagcaaggtattgatggcttaactaagcagcttgaaatcagcgctcgtcagccaatcacattggaagagaaaaaataagatgggtgagagtctgatctgggaaaaaacagggcaaacattgattctcaagggcactttagatcgtaatagtttgcttcctctctggcagcaaaaagagaaattattggtcgagatcaatgacatcaatgtgtcacaacttgaatatgtggattctaccgggttagctcttttagtccgtttcaaacatcatatgcaaatgagaggggataaattgcgcttttctggcattgatgaacggcttaataccctgattacgctctatgatttgcaagaaattatcattgatagctaaccgataatctcattaattacctgtatatatcctatggatttcaagatggatcgcgacggtaagggagagaatccccgggagtatagataacgatgtgaccggggtgagcgagcgcagccaacaaagaggcaacttgaaagataacgggtataatcagcgcccttgtaagcagagatgttacaagggcgttttcatagtttaagaataagcaggattctattaggatagatggctgtctattatttatttctaactacataccctatggatttcaagatgcatcgcggcggcaagggagcgaatccccgggagcatagagaactatgtgaccggggtgagtgagtgcagccaacaaagaggcaacttgaaagatgacgggtacagaacattgagcaattatggatactaatgagattaaacaagtgctgatggataaattagcactggatgaagtcatcgttaacggagatggcagccatttccaggttattgtggttggtgaaatgtttgccggcatgagccgggtaaaacagcagcaagccgtttatgcgcctttgatggaatacattgctgataatcgtattcatgccttgtcaattaaagcctacacaccggatgattggaaacgggatcgcaagctcaacggtttttaatgttgtttgcctcgccgcgaacagcaaattatataaagagagtcgtcacagatggataaatttcgtgtgaaagggcctactcgtctgtcgggtgaggttactatttccggggcaaaaaatgctgcactgccaatcctgttcgccgcgttgttggctgaagagcctgttgagttgcaaaatgttccagaattgaaagatattgataccactatcaaattgttgaatcgccttgggactaaagttgaacgtaatggttctgtatttgtagatgcccgcgatgtgaatcaatattgtgcgccttatgagctagtaaaaaccatgcgtgcctctatttgggcgttaggtcctttggtggcgcgttttggtcaggggcaagtttctttaccggggggatgtgcgattggtgcccgcccggttgatctgcatattagtggcttggaacagttaggtgctgaaattgtgctggaagagggctacgttaaggcttccgttaatgggcgtctgaaaggggcttgcattgtgatggataaagtcagcgttggagcgacagtcacgattatgaccgcggcaacgttggcagaagggacaacagttattgagaatgcagcacgtgaacctgaaatcgaagatacggctaattttctcaataccttgggtgcaaaaatcaccggagcgggtacagaccatatcaccattgaaggtgtagaacgtcttggtggtggtgtatatcgtgtactacctgatcggattgaaacggggacatttcttgttgcggcggcgatatccggtggcaaggtagtttgccgtcatgctcagcctaatacgctggatgcggtattagctaaattgcgtgaggcgggtgcggatattgcaattggtaaagattgggtaagccttgatatgcacggtaagcgccctaaagctgtgacattacgtactgctccgcaccccggtttcccgactgatatgcaggcgcagttcagcttgctaaatttggttgcggaaggtgctggtatgatcaccgaaactattttcgaaaaccgtttcatgcatatccccgaattaattcggatgggggcgcatgcggaaattgaaagtaataccgtgctttgtcatggcgttaaaaaattatcttgcgctcaggtcatggcgacggatttacgcgcatcggcaagcttggttctggcgggttgtattgcggaaggcgtgacggttgttgaccgtatttatcatattgaccggggttatgaacatatcgaagataagttgcgcggacttggcgcaaacattgaacgagtgaaatcaacgggaaagtaattgtacttccttaacttggaaataagaaatgggggtaattgtcgggtagctgtgacaatcgccaactttcttatttttttataatgctaaaaatattcacatatatagagtcagacacagaccatttttatacacattattgtgtgtaaaaatagttctcatttaaatagccctcaacagttttttaaagtaggtgttgagggcgcttgataccgaagagagtctcactttggtggtgaaatcgagtttggtacttgatgagatagctctttaaacaacagtaggctacggatttagccatcatcggatgaaaatcctgtttaaaattgataaacccataccagattggtaagtattcctctgcatttctgaaacgcaggcaagttcattttctacaggcataaataggcttcccatcattaatttactttagtaatttatctaacaagttaatatcttggttattgtgtaaatatggttttgtccagccactcaagtcatagtcagaaagacaggattccaccaaatccatcattttcttcatattgccagaactataagcatggcgcagacattgcaagcggactccatcttgactaccagcataattgatttcgtatagctgatggcggctaccgaattcacttccaatggcatcccacattaattttaaaatcttaatccgttctacatagtcgatgccgttggaaccgcgtacatattgctcaagatacttattaatttctggattattcatgtcacgtatactggatggcaggtagattaagccgctggtgacattactttcaataatattcctaatttttgtataagctatcggtgccataacgagataagtttgaatcgcttgagtatccggtagataggcattgccttcccacggcttggcttctgcccacatggcatctgtcaatgaccagaatagattgcgccatgccactacttctcccaagtctgcttgaacaccacgaaaatctaccactccggtacattcgagactcttttgcagcagtgctgtaatgaaatccagcttaacggctagacgtacacaagcctgcatggggaacagacgggcaaacccactttgtacagcccaatggcgagagctaccaacatcgcgataaattagtatgttttcccatgggattaataccttatccatcactaaaatagcgtcattttcatcaaacctactggagagaggataatcgaaaggggaaccggtggtacctgcggctaattcataagaggcgcgggatatcaatttcatgccattggcattcataggagcaataaacattagggtaaaatcggggttatcccctatgtcttgcgcagagccaacaatgaagttgtagtgcgtaagagctgagttggttgccacgactttggctccactgactataatacctgcatcagtctctttttccagttggataaaaacatctttgacttcatccgctggtttgtgacgatcaattggtgggttaacaatggcatgattgaaatacatacatgattcctgaatgcgtttataccatgcgcgggcattgttagagaattgaccatagaattcagggtaagcgcccaatgcgcaactgaatgccgctttataatcgggggtgcgtcccatccagccgtagctttggcgtgaccattctgcaatggcatctcgttgttggcgcagttcatctggattggtcgcaaaacggaagaatttgtgcgtataaccttcattaccagtgtctgtattccagcagagcgcattgtgggtttcaggggcatgcagagcatcatataattgaccaattgaagcggctgtattgcggaaagctggatgtatagtgacatctttgactcgctcaccataaatgtaaatttcacggctatcctggagtgaattcagatactctttactggtaaatgggcgtttgttatcggtacgtaaattttctggtttcatggctacctcacaattgtacccatttgtgatttctgatccgtagggtactcaatgttaatttaatgtttctagagcttatttttatcagacttgaatataatgttcatataacctctattgacttaagtgccgataaggcttgatccaatatttgtaacttacttttgttatctaccgttatcgtgatatcggatagtttttggttacatttactcgccaagaaataattgtttaagaagacttcttctggatggagataattaactccaatatgagagcttttatctagaaaaatagtagtgcctttttctttcatttgatttctaatatatttaaaatctaaatcgtcctcaataacagaatgtcctgcaccaaaatcgaccacattatttgatgcatttttgacaatttttttgaccagctctgattcaaatttatggttgtatctatataagtctataaatctacatttttttactaattgctcaacataatttagatcgtagcccatcttttcatatatggaccatcttatatatccgtcatctttcaagttgcctctttgttggctgcactctctcaccccggtcacatagtttgctatgctcccgaggattcgctcccttgccgtcgcgatgcatcttgaaatctattgggtatagaatctaaactaattagttctttttctagttttttagaaattaatttacttagcatagttttacctgcgccaaatggtccaataatataaatattattcataccacctcgctaatgttcaatttcgagccaatgacttccctatgtgagacgatgattatttttttatttttatcaattttatctattaatttcctacaatcaaactcatcaaatataatcacatctgaattagatttgtttaggtaatctaaaaatttatcgtttgctaggtagtgatcgaaataatggtctatatatatatacccctttatttcggataatctcttaagaaaaaaagttttaccgcttccattatttcctactaattgtataactctatcactttctaatctttgctctaaaattgataaattagaggataagtttgttctcttatgataaaaatttacatgtttagttattctttggatagatacaatctccgataagtatccgaatattgcaaaataaaaaattactattctactgtctaagtttatagcagccgtaatgttgtctgattcgaaatttggatatagagagtaaaaaattattaaactggatattagaaaacctaatatagaagctacagagttaattatatatcgttgtgatgctattgtatacaaacgatgcactccggataggatagtatcctgacagaaacgattaaccaaattacatcgaggtagttttttaggataagaaaagtaaattgatagagagtggagttctttatagtgcttatttctattatccttgtacgtaggatacaataaataaatgctagcaagaaatataaacatagctccaagtataattataaaattgtcagagtcaaaaaataaaaatagggttccggaaaatatcgaaccaaaccagaaaacatctttggcatacatggtaaatctatttattattacattgtattcatgcttgaataagttgaatccttcttcactagagttgtttttaatatatctatatatgtcttttcttgctttttttcttattttaaactctattaaatatgatcctgagacaaatgaaattagacctaatagagatatggatattattctataggtttcactatcatattcattgtatgtaattcttcctaattcgaataatgaaaagctagcaataagcagtaatataattccaattaaagagttatagctaaaaatagataaaaatctggcaatttttgtgtgatctttcatttttctaactttactatctaacgtagattttgtggtttcattttttgtttctaattctatatctttaattttatgaagatgtaatagtataatatcaatttgatattctatttttaatttgtaaatgacatcttctaaatcaagtaataacttagaatcccagccagtcctatttacatcaaaataaatatggcctttgtaattattaattatagccatatatacattccttacggcaaaaataagatttaattgtcctcttgacaattcattaatgtttgaacttaaattaatatacttattaatttgaaaaatttcataacatagcttgtttaatattctcctattgattaacttttttgataaaaatatattccccagaatggttttttcaataaaaccttgtgtgccatctaggttatagtattcatctggtttgtattggtaattcttatatctactaataattgacaatttggccagataaccatcataaaatggtgttagtaatctaatcaaaccaagatattcgccaaccagaattagagaatataaaagaatgagtaatttttcactattgtctatttctttgccaatcaggattataaagaggacaggaataacttttaaaaacgcatttgatgcaatatctacagctctccataatgaatcaatgcgttttactttttcttcagtatcaataattctattcaagcttagaaattttcccccttggtacccagttaacaatatagcagtcagggcctcaaagttatctccaataaatccatatctcagcttccttatttttgctagtttcttagaaagatgggctcgttttttaaatagaaaaaatgataatggtatcaatatagaacacaatgatagtaagccaactgtaccaccttcaacattaataaccatgagaatggaaagataaataaagcaaattaccttagatataatcaaaacaacactagtgtcatacgaggagtaatttacaatgtcgtgctcattctgctgagcatcttttttacttgtaaagcaatcattaaatgttgataaaatataagcctgttttttattaataaggaacaggcttatgttattaattacacttaaggcaggtctcaatattgcaattaagaagataatcaggccaatactactttcctctaaactattagtcaaaggcaatgttattatgtaaattaatatggaaaatgaaaaaaaagaagataataaattaattactgtttcaataggaaataagataaaagtactatattgctttcttaaatcgttcttaattgcagaggtgttcatttgctaccttatttttgtgagatatattcttcgtatactttaagtgctaaatcaggccttctttgctctccaaagtacttatagaaaaacacaatgatgttctcatatattccaccaagataccagctgcgtatactcgtccctgctaagtcccaaatttgtattttacctaaacatagaccaacgaaatcttgaatatatatttcaacaccaaagggatattcacttaaatagttctcatgtgtgtaagttttggtaaattgacaggatgatacagaataaacatacccaaaatctttatctttaaactttattagaattcggttatcactcaattcaccatttatatagttattcattgaaattgctaatcggccaactaaaggatcaatagctagagttcgagccatatcagttagttcattttcaatcgtagctaacccatttttttcttctgtttcactaagttcaccgagtacaggaataaatggactgagctcaactccagattcttcatccatgtacttaattagcttattttttagatctaagtgtttgtttttatttaattctatccagctagataaactgattgaaagatttccatctataacttctattacttcacctggatatgggccacaaacgttctctttaattgataattggttggcaatttcagacaataccttattatctgagaataggaatggaccataattttctctgggatttataaacccattgccacaaatcaatatcttagtttcctcagggatgccatcaagatagtctattaatatagagttaagtaatttgactcctctataattcttgccactaagtcttgacgattctaatggtagcaaatttgtatatgctccttgagcttgttttggtgtacactgtgaattatttgctactatgatccactgtggatttgggtattgatcaccaatcccttcaatgtattcctcgctgattattgcatccactgctataaaaccgttatatttttcttcattaatatctgatactaagtattgagttacccttgactcccataatattgtttcatatggagcagagaatgactttattttgatatcttttactcttatttcttttttaaatgaatgtaatatgacattatgccctagatgttctaaagctgtttttatacagcttggcataagcagtgatatataaatatctgttccctttggaaatattgatagagtatcgatatcgaaatggtcaacatgttcatgtgatataaatacggcatcgattgatggcatattgcttatatcaatatctcttggagggtatatttcgaactttatatatcgggagtttcccattgttgggcctaagacaggatcaaccaaaatatttgtatttttgtgagagattagccaactttgatgaccgataaatgttaattgcatacatcactccatatatggcaaaacagcaacctatgtaggttgctgttagcttaaagattaatagtggtaagcagcgattgcgtcagattttgaggtctgactcttggagcctttttttccttttacttgtttaagtaaacgtactaatttaactttttctttatcactcatattgttctcctttaatcgatgatatttcttagttcattggaataaaaaagaatagatggttttgcatagtactccaagaaagtattgataaattattataatgattttatcaataataacctttaagatgtgaggtaaatgttacataaattatgttttatatactcatacttaatcgatgagtgagctggggcttgttgactaaaggagagtgaaatttattgttgagccggtgtcttggtgtcttgatagtgtaagtttcttattgaagaaagcatcataatccctaaatctcgttataagatcaaaaactgtaagtagtagtaatacagtacttatacccgtcatctttcaagttgcttctttgttggctgcacttgctcaccccggtcacatcgttctctatgctcccagggattcacgcccttgccgtcgcgatccatcttgaaatccatagggtatatatagttacccattgaaattactaatcggccagctaaaggatcaataactagagctatgtgggggctcgttaagttattggtgatacagattcactctgattattaactattttaattaatcggttattcactgaaatatcgtggattatcattaactttcaaattcttcaatggtcacttgtagcgataatattttcccattgcgcaataaagtgacaggaaccacgctgccggggcgtatttcagccacttgatccattgtttcaaccgcggaaatagcgggtttgttattgacactggtaatgatatcacccactttaataccaactttttgcgctggtccgtttgtagtcacctgaaatactcgtaacccttgaatctgattaatactgccgttagaagagcgaatatgtggcagctcttgtgacgttatgccgataaaacctcggataacccgtccgtcacgaataagtttctgcataatcttggtggcgagttcagtcggaatagcaaagcctaatccttctggggtttcaccattttcacttttatcgaatgataatgtattgatacctactagctcgccaagggtattaatcaaagctccgccagagttaccctgattaatggaagcatcggtctggaggaagttttgacggcgggtagggcttaatccaacgcgaccggtagcgctaataatcccttgagtaatggtttgccccaagttgtaagggttaccaatggctaaaacgacatctcccacatgcgccactctatttggattaatcgttatgacaggtaggttttcggcatcaattttcaggacggcaagatccgttaagctgtcagagcctatgacgagggcttcataaaaatgaccatcttgcagtgcaacaataatttgtcctgcattattaatgacatgtttattggtaagaatgtagcctttatcactcatgatgacgccagaaccaagggtatggttttcccggccttggtgagaaaaactccccatgttgctgctgtagacgttgactacggcgggtgctgccctacggacacctttattaaagctgaatggaacttcgtcattactgttattggtaattgctgatgtcagcccgctagggcgcagtgatggaatggtcatcagtaaaattacagcgataagtaatcctaaaaaagcagagcgcagcaacttggcaatcatgggtattattcagtgtgagttaatcagtcactgcaggataacatagaaattaacagacactgcattatgctgtatctcggattactgacttttagcgcttcgattatcactattgagttttcattaataataaaatgaaaaaatttgtattgatggtttgcatgagtattaaactctgttttatcgcattttgctacaatctgagggattttaacgctttttttactgtctttaacttttcgttttagcgcttttatttacttcataacgttgagattcgttcagattaaatcatgcgggttttcgtttttcatgtgatttgaaaacaaggcgtgacagaaactttcgcttattcagataatatgataaaacagtagttaaaaaaaacgtttatggtctgtcagtgtggttttaaaatctggaaaaagtagtaagtgtattatgaaaaagcaggtaaaaactttaatcattaaaggtaaaaataagtgattaaggtttttttaaaacgggtaaaaaattcgatgctatactgatattggaagagaaaacatcaggaaaaatcggtcttaaattgattaaccaaatgacagcgttaattcaataataagagtgaaaatatttaacaggattaaccgtattaaaataatttgcttaaatataaataagaggttttacatggtctgtaagaagtttacgaaaatcatgggcaatcattaaaaaaaattgataaaccctaaagatttcaagatggatcgcgacggcaagggagtgaatccccgggagcatagagaacgatgtgaccggagtgagcgagtacagccaacaaagaggcaacttgaaagatgacgggtatatattttttcataacttaacgcgtccttcttccacaatatccagtcgttcggttaaaaagtcagagtcagttttttcttgttgtaaaaaggaattccaactgggtttaatcggtcgcagaataatgatatcgccttcacgaataatctccaattcgttcactccctcgaaatcgaggtcgcgaggtaaacttacagctcagttattgccgcttttgaatattactacggttctcatattgagtcctccagaaaaactgatttacaagaccacctgtcgtgagggatatcagtgatttaagacacagcattacgctgtgtctcagattattgacaaagtgctggttttttatccggcattttgttttaattaagttccgttcactcaacggagcttgccaccatgttaagacccccccctctccagactttcccgccagaaacgctctcgcttgacgagctggtccctaaaaatcatttggtccgtcaagtcgatgctgccattgatttcgaatttatccgcgaattagtcgccccgttgtattgccacaataatggccgtcctgctatcgatccggtcatgctgattaaaatgatgttactcggctacttgtttggcgtccccagtgaacgccgtctggtacaggaaattcaggttaatgtggcttaccgctggtttctgcgcctcggactgacagaaaaggtccctgatgcctcaaccctgagccagaaccgccgccgccgtttcaatcataccgcggtcttccaacagatttttgaccacattgttgaacaggcgatagccaaaggatttgtgggcggacacgtactctataccgacagcacccacctgaaagccagtgccaatccgcataaatcggagaatgtcatgcggtcggttccccccggcgcctatgttgacgcactggataaagccgtcactcaagaccgggcggcagctggaaaaaaagcctgaagccagccctaaaggaacggcagagaaagacgaaggtcagtaccgtcgatccggaaagcgggtttatgcaccggaccaacaaacccagggggttcttttaccttgaccaccgtaccgtggatgggcaagtcggtattatcaccgatacctacgccacaccgggtaatgtccacgacagccagccttttatcaagcgtttgacgcgtcagttagagcgttttgctctcaatcccctcgcggttgggttggatgcgggctattttacggccccggtttgttatctgacggaacagttaggcattatccccatcataggttatcgccggccgaataagggaccaaatacctttcagaagaaacatttcacctatgaccagctacaggattgttatgtctgcccgcagggagaaaaactgatttataccacaaccgaccgtcagggataccggcattatcaggccccggcggctatctgccagtgttgcccgcagcgtgatgcctgcacgcacgcgaaaggcggaaaaacgataacccgtcatatctgggaggccagtaaagagcaggccagagaaaaccggctaacggaatggggtaaaaaagtttacaagcgacgaaaggaaacaatagagcgcagttttgcggatgcgaagcaacatcacgggcaccgttatgcccattttcgcgggttgcagaaggtgcaaatacagtgtcttttggcggcaactgcccaaaatatcaagaagatagccttgctggtcgcgatgctttgttgtttttatctctggagggcgagccagtcaatgcccgcgaagcgaaaataacgccctgacgggcgattgaatcgggtcaatgaggaaaatgagttgtattatgattcgtaatgaaaggaacaaaccccattattttcaatggggtttgtcagcggtctggacacagcattacgctgtgtcttaaatatgtttactaaaagtattaatttcttagcaacagataaatactctcttctccgcgaagaatgttcagcgctataactggcggtttagaatcaataactttgcgcagttcattaatattctgtatccgttcattattgatcccaacaatcaggtcatttttctgtaagccagataacgccgccggtgagttttgagcaacactatcgattttcacaccgtaagtccctttcacttcaccattgcttagggttgcaccttgcagggcaagggttagatttccggctttggttgtttgaccttcactgttttctagcgtaacagaaacctccattggcttacctttgcgtaataagccaattttaatttctttacctggtatcgttgtgccgattttggctttcagttcagcaaagctactaatcttcttaccatcaacggaaataagaatatcgccggatttaatacctgctttcgctgcggcggattttggtaagacttcactgacaaatgctccgcgttgggcgtcaatattgaatgccttagcgatatcggaattcatttcagtacctttaataccgaggataccgcgttttacttcaccatgcgcgataagctgctcgctcagggtttttgccatattacttgggatagcaaagccgataccgatgttaccaccacccggggctagaatagcggtattgataccgattaattcaccattcaaattgaccagtgcaccaccggagttgccacggttaatagaggcatccgtttggataaaattttctaatccttccagattcagaccgctacgtcctaacgcagagataatgccggaggttgcagtttgaccaaggccgaatggattaccaaccgcaacagcaaaatcaccaactcggagcttatcggaatcggccatagtaattgcagttaaattcttagcatctttcagttgcagcaaggcaatatctgtctgaggatcgcggcctaataatttggcttcatattcacgtccatcattcaattgcacacggattttatctgcattctcaataacgtgattgttggttaatatataacctttggcagcgtcaatgatgacacctgaaccaagcccttggaatgggcgggtactttcacggcccatgggtagatttgggccaaagaagaatctgaattcttcaggtatactctgttcctgttgtacttgcgtaccagagacatgcacgctgacaacggctggcaggactttttcaagcatcggtgcgaggcttggtaatgtctgaccggcgatagcagcaggtaaagcagcattgctaatcgtagggacagaaattgcagacaacccgatactgattgctaatgcactaaggaataagtgttttcttttcatctaattttgttctcttgtatacctaagctagaaggctaattgagttaattctggcaagctgccatgattactctatgactgttaattattaaataaagttcatcgggcaaacagatttagcatgattctttacaggtatttacatgattgaaaaacaaaaaaacaaaacttgtaggtagataatagattttacatttgaattaatgctgtggcacacgatgtgccacagcagggtatttactggtttttttcattcatcggacgaaacaggccggaagcaccatcggaataatctcttggtggcattttaaccggagattgatcattatccgcttctgattcagtcaatcgataattaaatggattttcttgtgctggcatattcggcatcagttcatgagagcttttagccatatgctgatataactgacgataatcgcgagccatattgtcgagtaattctgcgctacgggcaaaatgaccaactaattctttacgatactcttccagttctgatttattattctccagttcagtttgtaaggctttctgctggcgcagcttagtgttaccaaaacgcataactagcgctccgatagcaaaaccaaccaccaatccaatcagtgcatactcccaagtcatagctactccttcatcgacatcgttgttccgcagaatgtttcacttaattatcgtcactataaccgttaatctagttagagtggaatattgatcatgatttacatttgtttgtatacccgtcatctttcaaattgcctctttgttggctgcactcgctcactccggtcacatagtttgctatgctcccggggattcattcctttgccgccgcgatgcatcttgaaatccatagggtatagatcttattgtggaccttattgtagacaattgatccggtaataaggtcaatctgaatcataaaaacgataaaaaacgggcgattattttaaggattgttattgtcatgccatcattgattaccccttcatcatgttatcaaaaagccctttctgagggcaaataccaaccagatgatgttcagcgtcaagttgtagctcaattggataccattcaccatgctctgattaatgtttctcccggcaatcccgtgaggcgacaaagcttgaaagggcgtctgagtaaactgttaggaaaaacgacgtcaatgagctgtgcacctgttcaagggctttatatgtggggcggcgttggtagagggaaaacttggttaatggatatgttttaccagagtttacccggtgaaagaaaattacgtttgcatttccatcgttttatgctgcgggtacatgaagaattaatggtattacaagggcatgaaaatccgctggatattgtggcggatggttttaaaacggaaacagatgtactttgctttgatgaatttttcgtctccgatattactgatgctatgattcttggtgcattgttggaagcgctgtttgtcagggggattaccttgattgcaacgtcaaatattcctcctgatgaactctatcgtaatggtttacagagagctcgctttttgcctgctattgagcagatcaaaaaatattgtgacgttatgaatgtggattcgggtattgactatcggttgcgcacgttgactcaagctcatctctatttcacaccgctgaatgaagataataaacgagcgatggatcgaatgtttattcttttggccggtaatagcggtgaacaagcttctatattggaaattaaccatcggcggatgccggcaattcgtgacgctgatggtgtattggcaattggatttaacgtcttatgtgaagatgcgcgtagtcagatggattacattgttttatcaaaacgttatcacacggttttgttataccaggttccagcgataatgccgggtaatgaaaatgctgctcgtcgtttcttggcattggttgatgaattttatgaacgccgggtaaaattgataattaatgcggcggtgccgatggagcagatttaccaaggggtgttgttggttttcgaataccagcgttgcttatcccgtttgcaagagatgcaaagtgaagagtatctcaaattacctcatttaccttaagtttgagttcgcttatctatttcagacggaaaactgattttaaatattcaaatgggggtcgatttttatttttgacttctctataatcttgcgaccccacgttacagcaatgtttttttcccaaaaacttgcatatagtgccggcataggctattcgaaggggtaggtttgctggacaagagtcgtgtgaacctcggcaagtttctgaaccttgagtgttcaccaacgtgtaacttattattgggtaagctttaatgaaaacttttacagctaagccagaaaccgtaaaacgcgactggtatgttgttgacgcagatggcaaaactttaggccgtcttgcaactgaagtggctcgccgtctgcgcggcaagcataaagcggaatacactccgcatgttgataccggtgattacatcatcatcgttaatgcagaaaaagttgcagtcaccggcaacaagcgttctgataaaatctactatcaccacaccggtcatatcggtggtattaagcaagcgacctttgaagagatgattgcccgccgtcctgagcgtgtaattgaaatcgcggttaaaggcatgctgccaaaagggccactgggccgtgcaatgtaccgtaaactgaaagtttatgcaggtagcgagcacaaccatgcggcacagcaaccgcaagttctggacatttaatcgggattataggcaatggctgaaaatcaatactacggcactggtcgccgcaaaagctcttccgcacgtgtctttattaagccaggtagcggtaatatcgtcatcaacaaacgcagtcttgaagtttacttcggccgtgaaacagcgcgcatggttgttcgtcagccgctggagttggttgatatgttgggtaaactggatctgtacatcactgttaaaggtggtggtatttctggtcaagcaggtgcaatccgtcacggtatcacccgcgcactgatggcgtatgacgaaactctgcgttctgatcttcgtaaagctggcttcgttacccgcgatgctcgtgaagttgaacgtaagaaagttggtctgcgtaaagcacgtcgtcgtccacagttctccaaacgttaattttttgtctttatggcaattatttaatgtgcaaacccgtctttttggcgggttttttacttaattatccacacacttcccccaaaatgtacaaaatctggtaaactagtgccaatttttgcctcatccatttgtctgcctactatctgaacggtagtaattgcgttgaaacggtaatgattgcgttgaaacggtaaattgtgttgaaacgataaattgtgttgagtagcacattccgtattcaccgttgtggcgcagaaacataagggatgagaatgaatgagtaagaatagtcgtggtcgtgtggggctattcattccctttttagataaacttggaggttttcatggctgtcgctgccaacaaacgttcggtaatgactctgttttcaggcccggccgacatttttagccatcaagtgcgaattgtattggcggaaaaaggtgtcagtgttgaagttgagcaggttgaggcaggtaacctgccacaggaccttatcgatctgaacccttatcagacagttccgactttggttgatcgtgagctgacgctatatgattcccgcatcattatggaatatctggatgaacgctttcctcatccaccattaatgcctgtgtacccagttgcccgtggttccagccgtttgatgatgcaccgcatcgaaaaagactggtattccctgatgcatactattgagaaaggcaattctcaagaggccaatactgctcgtaaacgattagcagaagagttgctagcagtggcaccaatatttaaagagatgccattctttatgagcgaagaattcagtttggttgattgctatcttgctcctttgctgtggcgtttgccggtgttgggtatagaattaccgagttctggtactaaagatttacaaatttacatgcagcgtgtctttgagcgtgatgcattcttagcttcattaaccgaagctgaacgtgaaatgcgcttgcaatccaggagctgatttatggagctgtctcaaatgtctccccgtcgtccttatttgttgcgtgctcactacgagtggttactcgataatgatatgactccacatctggttatagacgtgactttacgtggagttaatgtaccaatggaatatgcccgtgatgggcaaattttgctgaatatagcgccgagagctgttggtaatcttgagttaaccaatgatgaagtacgcttcaatgcccgttttggtggtgttccccgtcgggttaatataccgatggcggcggttatagcgatttatggccgtgaaaatcgggcgggaatgatgtttgagcctgaagcagcttataaagatgaatatctttttaaatccgcttcagatcaggataaggctgatacctctgcatttgcgacagataatctggtattagttacggatacattgcccgatgctgaagataatagtggaacttcacctgatgatgagccaccaaaaccgacgagagggcaccctgctttacgggtagtaaaataagcgttaaaagagggggcggtttgcctccttattttttttcaaattcattgattagaattctgtattgtaggctttttctaattcccaaaaacaatctccagttctgtttttagctttgaaatctgtgatagcgcttaagctctttttaaccttatctacaaattctattttattctctctggtccccagttctggtggggttgtgcagatatcagccaatgatatattgttttctttatctacgttagcaaggacttcagcaggattattaattaatgctaaggataatgcgtagcgaacttctttggcaaaacccaggtgtatgctttgcgttaatttaaaagccagttttatccatttactatcaccagtagaaatgttgtgagtgatttcttgtttggctcctatttcacctaattctgccactacagaattggtacctctattcataatttctttattaatattttcagatgttaagggctgtgataaagcaagtgctgtatgactgataaacagcattggagataataaaattaaggtttttattagcttcattaatatttccagtatttatagttgaataagtatcgtgatattggtgtcggttaattggagtattttatttaagacccacattaatgagaaaaaatattccaaaatatcatgtatgacagtaataagtgtggaatgttcattaaattcacttacttttttgtgtaagggtaatccaattaatataaagtattaaactgatgatagaaagagatgggagctgaaaagctcccttggttgactagatgttgagataatcaagaatgccttgtgcggctttgcgcccctcggcaattgcggttacaacgagatctgagccacgaacagcatctccaccagcaaatatctgcggattgctagtttgaaagggaatgtctgagtactctggtgcgacaatgcgtccttgtttatccaaggttacttgatgagcacttagccagttcatggtatgtggtttaaagccgaatgccatgatcactgcatcggccttaagcaggtgttccgagcctgcgataatttcagcttggcggcgtccattctcatcaggttggcctaattgagtccgtaccatgtttatgccacaaacttgacctgaatggttgatttcaatcctgactggttgcagattaaacagaaattctacaccttcttccttggaatttttgacttcacgctgggagcctggcatgttggtttcgtcacgacgataagcacaagtaaccgaagccgctttttgacgaatagccgttctgacacaatccattgcagtatcaccgccaccaagcactacgacccgcttgccttgcatattgatgaaaggttgcgatggtagggcgggataacccatcaaatgccgggtattggcagtcagaaatggtagagcatcataaacaccatcagcatcttcatttgccagtcccccacgtattgactgataggttcctacgccaagaaatatcgcatcaaactgctcagtcagttcagataaggcaatatctttgcctatttcagtattgagccggaattcaattcccatctcagagaaaatttcacggcggcgtatcatgacctctttttccagtttgaacgcgggtatgccaaaggtgagtaatccaccgatttccgggtgacgatcaaaaacaacggcttgtacgccattacgggtcaatacgtcagcacaagctagccccgcggggcctgcaccaataatcgcaacctgtttgcccgtgggctgaacgtgtgacatatcgggcttccagcccatagcaatcgctttatcattgatgtagcgttcaatattaccaatagttactgcaccgaactcatcattcagagtgcaagcgccttcacaaaggcgatcctgtggacaaacacgaccacaaacttccggcaggctgtttgtttgatgggataaatccgccgcttccataatacgtccttcattagccagtttaagccaattgggaatgtagttatgaacgggacatttccattcgcaataagggttaccgcaagaaagacagcgatcggcctgtgtctgtgcctgacttgttgaaaatggctcatagatttccacaaattctattttgcggattttcagcggctttttaggcggatcgacgcgttgtaagtcgataaactgatatacattctggctcatcttggctccttattgcgcttgaattcgcaactctgcggaagaacgactgcgatgtcccaatagggctttcacatcactggattttggcttcacaagcgcgaacttgctcagccactgttgccagttagcaagaatatcttcaccgcgttgggaaccggtcaggaggacgtgctcggtgataagccctctcaagtgctcttcgtggatagctaaggcatctactgccagtacttcaaccaactctaggttaacccgtttacggaaatcatcattttcatccaagacataagcaaagccgccggtcattcctgcaccaaaattgatgccagtgcgtccgagaatacagacaatacctcctgtcatatattcacagccattatctccgataccttctacaaccgtaatcgcccctgaattacgaacggcgaagcgttctcctgctcgcccggcagcaaacagtttgcctccggttgcaccgtagaggcatgtgttgccaatgagggttgcctgatggcttttgaaggcagaacccactggcgggtgtatgacaatgcgaccgccagccatacccttaccgacataatcattggcatcaccgatgagtgtcagctccagaccgccggcattccagacgccaaaactttgaccggcagtaccattgaaatgaatttttattggtgccgctgcgatcccctgattaccatatcgagcagcgataaaaccggaaagggaagcgcccactgaacgatccgtattacggatatcaaaatagaaagttttactttgttggttctcaatatagctagcggcttgagtcagtaagtttttattcagtgctccattatcaaatggtggattgttttcggtgcaatataatgttttgccctgatggggttctgcggttgctaagagcggatcaagatttagtttgctctgttttgctgaaataccttccagtacttccaacaggtcagttcggccgattaaatcagttagatttttgacacccaatgtagccatgatctctctggtttcacgggcgataaagcggaaataattcatgacccgttcaggtaatccgtggtagtggtcgcgacgtaatttctcatcctgagtggcaaccccagttgcacaattattgagatggcaaatacgcagatatttgcatccaagggcaaccattggtccagtaccgaaaccgaaactttcagcgccaagaatggccgctttaataatatctacgcctgttttcaacccgccatcaacttgtaagcggatcttatgacgtaatccgttagcaactagcgcttgttgggtttccaccagccccaattcccatgggcatccggcatatttcaccgatgacaatggactggcaccggtaccgccatcataacctgcgatagtaattaaatcggcataagctttggcaacgccagtggcaacagtaccaacaccgggttctgaaaccagttttactgagatcagcgcattggggttgatctgttttagatcgaaaatcaactgagccaaatcttcaatagagtaaatatcgtgatgtggtggtggagaaataagtgttacgccgggtacggaataacgcagttttgcaatatacggtgttactttatcacccggtaattgcccaccttctccgggtttagcgccttgcgcgactttaatttgaatcacatcagcgttgaccagataagcaggtgtcacaccaaaccgaccggaagcaacttgtttgatacgggaaaccttttttgttccataacgtgcgggatcttctccaccttcgccggagttggaaaaaccacctaacgtattcatggcttcagccagagcttcgtgtgcttccgggcttaatgctccaatcgacatcgcagcagtatcaaagcgtttaaatagctcttcggcaggttccacttcttcaataggtagaggctcagcttctgtttttatcgccagcaaatcacggattgtggtaattggacgctgattaaccaaacgagaatatttcaagtaatcgttatattcgccactatgaaccgcagcctgtaaagtgctgacaacatccgggttataagcgtgatattcgccgttatgaacatatttcagcagtccgccctgatcgagtggttgacgagcaagccaggcacgtttagataagtttcgcagatcctgctcgaaatcgctgaaattagcaccgccaattcggctgacgacgccattgaagcagaattcagttaattctgaatgtaagccgacagcttcaaatagtttagagcagcgataggaggcgatagtcgagatgcccattttcgacatgattttatataaccctttattgataccattgcggtagttaagcatgacatcagcataaggtttattaattgtgccattatcgaccattttggcgagggattcataagccagatagggatagatcgctgttgcaccaaatcccagtagtacagtgaaatggtgtggatcacgggcacttgctgtttctactatcaggttggtatcacagcgtaggtttttttctaccaaacggtgttgaatagcgccaatagccataggtgcaggtataggtaatttgttcggcgtaatgttgcggtcagataataccaacaataccgcgccatctctggcgagttgttcagcttggtcacacaatgcaaacagggcattttgcaaattggtttcttgtggattgaaagttaagtctaattgttctgcgcgatagtgtggactttgctgtgtgattaattggtgaaagtcagagtagagcagaataggagatttaaaacttaatcggtgtgcctgtccctctgcttcacaaaatacgttcatctcccgcccaatgcaggtagtgagagacataacatgtgcttcgcgtagtggatcgattggcggattagtgacttgagcaaattgctggcggaaatagtcataaataatccgtgggcggctggaaaggacggcaaacggtgtatcatcccccattgacccggtcgcttcctgaccattctctcccaagactcggatgatttgatctagctcttcgttgctgtaggcaaattgtttgtgatagaccgctaaggattgatcgttcagatcccgatgaccagcttgatcttccagtaattcttcgaatggggtcagacgcttgacgtttttatccatccattctttatagggatggcggctttttaagtcattgtctgtttcttctgcatgaaggatgcggccttggcgggtatcaatcacgataagttcaccgggaccaacgcgccctttttccaccacttcatccggttgataatcccagataccgacttcggaagcacaggtgatcaacttatctttggtgataacatagcgggctgggcgcaagccattacgatccagattacaggcagcgtagcgtccatctgacataacgatacccgcagggccatcccacggttccatgtgcatggagttgaaatcaaaaaaagcccgcagatcttcatccatatcaggattgttttgccatgcgggaggaaccagcaatcgcatagcacggattaaatccattccgccgttgagaaacagttccagcatattatccagcgagctggaatctgaccctgtttcattgacaaaaggggcagccgtgtgcagatcgggaataagcggtgtcttgaatttataggctcttgctcgtgcccactggcggttaccggtgatggtgtttatttcaccgttatgggcaagatagcggaaaggttgtgccaatggccagcgtgggacggtattggttgagaagcgttgatgaaataggcaaattgccgattctaaacgtaaatcagccagatcgggatagaaacggggcaaatctgccgccatgcacagccctttatagatagtcaccaagttagacaaactgcaaacataaaagtcgctgtcgttgatgcgtttttctattcggcggcgagcaacgaataagcggcgttctaaatcacgtgcacgccagccagccggagcattaacaaaaatctgttcaatatgagggaggcttgaaagggctatttcgcccagaatatcacggttgatggggacttcacgccagccaacgactgacagggtttcattttgtagctcttgttcgatgattgcccggcagttttgtgcaatctgaggatcttggctgagaaatagcataccgacggcgtaattgcgggctaaatgccactcttgctcctgtgcaaccatccgaaaaaagcggtcaggtttttgcaacaataaaccacagccatcaccggttttgccatctgccaagattgccccacgatgttgcattctggctagggcatggatagcggtacgtactactttgtggcttggctccccttcaatatgggctatcagtccaaagccacagttatccttttcttgagatttgttatatagcatagtgtgaacctcccgaggttctgtccgactctcacagaaactcacagacatttgtgagattaatattttttactggcgtctgaattgcgccctcaagcaaccaccacttgtttatttgtgataaacaggtggtgacttaaatgatattgtgtcactgcataattatggttcagatgagaatctgacagatgatttccagtgactttccaagttaactagaaatataaatcaggtcaaatatcaccgggataagataaggtcaggtgataagtaaagttaatgttatgatttataagtagaaaaattaacattcatgttgtgtgatatagatcaggttaggattttaatgtgatttatatcactaatattagtgtaatatctgttttgtatatgctgttaaacttttatttattagatttaaaatctaactaatattaactttacggaattaatgtgtatttttgtttctttataagaataaagttttatctttttgggctattaaacgagtaaaaaagaattttatgcttattttgtcaatgtgtttgattatttattcatgcttggattgtgcgaaaagaccggcatgaataaaaagccagaataatgtttgggaagtcatcactaaaactattaaataatactattgttttacccggtcaacaatttctgttattccttcaacgaagtggccggttttttacggtatgatccggaatggtcatatttaacgggagtttttatgaaatgaagctgctcaggggcctggcccaatattatgttgatttaatgatgaaattggggttagtgcgcttctcattactgcttgcatctgcactggtcgttcttgctatgggtgtacagatggtggtcacttttctgcttcagggaggagtgcaaagtattgatttagttcgctcaatcttttttggtttgttgattacaccttgggctgtctattttctttcagttgttgttgaacagcttgaagagtcccgtcagcgattatctaagttagttgaaaagttggaagttatgcgtcagcgtgatcgggaacttaatcagcaattaaaagacaacattattaagcttaatcaggagatctcggaaagagagaaagctgagcaggcgcatctgatattgttggataaactcaaagaagagatgaaacaccgtgagcagacgcagattgaattggaacaacaatctgtattgttgaaatcttttctcgatgcttctcctgatttggtctattaccgtaatgaaaataatgagttttctggttgtaatcgggcgatggaattgctgacgggtaaaagccagaaacaacttgtcgggctgacaccaaacgatgtttatgacaaagaggttgctcgcaaggtaatgaaaaccgatgaaaaagtgttccgtcataatgttgcactcacttatgaacaatggctagtttatcccgatggtcggaaagcctgttttgagcttcggaaagtccctttttatgatcgggtaggaaaaagacatgggcttatgggatttgggcgcgatataacggaacgtaagcgttatcaggacgctttggagaatgcaagtagggataagaccacttttatctcaacgattagccatgagctccgtacgcctttaaatggcattgttggtttgagccgtattctgctcgatactgagttgacgtctgagcaaaataactatctgaaaacgattcatgtcagtgccatcacgcttggtaatattttcaatgacattattgaaatggataaaattgaacggcgtaaagtgcaaattgataatcagccaattgattttactggttttatgtccgatctggaaaacctctctgggctgctggtgcaaccgaaagatattaaatttgtcatgaacccagaactgccactgcctgccagaatcatgacagatggtactcgcttgcgccaaattctatggaacttgattggcaatgcggtgaaatttacgcaaaaaggtgagattactgttcgaatctggtacgaagagggagagcgtttgctgtttgaagtcacagatacggggattggtatcccacatgatgagctggagaagatttttgcgatgtattatcaagtgaaaggcagtcatggtggttgtccagcaacgggaaccggtattggattggcggtatccaaacgtttggctcaaagtatgggaggggatattgtggtggaaagtgaaccgggacaaggttctcggtttacactgtctatcattgcccctgctatggaggagaatcttttatgcaaagaagatacagaagattatccacttccagcattgcatatcttattggtagaagatattgagctgaatgtgattgttgctcgctcggtattggagaagttgggtaacagtgtagaagtcgctatgaacggtaaagatgcgctagaagtgtttaagccaggagagttcgatctggtactgcttgatattcagctacccgatatgaccgggttagatatctcccgggagttaagtcagcgatatgccaaaaaggatctgccccccctgattgcactgacagcaaatgtcttaaaagacaaaaaagagtatttggatgcaggtatgaatggtgtgttgagtaagccgctttctgtgaatgcgttaactgccattattgaacaatattggggggaacagtctgtgcatcatatgcagccggaagaagaggagtcaggattgatgaaaaaagatgaagatttacttgatacagaaatgcttaaccaatacatcgagctcgttgggccccaattgattcgcaatagtctgagtgtgtttgaaaagatgatgccgggttacttatctgttctggactcaaacatgacagcgaaagaccagaaaggcattacggaggaagcgcataagataaaaggtgctgcgggatcggttggattgcgtcatttacagcaactggcccagcagattcaatcacctgatttacctgcatggtgggataatgttcaggaatgggttgatgagttaaagcaagaatggagaaaggatacggaaattttgggggaatggttgacggacgctgaaaaaaaataaccccaaccgaggttggggtgcgcgaatactgcgccaacaccagggaaaactttttacacgcctatctgatatatctttggttgcggcgagtaaatgaggaattctccgtacatcatacaagtaccaacatagcaaagataagattttttgttacaagattcattaaaatctgtgatgaagattggtgtttaaccccctaaagggttaagcaataatctactacaaatggagtgaggtatgaaatcagttgcggttgtcttaagtggatgtggtgtattcgatggtagcgaaattcatgagtcagtattaactctgctttctttagaccgtttaggtgttaaaacgagcttttttgcgcctgacgaaccacaacttcatgttattaatcatattaacggtgaagaaatgggggaagaacgtaacgttctacaggagtctgcccgtatttcaaggggaaaaattaagcctttatcacaagcaaatgccgatgaatttgatgccctgataattcccgggggatttggtgttgcaaagaatttatgtgactttgccgctaagacagttgattgcgaaataaataaggaattgttaagtttggtgagggctatgcataatcaacataaaccaatgggatttatgtgtattgcgcctgttatgttgccaaaattacttaataaaccggtgaaactaacggtcggcaatgatccagaaacggttgctcaagtagaggcaatgggaggcgtccatatcatttgcaaggtaaatgatgttgttgttgatttagaaaacaaaattgtgacgacaccagcctacatgcttgctgaatctatttcccaggcggaagagggaattgataaacttgtcagaaaagtattggaaatgactgagtaactggatgcgaaatccttttcaatttttatggtactggcttaaaaaaatcgcaatctcagttattatcttatggatagtttctgttgttgcattttcatttttgccagtgccgttttccatggttatggttgagcgccagattagtgcttggttatcggttaatttttcttatgtatctcattctgactgggtagggcaaggacaaatatcgccaaatatcgcattggctgttattgctgcggaagatcagaaattcccacaacattggggatttgactttgatgctatcgaaagtgtacttgagcgtaatcaaaatcattcaggcagacttagaggggcttcaacgatttctcagcaaacggccaaaaatttatttttgtgggacggacgtagttggttaagaaaagggttggaagccgggatgacctttgctattgaactgggatggtcaaaaagtagaattctgactgtttaccttaacatagcagaatttggtgatggcatttttggtgttgaagaggcatctaaacactattttcataaatcagccagtaaattgacggcatcagaagcggctttacttgctgctgtattgcctaatccacaccgctataaagttaactcaccttcggcttatgtcttacagcgtcagcaatggattttgcggcaaatgcggttgttgggcggggggagttatcttgagaaaaatgggttaatgaaagatgattgaaggaagaatgagaagttattcagtttgacgtgagatgatgaaaagggtaaaacgccagcgccaaaaaatgacgcggcctgatacctgaatgtttgacagatttatcgtgtcatcactttcaatcaatatatttaattcaaataagtaaatgcggttgttactcgcttaacaccgttagtttcgctggcaattttcgcggcggcattaccctcttgtttggtcagaatgcccagtagaaagacttcgccgttttccgtaacgacttttatgttagaagacttaaccgagtcactagccaggatttttgagcgtactttagttgtaacccaggtatccttagaagcagtacctaattcaacaggtttcccctgacgaatttcattgtaaacggtgtgtgctccatcaacacgtgatgctatctgtttagcacgctctggaaggcttgagtctgggctttggcctgtcagtaaaacttttccttgataggcagtggtaataatacgggtttgctctttgagctgcttatctttgttaagcgcattactgacacgggcttcgagagtactatcgtcaacctgctgaccaatagtgcggggatcggttgcggtttttgtcgctacggcagtagaactgaccacgaccgcaccaatacatccttgcaacattacagcagcacaaatcgtggctaatagggagaaaaatcgcattattggctccttagtcatcctgatggggaaaaagtgtattatcgattaagtcacataagcagttaactgttagcatatgaacttcttgaattctggtactgcgatgagatggaatacgaatctctacgtcttgtggcccgagtaagccggcaagctcaccaccatcatagccagtaagggcgacaattgtcatatcgcgggttacggcggcttcaacggctttgacaatatcacggctattaccatgtgtggaaatcgctaataacacatcgcctggctgacctaatgcccgtacctgtttagcataaatttcatcatgctgtttattgcttgaaatcgcagtgatgaccacattgtctgcgttaagtgacaatgcgggcaggcttgggcgctcagtttcaaaccggttaatcatattggcagcaaaccgttgggcagtcgctgctgagcctccattaccacagcaaaggattttgttaccattcagtaatgactgaaccatcattattgccgctcgcgagatagcatcaggtaatgcttctgcggctgcaatctgagtttgaatactttctgtaaaacagactttaattctatccagcacgtttataacctactcagtatcattttaacgagtgaactcattttgattgaaggcattttgcaaccattcaaattgttgaccagtaatagcacaaatatcaaagcgacaagaagaggtttcaaaacattcacctcgttgaaacagccaaactgcggcagcgtgtaataattttttacgcttgctacgagtgattgtcgccaatgcatctccatattgtcctgatttgcgaaaacggacttcaataaagacccaagtttgcttgtctttcataatcaggtcaatttcaccaccgtgaactttcacatttgcggcgataaaagataatccttgtttttgtaaaaacaactttgcctgcgcttcatagttgcgccccagcaaataacttgtcagcttttttattttcatcctactttttattctcattctgaaatgagtcatttgaattgaaaggccgcttggtgacaagcggcaagttacttaattaaatcgcagtgatttggccttgatgatattgcatccatgagagttgtcggaaaatggtgcagttttcctgaacggacagcactccagaagcaccattgagatggaaatcactttgaagctgaacttgactgaattgatttgctaatgaccaggcgtcaatacccatagcgtaaaggcgcatcaaagagtaatcattcgcaaatttactgactgcttgctgcatcagtggcaagttagcaccggcgattaagggaatgtcactgaattgcattccttccatctccaggcggaaatcgggaccgacgcccgcctgattactgcgggaacttgcgtaaagggcgggcttatcgcgggaactgattgccatatcaatcattgtcttaattagcgtcagttcatccagggtagaaacaatataaactgcatccactgagccgccagtagaagtaggaacgacatcggtgtttatctgggggatttccagatcaccaatagcgattgatgtaggttgattgctggtgacattgacggctgttccggtcaagcgaataccggtacctctattaattaattgtttcagttcggcagaagagccaaaagtttgttgcagaacagtatgtcccccttgtttttgccattcctgtgcaaaggcgttggcaatgcgatcaccaaaagtccctctggggaccaaaatcagaggattctgtttttgttgctgccaaatatgttccgcagcatttttcgcttcatcttctggtgacaaagaaaaatagcagatattagagtgtggttgagcattgtctaactcgttaagtactagcatgtttaatgccgcatttatctgaacgagtttaaccacatctggcttaagtaacggcccgacaattaaattcacaccatcctgcttagcctgaataaataagttttccaatggctggcttgttgtgtcatagattttgacctgttgtgtgttaatcggcgcattggctatgacaggtgttgtttgagtggctggtattgctgagtttatgatcgccccttcactaggggacatattggtagaagccacgctatctgacgcactatcactgtctgttatagataaattttccgggttttctgttggcaatgatggacttggtaaaccggcctgagcatcaagaaaaccttggcgaatggcttcaccgaatacttttgcttggccgcttaatggcaggaacagagcaatacggatattcgtatcttgctgttggatggctgctggctgtaactgagttgggagtgactgtacagcagggttttgtggatagcgaattttccagtcacggatagctgcctgtagtttgtcggagtcctgtttgttatcctgataggcactgagtaagtccagccagccttgcagaacattttcatcagcgttgatgaccaacccacggcgctcttgtggtgaaagacgggtcagcatttgccaggtatcatcgatatttttttgacgaaccgcactctctttcacgagtggttcctgagcgatataagcacggatgacatcaagagaaggttcgccatgagcggcatcaatgatagattgataacgggcgatttctgtactgattttgtcctgagtttgcgaaggttgttgtccctgttggtcaggtacggtacatcctgcgatgatcatgactgccagcatagctgaacagactaaaccagttttgatacgcacaaaaattgaggaaagcatactgtatccagcgatgtttttttcaaagatgctcaattttaaatcggccattcggatgaaacaatgaatcaacctaatcgagcagtggttacgacatccacgctatatgttgtgccaacccccattggaaacttgggtgatatcactcagcgtgcgcttgaagttcttgagcatgtcgatctgattgcagccgaagatacgcgacatactggcttgttgcttcaacattttgccattaatgcacgcatgttcgcacttcatgatcataatgaacagcagaaagcagatcaattaattacaaaactccaacaagggcaaagtattgcattagtctctgatgcaggaacgccgctgattaatgatcctggttaccatgtggttcgccgttgccgtgaagccggtattcatgttgtcccacttccaggaccttgtgcggcgataaccgccttgtctgctgctggtctgccatcagatcgtttctgttacgaaggatttctgcccgcaaagcgtaaaagtcggacagatactttacgggctttgcaacaggagccacgcacattaattttttatgaatccacccatcgtctgatcgaaagtttagaagatatggttgaggtgttgggagctgaacgttacgtcgttttggcgcgggaattgacaaagacttgggaatccattcaggggatgccagtaggtgaacttttggcgtgggtgaaggaagatgaaacccgtcgccgtggtgaaatggtattgatcgttgaaggctataaaaaactggatgacgatgttttgcctccagaggcattaagaacgctggcgcttcttcaacaagaactgcccttgaaaaaagcggctgcactggcagcagagattcatggtgtgaagaaaaatgcactttatcgtcatggattgggacagaatgaagaatgatagcaattgctaaattagggcagataatcggtaaatgcctatacattattgggtaaacctcttataatccgccgcggagttgactagacagtcgctgctttatcattaatcctttggatgatagatggaggagaggaaagtccgggctccacagggcagggtgccagataacgtctggggggtgaaagcccacgaccagtgcaacagagagcaaaccgccgatggcttacttaatgtaggatcaggtaagggtgaaagggtgcggtaagagcgcaccgcacggctggtaacagttcgtggcacggtaaactccactcggagcaaggccaaataggggttcattaggtacggcccgtatcgaacccgggtaggctgcttgagccagtgcgtaagtgctggcctagatgaatgattgtccacgacagaacccggcttatcggtcaacttcacaaatttagccccgttagattggaatctgacggggctttcacttttttaagcagccagatcaattaacagtccttggaattccgtatctgcttttaaaaccagacgactttcttcatgaataaaagcgccatctccgcatttaattaaattgttatccttagaattgcctcttatttttatatttccgtttagagattgcagataggcattttttcctttcaattgcagatgatgagattgatttttattaagggaaatatgatttacccacacttgttgacgtaattgcatactgccatcttctgcggttggagaagctagcatagccagtggttgttctggtaattccattcgttgcaatggtaagctttcctgctgaggaaaggcattcagccaaagctgcaagcgcgttagtggcttattaatactggcattatgttcactgtagctgatgccttgacgggtagaaaatagtaaacattctcctttacgggctctgatatagttgccttcgctgtcacggtattctgcttcaccttgtagaataatattcaatatatccacatgtggataggatttaggttggaaagcggctttgggggcaatgacttcttgattgagtacacgtagcgcgccataacctaaaaactttgggtcaaaatagtgaccaaatgaaaatgtataacgagcttgtagccaaccatagtcagctttcccacattgttttgctgttctatttataatcataatggcggttaccttacaaaaacacacacaaacaatagtaattatctggacggcgaaatgttagccagttaatctggtcagcatattcaaatttcctgattgagaaaaatatgagcaaagaacgagcgcttacactggaatctctccgggtcatggatgcgattgaccggcggggaagttttgctgcggccgctgatgagcttggtcgtgttccttctgcacttagctatacgatgcaaaaattagaagaggagctggatgtagtgctgtttgaccgttcgggtcacagaactaaattcaccaatgttggtcgtatgctgcttgagcgtggacgtcaattgcttgaagctgctgataaattaacggctgatgcagaagcattagcgcgaggttgggaaactcacctgacaattgtttgtgaggcgttggttcctgcttcttcattatttccattagtgggaaagcttgctcaaaaatcgaatactcagctctctttattgacagaagttttggcgggggcatgggagaggctggaaacgggtcgggcggatattgttattgcaccagatatgcattttcgcgcatcggcagaaattaattcacgtcagctttacagcattaccaatgtctatgttgctagccctgatcatcctatacatcaagagccggagcctttatctgatgtcacgagagtgaagtatcgtggtattgctgtggcagatacagcgagggaacgtccggtattaacggttcagttgttagataagcaacagcgtttaacagtaagttctctggaagataaacgccgtgctctcttggctgggttgggcgttgctaccatgccttatcctatggtggaacaagatattactgaggggcgtttgcgggtgattagctctgaatatagccatgagacaaatgtcattatggcatggcggcgagacagtatgggggaagctaaatcttggtgtttgcgggaaatccctaaattgtttgttagtcggtaagtagaagcgatgtgagcaatcaaattagaagacaggctgtaaaaaaacatgattcgatgattgcttagcgaaatatgaaattatggcacaacgaatctaacattcgtaaatggcgccagccagtacagcagactgtctggttggctgtgttaatctttttgagcagacatcatgggtaggtgtaatttgccttaatctaaattttgtgatttctattcgctgagtattgatgattctatttttggggtaccagacagtgatgaaaacagggagactttcgaatttatcaataacaccaatggtttttccctaagtcagaatggttgccctgatgtcaatatataccctaaagatttcaagatgtatcgcgacggcaagggaacgaatccccgggagcaatagtaaactatgtgaccggggtgaacgagcgcagccaacaaagaggcaacttgaaagataacgggtatatcttaccaaagtcactatgatttaataaaagttggatctattggctaaagtaagccgaaagatcttctagatcccccggattactatttatctttagacccaatattggatagttggctgataaaatctttgagcttttgatcgtttcaccttttacctgtgagcggttatttttcagattcagaacagccatagcaagatattaccagtttctttttatcaggtggtcgatactgaatttacctgggccgatgatagccagtaacagataaccgccaccaatagtcaggttcttgagaaacatagtttggttcatgccttcagcaaaattgctgtggaagaggatggcagtcaggacacagaagccaaaggtaaataacgcggtggtacgggttaacaaaccaaacagaactgccagaccaccacctaattcaagtaagatcgtcagtggtaatagaaaactagggacgcccatagcattcatatattgctgggtacccgcgtaggaatcacctaattttccatagcctgcaacgataaatagaatcggcatcaaaatgcgagccagtaacagggcactatcttcaaattttttcattaacaactcctaagacacaggaaaaataataatagtttgtttgatgattaacttgtaccaacccgaaacagcacaatttgttaatcattaacggatggaatgtatactaaaggtagatgaacttagttgtaagcaaggattattaacaattttatacaaagtttttgaatgtaagcaactaaagtgatcatcaatgagggatattatgaagaattattactatttccatttcaatagtcgaatgatatgacgagacaaatgataaaatttcacaggatggcgaaggccatacaaagagatagcatggattgcaggtcccagatagggttttaatgacaaaagcttttgccagcttttgtcataaggttcagtgaggttcttccagagctgtgtattgttggtgagttcgaggcgttgtagttggatatttctcattagctgctgttctttcagcttttttttctggcgttgtttactcattactatgatcctccaacatttctctgtctatctttaattgctcgcgagttgcactaagtaatgttgaatttcgcgctttcctgatggtccatataaggccaataagcgccagaacgagtagtgtgccagtagtacttgctaatacggtaaaacgccagctgggatcgatagcccaaaaaatcataacaagtaaacacatgaggccgaaagcggtgagcagtaatgtcaggctggctatgactaccagctgtatcaaagtggctttttctttttccaactctacaacgatgagttgtaaacgagtttctattatctcgataacaacagaggcaatacgttggagaatgtcaaggacccctttaccggggccttgagatttggatgagttgatcatattagcgtttagctaacactacacctaatacggcaccgacaacagtaccaataccgatgcttacccaaggtttatcgtgaacgtagacatcagcacggcccgccatatcttttgttttcttaacaaccatatcactggcattgctgagtttagaacgagtatctttgatgacttcctctactttgccgcgaagttcttccagctcgactttggatttatcaccagagcttttgatcacttcttccagtgtatctgcgagtgattttagttcaacgtgtagatcttcattagttttgatctttgacatgtagattactcctcaatgtaaggtgtgtgtatttgacttagttagttgcttttcctgatgcaggaaaagactatcactaaatatagcttatattttggaaggtgaataaaaaacattagcgttatttcactattctgctgcaaacgatacttttatctgcagcagggagggatattagattttattggaattaattactttttttgaggggattggcaagtttttttacgccatacaacgagcaaactgccgctaaaaccaataataagtaaagcaagtggcagtaatatcaggaaattcattaccaagtcttcatattgacggaaaatgggggtcttaccaaatgcataacccaaagaggtaaggataatgacccacaggaagccactgagccagttaaaaaactggaaacgactgttttgtagacctgtcagtcctgcaagtgttggtaagagggttctgacaaatgcgaggaagcggccaagaagtaaagctgataggccgtggcggtgaaaaagattgtaagctctttggtgataataagctggaaggtgagagagccagccttgtactgtcttggtatttcctaaccattttccttgaagataaccaatccaacaacctaagcttgctccggcagttaatactacaatcgttagagggaaactcattgcacctttggcaatcaatacgccaactagtataagcaggctgtctcctggtaaaaatgcagcaggaaggaggccattttcaaggaagagaatcaagaatagcatgatgtaaatggcccataatagggatgggttggccagagtttcataatcctggtaccaaagtgcatatataagttcttttactatttccatcaggtgttcctaaaatgcctttgttcgttcatcctgaaagcatgaggctaaaccgattaaattacatcctattttacgttatttggttggttttcatgccttttcactgttgaaaaaggcaaatgacgcagcctgtgccactgtaacaaaatcaggggtgactaaacagaaaattttggtgatcaattgaacgttcattaaaataggataagaaatgggtctataaggcgggcttgttaggtttcttgcatttaaatgaatgactgtttgtcctactattttaatctgtttttgttaccattttattcacttatgatttactgaccgctgaccgctgactgctgaccgctgactatgagtcaatattttttcagtggtagattgattcttgtctgaatttgatttatttttcaccgcagcaaaggggagtaacttccttagccggtttatcgtcattacgatgcaacagcatccggtagccgggcaaccttgaacttatacctgatggtacattttctgtgttgtaagtgagaccttgccagaaggcgagggttgcttgcaatacatccttatccacgatgtggggaagaaatatagcagcggctggcgtcttctgagacttcagccgtttttgtttatgagagaaagaaaatgaactctgtgggtagtcctctcttatggggaagttttgctgttttaattacgattatgttgctgctggatctatccttacaggggcgtaagaaagagcaagcaatgtcatttcgtcaagctgctgtctggagtgtaatttgggtaagtttgtcgctcttatttgcattaggattatggtggtattgcagagaaactgtaggggtagcggttgctaatagtcaggtaatggcttttcttaccgggtatttacttgagaaagcgcttgctgttgataatgtgtttgtatggctgatgttattcagctattttgccattccggcaaatttacaacgtcgggtgcttatttacggtgtcttaggcgcaattgtgctgcgtaccgtgatgatctttgcagggagctggctggtttctcaatttagttggatactttatctgtttggcctctttttgctggttaccggcgttaagatggcgttggttaaagaggatgattctccgataggcgataaaccttttgttcgttggctaaaagcgcatattcgcatcactgataatcttcacggagaacgtttctttgtgaaagaaaagggtttgttatatgcgacgccactcatcttggtcctgattctggttgaaattagtgacgttatttttgcggtagacagtattcctgctatttttgcagtcactacagatccttttattgttttgacttctaatcttttcgctatcttaggattacgtgcgatgtattttctgctggctggggtggcagagaaatttacaatgcttaaatatggtttatcagtcattctggcatttatcggtattaaaatgctgataatagatttttatcatattcctatagggggttctctgggagctgtagccagtattttggcagtaacaatgattattaatgtttgggtaaataaatacaaagcgacagagaaccagtaattaggtaactattttttaacagataaccatatcttttttgaatggggagatatggtttcttcttgtcttaaattgctgcgaaatggttaaacataaaaacaaataattgtattttgtaaatgtgtaaattgccgttttgatcacacaaatgtgaatgtgttgttaataagtgctggcgaggttgtatattttaactatcgctgcttttctctactcttggtttccctatactgaggaagcaaacacaaaaaaatatatactcgttatctttcaagttgcctctttgttggctgcactctctcaccccggttacatagttcgctatgctcccggggattcgctcctttgccgtcgcgatgcatcttgaaatccatagggtataggtttaacagaactgttaataaaatggatcagctatggaaaaacaaaaacgtggcttcgtgcattacattgtacaaggaagcctggttaaacaaattttggtaggtttaattgcagggatactgttagcgtggttggcaccttcggttgccaaatcagtcagtttacttgggacgttgttcgttggcgccctgaaagcagtagccccggtattggtatggattttggtcatgtcttctattgctaaccataaaaaaggccaaaaaaccaatattcgtccaatccttatcctctatatcttgggtactttttttgctgcgttggttgctgtggccggtagctttatattcccattaccgctggtgctagctgtcaatgatgctcagatgtcgcctcctgaaaatattatagaggtgattaaagggttactggttaatgttgtcgctaatccagtgaatgcattactgaacggtaactatatcggtatccttgcctgggctattggtttgggtatcgccctgcgtcatgcggcggattcaactaagtctctaattcatgacatgtctgaagcggttactcaggttgttcgggtggtcattcgttttgcaccggttggtattttcggtctggtgtctgcaacaattgcagaaacggggtttaatgccttactgggatatgtccaactgctggttgtattactgagttgtatgttggttatggcacttgttgtaaatccgttgattgtttactggaaaattcgtcgtaatccttatccactggtatttgcttgcctgcgtgaaagtggcgtaacggcatttttcacccgcagttcggctgcaaatattccagtgaatatggcgatgtgccgtcgtatgaatctgcatgaagatacttattcagtttctattccattaggcgcaacgatcaatatggaaggcgctgcggtgactatcccggtgttgactctggctgcggtcaatacgcttgggatacctgttgatgtgcctacagcattattgttaagcgtggtttctgccatttgtgcctgtggtgcttctggtgtggctgggggatcgctattgttgatccctctggcctgtagcatgtttgggatttccaatgagattgcgatgcaagttgtagcagtcggtttgattattggtgtattacaggattctgcggaaacgagtctgaactcttctaccgatgtattgtttactgctgctgtttgtcaggctgaggatgaccgtctgtcatcggatcagttaactcaacgtaattaattgaagtattttggtttaaaaagattaggtaagaaagagtaaaatatccgcgccaggaatggcgcggtttgaggatttaccctgtcttacggtctgtctatgaccgtcattatttatcatcaaattttaagacctaaccgagtaccttgatcgatagcccgtcgggcatccaattccgttgcaacatctgctccaccaataagatgcacggtttttcccgcttgctgtagcggttgatatagttctctcagtggctcttgtccggcacaaataacaatattatctacggcaagacagcgttgttccccattgctgctaatatgtaatccctgatcatctattttcaaatattgcatattgttgagcattttcacaccacgcaggtgtagattggttcggtgtacccaacctgttgttttacctaatccttcaccaacttttgtcggtttacgttgtaatagataaatttttcggggagaaggttttggtttagggccttcaggagataaaccaccacgatgtgtcagattatggtcaatgccccatttttcgctgaaagtggtgctatcaaggctagtactttttcctggttgactcagatattctgcggtatcgaaaccgataccacctgcgccaatgatagcgacacgttgaccgacatttttcttatctcttaatacatctaagtagctcagtaccttttcatgatgaataccatcaatggtgagttggcgaggcacaatgccgctggcgataatcacctcatcaaaatcagaaagtgcttctggtgttgcggtttggttcaaccgtacatcaacatgatggattgttaactggcgctgaaaataacgcagtgtttcatggaattcttctttacctgggatctgtttggcaatattaaattgtccgccaatctgtccgtcacgttcaaacagagtgacatgatgaccacgactggcggcggtcactgcaaatgacaatccggcaggcccggcaccgacaaccgccagttttttcggtgtggtggttggctcggcagtcatctctgtttcgtggcaggcgcggggattaactaaacaggaggctatttcaccgacaaaaatctgatccaaacatgcctgattacagccaatacaagtgttaatctcatcggcccgtccttgctgggctttcataacgaattcagcatcagccagaaaaggtcgtgccatagaaaccatatcggcacaaccttgagccagcacttgttctgcaatgttggggtcattaattctgtttgttgtgatcaatggaatagaaactttccccatcagcttttgcgttacccaactgaatccggcgcggggaaccatagtagcaatcgttgggattcgagcttcatgccagccgataccggtattgatgatagatgcccccgcttgctcaatagcaactgcgagttgctcgatttcctgccaattagaaccctcttcgactaaatccagcatcgaaagccggtagattagaataaattctcgccctgttgcttgatggactgctttaacaacttccacagcaaaacgcattcgattttcgaaacttccaccccatttatcttggcggtgattggtacgggtagtcagaaactggttaatcagataaccctcagaacccatgatttctacgccatcataacctgctagttgtgccagttgagcacaatgagcgaaatcagcaatggtttgctgaatatcttcttctgtcatttcacgaggcatgaatggattaattggtgcctgaatagcggtaggggcgacaaggtgtggttgatagctataacggccggtatgtaggatttgcattgcaatttttccaccagcctgatgaactgcgtctgtaataactttatggtgaataagatctttttcatctactaggaatgcagtgcctttccctataacaccttgtttatttggcgaaatgccgcctgtgacaatcaatgccacgcctccggctgcccgttcagcataaaagcgggcaagcctctgggcgcgatcgggatgttcctctagtccagtgtgcattgatcccatcaaaatgcggttttttagtgtggtgaaccccaggtctagaggggcgaacaggtgaggataatggctcattgcaatctccatcgggtgtttgtcaattataaccagattattattgtgttctaaaccaccagtcaaaactcaaagtggtcggatgagtgatggttcaaatttagatggaataaggttgattgggaaaaaaatgttaaatgaatgtgatgaaggtcatgaaatcaggttatttcatcgagttagtgaaaagaatctgactgattcagtcaggcgatttgtttacccagttttagtatttttttctgaatgattcgacagccgcctgagatgttaaaagtgtgggttttgctttaatcggggattgatttttcatatattaacttgattccagttttgattctggaatagggtgaactcttctattctgacttaatttataactcagtggttattatgaaaaaacagatgactgaatgggtaactttggcaggaaaaggggtgactttagaacctctgacacaccaacggcatgatgagtttttacaggcaattgaagaaagtgagctgcataaattgtggtacaccagtgtcccttcgccggctgagctaggtaacgagattgaacgccgtttattgctacatgaaaaaggtactatgctgccttttgctattgttgatcatcgaacaagtaaagcggttggcatgaccacgtatatgaatattgattctgatgtccgccggttggaaatcggttatacctggtatgctcgttctgttcagcggacacatattaatacggaagtaaaatatctcttattgaaatacgcttttgaagaattaggatgcatcgcagtggagtttcgcactcatttttttaatcatcagagccggaaagcgatagagcgactgggtgcaaaacttgatggaattctgcgtagtcatggtgtatctaaagatggcagtatcagggatacttgtgtttacagcattatcagtggtgaatggccggcggttaaaatacatcttgaatggcagatggttaaaccgagataagagtcatcttaaaaattaggccgctctgtgaaaagtagcggcctgattctgatttaatttgaaggcagagaatgctgcattccattatccagttcatctagtaattgatagcggcggcgatattctgcccgcttcttactggctatatcttcaagcggttttctttcaatggataaggggagatggaaatccttatttttgccctttgctccacctaatgattcccagaaagagtcgtaatcagcgactaatttgtctttctttttatgccaatagcgtagactcttatagatgtgagtatcattgctggctgccagaatttgctggcattcaaagtgggcagcgagacggcaaatggattcaatcagtaagcgttttggaaataatccataacaatctttcgttgcatcgcggataatttcaagggttgcatcgcctttggaaccttgtagtccaccgatgaacagtgtttttttaccggcaatagtgagtagtgtgaaagcgcatcttgccaaagttttactatctcctgttgtaataaatagagtgagctcaccttctttattaaaacaatccatagaatctagaaaaatagtgtaagttccactcttaccattgataaccgctaatggatatgcattggagcgaaatattttattaacaatagactgatttaacccagtaaataatagctggtaatgttcatttattgcacgtaacgtctgccctctattgaagttaatacttagataagggcgatgtaatttagaaggtaaacaaggctgtttcttcaaaatatccaaatagaacggcgtattaactatctggtttaatagttttagtgtcgatattggcatcagagcgctacgtaaggcaaatttagtgcgattctgggcagaataccaatgagggctagggctaattttttttccgactaaatctgtgaacagccgaattcctgaactggcaggttgatacatatatttcatttatttcatttctttatctagttctaaaaaatactggagggaagaagacttgcaaaccgtgagtatactcctttggtattaaacaaaacttcaacggatgtttatttatatttttttaagataaaaaatcaacagctgtttaatgaatgtttagttattaaggggattttctcatgtttgtttattattcgtttagttttctgtgatgctttttgctgtaaaagcacatccagaaagatgagaaaaacggctataacttgttgtgatacccgagctcatgatctgtaacaaatttagcaggtgagtattggtgataaatgattaatgtcggatatattcttttttgaatccgtttaattaaaacattaataattattctattaatttgttctgtttttacattaatgtcagaagagaatggatgaaatatttttattttgtgatttatatcatgttgttatgaaaacccccttattcttgaaagttaagttagtacttgcagaatatgtattgtatttttattgttaattaaaatttatgattttatatgattcaattcacagaaagggcattaataatggatgagatacttgttcttgttgataaacatgataatcccattggttcagcgggaaaagctgatattcatcagaaaggtatgttacatcgggccttttctatctttgtttttgataataaaggaaatttactcttacagaagcgagcggcaaccaaatatcattcagccgggctttggaccaatagctgttgtggtcaccctagggttggtgaagctctggaggccgctgcacatcggcgtcttggcgaagagatgggttttgactgtccattgaaaaaggtttcgtcatttatttatcacgcgatacttcctaataatttgattgaatacgagtatgatcatgtttttattggacgctttgataaagaaccgataattaaccttgacgaagtatccgattataaatgggttaatcttctgaaattgagggcgctaattaataatgctcctgatgtgtatacggtttggttcaaaaaaatcattaatggtctttcgtatcaagatattgaggagtggcaaaggctgatttgataacaatgtaatttatcggtagccatagcattggattaattagatatgaatatttcattgaaatttaccaatacgccgaaaatcttgacaaattaagggtgtgacgcttttaaaaaccgtttaataaggaaaagttcatgagtagctttgataatgtgttttgcactgatgttgagtctgtctcgccctatcacatcattcagggggaaaccaccaacgattacgaaagtaaagtggtacaaacttattgcggagatccagaatgctggcgtaaggtgattggcgatacactgttattccagtttggtgtttacgatgatcctgcttcaaagctaccaatttcattggatgactcaggtattcgttattttgatcgtcagctgctattggctggtttggaaacaaagatcgaaaggccaccaattcagcgtattttggatatcggttgtggttggggttatatcctgaaatatctggctgagcgttttcctgaatgtaagcgtttggatggagtaaatatcagcgagcagcagttgcggtattgtgctgaatttcacgcacaatatggactttctgagcgtatcaatctgtatctgtgcaatgcacaggatattgatcgcttacctgatccgcaggaaccttatgatctggtgattatccgtggtgtcatttcacattttccggactcgttgtatgaaaaggctatgagtgcattgttcaaacgggtgagcgctggtggtcaggtgattatttctgaaaatctctataatatggagttggataattataaatcggatattcctgacaccgttgatcgtctcgcttgtgctaaccgcaaaacacccagctatttcagacaagtgttggagaaaagtggcttcgttattaaggatatgagggtattgccgtctaatattgatgtggtgcattggttgttggatgttaaggccaacatcgaacgaaactttcctgaaggtgttagtggtcctttggaagaattgcgtgtactggctgaaaacttttcggttgctcaggtgaaaaactatgtgtcgacttatagtgttattgcacagagactttagaaagcagctttgttttcttggttgaagagtagggccgttaagaaaatctttgtcgccgttttgttgttactgaccgttggaaataaaaaagccactttttacggagtagcctcatcgccaatgcagcgtcagattgatgccgcctaccccgaattatcggcagggctgcatttacccaaatttgcccgcattgaggcacaccctgaaaatacggtcagcggcgatatctccgacccattccggccacgctatgcggttgatgtgcaattattggctgatgatggtcaggataccgctgttcctgtttatcacgcggttccgctgcttttgccgatggcgggcagtgaatcgggtatgttccaatatccgccagtcggaacggtggttgaaatcgcttttgaggcaggcaggctggacaagccctttatccggcagacattaagccagggtaataccttgcccgatatcaagccaggcgaacaattgcagcagcagcgggcggaagtctcgcagagagtgactcaggaagggcattggattcgtcagactgaccaaactattgatgaatcgtccatgcaccgtgaagtcagggcagacacggaaacacgtaacgtagttgcccgggaaaccacgatacaggccacggataaaaccacggtcttgggcacgtctacgctactggcgggcgctgtccggcaaattgcagacggtgactatagtatggtgacctcatcaaatttcgttgtcagtgtggggaaagaggccaatgttgaagttgggcaaaagctgatagagaaaattggcctgcttaagcagagcatcgccggcgccaggcaagaaatcgtcgcgctcgtggtttgggtgggcagccagcaaatcaatgtcatgaccttgatgttagagacgttggatgtggttaaggcactggcggaacagattgccgcccatacgcaccacaacacaggtatgctggagaatgccagcgcgataaggaacacggcctataaatccgatggattgaaacagaagtattcccctgtgattgggtgaatatcattccatttgtatgagcttttttactctgcaccctaggttgatattttatgctataggtattagactggttatgtcagttaaggaatatcgcgctagggctgaggctaccaatctcggtaatagcacaaaagatacccgcgccctgtatgggtaaaacaaaaaagccaacctcaccagttggttttttgttttttccaactcaccattttaattgattgaatcatctgaaaataaacctataatcaacggctgttagtttggggtagcgttctggcctgtgtatctctgacgcaagttttcgtaagtcctggctgaagaacaggtggtgctgcttcagtgcctcggtcagagcgcgatattccttaactgacttgatggaagtcagctggacaggcagcgtaaaggcaatggctggttaagtcgtgctcctaactggagcaaacgggtgaaagcatttattgatactgctatcatcgttctcaaagagttaatcgcgcttttagagctgatccgtgcatttctgaaatagataacggaaacgtagctaaggccatcgggtaacctcccggtggcctttaacatttaccgcctttgatcaagcaagccattcttgtttaagtggcccaatatattgatctaacggcttaaatttggtaatcccgactggacttgaaccggtgttcaagcggttattgaccacaacagtctcgcggcgcttatgacgaaataaatgaacttatggcgaaaacggcactacaccgcacccgcctgcacgctttggatcagaaaattttttcaggaaatttcagtttttggatcaaaagaggatcacgaagataattacaatgcaatgatattaaaggaaaaattctattttacgtgaaaaagaagatcacgaaaggaagccgtgctttatcatagaaatcagatagagcacggctttacaggatatacagaactgaaattattttatccttttgcattatgacaaggagaaagtgaaagtattaaagtgtgcttaattcattaataagcgcaggattacgttcaagcatcttaagtagtttcagtgatgaaccagaaggaatgcggcggtgctgttcccagctttgaattagagatgtagaaacgccaacagcttcggcaaattcactttgttttaagccaaaggtttcacgtaagttttttacatcaggcaggcgatggtaatggatattttcatcaaaaacagaaagttcgcctttttcaattgctaccatctgattcatgctttcaaccaaatcgttaaaaagtcttttgtccatagtctctcctgttgtatgaacattgtcgcgtatctgcgcggtgttaattactgtaatttgttactgatggctttaagtacctctttttcttttggagttaagtcatcttttttatttttagggtaaatcaaaaggagatagagcctcccagttttggttatggcatagtagataattcttactccgccacgttttcctatcctttctcgctgccaacgaatctttttacatcctccagtagcgctgatggtactaccctgctcgtgattctttagtaagtgctcctgtaatagcctaaattcatcatcggttaacagttctgctcgttctctactaaatacgggagtttcaataaaaaccagatattccataaaaaacatccttgcctatatatggaaatatgatattcgtacatagtacgatagtcaagataaaatcgtactggagactagatcttaatgcacatagaaaattgtagttgatcttctgaaaacaatttattatcgttttatgcatggggactcaaaacctcaagtaagcggtcaaaaccaaccccgttagtgttgggttttttatgcctaatttttaatggtagctattcggctgtcatctctctgattcaatgtcgggagggcgactaatacaacacccgcaaggggaataagtccgcggtttcttactgccgttttgagcctcccgacaccatattcttaaatggtaaacccaattctcaaagaaaagtaaggagtcagcaatggctagcctatccgtaactccattcatttttgaaaatcagcaagtacgtacattgattaaaaatggcaatttttggtttgtggcacaagatgtatgtgatgctttgaaaatcacaaacagccgcgaagctatcgcaaaacttggtgatgatgaaaaggatgtagctttaagtgacactcttggtggagagcaaaaagtaaacattatcaatgaatcaggaatgtattttctgacaatccgatgtcgtgatgccgtaaagaaaggaactttaccccaccgttttcgtaaatgggttactagtgaagttttacctttgattagaaagaccggtagctatataggcagggagaagagtatttcactaagtcagctcattatttgcccttattgtcagaaaccagccaatgttttaagtacagaaaaattgcatagacacagaattgaagtcttggcaatttgtgattctatttggtgttcagaacaagcttttaaatttgatctatgtttctcacattatcttcaagaagaagcagggataagggtagaaaaagtgatgatgttaagaggttgataaatagcctaactttctgctcagaaattgaagctggctagtgtgttttcatctgggtaatggctttatgaaaaaatctctgtcgccactgactaccagaaacaaaaaagccactcttgtttgagtggcctaatgtactgatttatcagctaaaatctggtggcccctactggacttgaaccagtgaccaagcgattatgagtcgcctgctctgaccaactgagctaaggggccgttgaatgggagggattatacgtacagttttgctcgcggtctagctttgtaaattcgtatgatcattttatgtgcaaaattgcgtttttagtaagtagtgaaaacggggagtgatatatattagttgtttttatggtctatttaacgtttttatccgttactggattaatttttcagaagcgattttgcaccatctggtcatatattattccgataaagatctattttatacccgttatccttcaagttgcctctttgttggctgcactcgctcaccccggtcacatcgttatctatgctcccggggattcactcccttgccgtcgcgatgcatcttgaaatccatagggtatatacgtgattattttaatgataatcatatttctttcattctttcttaatcaccggatggaaaacgacttttttatctatcggctagagagaatgttaattgagttatataagaggaacctgtgatgatatttctgcataaataccatattgtcagaggatttagagtatcgccgatattaaaaacaaaagcgtctgccggagcagacgctttttagtcagaatgaataaaattgattattcatcaaggaagctacgcagaacctcagaacggcttggatgacgtagtttacgtagtgctttcgcctcgatctggcggatacgttcacgggtaacgtcaaactgtttaccgacttcttccaatgtatggtcagtattcatatcaataccgaaacgcatacgcagtacttttgcttcacgagcggtcagaccagccaagacatcgtgggttgctgagcgcaggctttctgaggttgcagaatccagcggcagttccagcgttgtatcttcaatgaaatcacctaaatgtgaatcttcatcatcaccaattggcgtttccattgagataggttctttggcaattttcagtaccttacggatcttgtcttccggcatcaacatacgttctgccagctcttccggcgttggttcacgccccatttcctgcaacatttggcgggaaatacgattgagtttgttgattgtctcaatcatatgaacgggtatacgaatggtacgagcttggtcggcaattgagcgtgtaattgcctgacggatccaccatgtggcgtaagttgagaatttgtaaccacgacgatattcaaatttatcaaccgctttcatcaggccaatgttgccttcttggatcagatccaagaattgcaggccacggttggtatattttttggcaattgaaataaccaaacgtaagttggcttcaaccatctctttttttgctcggcgggcttttgcttcaccgatggacatacgacggttgatatctttcacctgttcaatggttaaaccggtttcttcctcaatttgacgaagtttttgcaggctacgctgtacttcgtcttccacttcaaggagtttttcagaccacggtttgttcattgcttttgcagcagtaaaccaaatgtcactggtttcattaccggagaacaaagtgatgaagttcttcttcggcattttgcactgctcaacacacattttcatgatttggcgttcttgaaggcgaacgcgatccatcatagaacgcatgttgttgaccagatagtcaaactgctttggcaccagacggaactgtttgaaaacttctgaaagttttaagatttcggccgcagtatttggatgattgcgaccgttttccttaatttcctgacgggtgatgtcatactgttgtcgcagttcttggaatttctggcgagctaattctggatcgatgctgttgtcatcatcactatcgtcatcgctgtcttcatcatcgtcgtcttcatcatcatcgagctcttcctgtggaagttcagaaccaacgtgggtggcagtaggtgcaagttcttcttctgcgttcgggtcaacgaaaccagtgatgagatctgacaggcgagcctcacccgcttccactcggtcatattgttccagtaagtaggtgattgcttcagggtattcagcaacggaacactgtacctgattgatgccatcttcaatgcgtttagcaatgtcaatttcaccttcccgggtcaataactcaacggtacccatttcacgcatgtacatacgtaccgggtcggtggtgcgaccgatttcagattcaacactagacagtacttgcgcagcagcttccacagcgtcttcatctgtgtcgttagcggtttctgctagcatcagatcatcggcatcaggtgcttcttccattacctgaatgcccatgtcattgatcatctggatgatatcttcgatctgatcggaatcgacgatatcttccggcagatggtcattgacctcagcataggtcagatagccttgctccttaccacgggtgacaagtagctttagctgtgactgcgggttttgctccataagacggtatccacacttcagagtatttgggttggtgtcggtcggcgaaactaatctgccaacaataacttttaagggcgttttcgttatattgccgctgcccacttatagcggcaaaatgtagggttatttccctacctaatgcggcatttaagccgtgaattcagtgtttactttctggcacgggattcattaattaagcgaacttcttcgcgctcttccggtgtcagaccttcagttcttgctctggcgataagaatgtctaaacgttcttctaacgctgaatcaacaagatgatccaacgcgtcacgaaatgtattttctgctatttcttctacttgtatatcgttccatgtagctaatttttcaagttgtttactaaatttattatcacgatattgctctagcagttgtccagttgtcagccctggctgagtaagacaaacctccacaagctccataaataatggtaagcctgcaattttggcctgcataattccctgtagggggggaactaaagcggctaagtgtgggttttgtaccaacagtcctataagtatacgcatagttgtcggttttagctgcggcatctgataattattcccactttccagatgctgcggcaatagacgttccaactgcactgcatcagggatgcccatcatattgccaagttcttgtctcatatagagacgcagaacttcccctggaatctggttaatcaatggtacggaaagtgaactgagttttgttttcccttcaggattactcaaatcaacttgtggtagcaatgattcgaacagaaattcggataatgtatgagattgttccattctttgttcaaatgctttccgaccttccttacggactagtgaatcaggatcttcgccatcaggcaaaaacataaaacgtaactgcctaccatcattcagataagggagcgctgtttccaatgcccgccatgctgcatcacgcccggctctgtcaccatcgtaacaacagatgacgttatcagtagcgcggaaaagtaattgaatatgttccgatgtagtcgaagtacctagtgaggcaactgcataatcgataccaaactgcgccagtgctaccacatccatataaccttcaactactaataatcgtgaaaggtcactgtgattttgttgtgcttcatagaggccatatagctggcggcctttatggaaaatttcagtctctggtgaattgagatattttgggagtgcatctcccagaacacgtccaccaaatgcaattacgcgccctctacggtcacggattggaaacattattcgttcgcggaagcggtcataggtacggccattatcatttgcgaccaacattccggcgtcgtttaactgtcgacgatcttcctcattatgagcaaaccgtttcaaggtgttgtcccaaccagcaggtgcgaaaccaatcgagaaacggtggataatttcttcactaagcccccgctgagccagatattgccgggcttgttgtgcagcaggagtgtttaatacattttgatagaagctgttaagcttatccatcagttggtaaaggttttgtctttggtgacgttctatctgactgtgactggaacctgcttcataagggacttccagaccatgcatagccgctaattcttcgatggattcgacaaactcaagtctatcgtaattcatcagaaaatcgatagcgttgccgtgagctccgcaaccaaagcaatgataaaactgtttatcgccattaacagtaaacgaaggtgttttttcgttatgaaatggacagcacgcgtggtgatttttaccctgttttttaagtggcacacgaacatcgatcagatcgatgatatcggtacgagctaataaatcattgataaatgcgcgcggaattcgtccagccataagcccttttacgcctgttgatgaacgacaataagccgcgctccctttcggaaagcacggcctttatctgcaactactattgtctgcaaattcaatcactatgcggatcaaccgcaaggattagtacagacgagtgcggcgtgcgttttcacgagccagcttcttagcgtgacgttttacagcagaagctttagcgcgtttacgttcagtcgttggtttttcatagaattcacgacggcgaacttctgctaatacacctgctttttcgcaggaacgcttaaagcgacgcaatgctacgtcgaatggctcgttttcacgtactttaattaccggcatgtgcctctcacctcaatagaaatcggtcttgctggcgtgggatgccagccatcttaaaatggtgcggaattttacttcaatgaacacggctttgtaaagcgccgcagcaaattgaaacaacaacactacgacggtgatctgcaaatcagttccgtaatattgatgataaccacacagggattttatgtagaggagtgattatagactaagcagcaaaaatagtcagcatgtaagccgcgcaaattagcttattaatgataaactggctctcttctgtggaatataggtagtgtaatgcgagttttaggtatagaaacgtcctgcgatgaaaccggaatcgcaatttatgacgacgaagccggtttattggcaaatcaattatacagtcagattaaactgcatgctgattacggtggtgtcgtgcctgaattggcttcacgtgaccatatccgcaaaacagtgcccttaattcaagctgctttgaaagaagcaggattaacctgtaaagatattgatgcggtggcttatacagcaggtcctggtctggttggtgcattgttggtgggggcgacgattggccgttctctggcgtttgcttgggatgttcctgcgattcctgttcatcatatggaagggcatttactcgctccaatgctggaagataacagtcctgagttcccgtttgtagctttgctggtgtctggtggtcatacacagcttattagtgtgacgggtatcggtaaatatgagctacttggtgaatcaatagatgatgccgctggtgaagcgtttgataaaacagctaagttactgggattggattatccaggagggccggtactctccagaatggctcagaaaggagaagttgggcgttttgtatttcctcgcccgatgacagatcgtcctgggttggatttcagtttttcaggattgaaaacttttgcgtctaatactattcataacaacagcgatgatgagcagaccagagcggatattgcccgcgcttttgaagacgcagtggttgatacattagcgattaaatgtaagagagcgcttgagcagaccgggttcaagcgactagtgatggctggtggtgtcagcgccaaccgggcattgcggattaaaatggaagaggtcatggcaaaattgggtggcgaagtattttatgcgcgccctgaattctgtacagataacggtgccatgattgcgcttgccggcatgatccgcctaaaaggagaggtgaatgactcacttggcgtgatagtcaaagcccgctggccattgtcggaattacctccattataaatcttcaaataaaagaccagtaactcaatgagttgctggtctttatccagccttgttgttaatcttcttttctttgctctttttctgttcgttttttttctttttcggtcatctcttttttcttttttagcttgttccagagacgattttcttggccgcgccacagacgctggatattatcatggtgacgtagtaacaccagacagcagagcatggctacggggaaagtaaattcgggtttaaaccaccagacatagaatggtgctatcaaggcactgacaatggcccctaaagaagaatagccgctcaataatatggtcagcagccaagtacccatcatcaaacctgtcagatcccaaccaattgccgcaatagcaccaaaagcagttgcgacacccttaccgcctttaaattggaaaaagatcgggtaaatatggccgagacaagcagcgattgctgtaattcctaaatagaaagggggaacatagagttgataagccaaccagacggggatcatcccttttagaacatcacaaattagtactattgccgcagtactgcggccaccaattcgcaatacatttgtcgcgcctgggttgcctgagccatgttgacgaggatcaggtagcccagccaggcgacaaataagtattgcgctggaaattgaaccgcaaagatacgcgaagatgatcatgccaagcgcgatagcactcataatgtctccccaataataatggtcgttttcttagactagtcatggataatacgcatatttagtcggaagtggtatccgacaagttgaaaaacaggaaaatgacgtgatggatatcgtatttattgaggagttagtcgttgttaccacaattggtgtttacgactgggaacagaccattaaacagaagttagtgttcgatatcgaaatgggatgggataataaacgtgcatcatccagtgatgatgtcgaatattgtctggattatgccaaagttagcgaagcgatcatcaatcatgtagaaaatcagaattttgctctggttgaaagagtggctgaagaggtagcggatctgctgttaaaacgttttaattcgccgtgggtacggataaaagtgagtaaaccgggtgctgtcgcgcaggctcgtcaagttggtgttattattgaaagaaaaaaataatctgatcagtagtgaatttggctgccatattattgtcattgttcttacatagactggcatgcagtggtgccaggtttgataattatgtcaattgattaatgacaatgggaataatggtagctgagtttattccatgctacttgtttcggatatttattaatgggcgacctctctatatgactgacctttctaccttgtttcatgcagctatccttggtgttgttgaagggctaactgaatttcttcctgtttcctctaccggccatatgatcattgttggccatatgttgggatttactggcgataaagctgaaacatttgaagttattatccagcttggatctatccttgctgtggtagtcgtgttttggcgtcgcttatttgggctcattggtatccactttggtgaagttcctcatgaaggtaaaaccaatggcaaactgaaactgagtcatattattttagcaatgctacctgcggtgacacttgggttgatgttccacgatgtcatcaaatcactgtttaacccacaaagcgtgatgtacgccttggttattggtggtgtgttgctgattactgcagaaatcttgaaacctaaaacaccaaaagcagaggggctggatgatattacttatcgtcaggcttttatgattggctgttttcagtgtctggctttatggccgggattttcccgttcaggtgcgacaatttctggtggaatgctgatgggggttaatcgttatactgcatcagaattctcgtttattttggctgtaccgatgatgatgggagcaagtggattagatttatataagagcctgcactttttgagcgcttctgatatcccaatgtttgctgttggttttgttactgcatttgttgtcgcgttagtcgccattaaaacttttctggcattgattaagcgtatatcttttatcccatttgctatctaccgctttattgtggcagccgctgtttactgggtatttatgtagtgaatggttcccctgatatcaatttaactcaaatattgcctagtgtttgatatcaggggatgtttcaggtaacagtattgtcttgagctgtatcgtcttgttgtttccattgcgccaatgcatgctgacgttgacgtcgtaactcatgaccaatgtcagcaccacgtaatccactgtctacaatatttttcacctgaacctggctggcaactttgaatgcctgtcgcagacaatcaccttgtggatagggtgtattttcaaaaccggtacgaccccgcgcatcggcttcactgatgataattaattgctctattcgctgaggcttacgccatgcatcaacagcatcaaacaacttaagtaatgttttcggccgcaattgagtgacggtatgcactaaatcatgatattgagcagccagttttgctaaatcacgagcagaattaggaacacgcagacgttgacataattggtcaactaacttaacgcccgctggcccatgtccataatggtgaggccactgttctggtggtgtcaaccctttgccaagatcatggcatagagcagcaaaacgactatcgacttcatctgttaattcagtcgctactttcagcaccattaacgtatgaataccggtgtcaatctcaggatgccacttctctggtgcgggaacaccaaacaaattatcaatttcaggaaacaacactgccaatgcaccacaatcacgtaaaacctgaaaaaagacctgaggggaagggctagcaagggctttctcggtctctttccagacacgttctggtgtgagtactgataactcgccattgattgccatatttgacattaatgcttgtgtttcggacgcgatggtaaaccctaaatgggcgaaacgagcagcaaaacgagcgactcgtaatacccttagcggatcttcagaaaaagcatcagaaacatggcgtagaatacgattgttcaaatcatcaacaccatgataaggatcgaccagttcaccagtgggtgtttgagcgatcgcattaactgtcagatcacgacgctgcaaatcgtcttccagtgtgacatctggcgctgcataacaagtgaaacccgtatatcccaggccggattttctctcagtgcgtgctaaggcatactcttcatgggtttgaggatgcaggaacaccggaaaatctttgccaacttgctgatatcccaaggataacagcgcttctgatgttccacccacaacgacccaatcccgctcttttacaggaaaatttagcagtcggtcacgtactgcgccgccaaccagatagactctcacctaacatgttccttattaactcatccaacggtcattacgcttacggcgagggatcatatgtggcagtaatagcccaaagattaaaccagcgcctgcaacaccaccgccatacataaaccattgcagaatgatattacgttgtttgtcatcaagttgcagatttgcagcatcaagctttttttctgctaccgtcagtttgttttttaacctctcattctcttttttcagttctgcaacaatgctactactattggcagccttcagttgcatgtcggcagtgcgctgattccagttattgtctatattggctaacttctctgtcaatgttttcacttcctgttccaactcagggaggcgggtgcgtaggcttggtttattactgagttggttaacgggtagccagacaaggcggcctttatcatctttaacttgagcgtaattactatcccgattgatgcttatcaatgtgacttcatcaccggcattcagtgtaccggcaatacgatactggttacccggcccggcgtgtgtgtaggtagataactcatcagatacatagcgttttccttccgcgtaggtagtgagcgaaaagctgaggctcattaacgccgtgagaagtaaatgtagttttcgcattgtgatttcaaccgttttttatctatggtgagtttagaatttgatagtaaagagttaagtttgctagagcaatcagtaaaccaaaatgacatttttctaattggttgaatacggggcttgttatctattgaacgaagcatttcctgttaatggctatcataacttgcagaaaaggaaaattttaatttttttcttactcatcgtagcaaaaagcgaaatcaaggtaagatgagagcaaagattgtcatcaacggtgtagatatgagtgtagaaattgaattaaaacttattgccaaaccacaagttattcctaccattcgccagcaattattgttacttccgcatgactatttttctccccaaaagttgaccaatatctattttgaaacgtcggataatcaactgcgtggtcttgatatggggttgaggatccgtggttttgatgatcaatatgagatgacggttaaaacagcaggtaaggtggttggcgggttgcatcagcgaccggaatataatgtgccattggcaaagccggaattggcattgactctgtttccaccgcacatctggcctgacaactgtgatgtggaagcattgcaatcccgtttgaatgcattattcagtactgactttatgcgtgagaagtgggtagtaacttatggacaaagtgagattgaagtggtgctcgatcagggagaaattattgcagccaatcgtaaggagccaatctgtgagtttgaactggagttaaagcgaggaatcatagccgatgtattagcattggcggttgaattggcaaaatcaaatggcttgcggcaaggaaatagaagcaaagcggcccgtggttatcaattagctcagggaaaaccaaaagcagtttggccttcaactcaagtggaaattgatatgcggcagtcattgccttcggtacttacgtcaatattagcccattggcaggagcaagaggaatgttggctggccggtttatcagacggtcgagatggcttaaagcaagtactgactttgattcagcagacgatcgaatattctagtgagtcggaacagttggataaccaattagttgctatcaaccagaaattattggatatggaaacagaagctgaaacgctatgttatagctcgctctatttgcaatgtaagttggcactgactatgtggttaataaatctatgtggttaataaatttctccgtttaaataacaggaattctctatgttgccactttcaactccgcttctggcccagttacagcgtgtgactgaacattttcatcaactgactttgaacgttgagcctgttgctgctcatgagcaggccatattatccctgagcgattttgttgttgaaaacctgcaagctcatcctgaatggttagttgagatccgccaacatccacctgaagcgcaggagtggcatcaatatactgaatggctgcaacagttactcgcatcagtagaggatgaaaataccctcatgcgggttttacgccagttccgtaacaagattctggtcagaatagcctggtcgcaggcgctacatagcattacgactcaggagactctgcaacagcttagtatgttggctgaaacgttgattattgctgcccgtgattggttgtatcagcgttgttgtcaggattggggaacgccttgtaatgagcggggcgaaccacaaccgctgttgattatcggtatgggaaaactgggcggtggtgagttgaacttctcttctgatattgatctgatttttgtctatcctgaaaacggcattacccaaggtggccggcgtgaaatggataacacccagttttttacccgcctggggcagcatcttatcaaagtgctcgatcagcaaactgtggatggttttgtgtatcgggtagatatgcgcttgcgcccgtttggtgatagtggcccattggtgtttagttttgttgcactggaagattactatcaagagcaagggcgtgattgggaacgttatgcgatggtgaaagcacggattatgggttcggacaaccaagcgtatggtgaagagctacgtcgaatgttgagaccatttatctttcgccgttacattgatttcagtgtgattcaatccctgagaaatatgaaaggcatgattgaacgggaagtgcggcaccgtggcttgaaagacaatattaaactgggcgctggtggtattcgtgaaattgaatttatcgcccaggtgttccaactgattcgtggtggacgtgaactgtgtttgcaatctcaggcgttgttaccaactctgcaaataatagcgaagttgacgcttttgcaatcattgcaggtgaaacaacttgctgacggttacctttttttgcggcggttagaaaatcttttacagtcaattaatgatcaacaaactcagactttgccagaagatgagctgaatcgttcacgactgacgtggggtatgggatttgaaagttgggacgccctaataattgaattgaacaacaagatgagtgctgttcgggctatttttacgcaattaattggtgatgacagtgataatagtgatgaggaacctagccatgtaccatttaaaagtctgtggctggaagatctcgaaaaagaagagttaatcatactcgctccacatttggatgaagagattgcacagcagatattgcatattatttctgtgttccgccatgatgtgggtaaaagaaccattggcccgcgtgggcgcgatgtgctcgaccatctgatgccacgtttgttggcaaaagtttgtttgcgacaagatgccaataatcaagatgttaataatcgaaatgttaatatagtgctagagcgggttatccctctgttgttaagtattgtcagccgtacaacttacctggaactgatacttgaatcggaagctgtactggcacatgttatccggctgtgtgctgcttcaccgatgattgcgactcagcttgcctgtcatccattgttgctggatgagctgcttgatccacaatttctgtatgaacctttgccgctgaatgcctataaagatgagttgcggcaatatttgttgcggataccagaagatgatgaagagcagcaattagaggcgctccgccagtttaagcaggcgcaattactgcggattgcggcggaggatatcactggcgtgttgccggtgatgaaagtcagtgatcatctcacttacttagcagaagcgattattgaagcggtggttttacaggcgtgggggcaaatggcaaaacgttatggtgttccatcacatctgagtcagcggcaaggattgggatttgctgtgattggttatggtaaattgggcggttgggagttgggttatggttctgatcttgatttggttttcttgcttgactgcccgatggatgtgatgactgatggcgatcgatcgattgatgcccggcaattttatttgcgtcttgcccaacgaattatgcacttgttcagtgctcgaacctcctctggtgtgttgtatgacgtggatgtccgcctgcgtccttcaggcgaatcaggcatgttagtcagtaccatcggtgcgtttgctgattatcagcggaatcaagcgtggacttgggaacatcaggcgttggtacgtgctcgtatggtatttggtgatgaaaacttgcatcgggattttgagcggatacgccatcagacgttatgtacgcgacgagaacccgcgttgttacgtcagcaggtaagggaaatgcgggaaaagatgcataaacatttaggcagtcaccattcagatcaatttgatattaaagctgatccggggggtatcaccgatatcgaatttatcgctcaatatttggtgcttcgttatgcggctgaaaatgagcgtttggtgcgttggtcggataatgtgcgaatttttcaattaatggcggcttatgaaattatggatgaagatgaggcagccggattaacgcaggcttacgtttctatgcgtgatgaactacatcatctgacgttacagacgcattccagtcgagtatcaatccactgtttcagtgagcagcaggaacgggtacgtcgtagttggcaacagtggttgggtgaataataacgggtttaccggtttggtgtagggattttacggtcatatgataatatttggcaccaatttgatatctaatatttggagcaagggatgaaaatgacactcccggattttcactgtgcagaggttttagtcgtcggtgatgttatgttagatcgctactggtatgggccgaccagccggatttcgccggaagcgccggtgcctgtagtaaaagtcaataccattgaagagcgtccgggaggcgctgccaacgttgctatgaatattgctgctcttggggcaaattcacatttaatcggtttgactgggattgatgacgcagcacatgcgctgagtgagaaactgcgcagcgtcaaggtgcgctgtgactttgtttctgtcccaacccatccgacagtgactaaactgagggtactttcccgtaatcagcagttaattcgcttagattttgaagagggtttcgataacgtcgatgcacagccaatgtttgagcgcattgaacaggcgttaccccatattggagcattggttctatctgactacgccaaaggtgcactgagtcaggttcaggaaatgatcaaactggcaaatgcggccaaagtcccggtattaatcgatccgaaaggtaatgattttgagcgttatcgaggtgcaactttgctaacgccaaatctgtctgaatttgaagcggtcgtgggccactgcaaagatgacaatgagttggttgagaagggaactcggctagttaagggtttggatcttcaggcattactgatcacccgttctgaacagggaatgagtttgctgagtgttgatcagccaccactgcatttgcctacgcaggcgcaagaagtgtttgatgttacgggtgctggcgatacagttattggtgtgttagcaacggcgattgcggctggaaagccactgaatgaagcttgtttcctggcgaatgctgctgcgggggttgttgttggcaaactgggaacgtcgaccgtttcgccgattgaactggagaatgctatccgtggccgcgctgaaacaggtttcggtgtgatgaccgaatttcagcttaaacaggctgttgttgatgctcgtcaacgtggtgaaagggttgtgatgactaatggctgctttgatattctgcatgcaggtcatgtctcttatctggagaatgcccgtagactgggtgatcggttaattgttgctgttaacagtgatgcatcaactaaacggctgaaaggtgagagtcgtccagttaatccactagaacaacgaatgattgtgttatctgctctgggcgcggtggattgggttgttccatttgaagaggatacaccacagcgattgattgcggatgttttgccggatgtattggtaaaagggggagattataaaccggaagaaattgctggtagtgaagaagtttgggctgcgggcggagacgtcaaagtgttgaactttgaagatggtatttcgacaaccaatatcatcaaggcgattaaaaatcagtaaataatgctttagcttgtcattgaaaatagtcagaagatattactgcattgatcactgtaaattatttatttgatcatattattagaatgaaagtcgggtaagagatgaaatcttcccggctatttttttatttaatttgtacttaattgagtgatatttcatcataaataatatatacccgtcatctttcaagttgcctctttgttggctgcactcacttaccccggtcatatcgttatctatgctcccggggattcgcacccttgccgtcgcgatgcatcttgaaatccataaggtatagatatttgtaatatcgtgtgcgagtcatttaattaacgatacaattattataataacaatttaagttagtgtgattttattatctattttgtgggggatttatcagaagaagtgtgatgtaacagatagttttttatctttgtggcataaaatgctggtcacgtaacgtcggcttattcataatgatttctgatgtaaatgattttttaatggaatatgttatctataacttttacatcttaaagttagtagataaacggataaattttttacgtaggaataagttcttatgcaaggtaagttgattttatcttcaatttgtttggcttcggcaatattagcagggtgtacaactgaatcttctaataccgtccaggtacaaaaagttaattcttataatacagtatatcaaggtgttcgtagtccaattgcgattggtaagtttgaaaaccgttccagttatcaaaatggcattttctctgatggcgttgatcgcctcggtaatcaatctaaaacgattttaatctcgcatttacaacagaccgggcgctttacggtgctggaacgcaccaatatggcggaactgaaagcagaagcgggtttacaaggtaaatcgcagaagttgaaaggtgctgcttacgttattactggtgatgtgactgaatttggccgtaaagaagtgggtgatcatcagttatggggcttgttagggcgtggtaaatcacaggtggcttattctaaagtcatgctaaatgtggtgaatgtagaaacttccgaagtggttttctctgtggctggtgcaggagaatataaattatccaaccgtgaaattatcggctttggtggtaccgccagctatgattccacactgaatggtaaagtattggatctggctattcgtgaagcagtaaaccgtctggttgaaagtgttgaaaccggtgcatggaaaccatctaattaagaaatatagggatatatattcatgatattaatgaaaaaagcgggcttattgctggcagctatgaccttagcgggttgtgtcactcagccaaaaacaatttatgagtgggataaataccaacctacaatttatcagtattatcagcaggataagatggggtttgaagaacagttacaggctttgcagcaggtgattgaaagagcgaaagccaaagataagtctgtaccgcctgggctgcatgctcagattggcttgctttatagcaaaacaggtcgtgtttcagaagcatttcatcaatttgaaatagagaaaaaattgttccctgagtcagcgccatttatggattttctattaagtaaaaataaaggaactatgcaatgaaccgtattctcgtcgcattaagtctattggcggcatttgtgctgacaggatgtagtaaatctgtcccttatgattacactgcatttaaagaaagcaaacctaaatctattctggttctgccggcggtaaacaaatctctggaagttaaagcagggcacagcctgatttctcatgtgacatatccattggcagaatctggctattacgtttttccggttgctgttgtggaagagacatttcagcaaaatggtgtgacagcggcacaggatgttcaggatatcagttacaaaaaattgcatgatatttttggtgcagattcagcgctctatttggatattgaagaatatggtacgcaatatcagattatcaacagtgatacgcgtgtaacggcttccgcgaagctggtggatttgcgtagtggtaaacaactgtggcatggtcgagcaatggtttcatcaactgaaaatcaaagcaattcgaataatcttgttggcatgttggtatccgccgtagtttcacagatagctaataccattatggataaaggtcatgaaatcgctggcattacaagtaaccgcttactgacagccggtggtagtcgtagtttgctgtatggtccacgttctgagcattacggtaaagaaaaccagaagcattaatctctgattggtgtggatgtgtaatgagcagatatcacattctgctcattatcacggttatttttatgtatggtaataattactcttctttttttgtcgtgttatcagcagatggaacattcttattctcaaacttcgcttctagttcacttaaacgctgttccatcgcggtcaatttttcacgagtacataacagaacctgagtttggatatcaaattcttcacgattcactaaatcaagcttgccaagttgggattgcaaaatcatccgtaattttttttctacatcaccaccaaactctttaaccccttttggtaaagaatcttggatctggcgggcaatttgttcaatttttttgggatcgagcatgatgcatcctttttatgacataaataatttctgaatagtgtaataccagatagtaaaaccataaaccattgtgagctaggtttcatatttgattttgttgattgccgctggcaaatattagcgttatagttcactggcttatctcagggcggggtgaaagtccccaccggcggtaaacatcagtccattttttgagtggcatggtgaagcccgcgagcgctccgtttgtggttatcttaatgataaagcggaggtcagcagatccagtgtaattctggagccgacggtgatagtccggatgggagagaataacggcatctgtcgggctttgtgctcgcctgttgttccggctatggtattcacacatgatattaatgttatggcatgatgttatagcgagaactcctcaagaccgccctgattctggtaatccataaattttaatgaggtttctttaccatgaatcagacgctactttctgaatatggcacatcatcagaacgtgttgaacacgccattaacgctttgcgtgatggaaagggggtgatggtgctggataatgaagatcgtgaaaatgaaggtgatattatctttgcggccgaaacaatgactgtagagcaaatggcactgactatccgttatggcagtggtattgtctgcttatgtctgacagaagagcgccgtcagcaattacaattgcccatgatggtagaaaataactctagcccgttccagactgcattcaccgtaaccattgaggccgctcaaggagtgacgacgggggtttctgcggctgaccgcatcacgaccattcgtgcagcaattgctgataatgccaaaccaagtgatttgaaccgtccgggacatgtttttccactgcgcgctcaacctggtggcgtgttggttcgtcaagggcatactgaggcagcaattgatttagtcagtttagccggatttaaaccggcaggtgtattgtgcgaattaaccaatgatgacggttcaatggcgcgtactcttgaagtagtgcaatttgcgaagctacataatatgccggtagtcactattgaagatctggtgatttatcgccaggcaatagaacagaaagcaagctgaaacctaattgtccgataaccagatgaaatatcagttataacgtacatactttttaaagtcacagtttgcgcaagctgtggcttttcagtttttttgaaaaactccatcaccattagcccactgttttgcttatctaaaaggcgtaacctgtcagcaagtattaaaattacctatatttggtgtgagaggtcattatgaatatttccagaatgccggcactgtttattggtcatggcagtccaatgaatgtactggaagaaaatcgctataccaatgtgtggcgtgaacttggtgaaagactgcctgtacccagagtgattctggcgatttctgctcattggtataccaatggcacactggtaacagccatgacacagccgaagactattcatgattttcgtggttttccacaggaattgtatgaaactcaatatccggctaagggctcgcctgaactggccgctttagtgcaagagatgctggaacctgtggaagtttatgccgatcatcatcagtgggggttggatcacggaacttggggaattctggttaaaatgtatccacgggccaatattcctgtgattcaactgagtatagatgatgccaagccagcgacgtaccactatgaattagggaaaaagctggctgctttacgggatgaaggtgttttaatcttggggagtggtaatgtagtacacaatcttcgagccatgaagcggcaagatcctaatgctgaaccttacccgtgggcggaatcatttaaccattatgtgcgtgataaccttaccagttatgagcaaccttatcctttgattcatgcactggacagagaagatggtctattatcgaacccatctcctgaacactttttaccgttgctgtatatcatgggaacgtgggatagaaaagaagcggtttccattcctgtcgatggtattgagtctggttcgctgagtatgttgtctgtgcaggttggttgaattgaacgttcttgttgttattatccgcatttgacataagaggagttcattcaacagcacagccggttgagtgatgctcagggggtaattgcccatgaattggggctttcaagttgggttaagctgaaagcccatgtcgacgtactggaacaggtcagaatggctagtcaaattcagaatttagcaccagatcatgaacttgttatactgaatatccttttgtgaggatggtttttaactaacggttttcgcgggtatgccaaaggtctacaatgtaaattgtatcgttggatatctcgtaatggacttcgtaatcactaaaaagtaccttacgtacctcgcggggcttatatctaggctgaggaatccctatcttaggttgcagtgccagatctgtagtgctgataattagatggtctaacacattattagcatgtgatttactgtattgacaggcaaaatgatagatgcgctccaaatcattttgagctttaagtgtccaataaacctccatgattatgattttttcagcttggatgcaaaattaataacatctgaatgattcacaatacggcctgtatcgacatccgcgaggccagccaaaatcatttggtggcgatgttcacgttcctcaatcattgaggtaagagcctctttaatgatccacgattttgagcggtctaactctttggctaaatcgtttatggctgtagctagtttgatcggtatctgtgcggtaattgtctgttttgctgatatggacataagagcttccaataaaaaccaataatagttattgaatactatagcatcaataacggctggattctttattttttaaggcttgatagctgaccggtgagacagggattttcttgcccattgtgtgaaaatgcattgatgtttcgtcactaaaaatttcattggttaaattatctttgtgttatatataaaggaatcgatttcgtgagcagtctaatagaatgaggtcaaaaaagattgtaaagtgatgacactaaattttagcttaaaatatggacagttataactgcaattttaatatcatgagctacagtacagagatatttaaaaatgacgaataaggttgacattgatagaggtagattaatctatagggtatatacccaagaaacttcaagatgcagtttttagcacctgaaaatggtcgttaattctagacatcagcgagtccgctatatccggtagcgttgtggtgaaaaatttgaagacgttgtctcgaaattcatgtttatccgcgaaataacggttatttcgaacctgttcattcatgaccttccataatcgttctatcgggtttaaatttggactatagggaggaaggtaatgtaactcaatattgctaacataagcccactccttcacaagatgagctttgttgtaacccgctccatccacaataaggtgaattttttgatgatagtcaggataagactttcttatttcattgaaaaaacagcaaatgttgtagtcgttgatggtctgatattcctggaacaccgtacgaccaatggcattcaggttgagggcacccaatatattcaggcgagtccggcttcctgttgttttgacggtttttttctcgccttttcgcatccagccataactgagtttggtgccttgagtcgggtgaacagcatcaagaaaaaggatgggttcgtctttcgctgtgactttaagattctcataatattcaataaattgtcgctgtttttctgcgtcgaatttatgagggacgccacaaggttttttataagaaaaaccctgacggtgtagccatttattcatgccgggaatgctaaaggtaatattccagagctgagcaacataggccacgatttcatgggtgtgatggaaaagatgttgagataagtgattgattaaaaaatcagtttgttctcgggaaagcaaactatcagaccctccattatcagatttaagtttaccttgattaaggtaatcactgatatggcggtcaacggtggtctgatggagtcgcaatgcctgggctatcatcacagaactccacccttcagaagccagaaggatcgcttttattctgtctcgtacctgaccatcacgagtggtgtcgtgaagacgttcaagtttgattttttgttctgatgtaataaatattttcatagcgaggataatgatctccatttcggataaaatcaagcatcttcaatgattacgggtatataagcttataagaatacaacgtttttatcggattgttgaaggaggaatctttggcgttgtggcaacctactttaattcctccttggtgagtaattaatccaaaataatatgtgggtagaagcgagataaatcttgggttattagttcactgtcttcccgcaaaccaataccgcaaggctgatcatttaccagccagctaccaataagcgtataattgtcaccgaattttggcagtgtatgaaattgctgaacgatcataccttctttaccgtaagggccatcaacactggcaatttccttgcctttttcaataatacggatattagccccttcccgtgagaacagaggtttaataacatagctatccattgccggataattatcatcggcaaaataagcaggtagcaggtttggatgatttggaaacatcttccacaacatgggtagcaatgctttgttggagataatacttttccacgcgggctctaaccaacgaacgccagcatcttccaatttggtagcgaaaatctcacggaacatcaattcccaagggtagagtttgaatagattgctgatcacctggtcttttagatcagtaaactgccctttttctcccagaccgatatcttcaataaataagaactcggttggaacaccggcttccagcgcacaatcttgcaagtattgaacggtaccacgatcttcttccgtatcttgacagcaagccatgtgcagtaagccaaagccatgttcatcacgcaattgagcaaagcgttcaatcaattgctcttgcatgctgttgaattgatcggcatgtgctggcagtaacccggcattcatctgatcttctaaccagatccattggaaaaaagcggattcatacagcgaggttggcgtatcagcattattttccaacaattttgccgggcttttaccgtcgtaaaccaaatccaaacgggaatagagtgacggctggctggtaatccaggaactacggacaaaatcccaacaatgttttgggatctgaaatttagtcagcaattcttcactatcgacaactttctcgactacctgcaaacacatttgatgtagttcagcggtggtagcttcgatttcttcaatttgggcaagagaaaattggtaataagcttcttcacaccagtaaggtttgtcatacatggtgtgaaaattaaagccatattctatcgctttttcatgccaatccggacgttcagtaatagcaatacgtttcatccgtggttagcctcccactgaacgggatgtggagcccgaagaggcgctgcgttgcatggttgactgtttggcgacagagtcaccgaagccgccacgggtaatggttgtggttgttgctggttttggtgccatagccgttttaggtactgtcatggaacggccacctgcggttgcagggccatagcttttacctgtcgaatcaacgaattgaccgtttgccgggctggtagcggatttggagctaaacagaggttgtgatggtgctgagccaccgcccattagacgccccatcatgtaacctgccatcagcggcatccagaagctgccgctttgctgctgctgtgcctgtgcttcaccattggtggaggtactagaagtagtggtgccaaggccagcttgcgccggggtttgagtacattgtgcttcaccaaattcggcaatacagtcttctttggtggcatatttaggcgctgttttttccgcttctttcaacgcattgttgtaagcagtagtacattgctcactttgtgatggattggcttgagaacattcatctgcattcatgtaaagagagacagtttcatcactcttttcacaggcagataacatgaaaaccgcactgacagctattgccacaggtgcaaggcgatagttacgccaagccttacggaatgtgtcgtgattaatatctttggtccgctttattgtcatcgtcgtatacccagattttagatgtctatgattctttatgaaatagctttaaggataggggaaatatgaacaaaattaaagcataaaccttcgaattgctagcttgattttttgtctgacaaagatatggccggatattgattatttggtattccgtttaatctggttttaatgttgaaaaatatctattttttagaaaaacagtgccgaaattaatattttatgatattaatcttaatctcgtaaatttcagtgaattaaaggtgatttaatatgtaacatgatgatgtaagtgaatctactaattatgttttttactttatgtctctagcaaataatcttaaattaataactttttgtgattatattattggtattgtattttctattttaattaaggaattaagtagcatggataaaaatcaatattcggaaaaatggcagatgcgctttgcattctttgaacagaatggtgctcctaaaacgcctgagcacaaagctgccatgaaagtagaaccctatatgcgccgtatattgttgaacatgaattttattgccttcttttttggttttatttacttttttgttttaggtttatggcgaaagaacctgactttatttggtgttggtgttggtgttggtgttgtagtgataattatattggagattatggaaagtgtcttgagtatttatattcctcctgctgtcgacatggggattaaatttgcgttttcagcaatatggggaaccactgctaactatgcctattatctgaaagaaaaagtgaatagccagagctggaatccatttgaaggattattttaatttatgtgttttttcattaagaaaaatatctgtttattgtttcagaacccaattatataccctatggatttcaagatggatcgcgatggcaagggagtgaatcctcgggagcatagataacgatgtgaccggggtgagtgagtgcagccaacaaagaagcaacttgaaagataacgggtatagttggttggaaataaaacagcccgcttgatggcgggccgttaatttagtggaagtgaaagactgtatcagttacgagcagaagttactggggttcctgttccctgaacaatgctgttagcggaagttgagagctgtttacctagcgaattattcagagcaactaaatccttctcatttaacgtacccagtgcatgctgaatattcagttgattaatcagataatcatagcgagcattggatagcttctgtttggcatcgtacaacttggtcgtggcattcagtacatcaacaatggtacgtgtgccaacttgataacccgcttccattgcgtcgagcgagctttgcgccgaaacaacaagctgtttgtaggcgtcgatactgctgatggaagcagatatgttgttaaaggaagaacggacagtctgtaccacattgcggtaagtgctctctaattgttcgctggcgctgacaaaaccatattgtgcttgttcaacgcgggaactggtggcaccgccgctataaattggcagacgaagtgtcaggccaacgctgttttcaccgctatagttgtttgatctgcctggtgcatgattctggctatttgaaacattggtagaagcgcctaaatcaatagttggcatatggccggtttgggctgctttgatttgttcacgagccagatcctgacctaaacgagcagatagtaaacttaaattacgtttctctgcctcttttagcagaatatctaccgcttctggcttctgtgttttgaaatgatcaatatttagtgaggctaaccgagggtaataaatacccgtgacctgacgcagggcttccaatgcattgtccagctcattacggctggcaacttcctgagcgagtacatcatcgtaattagctcgggcgttctggacatcagtaattgcaaccagaccgacattaaaacgttgagtcgtttgatccaactggcggtaaatggccgctttctgagcttcaatgtaggagagtgtatcaatggtgcgcagtactttgaaataagctgttgcactatccaagatcagtttttgttcactgctttggtaggtaacatcagcaatacctgccgttttttcttctaagttcaataggcgccatttagacatatcaaaaatggtttgagtcaaaccaagctttgcattcaatgtattgctttctgtgtcacgttgatcgcggtaaccactgttataggcgtatccggtatttaattccaactgaggtaataatgggctacgggattcattaattttttcaaaagctttattacgttcagccattgatttacgtagttcagggttaccctcttttgcttgcttataaacttgcaaaagatcttcagcttgactcatcgaactcaatcccgtcaggctcatagcgataaaaatggagagcagtttcttcattgtaattccttgattgcacagctattttgctcgttgtctatcccattaggctattttatttaccatgctttgtgataaagagtgaatgcttcaggtgctgcgcacagcctgagttcactgttcatttacaaaaacggcctgcaccaattacgcttattgggatagactcttacgttgccttggtgaaaaacgaaatgttactgattctagcagagtatgctatcagcgaaaggtagccgtttgtgccatattgccttaatttagcttaactttacaccatcaacgagtgaattttttaactctgcttgattaatatcatcttagtggctagcaagtaaggaactatttaggagaattttatgcataagaagccgttaacgccagtcatgttggataagcaggatatagaaattatcgcgaaaaaaagtttgtacaatggattctttaaactgacaaattaccgtttccgtcatcgtctgtttgccggtggttggagtgaagaggttagccgtgaagtttttgagcggggccatgccggtgcattgttaccttatgatccacgtcgtgatgaggttgtattgatagagcagatacgtattccggcaatagagacgaaagcgacgccatggttactggaaattgttgccggtatgattgaagagggcgaagatgtcgaacaggtggtgcgccgcgaaacaatggaagaggccggaatcgaagttaaacgttgcagacccgtgttgagttatctctccagtcccggaggaacaacggaacgtatctctgtgatggtgggggaagtggatgccacgacagcgaccggtattcatggattatctggtgaacatgaagatattcgggtgcatgtggtaagtcgtgaacaagcttatcattggatggaagagggaattattgataatgctgcttcagttattgcgatacaatggctggcattacaccatgaaaagttaaaaaaagaatggaattcagataattcctaatttttaaccgagaaaagggaagtgtgtgccagtcagcagatctcttgcgttaaaacgagttatgatgctcgttgatgacttataggacaaggaaaccatttggaaagccagtttgaactgcctgtggtagagggaaccacagccaaaatattgcaaataacagatacgcatctttttgccagcaaagaagatactttattgggtatcaatacttatcgcagttaccaagcggtgctggatgccatcctcaaacaaaatgctgatattgatttaatcgtagcgacaggtgatttggtgcaggatcagtcgttggaagcttatcgacattttgctgatggtattgcccgtttaccggcaccttgtgtctggttacccggtaatcatgattatcagcctgcgatggtggatgccttggcggcggctggcgtttctccgtcgaaacagattttagtcggtaagcactggcaacttttgatgcttgatagtcaggtgcagggcgttccccacggggagttgtcggaatatcagcttgaatggatgaaaaattgcctggataggcaccctgaacgttacgcggtgatcctgcttcatcatcatccattaccatcaggttgtacctggctggatcagcatagtttgcgcaattcacatattctggcccagtatctgcaaagttattcacgagttaaggcgatgctttgtgggcatatacatcaagagatggatctggattggaatggcatccgtatgatggcgacaccatcaacatgtttgcaattcaaaccacattgtaccaattttatgcttgatactgttgctccgggatggcgttatctcgaattgtctgttgccgataatggcgaatttggtttgacaactcaggtctatagactggcaagtaatgagttctgccctgatttagattcggatggatattaggttgtgtttgtctctttgtgttgctgtgttactctctgcttattggatttgccaagcctcaccatctgtggtgtgtcgcacaggagcatagtggccagtggtattgcacaattgaggggctcggtctgatgtcaaccttactctatttgcacggttttaatagttccccgcagtctgcaaaagccaatgccttaaaagcgtggctgtatcagcatcatcctgacattgacatgctggtgcctcagttacccccttatcctgaagaagcggctgagctgctcgaaaatctggtgatggagcatgccggggatgatttgggtatcgttggctcttctctcggtggttatttagcgatatggctttcacaatgtttcagcttgcccgctgtggtcgttaatccagccgtgcgtccgtttgaattactgcgggattatcttggggaaaatattaacccttatacaaaccaacgatatacgttggaatcgcgccatattcatgatctcaaaagcatgtggattgaaccattggagtcaccggatcttatctggttattgcaacaaaccggagatgaggtgctggattaccgccaggcggttgcttatctggtattatgtaagcaaactattgaatctggtggtaatcatgcctttatcggatttgaacactatttcccacaaatcatcaactttcttgggctttctagtgatggcgagaaaaaacttgccaaaaatgtttgaacgactggtattatcaacagtatacaaaactgattagccctttaatcaagaagcaaccaacagaattacaacatgactcaatctagttacaacgcagatgccattgaagttctcagtggtctggaaccggttcgccgtcgtccgggaatgtacactgatacaacgcgtccgaaccatttggcacaggaagtgatcgataacagcgtggatgaagctttggcaggtcacgctaaacatattgaagtgatccttcatagcgatcagtcactggaggtcattgatgatggccgcggcatgccggttgatattcatccagaagaaggcgtttcagcggttgagttgatcctgagccgcttacatgccggtggtaaattttcgaataaaaactatcagttttctggtggtctccacggtgtggggatctcggtggttaacgctttgtccaagcggattgaggtcaccgttcgccgtgacagtcagatttatcagattgcttttgagaatggcgataaagtgcaggagctgacagtaataggaagttgtggtaaacgcaacactggtaccggtgttcacttctggcctgacgaaagtttctttgatagccctcgtttctctgtttcccgcttgacccatttgctgaaagcgaaagccgttttatgtccgggagtggaaattgtttttaaagacaagatcaacggtactgaacagaaatggtgttatgccgatggtctgaccgactatttgatggctgcggttaatggcctgacaacattgccggctgcgccttttgtcggtactttcagtggtgcaaccgaagcggttgactgggcgttactctggttgccggaagggggagagctactggctgaaagttatgtcaacctcatcccaacgatgcaggggggaacacatgtaaacgggttgcgtcaggggttactggatgcgatgcgtgaattttgcgaatttcgcaatatcttgccacgtggtgtgaagcttgctgccgatgatatctgggatcgctgtacttatgttctgtcggtaaaaatgcaggatccgcaatttgctggtcagacgaaagaacgcctctcttcgcgccaatctgctgcttttgtttctggtgttgtcaaagatgctttcagcttatggttaaaccagaatgttcaggaagcagagcagttggctgaactggcgatcgctagcgcacaacgtagaatgcgtgcagcgaaaaaggttgtgcgtaaaaaactgaccagtggcccagcattaccgggaaaactggctgactgtacatcacaggatctcaattttaccgaactgtttctggtagaaggagattctgcggggggatcggcaaaacaggcgcgtgaccgtgaatatcaagccattatgccgctgaaagggaagattctgaatacctgggaagtttcttcagatgaagtgttggcatcacaggaagtccatgatatctctgtcgcgattggtatcgacccggatagccacgatctcagtcagttgcgttatggcaaaatctgtattctggcggatgcagactcagatggtttgcatattgcgacgctattgtgtgccctgtttgtccgccatttcccaacattggttaagaacggccatgtttatatggcaatgccgcctctatatcgtattgatctaggtaaagaagtgtattacgcattggatgaagaggaaaaaagtgcggtgttggatcgtctaagccgcaaacggggtaagcctaacgtacagcgctttaaaggattgggtgagatgaatcccatgcaactgcgtgaaacaacgttagacccgaatacccgtcgtctggtgcagttgactatcgatgatgaaaactaccaggaaaccttctctatgatggatatgcttctagcgaagaagcgttcagaagatcgccgtaactggctgcaagagaagggcgatacggtagacattgaagtgtaacacccacagggatagtcaaaagattctgaggaaattaacgaatgagtgagataactcacgatggagtggagcgtttgccgctccactcatttactgaaaccgcctacctgaactactccatgtacgtcatcatggatagggcgttgccttttatcggtgacggtttgaaaccggttcagcgccgtattgtttatgccatgtcagaactgggattgaacaataccgccaaatttaagaaatccgcccgtaccgtgggtgatgtactgggtaaataccatccgcatggtgatggtgcttgttatgaagctatggtgttaatggcgcagccattttcttaccgctatcctttagtggatgggcaaggaaactggggagcgccggatgatcccaaatctttcgccgcgatgcgttataccgagtctcgcctgtccaaatatgccgagttgctgttggctgagttaggccacggtaccgttgattgggtgccaaactttgacggcacattgcaggaaccgaaaatgctgccggcgcgtttgccaaatattttgctgaatggcaccaccggtattgcggtggggatggcgacagatattccgccccataatgcgcgtgaagtggtgaatgcactggttatgctgctggataagccacagagttcccttgatgatctgatggaacacgttaaaggtcctgattatccgactgaagcggagatcatcacttctcacgaagatatccgtaagatttataaaaatggccgtggttcggtacggatgcgagctgtttggtcaaaagaagatggcaatgttgtgatcactgcgctgccgcatcaggtttctggtgccaaagtgttggaacagatcgctaaccaaatgcgggctaaaaagctgcctatggttgatgacttacgagatgaatctgatcatgaaaatccaactcgtctggttattgtccctcgcacaaaccgggttgatttggagcaggtgatgaatcatctgtttgccactaccgatttggaaaagagttatcgcgttaacctgaacatgatcgggttggataaccgtccgaccgtgaaagggctggttgagatcctctccgaatggttggtattccgccgggaaaccgttcgtaaacgtctgaaccatcgtctggaaaaagttcttaagcgcctgcatgtgctggaaggcttactgatcgcatttctcaatattgatgaagtcattcacattatccgtagtgaagatgagccaaaaccagtattaatgtcacgttttggtttaagtgagacgcaaacggaagccattcttgagctgaaattacgccacttagctaaactggaagaggtaaaaatccgtggcgaacagagcgaactggcaaaagagcgtgataagttacaggcgattctgagttctgagcgcaaactgaataccctgttgaagaaagagatcatggctgatgcggccacttatggtgatgagcgtcgttctccaatgagagaacgtgatgaagccaaagcgatgagtgagcatgacatcacgccttctgagccggtgacaatcgtattgtccgagatgggttgggttcgtagtgcgaaaggtcacgatattgatccggccggtctgaattacaaagcaggtgatagcttccgtggtgcggctcgtggtaagagcaatcagccggttgtgtttattgatacaacaggtcgcagttactcgcttgatccgcgggatttaccttctgccagagggcagggggaaccactaacgggtaaattgactgtacccgcaggggcaacggtagaacatgtactgatggcaccggatgaacagcagtttctgatggtctctgatgctggttatggttttatctgtacttttagtgatttggttgctaaaaaccgagcaggtaaggcactgattacattgccggaaaatgctcgcgtcatgacgccgctggaaataaataatccgcaggatgatatgttgttggcaattacccgcgcaggccggatgttaatgttcccggttgcagatttgccgcaactttctaaagggaaagggaataagataatttctgttcagtcagccgcagaaaatgacctgttgagttggttattgatactaccgccacaatcgtctattacactttactttggaaagcgtaaattgacgctgcgtcctgaagatcttcagaaattccgaggagaacgtggtcgtaagggaacgtctctacctcgtgggttgcagcgtattgaacgggtacaggttgagactccaccttctgctactaatactaacgtaactaaatagtgggattaaataagaggcggctatgttagcaattattcgcggcattattgttattctgttttcgattgtagtgtgtgtctctggtgctatttactgcttattcaggccacgtcatcctgaccatgttatggtgtttgggaatatgtttggtcggttgtcgaaaatatttggcgtcaaaattattgagcgtattcctgctgaagctaagcattatggtccgagtatctacattggcaaccaccaaaacaactatgacatgataactatgtccaatgcggttcagccgggcacagtgacagtaggtaaaaaaacgttggtgctgatcccattttttggtcagctttattggttggcaggtaatatcctgattgatcgtgctaaccgtgctaaagcacatggcacgattgctcaggttgtggagcagattaaaaatcgtcatctttctgtttggatgtttccggaagggacacgtagtcgtggtcgtggtttgttgccatttaaaactggcgctttccatgctgcgatctctgcgggagtgccgattgtcccggtctgcgtttcttctatcactaatggacgtattaagctgaatcgctggaataatggtcccgtcattgttgaaatgttgcctcccattgatacttctggctataccaaagagcaggtgcgtgagctggcagaatattgtcataaagtgatgaaagctaaaatagatgcattggatgaagagttggctgcaatggagaaatagggtaagtattcataataggttgtttggagccactcttttataataaagtgcgggtctaaccaaggcgatagctgttaagcgtactttaatcctcacatatttagcatatgtgaggatttttgttcgttgtccatgaccacaatttattattagtcggaaatgacatgtactgatgctgatcgggaaagattcgtgtaatgcattcagatagtttaattcccaccatattcgcgttatgatgagcgcttgataaataatgtttttgttaagcgcaatcaaaaggataataagctttaataacttcaatattgagttattcgcttccgggatgaatgattgcagtgtctcaactatttttgagccatataggcccggaatttaattaggtttgtcgcggagaaaatatgtcatttagtcggcgccagtttattcaggtatcaggcttggcgatgtgtatcggagccgctcctttattggttcgggccagcaaaaatcagcagactgctttgccggttccccctttattggaatcccgtggtgggcagccgttatttctgactttacaaaaagcgcattggacttttgatggacaatataaaaccagtgtatgggggattaatggtcaataccttggtccgactatacgggttcataaaaacgatgatgtcaaactgatatacagcaatcggctagcagagccggtttcaatgaccgtcagcggattacaattaccgggtacattgaccggtggagttgcccgtcagatttctccggggtctgactggtcgccagtgttgcctattcgtcagcaggcggcaacttgctggtatcatgccaatacacctaatcggatggcaccacatgtttataaaggtttggctggtatgtggttggtagaagatgaaaccagccgtcatttgccgttgccgaaacactatggtgttaatgatttcccggttattcttcaagataaacggttggataactttggggttcctgagtatcagccggcctctgatagtggatttatcggtaatactctgttagttaatggcgtacagaatccttttattgaggtatctcgtggctggatccgtttacgtttactcaatgcatctaatgcccgccgatatcagttacagattggtgatggccgtcctttctatatgataggcactgatttggggctgttacctgcgccgatagccgttcagcaactctcccttgcgccaggagaacggcgtgaggtattaattgatatgtccaaagaggatgaagttgttgttaccgcaggtgaatcagctggggtacttgataagttgcgtgggttgtttgaaccctctacggtgttgatttccagcaccgttttgaccattaaagcaaccggtttattatctctggtgacagataatctcccatctcgtttgattgatgatgttacgccagtttccagtgtaatccgtaaccgggaaatttatcttgatgataatacgccgggaataaacggtgcgttatgggatatgaatcgggtggatattactagccagcaaggaacgtgggagcgttggatcgtaaatgcttctgccccacaaccattccatattgaaggtgtgcagtttaagctgattaaccacaacggtgaggcccctcaaccgcaagattatggttggaaggatacggtttgggttgatgggcgggtggaattgctggtttatatgaaccagccctcttatgagcacttcccattcctctattacagccagattctggaaatggccgatcgcggctctgttgggcagttagtgactataccggtcaatcaataatggaaaaaaccagatgagtgataatcggtagaaccaagaaaatagctcagcaaaattggggcgcggcggtgatgccgcgcacgttttaattctactttgtccacgatcaccctatcaattttatcagccgtttttcagcactgattattagcgctattttgctcaagaagctgaatgaattcactgaaatcaacgaatatttcaggggttggtcccagacgtttaccgatatctagcgtagtcatcgcggtcaaatcttctttttctagtttgaaatcgaacacatcaaagttctctttaattctcgataacgtggttgattttgggatcacaatcatgccgttatcaatgtgccagcgaataacaacctgcgcgggtgttttgccatacttttgtgtcagatgttgaaccagttgattatcaaatacattttcaccaccttgtgccagtgggctccaggattcggtaacgatattatgtgtggcattccaggcatggagctgacgttgttgtaacagcgggtgcaactcaatctgattaatgacgggatgaacaccggtttcattgatcagtcgctggatgtgttcaggttggaagttagaaacaccaatactgcgaataagcccctctttctgtaattcaatcaattgttgccaggcaccgacatattgatcttgcggtggtgcaggccagtgaatgaggtaaaggtcaacataatccagttgcaacttttccagactttctgtcaaggcagcacgggcatcaaggtgtctgtcattccacaatttagttgtaacaaagatatcttcacgggggatatctgtttcttgtaacgcgttgcctacgcctttctcattgttgtagatagcggcggtatcaattgcccgataaccgatatccagtgcagcatggattgtttctgctatctgctggtcatctgaggcccatgatccaagccccagttgtggcatgtgattcccatcagcaagtctgataataggttgattatccattactaactcctataaaaagagagacttaaaatatcagttgaaattatggcaattgatattaagttgatattaagcgtaattgaaggaagtaatacaatcggcgtgatctaagccatgtattgtaatcaatacatggccaagtccatagattgaccggtttggtgatgcatcgataccaagagtatcacttagtggctgagccttagcctatacccgttatccttcaagttgcctctttgttggctgcactcactaaccccggtcacatagttacctatgctcccggggattcgctcccttgccgtcgcgatccatcttgaaatccatagggtatatataatattggtacattaagttaaggataaaaaccctgctgctgcttgtaaaccatgatgacttttatttacgttttgtcgccgagattttcttgtggcgccagtacatcaacaaagaggcgcttaaaccacttagcaatagcactatgggtaaaattatcaaaatgttcatcaccaaatcttggtgatttttaataaacgggatctgattaaggagataaccaaaaccgaccacgatgacaacccatagcaggccactcaaccagttaaaaacttgaaagcgtttactgttaaggccggatatacccgccaatgttggtaacagagtgcggacaaaagccaaaaaacggccaatcagtaacgcggccaaaccatgtttgaaaaacagctcgttagctcgttggcgatactgaataggaagttgtgccaaccaattcttaactcgtttggtatcgccaagccatagcccttgaagatagccaaaccagcaaccgatacttgccgccgctgttaatataaaaacggttgggataaaactcatgactcccttggcaactaatgcaccggcaaggattaacagagtatcaccgggcagaaaagcggcgggtaataagccattttccagaaccagtgtcacgaatagaatgccatagataatccagagaacatcggggttggcaagtttagaaaagtcatgctgccataatgcctgcatgatcccgtttagtacttccattgcttatcctgtaactgttatacccgttatcttgaaatccatagggcatataaaataaatttattgcatctgtatatataaagtcagtttacagtaaaagctttggcatggcttgattttatcccggataaggagaaactatgactaatgttcattaataagtttagttaagtgtggtgaatcaatggattcttttaaaagagagttccagtcgtctggtgggtgtcctgcattaagcatttcaccaaatactttgtaagcatcgtgcttatcaccatatgccctttttgttctctcatcatttacccagccaaagataataattttactttcagcgtgaaaacggaaaaaaaggcgatattgttggaaaaattttgctctgaaccagtgttttcttttgccacctaatgtgtcacctaaacgaaaggctatattagttgggtcattgggaataatttcagtaacgagttttatgattgcagccaagcgttttgtatcattttttttcaagtagtcatttggatatttttgttgaagttgttctaccttatctattgattgttttaattgttctacaaagcacggatgagcaaaaagagcccatccgtttattacacatactcgatcatacatagtctttactcatcgtcagcagataatgggttgctcagatctatgtctattccagcgataagtgacttcgcctggttaatgagttgttcatctaattgttgtacttgtcccggatgtctccgaatgtcttttgccagaaagtccagaaatgattccatgacaagatctttttcttcttcactatttttacggctgataagtacatcaccagaagataaaatcttatatgcgatactgtcatgacctggttttaacttaagcgctttacggacagatgttgggatggttgtctggctgcgactggtaagcttggattctgcaccaacctcgaactcaacatttggtaatgcgtgcatatttctacctcgttatgctgatttgagaatctgttcaacaaagtgtaatgcaaatgcattgtactggcaatatatctatattatcgcttcattatgatttcaaatgttaagtttttcagtttattacattgaataacaataagattactcaagtcgaaattcgaccaaatccctctgcgaggtcatcaatcaaatcttgaacattttccagcccgacatgcaggcggaacagagtgcctgtcctttgtgaaatatcgtattgacgcatcatttttatctcttctggttgatagcctaggatcagagattcaaaaccgccccatgagaatgccattttaaaatggtgaaaattatccagataatccgtaaattgttggggagttaacttctttttcaattgaaaagagaacaggccgctactgccactgaaatcacggataaaattattgtgaccggggcaggaaggcagagcggggtgatagacagcggcaacttcggttcgttgttgcagccagtgtgcgacttcaatactgcttttttcatgttgtttcaagcgaatggctaaagtacgcaatccgcgactggccatatagaccgtatcggcatcggctatctgccccatcaaataggagttttctcgcagttgcgcccaacaacgttcattagccacagcaatccctaacattgcgtctgagtgaccaataatatatttggtgcctgattgaatcgaaatatcgacgccgaattctagcgctttaaacagcacacctgccgcccaagtattatcgagcatgatgacaatatctggattgacttggcgcactgcgcggacaatagcggggatatcttgtacttccattgtgatggagccgggggattcaagaaacaccactttggtattgggcttaatcagatcagcaatctcttcgccaatcatgggatcgaaataatcggtggtaatattcatccgtgacaatattttgtcacagaaactttgcgtcgggtcataagctgaaccggttaatagaatatgatcgcctgcggcggcaaaagcgagaatggcatgactaatcgcggcagcaccagaagggtaaagcatacagcctgcgccactttccagttcagccattgctgcttgaaaagaaaaatgagtctgtgtaccacggcggccataaaacagctcgctcttgccccggttttgcgtagcacgtcttttgtcggcgacagaatcgaagatcaccgatgaagttcgctgaatgatgggattgactgcgccttgagtaaatttttggcttctacctgcattgaccagtaaagtttccagttttttttctgccatgatccactgccacctttaacacttcaatttttgaaatggtgtaaaaaaatagagttaacacgttaaaagatttagacctttttgtacaaaaagattaagacaacttgacgaaaattcatctcattacctgtgagtaggggttgtttaactttattttgtgaagggataatacttttttattaaacaataatgataattactatcaaatcacttaatgtttgatattatcagcctgcattttcattcaatctggtgaagactcagtataaataaggttagtgagatgacgaaaagtaattcactgctaaataacaaggtttatagcaaagggagtaaaggccaactgatgcgaaatttgactgcttcaataatattagcgttcgggctgacaggttcagcattggctgatacagcaccagcatctgcaacagataacaataccacgtcaaaaaccgtacaaattgcagggtctactcccgcgactactcaggcaacgacggacacaactgcaccatctgcaaatcagattgcaccgcaagcggtacctacgacagaatccactcaagttacgccggttgcaacggatgaggttgcacctaaaattcctgctgatgaagccaatctttccagtggctttgcgactgatctgtccatttggggcatgtatcagaacgccgatattgtggttaagaccgttatgattggtctggtgattgcttctgttattacttgggctctgttcttctcaaaaggcactgaactgttggcatctggtcgtcgtttgcgtaaagagcgattagctttaacggacgttaagagccttgatcaggctgcggaaattgccgaaggtttcaacaaacacagtatcagccgcttattgctgagtgaagtacaggcagaacgtcagttatcttctgagagcactgacctgaatagcacgaaagaacgtgccgctttccgcctggaacgttccgttgcggctatcagccgtcatatggggcgtggcaatggctatctggcaaccattggggcgatttctcctttcgttggtctgtttggtacggtgtggggcatcatgaatagctttatcggtattgctcactcacagacaactaaccttgcggttgtggcaccgggtattgcggaggccctgttagcgacagcactgggtctggtcgcagcgatccctgccgttgtgatatataacatcttcgcccgtatgatcgttgcttaccgtggtcaggttggtgacatggcggcacagtcaatattactgcttggccgtgatctggatttagcaaatagcaagacaaggtgacttatggcaatacgtcttaatgaagatctggatgatagtggcgaattgcatgaaattaacgtcacaccatttattgacgtgatgttggtgctgttgattatcttcatggtagcagcaccactggcaaccgttgatattaaagtggatttacctgcttcgtcggcaaaaccacagccgcgtccagaaaaaccggtattcttgacggttaaagctgatcgccagctttatgtcggagatcaaccggtcgattatgatactttggcggcggtattggatcagaccacccaatctaataaagagacaaccatcttctttcaagcggataaaactgtggattatgaaacactgatgagtgtgatggattctttgcgtaaatcgggctatctgaaagtgggcttggtagggatggaagcggtttcatcaggttaattgtcactgattcttccattgaataaccgcgctggaaagcgcggttgagttgacaccctctgaaggacggggttttacggtgcatcggataaaatgataattggtttgtattaataagagcctaatttgaacaggatggaaaataatcacgctattctggatcgatatgaaaacatcgaaatgacatttacagaatttgcctgatcattaagctcataaagtgaactatcgttagcgagttcaagcagcattggcactgtaattttcagacgctcagctaatgtttcaatatcaatacaaacatcattaataagcacttttattgcccgatgaaataattcaggtttttcatggggaataagataatcctctttttcctcaatagcttctcccttacgtttaagccccaaaaaagccgttttgtattgcgtatcggttaaaagggaaagctgatgtgcccgataaataattgctgctttacttactttccaagttaacttgaactcacttagacctcgccagttgattcttccgcttatcggggcagggaaatatttagccatcgcacttcgtggtaaaagtagggcagaggcaaattggttggcttgagattcggttattctgtcaccagtagatattccgccgtgtaacacaatatgtccaatttcatgtgcaatatcaaaccgttgtcggcatggtgacttcttggctgtatttctgacaatgaaaggtcgatctaatggaacggataacgcgtcaacatcatcagatactgagtcaaacgaggtaacaaatgcacctagcttttcagccaggcgagttacattttcaattggcccaaaccctaatccccaatcaatccgacatttttctgctgctcgttcaacttcttccggggagtttgcttttaattcaggaaataacactgacggtaaatttagattttcctcaaaaacgacgattaatcgtctgtataactcagcctttgcaagtgctgctaattttgttgctactctaattgcgctgcgtttacggaaatgaacaatttcttcgttcacaggagattgtatttgggtttcaaagaacgcaggagtaacctgcaatacagtcgctaattcattagaaagttcattagttggcacagcaaagccggattccagccgctgaatatattggcgggttttattaacccgctcagccacttgctcaagagatagctcgtgatacagacgagctaatcgcaaattagaaccattgaacacttgtcacctactacttgttgttgcgcttgttttctctggatttatcaggcatcgcagcactgataggatccaattcgattgttaccgcagatggcggtgtgttatctgtagaatgcagagtagatattttgctgttatcgtaagtccattgagacaacatttcttcatgctcgttgtaaccagcaaaatgaacttgcgcaccttcgccttcaaactggggtttttctacaataaagcgccatattgttggtatcgtgatttctggtgcccagagttggtctacactgttacggcgaaagaagcctgattttttggggttttctgggtcatcagtaaaaaaacgaagtgggattgtttctatttcgatggtcgtatccatattaggattagtgagttttagccaatcataagtacctttcatacagagctgaataagacattgcctttggcggccaaatgtacaggttcctcgggtgtaattatcatctaatggtgtcgaaagctgctcataggtatgatcaagcacattgagtagttcttttgcaatgatacttaaacgttcttcacttaactgtggatggaattcccaagggtagcggatgtttggcatttgctgttttctctaaaggtgcaaaaattcaagtttgtcaactttgatgttggtgcaaatttctgattttgtcaacctagtatcatctaaattgttttcagatatactttaaatctaataaattacatggttgtttattaccacttatgttgatttcttttggttaattgctatttaaattccattgaatttacacttattaactggaaaaaattggcctccaaagagtgaatggtaccggctgctaatctgctagttaataccgtgatgccaattatcttctggctggtggcaatctatcataaaagatagcttggggcgcagtgtgtaaaatcatatttgcttgcggctatttggattaaatagaacccatagcgcggctaataatgcgcatcctccgccgctgaaagcgacaccataccaagaaaaatgccaagcggcgacagctcccaaagaggaacctattgcgccgccagcgaaataacaggtcataaatacggtatttagtcggctgcgagcctcaggtaataatgtatataaccgtgtttgatttgccactaaacccgctctgctgccaagatctaacagaataatacccgcgaataaaaatagaatattgtggctcgtgccgctaattaggcacaaggccagtgtcactaataaagcgcctgtggcaacaatcgttctcccgccgaagcgatctgtcaacgaacctattatgggtgaagctagcattcccacaatacccatcaaaccaaaaagacctgcgatatcactcccccatccgtaaggtggttgggaaagtaataaggccagcgacccccacagcgtattaaaagcggcgaacagtaaaaaaccggataatgcagcttcacgcaaaaggggttgttgctttaccaatttaccgagtgaaataagaagttggccgtaagtcatcgtgtgtggtgtttctatttctggcaacacaaaccagatcagaaaaaataggcagatatcgattaaagcggccaatataaacatttcacgccagccgaaatactctccgactgcaccacttaatgccctggcaagtagtgctccggcgaaaaggccactcatcagactgcctaccgcttggccacgcttttctggtattacccaaccagatacggcaggaataatgatttgtgctgaaatagaagttatccccacaatcaggctacttgtcagaagacatgtaaaatttggtgctgtggcacataaaataaggctgattatattgccgattaacaggcagaaaatcagtttgcgacggcttatcgtatctccaagcggcccaaaaaagagaagccccgccgcatagccaatctgagttagtgtcgcgatccagccggatattgaaccattaacgttaaaacttgtcccaattgttggcaataatggttggttataataaatattcgctacagcaaaaccacaagcagtagataacaaaatgagagaaatagaagaaataggatttggtttaattgctgtatttgacatgggaatgctcagcatttggccggaattatgatgaaataattctggcactatcttgagatagtgggaataaaaagagcgagcgaaattgttttgcatagaatgcaaaaatgagagcgctatcagatgttgtgtattatttgtaatatatgaaatgtataggtaaaaattgcgatgaaagatttattacgtaccgatatgctaacaacattcattcatgttgcccgctcacggagtttttctgccgttgctcgtttgcaaggtatggctgcatcctctatcacacgtcagatagacaaccttgaacaggtgttagagacaaaactattctttcgctctacccgcggtttatcgctgacggatgcaggggagattttgtttgcaagggcgcaaggtattatcaatgatcttgtcgatatccaggctgaattagcggcgttgaatggcgagccgcaaggggtattacgtgtagcttgcctgccaacgtttggacgtcaacatattattccgatgctagcagaactattcacgcggtatcctaaaattcggattgaacttgatcaaaccgagcggttgactgatccggtcagggatcgtcttgatgtagttattcgtattggtgaattaaaggacagcacactttattccaaacgtatcgccacacaaacttggattatttgtgccagcccaggctatattcaaaggcatggaacaccgacaacacttactgaactggatgagcactatttgcttgataaacatcatgaccccgcgggtatttgctggtcacgctatcgtagtgttattaatttcagcgataataataggatctttcgtagtgatgactttgaaacattgagaatggccacagtgagtggatttggaatagcgcttctgcctaattgggtggtatccacagatattcgttctgaaaaacttattcctctatttgatgatccagatggacgtaaagaagatatttatttactacgagcacttgctcacccgccagcaaaattaaccgtatttatgtcgttattgcaaaagaggcttgccaagattatttaggagaatccgtctgatatatattaataaatttatgcgatattatttaatataattcactcactatatgattttattgggtgtttttttactgtcgttattaatatcaatttattattgaagtatatgttctttagtgctgattttgttaaataaatcacagggtcgattattggcgtaaataattatatctatgtgattattgattgatataataaattaaaattaatatagggtaattgtaaaatatagttaaaagtaatatttaactattctctaagtattcggttcatttattgttgttgagttgtcagggaaatatatttattcttctatattattttttatttataacaatgtcatttcttaatgaatatagaggtttattgtgactaaaattttttcattaaataaaaatcatcgagatttatcggcagggcatcactcattgcttaaagaggttaatggcttgaatggtgctcctaaatctttgatgccgggtttccctgatttagatgatcaatttaatcagatggaaattacccatatccggctgcatgatggttttggtattggggatatggataattatttccaagtggatagagtcaatgatcgaaatcaaattattgttaatgtcccagaggaaaataaacctgcggctaaaaaactgcttactgatatttcaaatatcagaagcatttttcccaatgcggctgccgggatgagaaataatgatattagtcttgcattaaaagaggctaattataaaatgactgatgcttatctgcgcgatattatgaataatcaagctgagctaaacccagataatattcagcgaaaaatcatgtttcgtattggacgtactggtgacggtggttatgaaataccagaagattttgatatttatgcaatattagtcagtacgttggtgaatcgctacgctttaaactatgccagaattggtttaccaagaaaaataacctattggcaggtttggaatgaacctgatttaatttttttctggaatagtaatgatcctcaaaaatattatgaattatatgccaaaattgcaagaataattaaagctattgacccggatgctaaagttggtggcgcgggtattgggtttgttgatagagcacaagaagattatcttgatgggtttttacgatattgtagagataataatgtaccattagatttcttttcctggcatgggtacgttgaaactggagacccacaaaacattattgatgtggggaataaagttcaaaaaggtttgcatacttatggttttaccggtacagaaagtttttgtactgaatggaattcttgtcctattgggacaaaaaatacatatacaaaagtgcaaggtattaaaaatgcggcatatattgcttccacttttatttatatgcaatatataaaagttgacagatcttattattatcgaggagatggttcatcttttggtttgtttaacaaccagcccaaccctgaaaatccaagtgttaaaaatttctgtacctattcagctcaatccttttacctgtttgccaaaatgttcgaaacaccttatattttaagtggtaataaggatttttccacaggtttaactgttttggctgccgagaataccgaaggaaataaaataaatattcttgccgcaaattataaagttgataagagccttgccgatggtaatgcggctcctgattatttatatcaacaatactatttggataccagccgaacactgaatcaattaacggatactgggagtaagaataaatggtttggcggtgttgatccgacaaccgttcgcgttgataacgcggtagtacaacatgaaccggttaagccatttccggataataatatgttgagagctaaaaatcgtgattataccgatagcgaccaaggtgttaccgtggtaattaatcatataggttataaaaaatttaaagttaaagcattccgtattcaagaaggtggatcgctggcacaaatgacaccaccggaagtaactgaccagattaatgtgtctatagctaataataaattaacgctagtggataagggagcgaagcctgagacagtagcattatattcgttagagttagaggataattaattttatattcaatggagatattattgtaaattattttaatcgaacaggctctggaaagagcctttttgataacagttaattaaattgtatggattttttatattttttggtggcttgttaaggttgaaaacatgtttttaatatatgtcgatgatcttttgtacgatatttttaaatataatctactctctgtatggttttattgcgtgctattttattattgttattaatatcattgttggttgattgatatatctttttttcttttaatgattctgcggttaaataagtcacggagtcaattttattatcataaatagttgtgttaatgtaattgtttgtttaatccaataaattcaaagtaatagctgagaattttaaggtgtggttgaaagtgatatctaactattatctgggtcttccattcatttattgttattgagttgtcagataaatctatttattctttgatattatttttggtttatagggatacaatttcttaatgagtatagagggtattatgactaaagttttttcatttaataaaaatcatcgggatttatcagcgggacataactcatgtcttaaaacggttaatggtgtcaatggtcttcctaaatctatagcgccaggttttcctgatttagataatgaatttaatcagatgggaattacccatgtccggctgcatgacggctttggtattggggatatagataattacttccaggtggataggaaaaacaatcaaaatcaaatgattgttaatgtgtctgaggaaaataaacccgcggctaaaaagcttgttgctgatattgcaaatgtcagaagtctctttcccaatgcggctctcggaatgagaaatcatgatgtgagtcttgcattaaaagatgccaattatgaaatgacggatgcttatctacgtgatgttctgaataatcaagcagatctgaatccagataatattcagcgacaacttctgtttcgtattgggcgttcacttgatggtggttatgaaatacccgaggattttgatatttatgcaatattagttaaaaccttggtgaatcgttatggtgtaaattatgccagcattgggttgccgagaaaaataagctactgggaaatttggaacgagcctgatttactgtttttctggaatacggatgatccacaaaagtattatcaattatatgaaaaagtagtgagattaattaagacggttgatcctgatgctaaagtgggtggtgcaggtatttcgtttagtaatcatgcaggagggcattatattgatggatttttccgatattgtcgggataatcatgtaccgttagatttcttttcttggcatggatacgttgatactggagacccgcaaaacattattgatatgggtaatacgattcagaaaagtttgcatacttatggctttactaagacagagagtatttgtactgagtggaactctagtccttttgggtcgagaaatacatttaccaaagtgcagagtcctaaaaacgcagcatatatcgcctcctcgttgatttatatgcaatataccaaagttgacctggcccattattatcggggtgatggtttatcttttggtttgtttaatgatcagcctaatcctaaaaacccaagcgttagaaatttctgtacctattcagctcaatcttttggtctttttgctaaaatattaaaaacaccttatatattaagtggtcaaaaagatttttcaaccggcttaacggttttggcggctgaaaataaatcgggtaataaaattaatattcttgcagcaaattataaagtggataagagtttttctgatggtaatgtagcccccgttcctgcggatttatatcgacaatactatttggatactaaccggacattagatcaattaacggatacctgtagtaaaaatagatggtttggtggtgttgatccgacaaccattcaatctaataatgcggtagtgcaaaaagatccggtacaacaactgccactagattctcttttaagacctaaaactcgtgattatactcatagtgaccaaggcgttactgtggtgattgatcatataggttgtaagaaatttaaagttaaagcgtatcgtattcaacaaggcggatcgctggaaaaaataactccaccagaggtgactaaccagattaatgtgtctatagctaataataaattaacgttgatagataaaggcgcgaaaccttcaacggtaacgttgtattcgttagagctaattcatcattaatttatacccgtcatctttcaagttgcctctttgttagctgcactcactcaccccggtcacatagttatctatgctcccggggattcgctcccttgccgccgcgatgcatcttgaaatccatagggtatatatgcaatgaagatattaggatggattattttatctttctgttaataattggagaataaagttattcaggctatttataatagcctgtctaataagggtgaataatttattgaaataaggttgattaggagtaaataggtgtttgttattaatggtttaatgggtggttatatttcatgtaattagatggtttttggaaataatatttttttaatggcgcttatgtgattgataagatgataggtattcttatatgtattatgattttattgaattaagccatataataaatgaggataaaagtgagatatattattaacgctggttttacccagcgttaataatttgtgtattcaataaatttgtaagattattctggataaaaaccttgggataaaatctgctctatatcccagatacaggattcaggaaaaacatccagcccggtttcattagcagcaattgcaactgcatcagaccatgcgtcgtctaaccactctttatctgccagacatcccttaaggcttggcgtcttatcagtacgtcgcgatagagattttcgttgttctttgatggttctttgccaactggagccgcgacggcctggctgaaattgccatttcataaggtgagccagtagaacggccagccgacttgctagctcgcgtttttcacttttacccacgtcttctatctcctcggcaatgttttctatatctatctgactcagcttaccgctgcgtagtaacgctgcttgttcattagcccaagctaccacgtcggtttcataacgtgttcccatgaaagcctccgatttggattatctgtacaaaatgaatagatttgctctgtttctacgatatcgagtaactaacacctagtgatattttcgtttatacccgttatctttcaaattgcctctttgttggctgcactcactcaccccggtcacatcgttatctatgctcccggggattcgctcccctgccgccgcgatccatcttgaaatccatagggtatatctacatattgaattcattctcggatgttgagcaactgtttagtgagttttgtacccgttgtagcatatcagcgatttcggtagttaaaaatgtaaagaatttttctttgtgcagagtgcgttcctggacatcctgtgggataaagcgctgcatttcgttacggaaagcatcacctttaataattgcaggcaagcgtgtcagaatattggctaatttgtctgaatagccactaatccgataatctataatcttgttattaacccaatccatacgcagggtagctcctttctgttttaaccagcgtaaatcccagatatctcggtgccgtacatagtgttgtgtattgaccagagaaaccagtttatccgccatgacttcatccaatgatttggttaataccagcgtatcggcgtagccatcaggtagaaaattgtagttggtcattaatgccttcggttcctgtgaataagaagggatattggcaatttcaattttgattctctgtttggggagatctttgcgctcaggcgcggtgacaattgagacctgccacttatctatattaaggccagcatattcaggctcgtttcttaaatcggctggttctttaactgaaacttcaaaaccgtaacgtttgccaatgtaatgttccaaacattttttcatggcttgtaattgattacgattaaagttaacaccaccggaaaagtccagatcttcgctaaaacgtggagctccgtgacacaagcgcagagaggttcctccttggaaagtgagttgatcaagtaatccattagtatcaaggcaataaagaatatcgtaatgcaacagttccttctcaataaccggtcgcatatgggaacgtcctggtacctgcattgctaactctataagttgggcgaaatttgctttattgaccatgtgtaatctcctgtttattcactaaatgggtgttgcgaccaacgcgctttaaatcacgtagtgcacattcaagtttggcgagtctcaaagggcggtttgcttgcgtgatactcgctaagatatcttcttgttggcgtttggtatgagtgaattcaatagtacccagtggagtgtgataaagacctttccggcctgttgtcatcacggtgagcctatcgatcaggatctgtgaaataacgccatattcactcaatgctgattcaaggctaacgtaattgtactcaccacgtcgtagagctttggcaatatgttcaatagcgtaactatcgcgattatgagcaaaattaaacagataaacaccgcgtacaggtcgtgaaagcatcgattctttaaccagacgatttaagcccgcttggcgtgttttggggctatcttcgggaaagatttttctgagatcggcaagggtgaagacgtatcgcccttttttgtcccagtcaataaaacgtttaagtgcagtagatctatccatagggtatgtatttgtagttttaatgttcacttgattatagttattttaagtggacattaaagcactataattatggtgttcatgtccacttaatgagtttttcaaaatagtgaaaggagtgagtatttcgctggcgtggttgaattgttttgttaatatattgatatttaatcagatattatagtccagttttttagcgggttcttatcgaagcccctgataaggcaggaattggttacttttcactatttgtggtgattttttaaatttacccctttttccgtcaaacgatagcgctgtaatggactgctcggtttttctggatggctcatttcaattaatccttctgccaaagcgggttgcaaatagcgcagacggaatgaattacgatcttttaatccaagtgctgattgcagttgcccacggttcatttcccctttcaataccataatgagttgtttaacttgttgggtagcctgatgggtagcctgatgggtagcctgatgggtagcctgatgggtggatgtcagaattgcatcacggatcatgtgcagcataaactcaataaacggtgcacaatcaacaagttggctactgagattaattgcctgatagtaatgagcttgatgttcataaaccaggctttcaacgggaataaattcaaataaagggttccagtggtttaagattaatgtttgccataaccggcccattctgccgtttccatcggcaaatggatgaataaattcaaattcataatggaaaatgcaactggcaataagcggatgaatatcagtagagtctaaccagtgaaaaaggtcacccatcagctttggaatccggtttgcctgtggagccatgtgaatgactttttctccatccattacaccgacgccgctgtgtcgataactgccggcattatctagcaatcccttcatcagaacataatgggcttccagtaagttttgctctgatgtgaaatgccaatggttaagcttttcataagccaagatagcgttacgcgcttcttgtatttcactgatcggtgcaataactcgctttccttcaataatggctgtgatttggcttgcatcaagtaagttaccttcaattgccagtgaaccgtgaattgtgcgtatccgattgatacgcctcaatcgcagggcttttatttgttcctgttctgtgcttaaccgcccgatgttctcactgatttcagcaactaattggatcattttagctgtaattgagaaaggaggttggtagccttttgtagctgaattcattgaatacctaattggattaatgggattatcgtgactagctttaacgttatcattggcactgaaataggttgatattatcgccagtaagggggaaagagcaatatacccgttatctttcaagttgctcccttgccattgcgatgcatcttgaaatccatagggtatataaggttgaaaaagagataataatgccactttgaaaaatagttcaaagcggcaaatagcattaaaggttgaggttatttttctgcttcgccacctagtgcttcaatggtgctgttaatcagcgcacttaattcaccggtcattagaataaagtcagcatcaaaccgttgggcaaaatcttctcgatcaatgtcatcattttgttcacgcagagtatcactgaattttatgcgcttgaaagtaccatcatctgacaacataaattgaatacgttcttcccaatcaagcgccagtttagtgacacatttgccagcttctatatgagtagcgatttcatcagaaactaaatcttgttttttacaacggatcacgccaccttcttccagaatagcttttaattcagcttcatccattaaagcaaaacctgttggcagagcaccggaacgtacccattcggtcagggttaattctattgggtttttaaatgtcaggggaactacaggtagagaaccgagactttttctcaataatgctaaattatcttcggcccgtttagcactagcagcatcaataacgatcagattattggcgatatcgatccaaatataagtttggctgaatcggctaaatgcccgtggtagcagggtatgcaatatttcatcttttagagagtctttctctgtttttttaagtttgcgatgctgttctccttccagtttttcaatttttgcttgtagtgcttgtttgataaccggtgaaggtaacatcttttcttctttacgggcgcaaatcagaatttgattattcgcgacatgggtgaaggcgtcactgtgtgaacccattggtggcacccaacctgttttcgccatatcttgactaccacatggggtgaatgctaacggactcaattgtttttccagttcatccgcagaaagtgaagtttctcggtttaaacggtaaatcattaaatttttgaaccacaacataaaattaccccatatttttgctcaatgaatcgggagcatgaccaacataaggtagcatgatagcgaatcacagggataagccctagtatcttgtgtcaattatcctgattgatgatttttattgaacgctgagacacgccgtgcttatttgtggaagtacggcgcggtcaggtcatccgttgaagtgaggactcaccggagtagtttaaattcccgcttgaacgcagtggcgtttttcactctttggcgtgggaggggtatcaaagggttcaattaaataatggtatatatcacgctgtggcaacgtactgccattaatcctattaccttcgtaccaaaggcatgaagccgccggcccttgaccaccatagggaaggtaaccgtgttcttcccgatgtaaatcagtattactcagaatactatcgggtaagtgaaggcgttcgctgagttgatgatggatatagtcactggtaccaaacaaagatatatacatagcattagcagaatacaaaggatcggaaaaataatggattaaatcttgatcctgataatatctttgtaagaagaacacaggggcaaaaaattctttataattgccacctaatgataattctttctcgaaaaccgttggttttatcatgccattgatgggattaacttctcctccataggtgcaatagggtctattgactttaaataatgaagcaatttttatgctgtgatcaatatcgctattgggaccgactatatttttatagtcactataaggaccaactctatcctcaatattctgcaaatcagagattaatcgttgcttgaataaatcgtatatatcattgtgtactaatatggcatttggaccagcacaatcctgcccttgattgtaaagaacaacgcgttttgcactttcaacagccagattaatatctgcatcttttgagataataagtggattatgaccggcgccattaagaataaataaggtattttttctgaaatgtttacgtactttgagcgcattctctggcgttcccgtaaagattactgcatcagttatttttacgcgttgacttaaaaataactctttatcttcataagaaatagataatgttggagaaaattcggataaattaataaccgcctcaaattttttgtaatgtgtatgcattgctgtcggcgggcgtatgcacacgttttctgccataagtgaagggataaaaccaaaacatacagaagcgtaaatgggttggttaagcgggagaaatgatgtcacaccataaattttctttttgaaatattctctgttgttctcaatattattcaagacatctattgaacggagaatttcatcttcggtgacgtttttacattgatagccagagagtgcttcgactaacgcctcactattcttctgtaaagcggaagaaagttcatcacattttttcctgatttcggtgaaattaattttactgtataacttagtcatatatgttttgttctcctcaatgctattttttagtaatctctctttttgagatttgttaatttcgttgttaacgatattttcctcatttttttgggatgggtttttatatggggttttatgtgggtttttatatggatggctaaaatgggttaaaatatgctgcatgcaatttaaatctaaccatgttttaattcgtgggcctttggtatcaccaaataaccctcggtagagcagaggccatatttgggatgatttatcatctgaaaaatggtcttcatatgtagtgattatatgttggaaaagttgatctttagtggatatttctcctgaatttattgagttggcaatggctgagaaatatttttcttctttaatgttttgtaacccttgattttcattttcacatgtcctgatataataatgataacttatttccaattcctgatctgaaatggattctcccggttttttatagcgatttagaaaattttcagccgcgagtttacttgctggttttgatgcgtgtaatattcttgctatcttcgaaaaagatagtctttttccatctttttgcgaaatattaacttgatcattgagatgtggtgccagcgcgacataaaatttagacgatctctgtggctcttttgagaggtaagtgcgaattgcgtctcgtgtgagcagatggcgaatatcatctaaagagaaactatttcctttcgattttgatatttttttacctgaatcatcaaggaaaagcccatatttgtaaaaacgtggaattggccggtctaatgctcccgcgatctggcgagcaacatcggcagaagccagcaaatcttcaccatgcatttcaaaatgaatgtttctggcaaggaggcgcataccccagtcggctttccactgaagtttagatttaccgtttagtaccgaaatagtttgctcttggtccaatatttcatttttatagaattcccgaatttctacgccatattcataaccgggtttattaatgacttcatctccaggtatgtaataggttatttcgcctgatgcagggttcacgtctgtaacgataatatgttcaagtacggcacccgttctttcagaaatgggcatgatcatactgtaggttctttgtcttaaagatccggtagattccttgcatatttggtttagcactaaaaaattttgtaggaatagtttgatttcgtcattgtaatcgccattttgataggctaaagagtttctgactagctgacactctatttcgtattctgtggcgagcttcataagttgatactccgccatttcagagaatgacgtgaaatttccgaaagggtctggcaccttgcttatcggttggcctagataaggcgttaattgttcagcatttggaatattcaaaggcacttttctgaaagggtccaaatcatctgaaatgagataaaaattaactgttctacctgctttctccaattcggttttgatgagattggctcggaggatttcacaaagggttcctatgtgtggcagccctgtaggtccgaaacccgcttcgatattgattgattcctcgtagggtatagcctgattaattgcgagggcttccttgacataccatttcatttgcagttacctccatcataatgttttgattattttaggattaatggtgatgaataaagacagtagaggtgttattaacttgtcaggaaatcctcagtaatcctgatgagaaaaaatgctttaactttaagatgttatattattttatgttttttgttttgacgtcagcgattaacctgaaaatcgctttaaaattaatgaatagttaaggctagttctagctaattaactattactatacccgtcatcttacttaacttaaaccgtgttaatgttatgggaggagtgagatcttggcaaagtggtacgcttgcgggtaacttttggcgtgatagaaatgaaaagaccctaactataaaaaaacagatttatcttgtggattgagataaacgttttgcagtttctcagtacaatagcctgcgtttgttcgttgaaacggcatatgatgatgtgtacagcgacaatccagcttatgaaaataaaagataggtgacgctcatctgtatttgtaagttgacagtgatagtaggagagctaattttgaatcctccaaaactacctaaaaaagaggtgtgaaatggttaacaatgtgttgaaagtctccacattaaccttattggtcgcatgtaatgtccatgctgcaacagttgatttgcgggtaatggaaacatctgatgttcacagtaatctgattgattttgattactttaaagataaacctacagaacaatttggtttggtacgcacagcgagtttagttaaagctgccaaagcagaagcctctaacaccattctggtcgataacggtgatttgattcaaggtagcccactggctgattacgtggccgcaaaaggtcttaaaaaaggggaatctcatccagcacatcagttaatgaatacaatgggttataccgtgggtaactttggtaaccacgagtttaactttggtttggattatctgaaaaaagccattgccggtgcgaagttcccttatatcaatgccaacatcatggatgcgaaaaccggtaagaactatttcaccccctatattattgttgatacgccagtaaaagaccgggagggtaaaaatcataccatcaagattggctatatcggttttgtaccgccacagattgttatctgggataaggtcaatctggatgggaaagttgtcgttaacgatatcactgaaaccgcgaaaaaatttgttcctcaaatgaaaaaagcgggggcagatttgattattgctattcctcattccggtttttccaaggagccttataaggcaatggctgagaactcggtttattacttgagtgaagttaaaggtattgatgcgattatgtttggtcactcacacggtgtgtttccaagcaaagaatttgccgatattaaaggcgttgatgttgccaaaggtacggttaacggtattccggctgttatgcccggccaatggggtgatcatttaggtgttgttgatatggttatcgacaacgagggtggggcctggaaagtgacggaagccaaagcggaagcgcgcccgatttatgacaaagtgaataaaaaggcactggttgagcgtgatagtgaattggcaaaaattattgggcaagctcatcagggaacgcggggttttgtcggtaaattgattggcaaagcgtctgccaatatgtatagctatttggctttgattcaaagtgacccgacagtgcagattgtgaatgatgcacaagccgattacacgcggcattttattcaaggtgatcccgatttagcggatattcctgttctggccgctgcggcaccattcaaagttggcgggcgtaaaaatgcacccgcagagtttgttgaagttgaaaaaggtgatttaacctttcgtaacgcagcagatttgtatctctattccaatacactggctgttgtgaaagtcaccggtgctgatgtgattgaatggttggagtgttcggccggcatgtataaccagattgatccaaattcaactcagccgcagtatctgttgaattggagcggcttccgtacttataacttcgacatgataagtggcgtgaattataagattgatctgactcaacctgctaaatacgacgttgattgccagatcatccatcaaggggcgaatcgtatcaaagagctgacttaccaaggtaaaccgatcgatcctcacgctaaatttctcattgctaccaataattaccgcgcctatggcggtaaatttgctggcacaggtgaagatcacatcgcattctcttcaccggatgagaaccgcgctattttggcggcttacattgtcaaaatgtctaaacagaaagggatagtaacgaccaaagcagagaataactggtcgattatgccaatcaaaactgacaagaaattggatatccgtttcgaaacgtctccaagtgagaaagcggcgaaattcatcaaagcattttctcaatatccagtgaaatatttggaaaatgatgagatcggttttgcggtgtatcaaattgatctgactgaaaaaaaataattttaatagtcgcctgccctaatttgggcaggtttttgtttgtttaccatcaacagggaaataatttcccataaaggaatgaagatgcgtttttttaatttattatcagcaatattcgttttactgattgtgggttgtgcgaagcaaccagaagtgactgactcgttggcgtctctatcaacattggaagagggggcatcttgtatcttaccggctactccgccgaaagattatgactatgttgctaaaggtgatcgttatggtcagaacgcaaccgcatcgacagattacttcaaactggctattagttattctcctgcattttgtaagggcaaagcaaagaatattgagcgcctgaaaaagagtaacaaacttgctgaagcgcagcgtgaatatgaaaagtttgaattgcaatgtttctccgaaaacaaatttagttgggtgattcacggcttgtgggcgcaaacctgtgatagtaaatcaatggcgcagtgccgtgattggtctgatgtcagaaaacatccacgtctttgcaaaggggatttgccgccactggattatcaggtgattaaaccttatctgtgcgcttctccaggggcagatttgttacaaagtgagtgggaaaaacatggtgtttgcgcgtttacaacgccagatcagtttttcagtaaacagcaagaactgtttgatggattggtattgccgagtgatcgcccatctaatgagcagttaattaaattcctccagaaaaataacccatcgttaaagggaaaaaccattcagatcaatcgtgatgaattatacatttgctacagcaaaaatttcgacgtgattgattgtccaaagcgtgagttgtgatggttctcctttctataaaggaaaatcaccgtgatgtgcctgacctgcggtaacgtgggtcaggtttgccttctcttaatcgtctatacccgtcatctttcaagttgcctctttgttggctgcactcactcaccccggttacatcgttatctatgctcccggggattcgttcccttgccgtcgcgatgcatcttgaaatccatagggtatataatggcgatgatatcccgaaataaacggcgtctgatgcagaaaactgcccagaaaaaatattgcttgcaggcttatagcaattcacgtcaagttcttctgtcttctgtcttctgtcttctgtcttctgtcttctgtcacctaagcaacgaattgataaagggtttcaagatctgatgttatagaatgccatcaaaatcagatctgaaattgaccaatttagccgtagctaacttgaccaatttaaacgtggatctatcatgacaaatagaaatgttatctggttagtaaggcccgtaggctatcaggccattttgaaacgttgccctggctgtgaagtaaaaaaggagttttatccagccggcacttttagggttaatgcgcagaaaaaagtcttagatgtgtggagtatctataaatgtgagaaatgtgattacacctggaatattgatattttttccaggattcatgtcaacaaattggaaagcaatttgtatgaacggtttttgcataatgatcaagatgaaatacgacggtatgcatttgattaccgcgtattggcaaaaaatagagctgaactcggcactgctcctgactttatcatcgaaggtaaaaagcttcaggacatcgctcaaattccagcggcagagatcacaatacagcttgaatatcccattcctatcaggttgatctcaatcttgaccaaaaagctcgcattgtcacgtagtcgagtggagaagcttgttgggcaaggcgctattcagggggtaacggaaacggaattaaacaaaaagttgaaacgtgatatcactcttagcgttaacgttaacaatttattgcaagaatatgataattatggcgtctaaatgacgccagatttcctggagatgacataggcagtaaaaatgaatgaaatgaatacgataaaaaaatggtgggtgctcactgctgtttcagtcgcgttatcgctggttgctatcgatatgaccgtgttatataccgcgttaccgagtctgacccacagtttgggggcgaatacaacggaaaagttatggatagtgaatatctatcctcttgtcgtctctgggttgttgctaggcgcgggtaccttgggagatcgcatcgggcataaacggttgtttgtttatggtctcatcatctttggcttctcatccttgatagcggcctactcctattcgccagaaatgttggtggtttctcgggcattattaggggttggggcggcaatcatgatgcctgccacactgtcgattatcgctttgacattcgaagatgaagatgagaaatcatttgccattgggatttggacagcggttgcttctggcggcgcggcaataggtcccctgattggcggtgtattgcttgaatatttttggtggggatcagtgtttctgatcaacgttcctctggtgattttgacactcattctgtcgtggttgtttgtcccaacagcgaaaacagattcgtctcacccgtgggatcttattggctcattgcagatcatggttgtcttgataagcttcgcctatgccatcaaagaatttgccaaacgggagccttcttatatcggaatattgataacttccactctgacgataggttttctgacgttgttcattcgacggcaaaaacgcagtgtgcatccgttgattgattttgacctgttcaaaagcccggccttctcatctgcggttatcgccgggctggtggcttccgcctgtttgatgggccttaatctggtgttaagccagcgtttgcaactggtattatcattaacgcctttgcaatccgggctctattttctgccattctcattgggtgcgattgttgcaagtcctgtgagtggttgggttcttcctcgcttagggagtgcacgcttccttataacctcgttgttgatgtatgccattgccatactggcgctcatggcgagtttttcagcgccgctacctttgcagatagtttgcttttttgcgctcgggacatgtcttggagcaacaatgactgcggcatccagtactatcatgcaggcagcaccgcctaatcgggcagggatggcggcgtccgttgaagaagtttcctatgaattgggtgggggattgggcattgcgatcatgggtagcattatgtcatttatctatagctatttcattgaaattccagtggattctcctatctacgatgtggctaaagatggtattgatggcgcattgattgcggcaaaagagatggctccggatgcggggcaggctttggtcagccttgctaagtcagcgtttgacgatgctgttttttctgtgatgggtgctgcgtccctgtttcttctgatgatggcggcgttggtgtggttcaatttccgccgctcctcactgagtaatacatctcatgctgcgattcatcgtcagtgaaatcggtgagccggattgattgtactcatcgtttcttaataggaaactaatggttgaataagggaaccgctttttggctggttccctgacccaacacactggcggctagtcgggtaagttcctcgacccagtattctgggcggcctcttttctctatctatatgtagaagagttcataaaagccgtaaagtgagggtatggttaaaacaaaacattaaccaaattacttatttgatagtaataatgtattaattattttggtccagctcaaatatctggattgattcgtggaggtttatttttttattgctacttttaaaatcgtcactgtgtttttaataccttaataaatgacgctaattatcattccatgtgggtagccgggctatcaattcccgtttttttactctgcatgttcgctttctctggtagtcaaaagtaaacgctgtgttattcgactaatttgtatgcagaagagtattgagtctgcataacgttttaatttcgtttctgcccgcagggcttgcaatggaaaggtgaatattatgcgtgttcaattagggcaattatatgatttgcgatattcgctgagcgttgatcagttgtgtgtcggtgaagtattaatgcccttggagcgattggcaccggcacatcttaaggtagcgattgaatatctattgcataagtattctgttctgagagcacggtttgttggtagcgggatgaatatgaagatggatttcgtgccgcctagccgtgaattattgcatcaggtttttgaagttagagagcaaaccgatagtccatgtgatcgccgacgcttaatatcaaactacattgctgaggttagggctgccatgaatttggcaaatccgccgttattgcgttattgcttgtttgatggcaattgtgcccgtgatcaaagattggtattgatattcaatcatctggtctgtgacggtatttccagcagaatcttatggcgagatctttcaaaggcatacagaatgtcagtgaatggtcagccccttgcgcttgaaaatgccacaaattatgagcaattttgtgctgaattgtatgaacaacatcggcaaatcgtaaaaggcgctagcggctgtttttgggaagggtagcctgaatatgctgttgtgggtcagtcctcattttgtggggtattgggaaacccgatgaagatgcgcaagagataccattgagcatggatatagagatctatgccgatacgatggaggtcactatttcttccaggccagattgtcatctacagattttaccacctcgtttgatggaactttggttggaaatgatcggagaatctggaattgattgaggagaagggagttgaatgccagatagaactgaccactctttagagggatctaccatctggcaagcgttgttgaagatgccccgcttatcatgtaaatgcacaaagtgatgaggttatgatcacgcctgagaaattttcccatgaagagcaacgtcaggcgataactgaaatagtgatagaagagctgactccgtaacgaggctggcttagccagagggtggggatactgtttaagtatttatggagcttgacacgttatgtataaagattgcccacagattggtgatgaagaattgctgtccatgcagcaaagcgctttatggttcattgacaatgatacccctggcgattccaaatataatatttccatggcattccgtattcacggatcgtttcaaatcgatgcttttcgctatgcggctaaccagctcgttgccaagaatgccaccttgagaagcactttcgttaatgtgaatggcgaaccaaagttggtcattaatgaacacttgccgccggcattggaggttttcgatgcaacgaacttgagccagaaggcgcttgaagatgccgttcagagctttcattccatcccttttcaattagaaaaattgtcgtgtctgcgtttcggtatctacgttgtcagcgcggaagaatacgttttacatatgtgtgttcaccatattgtgtcggattttacttcactggggctgatgttggatcaacttgaacactattatctggctggacttggcgaagatgacgattcctggttaccgcccgctgaggattttaaggattatgctgtcaaagaacggaagtattaccaaagtgaagcggcggaggaatcgaaagcttattggagtgaatgtttaaagcagccgccagacgtattgcaatgggatagtttttggcgcaaaggcgctaatgacaagtcatccgttctgtttagtattggtgaagagacaaccaaaaaaatcaagcggcttgcttcaaaaataggtggatcggtctttacagtcatgttggccgcatggagtgcttacatcgccagagagacaaaaactgctgatatcgttatgggggtgccggtgtcgatgcgtcactcggttcatcggcacattatcggctgtttgtttaatgtattacccatacgtttatccgtcgatcagacatttcaccactttctattagcagcgaaggagcgattgttatcggcccttgataatcgaaatttttgtctcagccaaatggtcgaacacctggctgcggaacgaaatgatggtcgtaacccattgtttcaggcaatggtgaatatgctagggcatgtagagcagtcgcgttgggtggcgctggagatggctggcgattctgttcaggtatcatgggcgggacggactatttccccattcagggtttgtcagcaggaaggccagattgatattgaactgctatttgtggatgccggttcccacttaagatgtgagtttaaagcggataaacattttttctcacattcaggtcttcagatatttgcagagcgctttgagctggtggttgaagcgcttgtcacagcgcctgatgaacagttgactactcagtgtttcactgctgatccctatattcatcatagacgtatgtataaaaccggtgatttagcctattgggatggggaacgaattcatttttgtggccgtgtagatgaccaagtaaaagtctctggttctcgaattgagattgctgagattgaggattgcctcaatcgtcatcatgctattgcggacgccgctgttatcgttgaatcttacgaaggactcgatcgtttagtcgcaatattcgtccctgtcaataaggataaccttcccgaagagtccgctattcgtgatcatctcaaggcttatctccccatctacatgttgcccagtaggatgatgctggcggatgaattgccgcgtaatgctcacaacaaaattgatagaagagcattaaacggcttgattgaagcggggcaattgacagatatcagttcgttgagacccgcgcctatgttacctgtcgattcgcgtttgccggatattgatctgttcgacagtggtgacccctcaattgagtaaactgcaagagatgtatatttcgcctgcctctgtctggcaggccgggggaagtatcaattgggatattttttaccagagcgaatatcgtaaatggctcccgctgccaacttatccatttgaaagaacggcaatctgagctgtaaaaacggtagagatcgtcttcattttgaggaaagtgaggttgatatgagtaatattgaaattattcagagagaaataatcactatttttgcagagacatttggtttatcgaaagaagagataaaactagaaataccgctggttgaattgggggcggaatcactcttgttattcgaagcattagagcccatccataaacaatttggtgtaaaactttcagtgcggcaatttttcgcagaattacaaacagttcgtcaactcagtgaatatatcttgatggtgggtaaaaacagggttgtggaagataaccattcggttactcaacccgtcttgtctgatcaggaaaaaaggtctgaacaatccgatacgtcagatattccaccgattaataaagaacgctttttccaatggatgttgagaagtgcaccatcgattgaatctgaggagagaaaaaagtatctggcttcatttatatctgaatataacgagcgaacgattaaatcaaaaattcattcggtagcggtacgtaaaaatattgccgatagccgttctggaattggctttaaactctcgataaaagagctactttacccgattgtctgcaccaaatttgccggacctgttgtcaaggatattgatggtaatgattacattgatatgacgatggggtttggtgcgcatttgtttggccatagcccaccctttgtagttaaagcgctcactcaacaaatagacaacagttttggtttgggaactcggcatgagataggcttagaggtggctgaacttatcaaagagattaccggcatggatcgcgttgctttcgtcaatagtggaacagaagcggtgatgaatgcggttcgggcagcacgggcgctcactcgccgtaatcatattgtgctcttttctagcagttaccacgggcattgggatgccgtactggctagagcgggtgactatgatgaagctaatgcgacaaaacccgtttcggtgggcatacctgaaaatatggttgctgatgtttcggtgtttgggtttggttccaatgaggcaattgagtttctcaaaaccaatagaactgatatcgctgcggtgctggtagaacctgtaccaacgcgtgacccaggattgagcaatccagattatttgcgacatttgcgtcgagtgaccagggagttagatattctgctgatatttgacgaaatcgtgacaggtttcagatctcatccagcgggtatccaggggttattcggtattgaggcagatattgtgatctatggcaaaacgatagggggtgggatgccactgggcgtcattacgggtaggaagaagatgcttgattcgattgacggtggaaactggaatttcaacgatgatagtttccccgcagcggagccgacattctttggtgggacctattttcaacatccgctttgcatgactgctgcgaaagccactttgcaagagatcaagaggagaggggaaacttttaccaaggtactgactcagcgtactgaatcgtttgtttcacgtttgaaccaactgttcttaagccgtcgggttcctatcgaggcaagatcattttcctcattttttagattaatgcatcgcgacaacatggatttgctttactacaacctattgatgagaggggtttatatttgggaatggcgttgctggtttatctctgatgcgcatgatgacactcatctggaaaaagtttatttggcatttgtggatagtttggatgaacttgaggaaaacaacctgcttcctcgatatagctagatcaaactggcctgttgtgagcaataacttattgaatgattaagcatcctatcctctggctgtgctgagttcgatgttctgaaacgacggctcatagtctgttgagtaatgaaaattaaggggaacgttatgccgttggcaaataaaagtgttttcgttggtgggccgattcaatttgcaatttgtgataacggttttcatgaggagttgagaacgactatccaactggcgattaagacggtgaaggcattgaatggtaatgtattttcggcgcatttgactgagaaatttggcattgatacacctagttatacgccagatatggtatcgaaacgggatttccaatggatgcagcagtgtgattttttcatgccgattcttccggttcatcaaggtgatgaattactgcgtactgacggtacacatattgaacttggttgggcctctgctctgaaacggcccgtcttgttgatcactcaactaccgattgtgaatggtggtagtcatttgttaaagggattagagcatatttgcaacgtgtcgaaattggatattcacgatttccgtcaaaatccgggacagattggcgagattttcaggaattttgcagttgagtagctattgatcacctttttgaggatataccgcctttctattgaatggaaaggcgggttaatagcgagtttgcttgaatgggtaatttgtggagtgacgatggaaaatcgagttattgaaccaacctatgatgttttaggaatgaagataaaaaacccaattattgttgggtcgggtctgctttctgatcaagctaaaaatattcgccagtttatcgctcacggcgcaggggcggttgtgacaaaaacgatttatccgcgctcggaaaaattgcatacagaaaagacctatttattcagtacagggatgctgaacaatacgacatattcgaagaaaaccgttgaatattggttaacacttctccgtgaatttaaggaagaacaacttccggtgatcgtttctatccatgcggaatcacctgaggcgttagcttcattggctgttcgtatttcggcagtgaccgatgcccctttggagttaggcatttcatgcttgcatgcggacgacttcacggaagatacaccagaacgagtattcaactacactaaagtggtgaaggagcgaacgaacaccccttttgcggtcaaactctcgcttggcgataatttgtatgggcgtgttcaagctgcggtagaagggggggctgatgcgataactttgagcgataccatttcaggaattgcattcgacacagcgaatggtgaagcgctgcttaatggggtttgcggatactctgggccggggattaaaccaatggtgcttgccgctatttataacctgcgtaagcgaggggtgacgattccaatacttgggtcgggaggcgtacaggatggtaatgatgttcatgaatacctactggcaggggcgaatacggtgcaggtttataccgcgcttcatcggcatatgtataaaacattgcagcgcattgttcatgaatatacgcaagtcatgacgtcagaaaaaggatgaggaaaagggataacatcatgaataataaaaaaattagagagtttgcggaactgaccagtgagcaggttttaaccgcagttgaaggtaagacattgatatggccgattggcgggattgaacagcatgggcctcatctgccgttgaatgtggattccgtgatcccagaagcctttgcccgcgtgttggcggaggatattaatggtttcaccttaccggtacagccggtgtctgccagatcattgccacagagtggtggagggcttgaatttcccggcacagtttacctggatggatcaacatttaccgcttatatcagccgaaccattaagagcttgtgttcactaccctttaagcaactggtgatcattaatggtcattttgagaatgaaggttttattttcgaagcagtagatgcattacgggcagaagggcattttaacgatcgttccgttatcgtatttagctggtggagtttggtatctgatgattggactcgtgaacatttagttgattttcccggttggcatgctgagcatgcagggttaacagaaacgagtttaatgttgcatttacgcccggatttagtgagagcggagcgacctgatcacgataaacctccacgtgcagggatctatcaagtaccgattaaaaaagaattttcaacgagaggcgttctttctaaaacatccggttcgagtgcggagattggcgaactcattttcgagcatgtcaggcagcaaatactggaactggttactgcggattaatccgtcgtaatatcgcggtgttttttcgattttgcccaggctactgggactttcattttagtgagagaattttttacagtaatagagacatagataattgtatgagtaaccttagccgccggtgagttagttgggcggttaaggtttataaatagttgtaagtgacttattacatggcttttaatctattaaaccattaaaattaaatcgttaaatcgttaaatcgttaaatcgttaaatcgttaaatcgttaattatctgtcagtgtagttttaaaatctggaagaaattggcaagcgtattatgaaagaacaggtaaaaactttaatcatcaaagataaaaagaagtggttaaggttatttttcagaggataaaaaattcgatgctatattagcattggaagagaaaaaatcaggaaaagcaggttttaagtttattttacagggatgtaatgaaatttatgtgaaatcagagataatcgttaaataaagccgataaaatttcaggttaaccagattaagatcattaaagatgattaaagaaatatacccgttatctttcaagttgcctctttgttggctgcactcgctcaccccggtcacatagttatctatgctcccggggattcacttccttaccgtcgcgatgatcttgaaatccatagggtatatgcgttgattttaatgccattaacacatcatttactctttctgttttttaagtgtagaaaaaggaatatagaattattaaagtaaaaatgaaaaaaaccaagtatcagttaaatggaaagtatcagtttaatgaaaatggcatcgttaaatacgagatggaaaatagaattatttacctgttccaggccggtttatcatgtttttaacaaggttaaacttatctttttacttgcatgttcacttatgggcaattgcaagctgctttttatcggtgattagttagttaaggattgaaaaaaacaggtgcattcattaataccagatttaaaaaatacagagtggctaaaaaacggctgactctctgtcatatttaatacatttatcggcaatgctatcctccgattattttacgtttacctaacctgatacaactatttaaaagtgataatacggagctattaaaaattttatataactaacaagaggatattcagatgctttttcgttgttattttgcgagaaaatctataaaaataacgcaataaaaaattggttgatagattagtttaatagggtttaagttataatagttgagttaattatctgaaaaaacataaagggatatccttatatcatcaggccatttactggctgatttatcaaaaaataaagggtgtggcttattaaaaccactcaagattgtcggtaaaatagggtcagtattagtgcgcgttgggaaataatggataaaaaagaatgaatgattaaacagataagtgattatcatgatcagtaaaaatgaatagcgagtatgattaaacttaacagaaatcggccgtcgaaagtggtaaaaataccatttaaaattttatatcgcttaaaatccgatgttaaaacaatgtgttttaataacagtttaaaacctgtccatcataaatccatcagtgaaaaaacttgactctgttaatgcttatgtaatcagggaaaataaataacaatatgaatatacccgttatccttcaagttgcctctttgttggctgcactcgctcaccccggtcacatagttatctatgctcccggggattgactcccttgccgtcgcgatgcatcttgaaatccatagagtatagattaatcagacaatctgttttcttaaagggactggctttaataacgttttcaatcggaaaataaacttttttataaagtaattaaataatttattatggtaaataggtataaaaaccctcaagaaaatgatttaagggaatacgagtatgtttacttccggattaacgatgttgcacttattatgtgaatctaccaataactttcattgagtagttgttgtaaatataatgtttcctcgttttttctttgctggtatttgattctttaggcatcttatattaatgcattcggtaaagacttgcctgagaaaatctgggaaaatgttttttgtaacttgattgcgagttttccagagatattatagcttttataataagtggcgatgactaatagataaatagataaatagataaatagataaatagataaatagataaatagagaaacagattgtggcaaagaaagaaaaacggcctcaccatgatgtattattcaaatattttttaacgcagcctgaaacggctagggaattcttatacctttatctgccggaagaggtccagtcgttgtgtgacttagccacattgaaactggaacccggcagttttgtggaccggcatttacgtcaactgcacagtgatgtgctgtactcggttgaaacagctcggggacaaggttatatctattgcctgattgagcatcagtccactcctgacccgttgatggcctggcggttgatgggttatgccatgtcagctatggcggcccacctgaaaaaaggtcatactgaactccctttggtggtgcctttgctgttttatcatggtgaggttcgtccttatccttactcaaaccggtggctggattgttttacgttccctgaacaggctgcccgcttatactgccaggagtttccgttggtggacgtcagtgtgctcagcgatgaagagatcctgacacataaaggggtagccctgatggaactggtgcaaaaacatattcgctgccgggatatgctggaatgggtccctcaattggtgaaacttttgaatgcggggtataatacaactgagcagcgcaatgtggtgttacgctatattttactgaatggacatacgccggatctctcacaatttgtccatcaactgattgaacaatctccggagcatgaaacgatgttgatgactattgcagaacagcttgaacaaaaagggcgcgaacaaggccgagttgaaggccgagttgaaggtagagaagaaggtaaactggaaacggcttgtgccttgttacggcatggcgtgagtttggacattattgtcaccagtactggtttgagccgggataaaattgaagcgttaaagcattaaattattctcctcttttacagcaaaatgccgatgttcaagatcggcatttttgttcttattcaggatgatggctatacgagggacttttacgtttgcccggcgaagctgaaaccggtcatactcaagcaactttatagaggacgaaatgacaccctaataacatggggagcgcgattaggtgagttgtttgtggaaacaaatactcgttctgttgtagtagttattattcctattgcatattccttattacctgtgaaattaatccatagggtatatgttggcaagagcaagtcacgcagtacattcaaaaccagcaagtaatgctttatcgaaatttccttcccgccttatgttggcgggcgtaccctttcaaggaaaaaatggcggcattcagttcactttggaaatactttttatttattgttttccgctattgttgatcataacgaaactcaggtgagagtttacttatcccaagcccattaatttttttaaccttaatctgtacaggtatccgttctttcatagcttcaatgtggctgataacacctatggttttaccggaagcatttaaatgatccagtgcatcaagagcaatatcaagggtttctggatcaagtgtgccaaagccttcatccaggaacagtgaatcaatacaggttttattgctgactaaatcagatagtgctaaagccagggcgaggctgaccagaaaactttcgccaccggaaagcgttttggtatcacgaatagcatcggcttgccaggtatcaaccacttgtagttcaagaccatcactgtttttacgttgcaaatcgtagcgtccgtgcaattttttcagccgttgattggcgagatgaaccaaatgatccagtgttaatccttgagcaaagcgacggaatttagcaccatcagccgaaccaatcaggttattaagataactccagtcatcataattttgtcggcaatggctgatctcttccaataaggatttttgctgttgacggcgtattgcatcattaccaagcaggtttttcagctctccttgttgtaaggtgtttctttttagctcatcagtcatgttttccaactgttcggtcagttgtgattttgtatattgattaagtaactcagggcgatttttccgatgttgttgcagggtttctgctgctttctggcatagggcgttggcttgtatctgctgttgttcaagctgttctttaagttgtcgcaattctttacgttgctcttgcgataacagcgctgattcaacggcgtgctgatcggcaaatgggctttttgctaatgcagcattgaaattctgttctgcctgctgtttttgttgctcagactggttatcgtttttttctgtctcatgaatggcaccggtcagttggttgatgctggattgcgcttgttgcagatgtgacaatgcttgtttgtgcatttcctcaagcttttgagattgttgttgtaatgcctgagtgatttccgtaacggattgttcaccaaatagttgttggcgctgttgttgtgtctctgcgagttgctgtttctgttgttgagctgtttgattaagcctatttagatgggagagatattcttctttctgtttatgcaatgattcaatttgattttgaatgaccgcttcttctttttggatctgttgccagttttcatgacagttttggtatatctgccactcttctctacgttgttgcagccagttttcagtatcattcagcattggcagggataaattatattgctgtaattctgacgtcattttttcgatgacatcagttagtttatgctgctgttgttgtatctctggttgcaattcagataactgttttttcagtatattgtgttgatgcttactcagttcaatatttcgttcaatttctttaacgtattcttgatgagcggtcactgttttttctgttttctggtacgttttttctgccagttcaaattcggttaattgagtttggcaaagccgatgagccgattggttttgttgcacaaatagttcaagagcgggtttatctgaaagagaaatttcggtctgtaatattgcgcaagtttcctgccattgttgcgttaatatattcaatcgtggttcagcatcagtaatttcttgtaaaatatggtcgtattcttgctgttggaactcttttttattaaccaatgatattttggtggcttgcagcgcttcaaattgctggcgtaaatcttttaaccgttgttctgattttggcagttcaatattttgataagcctgaattgcaggatgatgttcagcaccgcatagtgggcaaggagaaccttccttgagctgtgcccgctctttttccagactgacaatcttttgttctaactgaatacgttgagtaagatcggataaatgttgctgtttgtctgagagttgtttatcgatggattcaatttgaacaggaaattcttttaataatttttccggttgttgtaagcgaatatgatgactggcaatagcggcttgtaattgtaagatttgtggcgacaggatctccagtttatgttgcagcggtagctgttcctgatattgagttaattgtttttttaatttctctggcgaatattgtttttgcagagtaaaaaattgttgcttggcctgttcaaatgccagttccagcggttggttattttcaatttgttgttttaagtcttccccttgtttgttcaggttattgctaagttgcgtgatttcggcagtgagcttgcctactttttgtgtttggtggtcaatttgttgttgatgttcttgccgccacgagaattggtgttgccaaaaagccagtttttcaccgaaatattgatgataaggttgttgttcgaaatagttttccagttgttttctttgattggtgaatgataaggcgcgctgatttgctgtgtcatattgttgacaacggttttcaagcaccgttttctgttcgttgatttgttgctgagtaagattgagctctttaatctgtaccgcaatttgatgatctaatggaatcacctgttctgttatcagcttttcttgttgttgccggtgctgttgatactctgctctggcagaatctgcatgagccaccttttgctgtatcggtgtgagcgtctgttgcagttgttgaagttgctgatgcatctcttccaactgtttgctggttctctgatgttcatattgtgttcggtttttatcatccagcaatgggcgcagtgtttctgcgggttcactgttagccagtttttgcagttgcggctctgcatgagtaagcgctttttctgcctgctgtaagatagcgttattttcagtgacgagttgctcaagttcttcttcacgtgtcagccattgcgccgaatgttgcactgtttttatctgctgattgagttgtgattctgcatgggtgagttgttgctgttgttccagatattgttgatgctgctctgccgttagcaaatcaatggtagatgctttggcttgcagaatatccagcactgattgtgcttgtttatgttgttggtaaatttgttgggataaaattccgtaaatttcagtgccggttaactcttccaataaatcagcccgttcgtttggctgagcattgaggaaagccgcgaaatctccttgggatagcaatatggatttggtgaaacggccgtaatctaatccagtaatttcaatgattttttctttcttatcttggattttatcggccagaattttaccactgctgctaagggcgagttccactttaggggcttgcaggttgccattgggttgattacgcgctcgccgttggctccagaaagcacggtaagcgacacctttcacttcaaactctacttcagccaatgattccgcagtgtgtcgggtcatcagctcattttgtgaggtagaaatcgtcaagcgtggggtttcgtgataaagcgcaaggcagatcgcatccaataaggtggttttacccgcaccggtcgggccggttatggcgaacaaaccactgctggcaaacggctctgctgtgaaatcaattttccattcaccttgtaatgaattaatgttttttagccgtaaactcaaaattttcatgcctgctcctccttgtttttagcctgatagatatcgttcagtgtttgttcgaaaagggtggtcagacgttttttatgttcttcatcttcgagtgctgattgtgcaagccgtcgggcaaaaacctcgttaacgctaagttctgtcagagtttccctgttttcttgtgctagcctattttgttgttgtgttttactacgtcgtagcagaatgatttcgacaggaagctcggcaaccattgatcgaatccttttctggatatcatggaggtaatcttgggttgcaacttcaatatccagccagacgggttgctctccttgatagtcattaaaagtttgcaactgttgttcaatgtgttgcaggttgcccttgatgagttgcatgggctgatattgcggaatgggtaaaagcttgatggattccagtttgtcttgggtaaattccaccaaacagacacttttctcttgcccgacttcatcgaaactaagaggaataggggaaccgctgtagcgaatatgttcagatttagccactatttgtggccggtgaatatgcccaagcgcaatatagtctaccggcgggaaagcttgcgccgggaaggcatccaatgtaccaatataaatatcccgcaccgaatctgtaacagtggcgccaacggtcgtcagatgcccggtagcaatgataggtaagggtaaattcaattcatcacgtaattcacacgcttgctgatagagtcgatgataatgttctgcaatagcttcttgtaatacgagctgtttttgttctcctgactgaccagcctggctgatcataatatctcttggccgcagaaaagggactgcacaaagaattgcaccggcattgccttgtttggtggtgagtatttttatctgtttttgttgatctttttctgcgtgagcaataacggtggtattcaggcaggaaaggagttcttttgattcatttaatgttgctactgaatcatggttaccaccaaggctaattaactgacaaccggtcggttgtagttcaacgacaaagcgattatatagttcacgggcatagctaggtggtgaacccgtgtcaaatatatctccggcaacaattaatgcatcgacctgataatgttcaatctgtttaatcagccagcgcagaaaatgttgatgttcagcagcccggctttttgtaaaaaaatattggccaagatgccagtccgaagtgtgaataatacgcatattttcgccgtcattggttaaagtgaagcatgattataatcgttatattttggatgtcgcttttaaatctgatttcgtgaatatatctacgagcggcttcgcattcattatgaaatatggcaattgttaaattaattattgcgaaatcgattgcagagagaagataaccaaggcaggatttcataaatttgtcataaaactgacgcataatgctttttcaaactaagtaacgtttataccctatggatttcaagatgaatcgcggcggcaagggagtgaatccccgggaacatagcaaactatgtgaccggggtgagcgagtgcagccaacaaagaggcaacttgaaggataacgggtatatctcaatatattaacgggactaatcatggcaagacgcattctggtagttgaagatgaagctccgattcgtgagatggtctgttttgttctggaaaaaaacgggtatcagccggtagaagcagaggattatgattctgcgttggcatgtttatctgaaccctatcctgatttagtgttattggattggatgctccccggtggttctggtttgcagataattaagcagatgaaacggaataataatattcgcgatattccggtgatgatgttgactgcccgtggtgaagaggaagatcgggtgcgtggcctcgaagttggggcagatgactatatcactaagcctttctctcctaaagagctggttgccagagttaaagcggtattacggcgtatttcaccgatggtcatggaagatatcatcgaaatggatggtttagttttggattcaacgtcccatcgggtgaccagccgggataaagcactggatatggggccgacggaatttaaattactgcacttctttatgactcaccctgagcgagtctatagccgtgaacagttgcttaattatgtttggggagcaaatgtttatgttgaagatagaactgttgatgttcatattcgccgtttacgtaaagtattagagattggcggccatgataaaatggtgcagaccgttcgtggtacgggctatcgtttttctacccgttactaagtccatgcaccggagaatctaatgtgttagaacgtctatcttggaaaaaactggtttcagaactgtttctcttttgtttgcctgcgttaattctggcgatatttattggtcatttgtcctggtgtttattggtttcggtatttttggtgctgatatggcatggttataacttgctgaaactttcgaattggctatggttggatcgcagtatgttgccaccgtcggggagaggagggtgggagccaattttctatggtattcaccagatgcagcaacggaatcgaaagcggcgtcgtgagctggcgctgttgatcaaacggtttcgtagcggggcggaatcattacccgatgctattgtgatgatgacaacggaaggtaatattttctggtgtaaccgtttagcgcaacatttacttggttttcgttggcctgaagacaatggacagcatatttttaatttacttcgctaccctgattttagccgatatatcctttccagagatttttcgcgccctttatccattgaattaaataatgggttcgttgttgagttccgggtgatgccttattctgaggggcagttcttaatggttgccagagatgtgactcagaagcgaacactggaaaatgcccgtcgtgacttttttgctaatgttagtcatgaaatgcgtacccctctaaccgtcttgcagggttatttggaagtgatgcaggatcaggcagcagaggatagttcgctaaataagaaagcgctgaatacgatgcaggaacaaacccggaggctggacggtttggtgaaacaattgttgcaactgtccaaaattgaagtcgctccccaaattgatatgaatgaagtcgttgatgtgcctttgatgcttaaagtattgcgtcaggaagcgattgcgctaggtaatgaatgttataagattaattttgatattggtgaagatctaaaagtattcggtaatgaagagcagcttcgcagtgcaatgtcgaatttggtttataacgcggttaaccatactcctaaagggactcaaattgatgtcagttggaaaaagaattcccacggtgctgaatttacagtgaaagataatgggcaaggtatcagtgctgaacatctacctcgtttgaccgaacgtttttatcgagtagataaagcgcgttccagacaaactggaggaagtggtcttggtcttgcgattgttaaacatgccttacatcatcaccattctcatcttaaagtttccagcgaaataggcaaagggacgatctttagttttacttttccggccggattgattgtacctgtcaaaataaccagcagaagagataggaatagtttgattaacagtaataattaatcttcgtaattgattattattttttcaggttaaaaaaaacgcaaatcatatagtgtttattcaatgatagctaacagcaatcactagttttgaaaaagagtgcggcatatacttctgcattctggtttatctattgccttctggcactataaaagttttacttgtgggcagttgttggcgattctatctatcatggtcactataatctgtcttcaacagatacctggtgaatattgttttgataataaatcgttaaattagggttcaatattgtcaatatgggcttaactgttgatgatatttatattattcaggccattaaatatggtaacaaaacattaataatcattatgacacatcgtttatcatctaaggatatttgggcattagggtttatgacttttgctctgtttgtcggggcgggaaatattatttttccccctatggtggggttacaatcaggtgaatatgtttggttagcagcactaggctttctagcgactgcggttggtttacccgtcattacaatcatcgcattggcaaaagttggcggtggtattgaagagctgagttcacctattggtcgagttgctggtttgctgctggcgacagtttgttatttggctgttggtcctttattcgctatcccacggaccgcaacggtctcttttgaggtaggcatcgccccgcttaccagtaccagcgagttatccctgtttatctacagtcttatttattttgttctggtaattgctgtttccctttacccaggccgtttgcttgatactgtcgggcatgtgttagcacccatcaagatgttggcgttaggtatacttggtgttgctgctttactttggccagccggtgattcaattcccgcgattgatgtttatcagcaaatcccattctccagtggtttcgtcaatggttatctgacaatggatacgctgggagcgatggtgtttgggattgttattgttaacgctgcgcgttcaagaggcgttgcctcatcttcattattaactcgttatgcaatgtgggcaggttttattgccggctttggtctgatactggtttatctttccctgttcaagttgggggctggcagtggatcgttagtgcctcatgcagaaaatggtgcggtcattttgcatgcctatgttcatcatacttttggtggtgttggcagtgttttcctggctgtgctgatttttgttgcctgtatggtgactgcggttggattaacttgtgcatgtgctgagtttttcagccgttatttgcccctgtcttatcgttcattggttctgatccttggaggattctccatgttgacttctaaccttggtttgagtcatttgattaagatttccataccggtactgacagctatttatccaccttgtatcgttctgattgtgttgagttttacgctgtgctggtggcacaattttactcgtattttggctccggtaatgttagttagtctgatatttggtattttggatgcgattaagtcatccgaagtattagtttatttgttaccaaactgggcaacgcgtttaccactggcggatcaaggattggcttggctagcaccatccctgttggttttagttgtggctggtatttatgaccgtgttttagggcgttcaggtacccgtgagactcaaatgcatcagtgatgatgtttgtttctctgactgtttgccatcgtcagatgttcagggaaagcatgggatgggattcctgaaaaaaggatatcccatcccgatattgcctacacagattagctatttttttagctgttggtcattagtagccaatagccgcaccagccgggcgtcggacatcattggcaccataaagatggttttcacgaacttgaccagatacggtggcatcattgcctgaagacttagctgaagtgctagtggttttaggtaaaccgaccataatcacttcagccgcgccccatggtatctgctccaccattttatatcccattttttctagcaaattcaacgagtctttagaaataccacgttgctcataataaacttcatcgggtaaccattggtgatgaatacgggggctattgaccgcttcttgaggagacataccgtgatcaataatgtttaaggcggtttgcaaggtaatagagataatacgggagccgccgggtgagcccagaacaaggaatgtcttattgtcttttgtgacaagtgtcgggctcattgaggatagtgggcgcttaccgggggcaatagagttagtcgcaccttgaatgagaccataaagattcttttcaccaattttagtggtgaaatcatccatctcatcattgaggaagaaacctgttccgggggcgatgacgacagcaccaaaaagtccattgatagtataggtagttgaaactgcattaccttctttgtcgacaatggagtagtgtgtggtttctggcttctcatggggtccaatacccggctgaatattctccgataatgttgctttacctggctctatttttttacgtagagattcagcatagtgtttactcagtaagtgatcgattggatttttaataaattctggatcaccaaggtaagtatttctgtccatgtaggcatggcgcatggcttctgtcaatgtgtgaatataatcagccgagttgaatcccatttctttgaggttataaccttccaaaatattcagaatttcacacatggttactccgcctgaacttggcggcggggaagagataaatttataaccgcgatagtgacaggtgacgggggttgtttctgaaattttataattggcaaaatcagcttcggtaataatgccgccggattttttagcggcttcggcgaccagtttaggaatatttccgtgataaaaagcgtcttgcccttttttagcaattaattctaacgtatttgccagatcggtttgtattaatctatctcctggttgataaggagagccatctttacgtaggaagatacgagctgcttctggatctttgcggaaacgcttgattgtggtgtccagaatatcggtatctgcacgggccagtataaagccttctcgtgccagcttaattgcaggggccatgacttgttcacggctcaacttgccatatttttttagggtgctgtctaaccccatcacggttccgggcacacccgccgcgcggtagccatataaactggctcctttaataacattcccttctttatccagatacatatcggcacttgctgcacttggcgcggtttcgcggaagttaataaaagtatcggtaccgtcggttaaatgaattgtcataaagccaccaccaccgatattgccacaacatggattgacaacggcttgggcatagccaacagcaaccgctgcatcaaccgcatttccacccattttgaggatatccacaccaacttgtgaagcaagatgttgggatgaaacgaccataccatttttggcttcaacagccggttctgaagcggcataaaggtgggacgagacgagcagggatattattaccagcggtgttttccatgttttcaacatgttgtaagctcctgtcttttggtgaggttatttttgtcggtgtaatgacttgttttatttacactgattttaatgttaaacaattgtaaatttaattgtaagtggtgatagttattgggaatagggggtttttgtgcgcaaggtggcaaaacgaggaatttcagtgaaaaaaaaccagccggaataaccagctggcctaattatggataatatctaaggttatagtttagcagcgttttgagacaggtatttagctacgccatctggagatgcgctcatgccttctttacctttttcccattgtgcagggcaaacatcgccgtgctcttcatggaattgcagtgcgtcaaccatacgcagcatttcgtcaatgttacggcccagaggcagatcgttcacgacttgatgacgaactacgccgtttttgtcgatcaggaaagagccgcgcagagcaacacccgcttctgggtgctcaatgccgtaggatttttgaatctcgcgtttagtatcagcaaccattgcatatttaacttcgccaataccaccttgatcgacaggagttttacgccatgcgttgtggacgaattcagaatcaaaagaaacacctataacttccactccgcgctttttgaactcttcgtagcggtggtcaaatgcgatcagctcagaagggcatacgaaagtaaagtccattggccagaaaaagataacggcaggtttaccatttaggtgttttttcaggttgaaattcccaactatttcgccgttgccgaggaccgctgctgctgtaaagtcaggggcttgacgagttaccagaaccatgagttactcctgtagttttgcggggtttatgtaaaaattggatatagaataaggaattagcgtacaccaataaaggataaaatactaatctttgcaatagattttacctatcaataccttatttttattttctttactgtcatgtctttctgcgtgctaggatgagactgcttgcttcataagctgtggtgcatatttgctcagtctgacacaggttgtattagctagaaagggggagttctacggtgtgtattaaatgaaggtgatattttgaacataaacgtctattggggtaagcagtaaaaatccttattttctgccttttccatcatatagggataaaattgccagaatagtgcgtcgaaatcagcgtaatgttgctctatatcctgaaatgatccagataaagccgataatctgggatgtcttcgagccatgccttttaatacatctgcgataaatgcaagatctgcataacggatcagccagttttgccgccataaaaacgcattcagctcctgaaatttttcgggagtgtaataaagatgaggttcaatctgactacgagcatggtgaataaatgccggtaatgagtaagtgggaaccagtttatcccaattcaaggagaggaagtgatcccagataatatctaaagtaatcggcgcaacccgtcgatatgaattactgaataaatgacgggcttgaataaccagtggatgggtatctgttaatacgtcaacacgccgatgcatacgaatacctgcaaccacatcagcactgtattgtccctctggattaccgcgcacaaaatcagccatcagatttcctagtaaggaactgtcagccagagttgctaaatgaaggtgagcgagaaaattcattcggcaattataatataaatccgcgaagttatgtgcttatttgttgcaccctcagggctgcggcactagactagtccgcttgtttttctgaatgattaaatataatgcgtgtctccgattttacttttgaacttcctgacgaaatgattgctcattaccctcaaccacaacgtagtggctgtcgtttgctctcgcttgatggtgaaacgggggcattaacgcatggtatttttacggatgttctcgataagctgaatgccggagatttactggtttttaataatacccgcgtcatacctgcgcgtattttcggccgaaaagctacgggcggtaagctggaagtgctggttgaacgggtgttggatgataagcgggtacttgcacatgtgcgtgcttccaaagcgccaaaagagggaactgagctgttattaggtgacaatgaaagtcttaaagcaaccatgttggcccgtcatgataccttgttcgaaatacgttttgatgatgaacgtgatgtgttgtccattttggatgacataggtcatatgcctttgccgccttatattaatcgtcctgatgaagaggcagaccgtgagttgtaccaaactgtatacagtgaacggcccggagcggtagctgcaccaacggccggtcttcattttgatgagccattattggaagcgctgcgtaaaaagggcgtggagatggtttttgtgacattgcatgttggtgcgggtactttccagcctgtgcgggtggagaccattgaagaccatattatgcatgctgagtatgcagaagtgccacaggatgtggttgatgctgtgctggcatgtaaggcgcgaggtaacaaagttgttgccgttggcacaacgtcagttcgatcgctggaaagtgccgcaaaagcctgtcaggatgagttaattgcgccattttttaatgacacgcaaatttttatctatccgggttttgaatatcaggttgtggacgcgttgattactaatttccatttgccggaatcgacacttattatgctggtttctgcgtttgcgggttataaaaatacgatgaatgcttatcaagaggcggttgcagaaaaatatcgtttctttagttatggtgatgctatgtttattcgtcgtaatcccttcgcttgcaaggaaaagatttcttaattcaatgtaatgattatggcattgactggaatatattattgaagttgttgaaaatagtgttatgtgaatatctcagttcaacggtaaatttcaactttgtctgattttgaacaacagcatcggactgtttatctgatgcctggaggttaagtgaaatttgaattacaaactaccgacggtcaagctcgtcgtggtcgtctgatttttgagcgtggcgtggtagaaacgccggcatttatgccagttgggacttatggcacagtaaaaggaatgacaccggaagaagtgaaagaaaccggtgcgcagatcttgcttggcaatactttccatttgtggctgcgtccagggcaggaaatcatgaaacttcatggcgatctgcatggatttatgcaatggcatggtccaatcttgacggattcaggcggttttcaggtattcagccttggcgccatgcgtaaaatcaaagaggaaggtgtacatttccgtaacccaattaatggtacgccggttttcctcagcccagaaaaatcgatggaaatccagtatgacttgggttctgatattgtcatgatttttgatgaatgtacgccatatcctgctgattgggattatgcgaaacgttcgatggagatgtcgttacgttgggctgcgcgtagtcgtaagcgttttgatgaactacagaataaaaatgctttgtttggtattattcagggaagcatttatgaagatttacgtgacatctcagtaaaaggtctggtggagattggttttgatggatacgctgtaggtggtctggcggtaggggagcctaaagaggatatgcaccgcattcttgaacatgtctgtccgcaaatcccgcaagacaaaccgcgctatctgatgggagtaggaaaaccagaggatttggtggagggagttcgtcgcggcattgatatgttcgattgtgtgatgccaacccgtaatgcccgtaatggtcatctttttgtgacccatggtgtgattaaaatccgtaatgccaaacataaagaggatacttcgccactggatgagcagtgtgactgttatacttgtcggaattatagtcgggcatatttgcatcatcttgaccgttgtaacgaaattctcggtgcaaggctgaatactatccataatttgcggtattatcagcgcctgatggctaagatccgtcaggccattgaggaaggtaatcttgaacagtttgttgaagatttttatcaacggattggtaaacccgttccggcattaagtatttgacttaagtagtgattgactggtttcagtgggtatagcatattgcggctggtttttgattactattgaatttgataacaatgagggaagtttaatgagtattatttctgaagcagcagcatctgctggcgcaccggctcagggaagcccatattctttgatcatcatgctggtcgttttcggcttgatcttctatttcatgatcctgcgtccacaacagaaacgtaccaaagaacacagaaagctgatggattctatttccaaaggtgatgaggtgatgaccaatggtggtttgattggtcgtgtcacaaaagtttctgacacgggttatatcgttgtagcactgaatgacactactgaagtgaccattaaacgtgatttcgtcgctgccgttttaccgaaaggtacaatgaaagctctgtaatttctgattttcccgaagggaactgccgtgctaaaccgttatcctttgtggaagtatctgatgctgatcgctgcgatcctcatcggtttgctttatgcacttcccaacctttatggtgaggatccggctgtacaaatcactggcgcgcgaggcattgccgccagtgagcaaacgctggtccaaatccataatgttttagaaaaaaatcaaatcgcgagtaaatctattgcgctggaaaatggtgcgattcttgctcgtttcgataattccgatattcagcttcgtgcccgtgaagcattggtgtccacattaggcgatcagtacgtggtggcactgaacctggcaccagcaacaccaacttggttaagtaaggttggtgccgaaccaatgaaactgggtcttgatctgcgaggtggggtgcacttcctgatggaagtggatatggaaaccgcattaggcaaactgcaagagcagaatattgatggcctgcgcactgatttgcgtgaaaaaggtattccttactccactgcccgtaaaattgataattacggtgtagaaatccgcttccgtgatgagaaagcacggtctgaggcggaaaactatcttactggccgtcaccgtgatttagttttcagtattggaagcaataatactctgaaagcggtgatgagtgatgaacgtcagcgcgaagcccgctcttatgcggtgcagcagaatattaccattctgcgtaaccgtgttaatcaactgggtgtggctgaaccattggttcagcgtcagggcgctgaccgtatcgtggttgaattaccgggtattcaggatactgctcgtgcaaaagagattcttggtgcgacagcaacgttggaattccgtctggtcaataccggtattgactctaccgcagctacatcaggccgtgtgccaggtgattctgaggtgaagagcactcgtgatggtaatccggttgtgttatataaacgtgttattctgaccggtgatcacattacagattcaatcccggataccgatgaatatggtaatccacaggtcagtatttcactggacagtgccggtggcacagcgatgtctaatttcaccaaagacaatgttggtaagccaatggcgacattgtttgtggaatataaagacagcggtaagaaagatgctaatggtcggtcggtgttagttaaacatgaagaagtgattaacattgctaatattcagactcgtctggggaacagtttccgtatcacgggcctttccaacgcaaccgaagcgcgtcagttatccttattgttgcgtgcgggtgctctgatcgcgccgattcagattgtagaagagcgtactattgggccaacccttggtctgcaaaacattgaacaaggtttagaggcttgtctgtggggcttaattgcatcaattctgtttatggtgatttactatcgcaaattcggcgtgattgcgagcagtgcgttgttggctaatctggtgctgattgttggtatcatgtctctgttaccaggggcgacgttaaccatgccggggattgcgggtattgtgctaacgctggcggtggcggttgatgcgaacgtgctgatcaacgaacgtatcaaagaagagttgcgtaatggccggacagtccaacaagcgatacatgaaggttataaaggcgctttctccagtattattgatgctaacttgaccacgttgattacggcggtcattctttatgctgttggtaccgggtcaattaaaggctttgcgataacaacgtcaattggtgtcgcgacttctatgttcaccgctattgtaggtacgcgaggaatcgttaacctgctatacggcggtaagcgtattaagaagctgtcaatttaaggagcacgttgtggcacaggattatactgttgaacaattgaactacggtcgcagagtctatgactttatgcgctgggacaacgttgctttcggaatttcgttgctgctgttggtagcttctgtttttgtgatggcaactcgcgggtttaactggggactcgattttaccggtggtacggtaattgaaatcaaactcagtcaatctgctgatctggataagatgcgtgataacctggcaaaagcgggctttgaagatccgctgttgcaaaatttcggtagtagccgtgatgtaatggtgcgtatgccaccagttacgggtgcggcgaatgaggaactgggtaaaaaggttattaaagtcattaatgacaccattgataaagatgcgagtgtcaatcgtattgaaattgttgggccgagtgtcggtgctgagctcgcccaagatggtgcaatggcgttgctggcggcgcttatctgtatcttgatttatgttgggttccgttttgaatggcgtttagcattgggtgcggttcttgcgcttgcccatgatgtcatcatcacgctaggggttctgtcattgttccgtatcgagattgacctgaccattgtggcatcgctgatgtcagttatcggttactcattgaatgacagtatcgtggtttctgaccgtatccgtgagaatttccgtaagatccgtcgtggtacgtcgtatgaaattatgaacgtctctctgacgcaaacattgagccgtacaatcatgacatctgcaacaactttactggtggtgctgatgttgtatattttcggtggtgcaatgttgaagggtttctcactagcgatgttaattggtgtttctatcggtacggtatcttctatctatgttgcttccgctttagcgttgaaactgggtatgaagcgtgaacacatgatccagcaaaaggttgagaaggaaggagctgatcagccatctttactgccttaattattctgccttgatgctgttcaaacaccctgtgagtatccgactgacagggtgttttttattcagattaaggataaactgtaaatttagttcggattaaccatcaggaaacgatatgcattgcccattttgtgctgctgttgataccaaagtgattgactctcgtttggtaggggatggctcgcaggtgcgccgacggcgccagtgtcttgagtgtcatgaacgattcaccacttttgaaatggctgagctagttatgcctagagtaataaaaagtgacgatatccgagagccgttcgatgaagagaaattgcgccgtggtatgcaaaaagcactggaaaagcgcccagtcagttctgatgatgtagaaatggcgattagctatattaaatctcagttacgtgctaccggtgagcgggaagttccatccaagatgattggtaatctggttatggatgaattgaagaaattggataaagtcgcctatatccgttttgcttctgtctatcgcagctttgaagatattcgtgaatttggcgaagagattgctagattacaaggttgaaccagtgaataacgataaaaaatatatggcgcgcgctttggaattggcgcgtcaagggcgctttaccacgtcacctaatcctaacgttggttgtgtgattgtgcatgatggacaaattgttggggaaggttttcatttacgttctggtgagccgcatgctgaggtttacgcgttacagatagccggagataaagctaaaggcgcaactgtttatgtcacgcttgagccatgcagccatcacggtaagaccccgccttgtgccgatgcgttgattgcggctggcgttagccgtgtggttgcggcgatgcaggatcccaatccacaggtagcaggaagagggctttataagctgcaacaggctggtattgcagtagaacatggactgatgatggaagaagctgaatctctcaaccgggggtttttgaagcggatgcgtaccgggtttccatatattcagttgaagatggcgacttctctcgacggccgaacggcattagcttctggtgaaagtaaatggattacatcaccacaagctcgctgtgatgtgcaaaaattccgtgctcaatgtagcgcgattctgagttccagtagcactgttttagctgatgatcctcacttgacagttcgttggagtgaattggacgcagaaattcaggcggtttatcccgaggaaaatctttgtcaaccggtacgtgttattgttgacagtcagaatcgtgttagcccccagcatcaggtcatacagcagcccggttattgttggctggctcgcactaaagtagatgaacatgacttatctgaaaatgtagaacagatactgttacctgctcatggtattggggtagatttggtgtcattgatgatgcagctgggtaagcgccagatcaacacagtctggactgagtgtggggcattgctggcaggcgcattgctaactttagggttggtggatgaattggttctttatgttgcgccaaaagtgctaggtgatacggctcgtggtttgttcactattcctgaactcaaaaatctggcagaggcaccggaatttgacattttcgatgtacagcaagttgggcctgatcttcgtctgcatctgcggcctgtatactgactgaatatgtgagtgtgggtgagtttgcctgtttttatgctctgctgctaaatcggcaggcgcagctaacgaaagaatatgatagaatccgcccccctgcggatatgaacagatggaaggaaggctatgaacgtaatcaaaggtgttgttgcagctccacaagctcgtgtggcgattgccattgcacgttttaacaacttcattaatgacagtctgttaggaggagcggtggatgcgcttgagcgtatcggtcaggttgcttcagagaatatcactgttgtctgggttcctggtgcttacgagttgccattaacagtgaagacattggtcgaaacccaaaaatatgacgctgttgtcgcgctaggtacagttatccgtggtggtaccgctcattttgaatacgttgctggtgaatgcagttctggtctgtctagtgtagcgatggctagtgaaattccagtagcgtttggtgttctgaccacagaaagcattgaacaggcgattgagcgtgctggaaccaaagcgggtaataaaggcgcagaagccgcattaaccgcactggaaatggtcaatgtaattaatgccattaaaggctgattttagttttaattaaggggaatcttgtgaaacctgctgctcgtcgtcgtgctcgtgagtgcgctgttcaggctatatattcatggcaattatctggcaatagcattgctgatgttgaattacagtttctgtcggagcaggacgtcactggtgttgacgtaacctattttcgcgaattgctgtcaggagtagctgtaaatgcggctaagctggatgctttgatggccccttatctttcccgtcagctcgaagagttaggtcaggtagaaaaagccattttgcgtattgctatgtttgaactaagttatcgtgatgatgtcccttataaagtggctattaacgaagctatcgaattggcaaaagtcttcggtgctgaagatagccacaagttcgtaaacggggtactggataaatctggcccggcagtacgcagaaaaagataagctactgcttgtcgggtttttcccaccgtagacgatgatttgtaaggccgggataccggccttatgttcgtgatcatcagtaactttttgggattttattatggcatgtggcgaatttgacctcattgcacgttattttgatcgccaggagattaaccggcgtgatgtaaatttaggtattggtgatgactgcgcactgatgacactagccgataaacaacaattggcggttagtacggataccttagtttcaggcgttcattttttacctgatatttctcctgaagatttagcttacaaatctcttgctgtgaatctgagtgatctggccgcagtcggcgctgatcctgcctggctttcattagcgttaacattaccggaagtggatgaacgctggctgagtggtttcagtgacagtctgtttgagcagttgcgttattatggtatgcagcttattggtggtgacactacccgcggtccgatgagtctgacgttgacgattcatggtttagttcccgcaggcagggcgttacggcgtactggcgcaaaaaatggcgattggatttatgtgagtggatcgctgggggatagtgcggcgggtttggctctgttacaaaatcgtttgcaaatttttgatccggtatctcacaactggttggttcagcgccatctcaggccgcagcctcgtattttacaagggcaagcactacgtggcttggcaacatcagcaattgatttatctgatggtttgatttctgatttaggtcacattctgaaagccagccgatgtggagccagaataaatctggatgcgcttccttactctgatgcaatgaaacagtacgttgaaccacaacaagctttaatgtgggctttgagtggtggtgaggactatgaattgtgttttactgtcccagagaggaatcgtggtgcgttggaaattgcgttggcgcataccggtgctggttttagctgtgttggacagattatggcggaatcagagggtattcgttattacagcaataataaagagattaaattagatctgaaagggttcgatcactttattaccgaggaagcacatggataaggcaaagcatcgtttacggatgagtaatccctggcatctattagcgacaggttttggtagtgggctgtcgcccgtggtgccggggacaatgggatcggcagcggctattccattctggttattactggttcagtttccggaatggatttgctggttggttattattgttgggatgtttttcggcataatgatttgtcagcgtacttctgatgatatgaaggttcatgaccatggtagtattgtctgggatgaatttatcggtatgtggatcacattgatggcaatccctatggttaactggcagtgggttttgaccggttttatagtgtttcgtattctggatatgtggaaaccgtggccaattcgctggtttgatcgctatgttcatggtggattaggcatcatgttggatgatgttatcgctgctggattttctttcgtgattgtttggttactggcgttttatcagatttttattttctgaggtgtggtgtagatggaaagcctaatgaaattactacaattcccgaacgcctgaacagattgccactgaaaggtaatatcgttgccttggattctatgagatgtcagcgtggcatagtgcaaaatataattggttagcagacagactgtataatgccccttaaagagggactcattttttgctttatacttcagcatgttcttctctgggctaagattgcctaatatcaaaattaggactacgattgtactacaaaaatcagcatgtacgaggtattaaatgggtactgaaacttatgttcgcacacgtatagacccagcaattaagcaagaggcaaccgatgttttagctgctattgggattaaaatgtctgactttctacgcattgctgtaacgatggtggccaaagaaaaggcgctacctttcgagatcaagaaaatccctaacagagttactgttgaggctatgaatgaggcgagaagctcaatgaatgcacgttttaacgatgcggatgatttaattcatgacattgaaaaagactgcggcaagtaagcgcgctagctttccgcgtcgctcagactatacaaaacagttcggtaaagattggcaacgattgagccgttctgggcgctatgacatgcaccgattaaaatctgttgtaatgctcctcattgctaatgattcaccgctaggagctgaatataaagatcatgagttaatcggagattgggctggatttagagagtgtcatattggggggattttcttttaatttatcttttggacgaacagaaaaatgcaatcgagtttgtcagaaccggtacacatgcggaattgttcgagtgataaaggaatttagtggaagttctgagtgacacaatgacgcagattttcaaggaattagaagcttagagggatgaaagaagtattggtttatagggagtgttagaaatttttggcaaaagtcatcgacgcagcagtaaagtttttctaaattaacccgaattctgtttaaaccatcactggaaaatcgtcttctgagtagaaaattttcagtgatggtttttttaatttaaggcagtaagcaatcacaccacctaaaacggtcaacagaaatcccgttatacttcggtggcgcgaatgctctatttgagaaatattctttaattgatcattgatggtttctatgatgaaacgcgttgataacatgattttatcccactctgccagcatacgcgctttcatgttacgacgtttcttcgtgatgaaagtgacactctttaccgctgaaaaaggggacgtccatcacatcatcccatcgaggtttttcctcgttttgcgatcccctcaaaaacctgatgacggggaatgcggatgttatgacaaatacccaaactggtggaatcaataaaagcaatgccagtcggtttcccttttaattgagtcagataactgcacagtggtgccaaaacggaaggcgcgacacgaataaaacgggtataactgagcaaggtgggaaaatcattgtggtgatatttccaaatatgctccagataaaaatgtttaaaatcacggtaatgtgatagatgaaagaggatcaggatagtcatgatttcactgggagacatgcgaccttggcggtgacgtagacggtatccgttatcaaggcaaaactgtgtccactgagggatgaaaaaacggcaaaaatcgtcgacatcgcagaaaatttccactaacttatccttggcctgttcctccccggagctgttttcggcgttcaccaaaattttgctcccggaacaggcttctcgtcaatttcttatccagaactcaggttaaatatgacataggcgtttccctgtcgcttaacagagatatctggtggtggttgtaatttattgtgattggttgcttcgttcatttaaagcttccccgcagtgactagagctgcatgtattgttttgaatggtaacagcaaagataggtgggcatctaatagcggaatagcaccatagctggcgtaccactcggcaacacgctcattcttggcatcaatcagcaatgcaaccccgccagcctgtgcggccaccaataaacagcgccgaccagcggctagcaacaactgaccaccgagtccttgactctgtactgaaagatctatagccagacggccaagccgaaatactggcacttcatgtcgagccagaccacgtttaatcacttccggtgcacgttcataagcaatagaagcgggacttagactgtagtaacctaataccgttccattgttcttgctaactgcaaggtaggtttttgccccacctttctcatggctctgccttgcatggcgatgtaaaaactgattcaacgcctcatcaccacagtcaaaagcaccacgatcatgatgtttgcctataggttcttcgtgccagattggtagcatcatgattgtttcggcaaggcaaatgctgcggccaacaatttatcattgggtgccggtgggttatccaaaagatccagaacatgcaaactatctctttcggtcagctccagccgttcgttctcgtcgataactttccgtgctgctggcatcacattgcggagcacgaactcagtcaagttggtatgttgtaaagcggctgcacgcatcaacagcgacttttcttctgaggcaatacgtagcgacattcggtcgttagtttctactgggatctgaggcattgttacgccctcctatttatacgcattgaaattgtacactaaggtgtgcctattagcaaaatgtacataatgaaagcgtacaagtaccgtatcaaatacgaacgtttttggcacggtcatgacccctatcgattttgtcattttcagaagacgactgcacgaaatatcagaagtcggctgcactggattgctgggtttgtgtagagtactttggtaagcatcgttacttgattctgaaaatggtgcctttttatagagaagaatgcggaaatacatatcatctaatttgaggcacttcctactataatcctaaaaaaagccgcttcgctatgcgttgcggctttacatgaaacctgacaaactttacctatataatacttgttcagcgttagtctcgattatttgggataatagctatagcaattcccgctcactaaaattaactacagcaaaccaatcggtttatagattatttaattacaattccaataatggaacaattcgacagattatcactaatatttcctaacgtaggcgtcagagtagggggtgtagactgctggcgattttaactcaaatcattatacgtgattaatctgtaaatccacacattgaggataataggataaatatcctattatccctatacactcaggaaaatagccttttattgatactattttgaataccggcggcatcaagccctaaatccgctttgatttcttcctgactaccttgtggcacaaattgatcaggcaagccaatattcagaatttgtaccaggcggcctttctgcattagtaattcattaacgccacttccggcaccgcccataatggcattttcttccagtgtgaccaataaatcatggttatcggccatgtctaatattaattctttatccagtggtttgacaaaacgcatatcaacaacagttgcatccagtgactctgctgctgttattgcatcgggtaacagagtaccaaagtttaggatcgctaccttattaccctgacggcgaataacacctttaccaattggcaattgttcaaatggttggggttctgctcccgttccggttcctcgtggataacgtacggctactggaccttgctgataatgatagccggtatgtagcatttggcggcattcgttctcatcgcttggtgccataatgaccatgttggggatgcaacgaaggaatgaaagatcaaaggcaccttgatgtgtctgaccatcagcacctacgataccgccgcgatctattgcaaataaaacaggtagattctgaatggcgatatcatggataacctggtcataagcacgttggagaaatgttgaatagatagcaacaatcggcctgtaaccaccaattgccaaaccagcggcgaaagtcacggcatgttgttctgcaatggcgacatcaaagtattgatcaggatattctcgggagaaacgcaccataccagagccttcacgcatggcgggtgtaattgccatcaattttttatcgttagcggcctcttcacataaccaatctccaaagattttggagaaagtagggcggttgtctgaacttttaggtaatgcgccagtggtcggatcaaatttaggtaccgcatgccagctgatgggatctttttcggcaggtgcatagccacgaccctttttggtcatgatgtgcagtagctgtggccctttcaactcacgcatatttttcagtgtttgagtcaatgtcagtacatcatgtccgtcgatgggaccaatgtaattaaaacctaattcttcaaacagagtgccaggaacaaccatgcctttgatatgttcttcagtttttttcagtagttctttaatcggtggtagattggaaaagacttttttcccgccttctcgcaatgtggtgtagagttttccggaaagaagttgggctagatggttatttaatgcaccaacgttctccgagatagacatttcgttgtcattaagaatgactaatatatccgggtcgatatccccggcgtggttcatcgcttcgaaagccatccccgctgttatcgcaccatcaccgataacacaaactgtacggcggcctttgccttcgcgttgagcagcaattgccatacctaatccagcgctgatagaggtcgatgagtgcccaacacataaggtgtcatattcactttcatctcgccacgggaaaggatgaagaccatttttttgacgaatcgtatcaatgcgatctcgacgtcctgtcaggattttgtgaggataagcctgatggccaacatcccataccaatttatcgaaaggcgttttatagacgtaatgtaatgctacagtcagctcaacagtaccaagaccggaggcaaaatgaccactggagcgactgacactgtttagcaggaattgccgaagttcatcgcataacttcggcaggctctcttttggcaacatacgaagttcttcaggattttccgctaatgccaatgtggggtatttggctatatcaatgctcatttgatgctcgttaagaagtgtttattaatagcgctgccagcaggtagatttaccggcagaccttagttattacgttcaataataaagctggcaagtgcgcgcagcattgttgtgttataggatttatcttccagtttattcaaagcttttaaggcttcttgatacagttcgtatgcttttttctgtgcttgttctaaccctagtaatgcggggtaagtgctttttcctagctgttggtcactgccttgacgttttcctatcatttcggtatcgccaatgacatcaagaatatcgtcctgaacttggaatgcgagaccaatcgcttgggcatattgatccaattcaggcagggcgtcatgcccactttggcctgcaccatatgcgcccattctgacggcgcaacgaataagcgcacctgttttatggcgatgaatttgttccagcatatggagatcaatgtgtctgccttcagcggccaagtctagggcttggccaccacacataccggctataccactggcggttgccaattcagcaaccatttcaaggcgatctgctgttgtaacatccggcatttctcttttagataggatttcaaacgccagagcctgtaatgcatctcccgctagaatcgcgtgagcttcaccaaattttatgtggcaggttggttgtccacggcgtaaatcatcgttatccatcgccggtaaatcgtcatgaattaatgaaaaggcgtggatacattcaacggctgctgctggagcatccagattatttgcggataatccaaacatttcaccaacggcataaactaaaaatgggcgcaggcgtttaccaccgagtaaagtaccatgttgcattgcatgaactagtgggttgtttgcaaatgccactgaagatagtgtgcttatcagaacgttattgactcgttgttgacagattttaagctgttctttaaattgggttgaattttgttcagacataggcttattcagtatccggggagaaatgactcagtggcgattgggtgtcgtcgttaagcagaatttgtactcgttgttctgcttgttgcaaagtttgttgcccttggcgggctaattggataccacgctcaaacttgcttagggcttcttccagtgccagttcacctgattccaaccgggcgacaatctgttccagctcttttaatgagctttcaaatgtcattgctggtgcagtttctggcgtactgtttgtactttctgatattgcatttttctttggcataattttttactatttatacagagttcgcctgagagttgcagactatcctattacgctggtgcaaacaaatccttaactggttttgtgttttttacgcgctataccacgagatagtgttatacttcgcggcttgatttgacaaccaaaacataccatcagttttatttatcaaaatgcctaactactactataactcactatgaagtttattattaaattattccctgaaatcacgatcaagagccaaactgttcgtttgcgctttattaaaattctcgcgagtaatattcgcaatgtgctgaaaacgttaggagataatattgccgtggttcgccattgggataatatcgaagttcgcactaaagatgaaaaccttggcgttcaaatttgtgatgcgctgacacgtattcccgggatccaccatattctgcaagtagaagagcgtgaatttcgtgatatgcatcatatctttgaacaagcttatgaggcttatggagaattgctccacaataagacattttgcgtgcgggtaaagcgccgaggtaaacatcaatttacttctaatgaagtagaacgctatgttggtggtggtttaaaccagcatattgaatctgcaaaagtaaaactcaatcatcctgatgtgactgttaatctggaaattgatcaagatgtgttgattctggtaaaagcccgctatgaggggattggtggttttcctatcggaacgcaggaagatgtattgtctctaatttcgggaggttttgattccggtgtttccagctatatgctaatgcgccgtggctgtcgtgttcactattgtttcttcaatcttggcggttctgctcatgaaattggtgtgaaacaggttgctcattatctttggaatcgttttggcagttcccataaagttcgtttcgttgctgtggattttgaacctgttgtcgctgaaattttggaaaaagttgatgatggtcaaatgggggtggtgcttaaacggatgatggtaagagcggcatctaaagttgcagagcgttatggcgtgcaggcgattgttaccggtgaggctttgggacaggtttccagccagacactcactaatttgcgcttgattgataatgcatcggatacgttgattctgcggccactgatttctcatgataaagaacacattatcaggttggcacgtgaaataggcactgaggattttgctcgtacaatgcctgaattctgtggtgttatttcaaaaagcccgacagtaaaagccgttaaagctaaaattgaagcagaagaagcgaatttcgattttaatattttggaaaaagttgtcagtgaagctcagaatgttgatattcgtcagatcgcagaacaaagcagtgagcaagtggttgaaattgaaacagtgacagcgttcgctccaacggatgtgttattggatattcgttcacctgatgagcaagatgatcggccattacagttgaatggtgtggaaatcaaatcattgccattctataagttgagcagccagtttggtgatttgccaaaggagaagacttatctgctctattgtgaacgtggagtaatgagccgtttgcaggcactttatttatctgaacagggttttgataacgtgaaagtttatcggccttaattgtttcaattctatgtttcggggttcctattacgtgaaccccgaatcgtataaccagtttcacacctctggagcaagttaaaaccaattctccatcactggcggtgctggcaatcgtaacactgatgccagcgcgtaccagtaaatcaatagttgtaacggcttctgtttcttcactaccgtgagtcaggcagatgagtgctgaagggttcataatcatctttccttatgttttactaggttatagatacgggtattttcaggggctgccagaccatgtgcccgggcttggcgtaataaataaccggtgatatagtcaatttcagtgcgacgctttgcgcggacatcttgcaacatggatgagtagttttttgctgtaagtttaatcacatcgtagacataggaaatcaggttgtcgatagtggtatggatgttttctcgttgcataacctgaataatttcttcgcacaaaatattcacttgttctgggtagcgaagcagatctccattttggcattcataaagcgcagtcagcgggtttacgacacagttagcggcaagtttcagccaactaatagagagaatttcattatgccatgcaacatctggcaaagattggtgtaatacattagccagagagctaagcccagttgcatttgatgttgctgaaccaatataggttagcccggaagcggtatgataaacctgttggtcatcctgatatgcgccatgcgttgtgacgccaagcagtattggattaggcgctgataatagttcttcttgggtgcccatgccattgtgtagtaataagattggacaattaggtgaaagtttggggagtaaattattcactgcatcagcaacttgccatgctttcagacagacaatcagtaattcgctgttggtaagatggtcgctgttattagttgggattggttggttgaatatttccccattcatttcgtcaatatgaacagataaataagatcgggaactttttagccaaccttgtacttgatgtttttgttgtgataatgctgctagccacagttttcctatagcgccacagccaagaacggttatcttcatataatcctccgggagagacgctattatggtaatggatagaaatgataagatcccgcgaatctgagtatagagcttttgctgacaatggaaagcggttatcatgccaacttattgattatcaggaggtcatggataatgccatctttcgatattgtttcagaaattgatatgcatgaagttcgcaatgcggtagaaaatgcgcagcgcgagcttactagccgttgggatttccgtaatgtcaacgccagtttcgaattaaatgaaaaaagtgaatctatcaagattgccagtgagtcagattttcaggtaaatcagttggttgatatcatgcgtgaaaagttggctaaacgtggtatcgatggtgctgcattgaatatccctgatgatatgttgcacagtggtaagacttacagcgttgacgcgactttgaagcaggggattgatacccctacggcgaaaaagatcgtgaagctgattaaggatagtaagctgaaagtacaggcacagattcagggtgagcaagtgcgagtgacaggtaaagctcgtgatgatttgcaaagtgttatggcattagttcgtggcgcagagctgggacagccattccagtttactaatttccgggattgattttccgcctaatggattgatatatctagcctaatgtggagtgggatattcctgaccaggagtcccactcccaatttaccttaatgtcgaatcggagcgagtaggggttatctggtttgatacttaatctatcgtgtcattattattagctatcaattgttcaagttgtgctctgcttatcagcttagtatctacttttatgtaggcactatgctcctccggaacaataacgacgtcgcaaacgccgggctgaacaagaattttttgttccagcaatgccttattgacgatattttctggtagagaaattctgatactgctgacataaggaggttgtttcattgttgtgctgataatgaaccaaatgattgtcagaacgatacctgctgcaaataccagcggtgctccttttaattcatataaccaaccaccgaggccaccccctaaagcgacacctaaaaattggctggtggaatagatacccattgctgtacctttataacccgctggtgcttctttactgatgagtgatggcaagatagcttccattacattgaaagcaataaagaaaatttgtatgccgataaaaatcatccataagtgatgtcccgccgcccacaatacaatttcagcaatcagcagcatcgtgatacacagtgaaaacacttgtttcatgcggcgttttttttctgcgtaaataatgaaaggtaaaacagataagaatgaaactagcatagtgatcaggtaaaccttccaatgttgctgggtagggagccctgcttgttgcatcaccagaggaagggcgacaaaacttgccattagcaaagtgtgcaaactgagaatgccaaagttaagtttcagcaactggctatcagccagaaccttactgaaactgtgacgaacaatgcctgattcacggttaagcatgtgtttatctgtggaaggaacagccaatagtgttatcagaatggcactaccggccagaatggtaattccccaaaataggccatttaatccaatagcattcgtaaggattgggccaagtacaatggctatggcgaaagttattccgaagctaatgccaataaaagccatcgctttagttcgattttgttcacgggttaaatcagaaagtagcgccataattgcagcagatatcgctccagcgccttgtaacgctcgcccaatgattatgccccagatggaatcactgagagcagcaataatactgccaaggacgaatagcaataatccgccaataattaagggcttacggccaattttgtcggaaagcaggccaactggaatttggaaaatggcttgggttaaaccataaatgccaatagcgatgccaataagtgtttcggtggcatcttttagatgaaggccgtaggttgttaatacaggaagaaccatgaacatacctagcattcgcagagaaaaaactgaacctaggccccatgtcgcccgaagctcaagtggcgtcattttattatcgttcatgattacctcgaaatattttgatgcgtcattgtagataggttttcaataaggggtaaatagttaattgaattaataatattgaagtattaaggagagggaaattaggatgagagaactgatggcagaggagtattgccactgccatcaggaaaaattaccggacgtaagttaggaaggcttctgagggcacatgcgggtcaatagacatcatgacactcagggaagtgattgccacaatggaaaatataaataatttacgagcccaaatgcggtcattatcagttttgtaaccggataatgccattcctagccaccagacgctcactgctgctgcaacaaccaaatatttgtaaccggcgtaaccgctgatggctaacataagggttgcaatcataaatgccaggatataaaggataatgtggttcttcgccacagatatgcctttaatgacgggcagtacaggaatattggctgcctggtaatctttgaaacgaaaaatagcaatggcataggagtgcggcatttgccacaggctgaaaatcagtaacaggatcaacgcgcccgtatcaaactgaccagttactgcacaataaccgataaccggaggtgcagcaccggacaaactgccgatcaacgtgccataaacagatttccttttcatatagaggctgtaaacccctacatagacgacaaaaccgataatcgctaattgcattgctaaagcattggctgctgcatagagcagcactatgccagcaatacccagtattgatgcgtaaatcaggctgattttcggatcaataagtccttttacaaggacacggttttttgttctttccatgatccgatcgatgtcacggtcaatgtagttgttaaatacacaaccagaagccacgactaatgaaacgccgagcagagtcgagatgaacaaagggtaatcaatcacccctttcgaggcgagtagaaaaccaccgatcacagaaattaaattgccgaaaataattcctggtttagttacttgcaggtattgcttaatcatatatgcagctctttaatcaaccatcatattaatgttgaggttgtacataatccatagtgagccaacaacaacaataccgataattaaaatggtgaacagcaatgctactaagttccagcgctcttctgacgaagtgttcatgtgcaggaagtagataaaatgaacaataatctgcaccacagccagagcaactactgttgtcaggatagtcgtatgggaggcagaaccatccattaccatccagaacggaatcactgtcagtatcaccgaaagaacgaagcctatcagataagacttcaggctaccgtggctagctccagtatgagcggtatcagaatgactcattacatagctcctaacagataaacaacggtaaatacacagatccataccacatccaagaagtgccagaacaagctcaggcagttcagacgggttttattgacatcagttaaaccgcggcgggttacttggattatcatgataataatccagaccagaccacaggtaacgtggataccgtgagtagcaaccaatgcgaagaatccggacaagaacgcactgcggtcagggccgtggccgtcaacaatcaggtgatggaattcgtacaattccatcgctacgaagccaaggccgaacaggaaagtcataccgagccaggcgttaacctggccgatttttcctttgttcattcctaacatggcaaagccataagtgatactactgaataacagtaggaaagtttcaaccaatacaaaagagaggccgaaaatctctttgccagatggaccgcccgcggttccgttaacgagtactgcataagtcgcaaacagacatgcgaacaaaatacagtcactcatcaagtagatccagaaaccgaatactttagtggctcccgcatcgtggtgcccgtgatgctcgtgggcatgattgtggttagtcatagtttcagttgacatggttcagacctgccttgctaatttgttcatggtgctgattctcaatttgctcaacttcagcaacgggtacgtagtaatcaacatcttcatcaaagctttttgcaatccaagtgataatcatgcctgcgaagcttgcgatagccagccaccagatatgccaaatcatggcgaaaccaaacagcaaggtaaagccagcaataattacacccgcaccggcatttttaggcatatgaatttcttcatacttagcaggacgtttataagcagtgcctttttctttcatatcccaccatgcatcacgggtttgaacatgtggaacgtcagcaaagttataaaacggtggtggagaagatgttgcccactccagagtacgtccgccccacgggtcaccggtcaggtcacggttttggtcacggtcacggatactaacgtagaattggatgacctgacacaggataccaacggcaatcagtgcaacaccaatcgcggagacgaccagcagattatggaattcagggttgatatcttggctaatacgacgggtcatccccataaatccgagcgcgtaaactggcataaaggcgataaagaagccggtgatccagaaccagaatgcgcggataccccatttttcattcagtgtgaaaccaaaagctttcgggaaccagtaagcagtaccagcgaaacaaccgaagacaacaccaccgatgatcacgttatggaagtgtgcgatcaggaataagctgttatgcagaacgaagtttgcacctggaactgccagcagaacgccagtcataccaccgatagagaaggtgacgatgaagccaacggtccacaacatcggtgttttatactcaatacggcctcgatacatcgtgaacagccagttgaagatcttaacgcctgtcggaattgagataatcatggtggctatgccgaagaaggcgttaacgttcgccccggagcccatcgtaaagaagtgatgcagccatacgataaacgatagtacggtgatggcaatggttgcccataccagagatgtatagccaaacagccgttttttcgagaacgttgcagtcacttcagagaaaacaccaaagactggcaacaccagaatataaacttcagggtgaccccaagcccatatcaggttgatatacatcatcatgttaccgcccatatcattggtgaagaaatgggtacccatgtaacggtcaaaagttagcagggcaatggtaactgtcagaatcgggaatgcggcgatgattagtacgttagtacagagcgctgcccaagagaatacaggcattttcatcatggacatgccaggagcacgcatacgcaggatcgtcgcaaagaagttaacgccagtcagcaaggtaccgataccggatatctgaagactccatatccaataatcgaccccaacgcttgggctatattctatacctgagagtggaggataagctaaccagccagtttgagcgaattcacctatacccagagagatgttaatcagtgcaacgccaacgacgaaaaaccagaagctcagtgagttcaggaatgggaatgccacgtcacgagcgccgatctgtagtggaaccacgatgttcatcaggccgacaacaaaaggtgtcgccatgaagaaaatcatgatgacgccgtgggcggtaaagatctggtcatagtgatgcggtggcaggaaacctgcttcacccgcagaggcgacagcctgctgaccacgcatcatgatggcatcggcaaaaccacggagcatcatgaccagcgccacgataatgtacataataccgattttcttgtggtcaacgctggttaaccactcgctccacagccatttccatttacggaaataggtcagggctccgacaatcgcgagccctgcgaagagaatcccagcaagagtgaccatgacaatgggctcatgcaatgggattgcatcaagtgttaattttcccaacattactttattcctcaactccggcatgagcagtttcgctcatattcatgttatgacctgtcgttgtaccgtggccgccatgcatattcatgttgcccataaatttggcaataatgtcttgatacaggttaggcttaacgcttgagaagtattcaaccggatggttctggctttgtttagctaactcgttaaatgcctgcatggtatccaaggtcttgggagaggctttcactttttgaacccattgttcaaaaccttcacgatctgcggtagcggtagcagtaaatttcatgccggagaagccgtggccactatagctgctggacaaacctttataagtgccaggttcatcggcaattaagtgaagtttagtctgcataccagccattgcatagatttgaccacctaactgtgggatgaagaatgagttcatcacagaatcagaggtgattttgaagttaataggaaccccggaagggaaagcaatttcgttaactgtagcgataccttgctccgggtaaacgaatagccatttccaatcaagagagataacttcaatagtcactggtttttcatcactgaccagtggcttatatgggtcaagctcgtgggttgttttccaagtaatggttgctaaaataataatgataatgataggaacggtccatactaccagctcaattttatttgagtgtgcccagttagggcgataggtagcacttctgttggcttcgcggtaacgcagggcaaaggtgaatgccatgatgattaccggaataacgatgatcagcatcaggccgatagccgtgagtatcagcgttttttgttcagcgccgatggcgcctttaggattcatcaataccatatcgcagccactcagcacaagagtagctgcgagtattgataatatcccaatacctttattgtatttcataagtctcatctaacgactccaaataacaaaagctctattgtcgtttcatcagtgcgggcattctacggtaaggctactggagtgtaaacatttgtaatagttagttgaggggttgttaccctttatgtcgatgggatcacatgcaagtggaggattaatcagaagttagcttgaaaaggttatttaattgtaacgaaatagggcggaaatacgaatttatactaaagttattttatattttttagcgaagaggaaaaaaatataaaaatttgctttaaaaatttccactgcggccattttatttaagaattaaattaattgtgagccacttttgatagctcacaattaaaatcaataattagaaattatatttgatagtgtaaacaatcccatcctgccagaagtcttcacccaatttatgatcggcatatcgatattgaatgccagttgtgaaggattggtgaggtgtccaccataacgctattgcaccattggtaccattccgtccaccgttgccgtagcgttcatttcgattaagttctatttcattccagttagttatgctgaatttttcttcccagagttgaaagtcgtaacccgcaacccaaccaacgacatagccgttattaccggagtagaaagtttggtcaacatagtgcagcgccacaaacggtttgaaccagacaccagcgaaatcagtgttgtagccaataccatagagggtatttacctcatggaagttcccgccatgtgctgtacctgggagcgaataagtaccataaacatgaccatagagattgaaacctgtatcagccagataaaagcgaccggttgttttaaaagtgtatctttggttatcccctggttcagcatgctgattgttgaaagcattttccagatcaaagaacccgtatagttcaccccagttaaatccggctccgccttccagttctaagtaggcaaagtcgtctttatgagaggtttgccctgacttgtgtgtggtatggctagtccagtcgaggtagttcatgctgatattagcaaagcccccttgatattcagcataagctggaactgagacggtggtgaataaagcagtagccagaatggttgttctcataaatttctctaacgcatccatgaaaagaggttttgggtttcaaagctatattaaataacccttaaaatggtagtctgattctacgcggatatgaatattgaacaatcaaataattactcgaaaatagcacttttgggcaaatgactatttgaagtgtgatcgctatcacttaaatatttaaaaagagggcagagatatcaaaggctgaccgtcgtcaacctttaataaattaacttaatgttttcgccttttaagccaatttgttccttcttaatgcgagataatctagaaagctaccgagaatgatgcctgtgataccaatttgtgctgcccataatagcaatgtttcggccagataaggtgcatgagtccagttaagagcattggtggtgatggtaaataaccagaatgtgagcaagatgcttgctaatgatagtaagccaagcgctagacgataggaatttttgaattcagtacgtggcataaaatcgttagttcgctgggtataaaccagagtctggcggcagataaataacagtaataagcctggaacagaagccgctatagagaatagatagaagtttggccagccatgtaattcaacgaaccaacccgcaattgggccgacatagactcgtccaacagcagataaagcagataataaagcaaattgtgttgcagagaacgatttatgacataacgccataattagggcaacaaatgcagcggttcccattccgccacagatattttccagaaaaacggcgctgcccatagtgtagatatttttgtcagtaatggataacagccagtatccaatattggaaatcgcttgcaggatgccaaagatcatgagtgagcggaataaactccatcgttgcattaaataaccaccatataatgcaccaacgatagttgctgctaatcccagcgttttgttgatcattccaacttcaccagcatcaaagccaatacctcggataagaaatggggtacttaggctggcagcaaaggcatctcccattttatacatgacaattaacagtagtatcagccatgcattattgcgattaaaaaaatcgactaatggctctattgcggcttgctggagtgtttttggtgacggagcgtcaatttcaggctctctagcttttaacgttgcgtagacgccaatcagcatcagtccagccatcaaccagtaggtgtgttgccagccaatatagcggtctgcgatccataatgctaacccgcctgaaactaacatggctaatcgataaccaaataccgaaacggcagcacctacaccccgctcttcgctactcaataaatcggttttataagcatcaaagacgatatcctgtgatgcagaacagaaagcgacggttactgccagtgtggctagccaccataaatgttgagatggctggagaaagcccattgccgcgatactggctataagtaataactgtgtaacaagtagccaaccacggcgacgtccaagaaaaggggggataaagcggtccataaaaggggaccaaagaaatttgaaaacatacgcttggccgacaagagaaaaaaagccaattgttttcagatcaacgtcttcaacggtcatccatgcttgcagggtgctggcggtcaatgcgagcggtaaaccagaaacaaagccgagtaaaagcagaattcgtgaattatgttgggtaaaaacggtgagataacgataagacatgtgcctcccaaaaccctgccctttgcgggcagagtaaataattaatcctttaattagcgagcattttgtttgatgaaattactgacggaaggatcttgagccatatctgctatgacttctgataatacagtattgactgcatcagcaattttctcattagttgcgcctaaaggaccttgtacattgtaactagtgcggtaattcttaacttgtttactgccattttgcgctgtactaatgatggaaatatcggcttttgttgaaatattatggcgcaggctaccttctttaacgtctgcatatagattgttcacaataatttgcagattggcattggctggagagccaatcatataaccacgggcggccatctgtttttccaggatttcttggagtagaaaacgcagatcacgggagggtttcagtatttccagctttgcattgcggttaacttgagcaagtgtctgagactgacgattgtcggcaccgctgatactgatggtaatcgcgcccattgttggatctgctgttggcaatgtaattttaggttcgatagtcaggatattgctgggagcggcacaaccagcaagaagaaaaagcgtaatgaatgggaataagattcttttcaacatgttaattttctcatcagtgataaggatatccagtaatacttatcaatagcataaattacgtcaataatagcactgccttttgatcatggcatatctctgatggggtaaacgcatataaaaaccttatgatgtgggattcgattgaaagatattttaatgcgttgatgctataactcatggagaatagactaaaattattagtatggttggcagtatgactactgtgcggttaaggggaatgatatggtgtatcaggatatagaagagaaattacaggttgcatttaatccctcatatcttgaggtcattgatgaaagttatcgtcacaatgtacccataggttctgaaagccattttaaagtcgtcatcatcagtaataaatttgctggtgaacgtatgctgaaccgccatcgttccgtttacagcgtattatcggcagagttggccgcaggtgttcatgctttggcgttgcatacctacacagaaaaagagtggaatgaattacaggatactgttttagcgtcaccggcatgtcgtgggggtaatattgttgtctgaaatccgctgattgatacttaatttggggcgttttcttacacaatagaataaattcagtgaacggtcttcgggccgtttttacgttttatatatgatacattttggatgcaaatttagccgctgaataatcgttatcctgtgaagttgatgaatagttcgggcttttttcagcaattctcgactcacaccgtctgcatcgctataatgtcgcgtctaatttttagaatggtttcgggacgcttctgacatcagggattctcggtttttaaatgcgaccgccccggttcttagagagtgttgcgattggtgcataaaatatgtgctggttgtatggtctctggagttgaccgagcactatgatttttttgaggtaaaaagatgcaagtttctgttgaaaccactcaaggccttgggcgtcgtgtgacaatcaccgttcctgctgccgatgttgagaaagcagttagtagtgagttggtcaatgtagcaaaaaaagttcgtatcgatggtttccgtaaaggcaaagtgcctatgaacgttgttaaacaacgttacggtgcttctgtcattcaggacgttctgagtgatctgatgcaacgtaactttattaatgcaatcatcgaacaaaaaattaatccagcaggtgcgccaagttatgcaccagaacaattcaaaaatggtgaagatttcacttactctgtagagtttgaagtttatccagaaattgaattgaaagatctggaatctattgaagttgaaaagcccgttgttgaagtaaaagacgaagatgttgatgcaatgctggaaacattgcgtaagcagcaggctaattggaaagaaaccgaagaagctgttggtgcagaagatcgtgtgactgttgacttcaatggttctgttgatggtgaagagttcgaaggtggtaaggcttccgattttgtgctggctatgggccagggccgtatgatcccaggttttgaagagggcattgttggtcataaagcaggggaagaatttaccattgatgtcaatttcccagaagattatcacgctgaaaatctgaaaggtaaagcggctaagtttgcaatcacgttgaaaaaagtggaacagcgtgagctgccagagtttaatgaagaattcatcaaacgtttcggtattgctgatggcactgttgatggcctgcgtgcagaagtacgtaaaaatatggagcgtgaactgaaaaatgcagttcgtaaccgtattaagtctcaggttatcgatggattagttaaggttaacgaaatcgacgttcctgctgctattgttgatagcgaaattgatgttctgcgccgtcaatctgctcagcgtttcggtggcaatgaaaaacaagctttggaactgcctcgtgaactgtttgaagaacaagctaagcgtcgcgttgttgttggtttgttattaggcgaagttatcagtagtaatgagctgaaagctgatgaagaacgtgttaaagcattaattgaggaaatggcttctgcctatgaagctcctcaagaagtgatcgaattctatggtaaaaaccaagaattgatgaataatgttcgtaatgttgctttagaagaacaagctgttgaagttcttttgggtaaagcaaaagtttctgaaaaagaaacaactttcaatgagttaatgaatcagaatcaaatggcataagttttagttttgtcatgagataatgaatttatcatctcagtgaaatgaacccgcagattaacctgcgggtttttttataaattaagaggcaagatttttcttgaaaaaagtgggtttaccctcagatcctttttaatattatgtatatgattgccaaatttttcagggggaattcccccttgactggctaactttgaatcatggtcatcatcgcttatctcaagtagaattggttatgaatggcaccaacatgaattctattaggagacgaaaatgtcatatagcgacaagcgggatcaatatgcgcctcacatggctttggtgccgatggtagttgaacagactactcgtggagaacgttcatacgatatctattctcgcttattaaaagagcgtattattttcctgaccggtcaggttgaagatcacatggcaaatctggttgcagctcagatgttgtttcttgaagcagagaatccggaaaaagatattttcttatatatcaattcaccaggtggtgtgattactgcgggaatgtccatctatgatacgatgcagtttattaaaccggatgtcagtactatttgtatggggcaggcatgttcaatgggagcattcttgttgactgctggggcaaagggaaaacgtatctgcttgccaaattcccgggttatgattcatcagccattaggcggtttccaggggcaagctacagatattgaaattcacgctcaggaaatactgaaagtaaaatcgcgtatgaatgagttgatggcaaaacatacgggaagaccgattgaagagatcgcgaaagatacagaacgtgatcgtttcttgtcagcagacgaagccgtagagtatggattggttgataagattttcacccatcgcgattaatttattattcccggaagctataatataaacattcggcttaccacttggtaaagctatgacgttcggggtaatagcagaagtttcctgctttgccagacgaatctgggtgagcagttgataaagtgaggttgtactgatgacagataagcgcaaagacggttcaggaaagctgctgtattgctctttctgcgggaaaagccaacatgaagtgcgaaaattgattgctggcccgtcagtgtatatctgcgatgaatgtgtggatttatgtaacgacatcattcgcgaagaaattaaagagcttgtaccacatcgtgagcgtaatgcattaccaacgcctcatgaaattcgtcagcatttggatgattatgtgatcggccaggaaacggcgaaaaaagtgttggcggttgctgtttataaccattacaagcggttacgtaatggcgataccagtaacggtgttgaattaggtaaaagtaatatcctgctgattgggccgacagggagtggtaaaacactattggctgaaacattggcccgttatcttgatgttccttttactatggcagatgcgactacgctgactgaagcgggatatgtgggagaagacgtagaaaacattattcagaaattactgcaaaaatgtgactacgatgtgcaaaaagctcagcgcggtattgtttacattgatgaaattgacaagatttcacgtaaatctgataacccgtcaattactcgggatgtttcaggtgagggtgtacagcaagcgctgctgaaactgattgaaggtacaattgctgcggttcctcctcagggggggcgtaaacatccacaacaggagtttttacaggtagatacctctaagatcctgtttatttgtggtggtgcgtttgcaggtttggataaagtgattggtcagcgtctaaataccagtacaggtattggatttagtgcgaaagtcaaaggtgagtcagaaaaagcgactgaaggcgaattgcttgcacaggctgagccagaagatctcatcaaatttggtcttatccctgaatttattgggcggttacctgttgttgccacgctcagtgaattgagtgaggaagcgttgatccagattttgaaagagcctaaaaatgcgttgactaagcagtatcaagcactgtttaaccttgaaggtgttgatctggaattcagaagtgaagccctgacggctattgctaagaaagcaatggttcgtaagacaggtgcccgcggcctgcgttctatcgttgaaggcgcattgctggacactatgtatgatctgccatcaatggaaaacgttgggaaagttgttgtagatgaatcggttgtcaatggtcaatctgcgcctttactaatttacagcaaaccggatgcccaagtttctggtgaataattgagtctaggatagggaattcgctaaacgagatattattaaataaaatgaggggactaccctcattttatttttattaaagtatcatactattgaatgtcaaattcctgtccccatatattttatattctatggagtgaaactcgtgagaaccgcgtttcacgagattccctaaaaactggcgaaagctaaacgaagagagagctctatgaatcttgagcgttccgaacgcatagaaatccctgtattgcctctgcgcgatgtggtggtttacccgcatatggtgatcccattgtttgtagggcgtgagaagtctattcactgcctagaagcagcaatggatcatgacaaacagatcatgttggttgcgcaaaaagaagcttcaactgatgagccaggggttaatgaccttttctccgttggtacagtagcttctattttacagatgttaaaattgcctgacggcaccgtaaaagtgcttgtcgaagggttgaaacgtgcccgcattacaactctgactgacaatggcgaacatttttctgctcatgctgagtatcttgactcaccgatcgttgatgaacgtgagcaggaagtgatgatcaggacagctattaatcagtttgaaggctacattaagctaaataaaaaaatcccgccagaggttttgacttcgctacacagtgttgaagatgcagctaaattagctgatacaattgctgcgcatatgccattgaaactcagtgataaacagactgttttggaaatgtctgatgtcgttgagcgtcttgaatatctgatggcaatgatggaatcagaaattgatttgttacaggtagaaaagcgcatccgtaaccgcgtgaaaaaacaaatggaaaaaagtcagcgcgagtactacctgaatgagcagatgaaagcaattcaaaaagaactgggtgaaatggatgatgcgcctgatgagtatgaaactctgaagcgcaaaattgaagcggcaaaaatgcccaaagaagctcgtgaaaaagccgaagctgaattgcaaaaactgaaaatgatgtctcctatgtcggcggaagcgacagttgtccgtagctatatcgattggatggtgcaggttccgtgggttgctcgcagtaaagttaaaaaagatttggttaaagctcaggaaactctggataccgaccattatggtttagagcgtgtgaaagagcgtatccttgagtatctagcggtacaaagccgaattagcaaaattaaaggaccgattttatgtctggttggtcctcctggggtgggtaaaacctctttaggtcagtctattgcacgagcgaccgggcggaaatatgtgcgtatggcattgggtggggtccgtgatgaagcggaaattcgtggtcatcgccgtacttatattggctctatgccgggcaaattgattcaaaaaatgtccaaggttggagtgaaaaatcccctattcctactggacgagattgataagatgtcgtccgatatgcgtggtgatccagcttctgccttattggaagttttggacccagaacagaacgtggcatttaacgaccattatctggaggtcgattatgatctgtcagatgtcatgtttgttgcaacatccaactctatgaagattccggcaccattgttggatcgcatggagattattcgtctttccggttataccgaagatgaaaagttaaatattgccaagcgtcatttgctgcctaagcagattgaacgtaatgctctgaaaaaaaatgaattaactgttgatgacagtgctattattggcattatccgttactacactcgtgaagccggagtgcgtagtttagagcgagaaatttctaagctgtgccgtaagacggtgaagacattgttaatggataaaaatttaaaacatattgaaatcaattcagataacttgaaagattatctgggtgttcaacgtgtggattatggtcgtgcagatacagaaaaccgtattggtcaggtcacagggcttgcatggactgaggttggtggtgatttactgaccattgaaaccgcgtgtgttccggggaaaggtaaactaacctataccggctcactcggtgaggttatgcaggaatccattcaggcagcattaacagttgttcgtgctcgtgctgataagttgggtatcaactctgatttctatgagaaacgggatattcatgtccacgttccggaaggtgcgacgccaaaagatggcccaagtgcgggtatcgccatgtgtacagcattggtctcctgcctgaccggtaatccagttcgggcggatgttgctatgacgggcgaaatcacgttgcgtggtttagttctgccaatcggtggcttgaaagagaaactattagctgcccatcgaggtggaattaaaacagtcttaattccggaagagaataaacgtgatctggaagaaattccccagaacattgttgcagatctacagatccatccagttaaacgtattgaagatgttttggctattacattgcaggaccctgtgtttggcgcagaattagtgtcagtcaaatagtacaaaaatagtgaattttttcaataagtatgaatgaaatataggctggtaagtgaattcaggcttaccagcctttttatattattaacttggataaactgcttaataaatattttgttgtcttatgatttcttgccaatatcggaaaggattgatataacggcactgctatcgggttatccgttgggattctgatgcggtagtaaaaactatatggggatgataagagtgaataaatcacaactgatcgacaaaattgctgctgactctaatatttctaaagcagctgcggggcgtgtagtagatgcattcatttcttctgtaacgggtgcattgaaggatggtgatgatgttgctctggtgggattcggtacttttgctgttcgtgaacgttctgcacgtacaggccgtaaccctcaaacaggaaaagagctcaaaattgctgcggctaaagtacctgctttccgtccaggtaaaggtttgaaagacgctgttaatgggtgacacgaactaaatattgtttgtcaatccttgttataccctatggatttcaagatgcatcgcgacggcaagggagtgaatccccgggagcatagataacgatgtgaccgagagcagccaacaaagaagcaacttgaaagataacgggtatatattggtaaacatagactgacgagacagatttggtaagttaaaatagaagcgcatcaattgattggtgcgctttttttctcttagcgcttgaattagcgtaatatggcgttttcaatttcaccaaagcggagttttgcctctttatgatggacaacctacgcacggcggcaaacagtcctgtgcttaaaatcgtgctggctctcattatcctgtcttttgttttgacgggggttgggggctacctgacaagtggagctggtagttatgctgccgaagtgaatggccaggctatcagtcgtgctcaattggagcaggcgtttcagcaagagagaaatgcattgcaagagcaattaggagataaattctcggtgttagcaagtgacgaacaaagcatgaagcagattcgtaatcaggctttggatcgtctaattaataatgcattgattgatcaatattcccgtgaattgggtttatctgctagtgatgagcaagttaaggattctatccgaaatacttcttactttcagacagacggtaaatttgataacaacaaatatctggagttgctcaaccgtttcaatatgagtccggatatttttgcggaacaaacacgccagaatttagttaaccaacaattaattatggccttttctggcagtgaaatagcattgcctggtgaggtgaaactcaatgctgaattgcttctgcaacagagaactgctcgtatagctacactggagctgaagaaaattcaggcgcagcaggaagtaacagataaagatttgcaagattactataatctgaataagagcagctttattgcttctgaagaagtgaaaatcagctatatcaagatggatgctgtagatgaaatgaataaagtttcagctacatccgctgatgttgatgcttattatgagcataatttgaagcgttatacacaaccagagcagaaaaaatacagtctgattcagcttgcaactgaatctgaagccagaaccgtgtttgatgagttaaataagggtgctgattttggtaaattagcgactaaaaaatctacggataagttttcagcgaaaaatcatggtgagatcggctggatggaagaagatgctcttcctgaagaattgaaacaagctaatttgaaagaaaaaggccaaatttcttctgtgattaaggttcctaatggcttcgctattttccatttggatgatgttaaaccccaaataattaagcccttatctgaagttcgttctgaaattgagaaaatggttaagcaggaaaaagcggtagatgctttctatgctctgcaacagaaagtcagtgatgctgctaccagcgataatgaatctttagctgcggctgaggaagtttcaggtattaaggttgtgacgactgattggtttgatcgcaatagtgtgccagcagagattaattttggtgccgttattcatgccatttttgaaggtaatcttgttgatggacaggggccaacaggaactaattctgatgttatctccgttgaaggtgatcgtgcatttgttctgcgtgtagataattataagccagaaacagtacagcctttcgagaaagttaaagatcaggttactgaactggttaaacgccagaaagctgaaaaacagcttcaagtcgaaagtgagaaattactgaccgccttaaaagaaggtaaaggtgagcaagccttgaaagatgcaggtattcaatttggtgaatctcaggttattcagcgtacatctcaggataatgtgttagttggtgcagtattcgctttaccactgccaaaagaaggtaaggcagaatatggtttgacgaaaaatagtttggatgacgttgtgttgatccaactggataaagttactccaggtgttgtatccgaagaacaaattaaaagcatgactgatggctatcagagtgaaatgggtaacgctatgctggagtctttactgattagtttgcgtgaaaaagccaaaattaagttagggcataccgaataaaaatttgcggagaatatcgcaaatatctttgtaattatcttgtcaacaaaggccgctttcgcggcctttcgcatatctgatctttgtccattgtgctcaaatttatctgtggcaatcttttttccgttcataaaacatggaggaattaatatgaaaaaatcgggaattttatctgttttgctcgctggcttgctttatgcgtgtggagggcaattcgcgattgccgccgagcaagtaaaagataaagtcgctaaagcagccagtactaccagccattcttcaccagaaaagcaattacagcaacaggacgctttgaaagtagaagaaaagggaaaggtgaatattaatactgcaagtgctgaagagttagcaagagcattaaatggtattggggtaaaaaaagcacaaggaattgttgaatatcgagaaaaacatggtgcgtttactgcggtggaacaattgcaggaggttcagggaatcgggccagtttttattgaacgaaatagaagtaagttgagttactagtatattatctatcatcctcattcatgatttttttgtgaatggggatgttgtgatcaaggttgcaaataaatcactttaattagtgtgaattttttgttttgctattgtgaaatcaacctagtcagacgagtgactttaacataaggcaatattatgagttcaattataaaagttcatggttatcatatagatttgtttcaacatgtgaacaatgctcgctatttagaatttctggaaagtgctcggtgggaatggttgcataagcattctgtagtggaatggatacagagaaacaatgttgggtttgcagtggtcaacattaatattaattatcgtagttcagcagttcttggcgatgaattggaagtggattgccgattgacggaactgaggaacagaagtggtgtattttctcaggaaatcatacgtagaaggaataatcaactcattgcagatgctaagactacgtttgtctggattgatagaaagacacaaagagcattatctattgaaggtgaattacgtgaaataatgggggctttggtgaaaacagggcaatgagagggaaaggctctcattgccatttggattaaactagatgtgtttttgctttcatttcagtcattattttctccggagcattcagatattgttctaatccgttagctctgagatgacaagctgcacatgtaccacatccattaccttgaatgccgttgtagcaagttagtgtctgactacgaacaaagtctaagtgctggtagtagtcggacaatgcccaagtttccgctttgttgagccacatcaatggagtttcaaaacggatatcacgggcaatgccaaggcttacagctttgttcaatgccttgacaaattcatcacggcaatcagggtaaccggagaaatcagtttcgcatacgccagtaataactgcttcggcttcaacttgataagcatatatagcagccagtgtcaggaacaaaatattgcggccagggacaaatgtactgggtatggcacttttttcgctttcactgtggtcggggacagggatgttatcacgagtcagactgctgagagccagttcattaagtaatgtgacatccagtactttatgtgcaacaacaccaagaaaatggctgacattacgtgcaacatcaatttcggcacgatggcgctggccataatcaaaagtgacacaatgtacttcgtcatattgattaattgcctgaatcaggcaggtagtggaatcttgtcccccactgaatacaacaacagctcgtctcattgtaacatcctcattggaataaaatggttatgttacttataactacggaaattgggtagttgtttgagataaggagagatatcgccgatgttattttttacccaatctggattgtaataagtatcgagataacgttcaccactgtcgcacagtaaagttactattgcaccttgctctccacgctcatgcatttggttagcaagcagaagcgctccccagacattagtccccgtagatgcgccaacttttctgcctagtaatttttccaaccagtaaattgttgcaatgctggcgcaatcgggtatttggatcatgtcatcaatgactgagggaataaaagaaggctctgctcgagggcggccaataccctcaatcttgctgctataattgccacgaatatcacagcaattttgacggtaatagtcataaaatatagagttttctggatcgacaacaattagtttagtgttatgcccttggtaacggatatagcgtcctaaagttgcagaggttcccccagtaccagcgctcataacgatataatctggttcaggaaatggttccatttgcatctggcgaaaaatactttcagcaatattgttgttacctcgccagtctgttgctcgttcggcgtaagtaaattgatccatataatgaccatttagttctttcgctagtcgttctgattcgtcatatatttgtgctgaatggttaacaaaatggcatttaccaccataaaattcaatttcctgaattttacgtttcgcagtgtatgagggcataacagcaataaaaggtagcccaagcaggcgggcaaaataggcttcggatacagcagtgctacccgatgaggattcaataaccggggtaccttcctttatccaactattactcagcgcgtaaaggaataaagaacgagcaagcctatgtttcaaactgccggttggatgggtgctttcatcttttagatataaatggatacctggaaaaactggcaaattaaggcggataagatgagtatcagagctgcgttgatggtctgcttgaatctctctgattgccttggtggtccaactgtgtgacattaattattaactctataatttaaaaataattggcagcgggtagattaacttgatactgggagaaatagattgttatttttcttaatatgtggtttctttatggaaaatttttctataagaggtagctatgttggataaaacagaccgcaagttgcttaagttactacagaaagattgtagtctgtctctgaatgcattggcggaagctgttaatcttacctctactccttgttggaaacggttaaaacgacttgaagatgaaggctatatcgttggtaaagttgctttgcttgatagcgaaaaattaggattagggctgacagtgattgttatgatcagaactcagcagcatagcagtgattggtatgagcaatttgttgcatttataaagcaaatgccagaagtcctagctttttatcgtatggctggtgaatgtgattatttaatgcacgtagaagttgtggatatgaaaagttatgatcttttctacaagcgtatggttaatggtgttccggggttgattgatgtgacatcgagttttgcaatggaaaaaatcaaatacactacagcattgccgataccagattaaccaattattaatctattgcgttaattcaattattctgagtgtcgttcaacatttctactatctatttcatttcgggatatacacgtgtgagattgttttctcaattaagttggtacttccgtagcgagtggcgtcgctatcttggggcagtaactctgcttattattatctctattctactactcattcctccatatctggtgggtgtaatcgttgatgggatcagcactgcgtctatgtcattttaccaattgatggtgtgggcgggagttatactggttatcgcattgattgtctatatcttgcgttatatatggcgtttatggttgtttggggcgtcatatcaattagccgttaaattgcggaataatttttaccagcaacttagccgacaaagccctgaattttatttgcgtcaccgcacaggggatttaatggctcgcgctactaatgatgtggatcgtgtagtgtttgctgcgggtgaaggtgtgcttacgttagttgattcgctagttatgggctgtgcagtgctaattatgatgagcatacaaattagttggcaattaactttactgtctttgttacctatgccgattatggcaatcattattaaacgatatggtgatcaacttcatcgtcgcttcaaatctgcacaaggcgcattttctgctctgaataaccaggctcaagaaagtctgaccagtattcgtatgattaaggcgtttggccttgaagatctgcaatcaaatcagtttgaacaagttgccgtggaagctggtcgtaagaatatgtatgttgctagggtggatgcgcgatttgatccgacaatttttattgctatcggtatgtcaaatttactggctatcggtggtggtggttggatggtgttaaatggtgttttaacactcggtgagctcactagttttgtgatgtaccttggcttgatgatttggccaatgttggcattggcatggatgtttaatatcgttgaacggggaagtgccgcttatagtcgtatccgtagcttgttgcaggagcctccggtcattaaggatggtattggcaatttattgcctgagcgcggtattctggatgtgaatatcaaagcgtttaattatccgcaaagtaacaaaactgttcttagtcaaattaatttccagttattacctggacagttattagggatctgtggttcaactggttcaggtaagagcacattacttgcgctgatacagagacagtttgatgtgactgatggagaaattcttttccaatcgctcaaaattgcagatatcaggttagatgaatggcgagcacgatttgctgttgtcaatcaaaccccctttttattttcagatactgttgccaggaatatcgctttgggacgtcctgatgcaacacaggaacagattgaagaagttgcccgtcttgccaatgttcatgaagatattcttcgtttacctgaggggtatcagacagaagtaggcgagcgtggggtaatgctttctggtgggcaaaagcagcgtatttccattgcgagggcattacttttagatgccgagattttgattctggatgacgctttatctgcggttgatgggcaaactgaatacaatatcctacaaaacctcagtcagtggaggcaacaacggacggttatcattagtgcccaccgtctgtctgcattaactgaagcggataatatcctggtgatgcagcaaggttctgttatacatcagggacggcatccgcaactggcagagcagccgggatggtatcgtgatatgtattattatcagcaacttgaagcagaattggatggcgaggaaacagcagaaggggataaagatgactaaagttcgtcaattgtggccgtctctgaagcgtctgttggtttatggaaaaaattatcgtaagccgttggggctggctgtactcatgttatggggggctgcaattgcggaagtcagtggtccggttctcattagttattttatcgataatatggttgcaacgggtaatatgcctactagagtggttatcgggctagctataacttttattgttctgcaactgattacggcggcgttacactattttcaggctttattgttcaatcaagtgtcagttgatgtggttcagcagcttcgtactgatgtgatgaatgcagcattgcgccagcctctgagtgcttttgataatcaaccggtagggcagttgatttcccgtgtaacgaatgacaccgaagtcattaaagatctttatgttaatgtagttccatcggtatttcgcagcatggcattgattggtacgatgctgattgctatgtttatgttggaatggcgtatggcattgattgcaattcttatttttcctgtcgtattgattgttatggcaatatatcagcattttagtacacccattgtccgccgggtacgtagttatttggctgatattaatgatgagtttaatgaagtcattaatggaatgagtgttattcagcagttccggcagcaggcgcgttttggtgaacgtatgttgttaaccaatcgggcccattatcaggcgagaatgcaagcgttgagattagatgggcttttgttacgcccattattgagtttgctatctgctatggtactgtgcggtcttatcgtgttgtttggaattagtgggccaggggcgattggtatcggggtattgtatgcttttattaattatttggggcggttgaatgaacctcttattgagctgacatctcagcaatcgattttgcaacaagctgtcgtttctggcgagagaatatttgaattaatggatagccctcaacaaggttatggtatggatggtcagccactatccagtggtcgaattgatatagaaaatgtcagtttttcctaccggcatggaaaaatagttttgcaagatattaacttacaggttccggctcatggttttgttgctttggttggtcatactggtagtggtaaaagtacgctggcaaatttgctgatgggatattacccgtggcagaaaggggaaatttatctcgatggcaggcctgtatcatctctgtctcattcggtattacgcaatggtgtggcaatagttcagcaggacccggttgttcttgcggactctttctttgacaatattacgcttggtcggaatatttcagaagagaaggtttggcaagtactggaaacggttcaattagctgagttagtacgtacattgcctgatggacttcatactatcttgggagagcagggtaatacgttgtcagccggtcaaaaacaattgcttgctatggcgagagtgttagtgcaaacgccacaaattttgatccttgatgaagcgactgcaaatattgattctggtacggaacaggcggtacaacaggctttgagattgattcgtcaacaaacaacattgatcgtgattgctcatcgtctgtctaccattgtggaggctgatactattctggtgctgcatcgtggtgcagttgttgaacagggatgccatcaacaattatttgtgagtcgtggacgttattatcagatgtatcagttgcaacaagtaggtgagacattaaatgaatgtggcacaatctctgagaaagaggtgttaatttaatcaagcttgcactaattcggtgcactcacgggagagtatattcgctgctctcctcccttcttaattctccataatttttactctcttcattattctttgatttttatatgtttttaatttctggcacaccctttgctatttccttattgaaaacataatagcaggatggaagggggatatatgaagctcattacgacaattataaaaccattcaaattggaggatattcgggaagttctttctggtcttggtgttcaggggttgaccataacagaggtaaaaggatttgggcgtcagagaggacatgcggagctgtatcgtggagctgaatatagtgtcaattttttacctaaaataaagatagatattgctgtagcagatgaattggttgaggaggtcattcatgctattcagcaatcagcttttactggaaaagttggcgacggtaaaatctttgtcattgaattacaacaggctattcgtattagaacaggagaaactaacgatgcggcactgtaactcactgatagagaagatagatatgaaaaggcaattctcagtggctgccagtgttgtggccagttgtgtaccatcattatctcaggctgcggaaggcgttgttgataaagcggataatgcttttatgatgatttgtacagtgcttgttctgtttatgaccattccgggaattgctctgttttatggtggattgctacggagtaaaaacgttttatcgctaatggctcaggtcatggtgagctttgctttagtatgtgtgttgtgggtgatttatggttatagcctggcttttgagccagggaatggttttttcggtggttttagtcaagtgatgctaaagaatttggcattcactgacttaagtggcaatttttatcagctaattcatgtggcatttcagggctctttcgcttgtatcactgttgctttgattattggcgcgttaggggagcgtattcgctttccggctttgttagtttttactgtgttgtggctgacattttcttacttgcctatggcgcacatggtttgggggggaggtgtgctttcacaagatggagcattggattttgctggtggtacggttgttcatattaatgctgctgtagctggattggttggtgcttacttactgggaaaacgtactggctttgggaaagaagcatttaaaccgcataacttgccgatggtcttcacgggcactactgtgctctatattggttggtttggttttaatgctggttctgctagtgctgctaatgagatagctgctttggcatttttaaataccattgtggcgactgccgccgctatcctgtcatgggtttttgcagagtggcttttccgtaataaaccgtctcttttaggggcatgttcaggctgtattgctgggctggttggtattacacctgcggcaggaatggttggtgttggtggtgcattaatcattggcctgattgcgggttttaccggactttggggggtggtggccttaaaacggtggttacgtgttgacgatgtgtgtgatgtattcggcatacacggcgtatgtgggatcgtaggttgccttctaacaggggtttttacggctaaatctttgggagggatcggttatgcagagggtataaccatgttgggacaagttggtattcaggcttttagtatactggtttgtgtgatttggtcagtcgttgttgcctttattgcttttaaaatagcagatctgttggtagggctgcgggttacggttgaaattgaaagggaagggttggacattaattctcacggagagagtgcttataattaagttgtaatataaaagggcagcaataaggccataaaatgtaatgttggtttcttagtttgctgccttactcatttatctattgcgtttcctaatcagaccttcctgtacagtggaagcaacaagtatcccttcacgattataaatctgtccccgaacaaaaccacgggcaccggaagctgagggactatctacagcatatagcagccagtcatctagtctaaacgggcggtggaaccacatagaatggtcaattgttgctatctgaatatttttctcaaggaacccgacaccatgtggctgtaatgctgttggcagaaagttaaaatcggaggcatagccaagcagatattgatgaataaaaggattatcaggcatattgccgttactgcggaaccaaacatagcgtataggttcttctggtggacaattgaatggactgtgatattttacgggtctcatttctaacgggcagggaaaaagaagcgtattctgcatcttctgtggcagcagatgcgacatttttttcacaatttcatcctgagggataagttcttctggatagggtacatccggcattatattttggtgttcaaaactttcttcgtgactttgaaatgaggcagtcatataaaagataggtttaccattctgtattgcactaactcgccgggcactaaaacttcctccatcccgcaaaatctcaacatcatagacgataggcttgtgactgtcaccggggcgtaagaaatagctatggaaagagttgcccattcggtcatcgacaacggtttgtttggcagcatacagtgcctgaccaatcacttgtcctccgaaaacctgaggaaaaccgagatcttcgctttgccctcggtaaataccttcctcaattttttccaatttcatcaaatttatcagattctgtaatgacttgctcataatatgcctttgttttctattaggttatcgagagtacaagggatgattattgtctcattaatagatgattaataaataactaaattgtaaatgttttaagtcctaacagcggtgcaataaagaatgtgagatttattggcgttttatgttcaaatttttaatctataattcaaatgatttagatttaatgatttgatatttcaatttattttaatatttatatagattagttaataatggaggaatgtgtatgaaattatggcagttacccgctggcgtattactagcggttgctttggttgggtgtaatgtcaaaggtgctgaggtagcagatactcaggtggagcagattgaaaatctaatgaaacggtcttttgttgaaggtaatattaatatactacagcgtatagcattgccagcagatgctgttctgacagtggcgttatctgatgtgtctttggctgatgcgccttcagttactctgtctcagaaggtagagcgtttaggtgggaaacaatcacctttccattttgttttgccttatcagccaaacaaaattaagccgaatgcacgcattgttgtcagagcttctgtttcgctgcatagccgcttgatgtttgttacagatacagcatatgaagtgattaataatgggaagactaaagatgtcgaaattacgttgaaagccgttagataatacatttccttattgtattgatttgcaatgtgcaataaaccagcattcgggcctgcttgtcttgctatttaagtaggtatgaatgataatggcgacgctttagagttaaagcaacacgtcacaatgggggctctgttggttctcccgcaacgctaacttgttaacttggtcaggtccggaaggaagcagccatagcaggggatgtgtgtgccgggatgtcgctggcagagccctcgccaatttcattggtaacctaataagccgatagcactttaccggctcggatcactttctatctgataaagactattttagcgaacatatttccatactgaaggtggaattctatcatacagtttattcatggtcagctcagctaggcgatgatccgcagcagagtagaatagttcaagttcatctcctgaaagttcatatttgttcttttcaatcacacgttccagtgtatcaatcgtggtgcattttcttaaacgcatcagataatcagttttagtcataatcgcctttcttatttaacatatataaaaaattattgagggaaatattcaatcaaattttgctcaaggagcaatttaaatcctgtaacaggacgctggttaagcgttcattagtttttttaccattccataagtttagaaacgctaatcttaatttgtttctaaacaaagtataactatatgtattatcaatacatttatcaattcaagtgagaaggctgaaatcatcagaatattttattttaaagtaccaaacgaaagttgatatgtattcaatctatttgtttagctttaaattatcctgagatgtagaagccatttttacaaccagtctcatctctgtgtactctacactagaagtacttctcgccttagattttcacataagcattctaattcatcaatgttatgtcatcttgagtgaatattcatccatgctatgttgatcttgctgtgtatgccattacttaatttttttgagttaaacactaagcatatacacgtaaaataaaatttttttcaagagattattattatgtatctataatcgttctttgggattatttatcttttctacagatggctctgattcgcttctagtaaaccagaatcagctcttaacaaaaattcataccttaactcaataaactataaatagcggctagtatgtgtgagtgaatatgtagatttatataaaacagtattaccctcagataccagtaacggcagattatagcctgatggctacaataatcaatgaatataacatcattattacataagtcactatgtgctggtattgttttttgtcatttagtgtaaaaaaagataaagtaatttttgtccgacaaattttatattaattttattaaagtcactaatgcttggatttttaaagctattttatactcataagtggtgattataattaaatttaaacgaaattacttaaatattaagcggatagattaatgatcagaatcttatcagatggaagcaacgattatatttaagaaggccgatttgacggccttctggttattgttggtagcatttagtgagattctgatgcgggttcaatctcctcagctttcttactgaaacgtcgtcttataaccacaaagaataccggcacgaaaaagatggctagcgaggttgctgcaatcattccgcctaataccccagtacccactgcgttttgagagccggatcctgcaccattactcagtactagggggataacacctaacataaatgctagtgatgtcattaggattgggcgaagacgcattcttaccgcatctagcgtagcttctatcaaccccttgccctctttttccatcaggtccttggcgaattcaacgatgagtatcgcgttcttagctgacaaaccgatagtggtcaacaagccaactttaaagtaaacatcgttatccaagccgcggaatgttgttgctaacaaggctccaacgatacctaatggtactactagcataactgagaatggaattgaccagctttcatacagtgcagccagacagaggaataccactatcaatgataatgcatatagagctggggcttgattaccagacaaacgttcctgataggacatacctgtccagtcgaaaccgattccatttggtagcttagatgccagctcttccattagggccattgcatcaccggtacttttacccggagcggcttcacccagaatttccattgatggtaagccgttgtaacgttccagacgtggtgaaccgtaggtccagggttctttggacgtgtctgtaaaggcagagaatggaaccatttcaccctgtttgttacggacatacagcttgtagatgtcacttggcaacatacgataaggtgcttccgactgaacgtaaacttttttgacacgaccgcgatcaataaagtcgttcacatagttactaccaaacatcgtgctgagtgttgagttaatatcagcgatggaaacaccgagagcttcagctttttcctgatcaattctgagccgatattgaggggtatcttcctgaccattaggacgaacacctactaacatatctggatgctgttgtatcatgccaagtaattgattacgggctgctgtcagtttgtcatgtccaaggtttgctttatcaattaattcaaaatcaaagccagttgctgaacctaactctacaattgccgggatgttaaacgcaaaaaccataccttctttgattgtctggaagtgagcactagccctggcaacaatagcaggtactttgttttcagcccccggacgttcaccccagtctttcaggcttataaatcccaacccagtgttttgaccttgcccactaaaaccaaagccactgacagtaaatacagaaaccacacgatctttttcttctgtattgaagtaatcgcttactttatctagaactttttctgtttgttcctgtgtcgcccccgcaggtaattgaaccattgtcagcaatactccctgatcttcttcaggaagaaaagaggatggtaaacgtgtgaacatgacggccatacctgccaccaggaatacataaattaccagataacggcctgtattacgtagaatgcgaccaatgctgtcagtatagtggtgggtacttttgtcaaatatgcggttgaaccagccaaagacgccggtctgcttaccatggctacctttggcaatgggtttcaacatggtagcacatagagctggtgtcaggattaatgctaccagcacagacaataccattgcagatacgatagtgatcgagaattgacgataaattgcaccggttgaaccgccgaagaaggccattgggataaatacagcagacagcaccattgcaataccaactaaggcgctttggatttgtcccattgatttcctggttgcttcttttggcgatagaccttcttcctgcataacacgttcaacattttctacaacaacaatggcatcgtctaccagtaagccaatggcaagaaccatagcaaacatggttaatgtatttattgaatagccaaatgtagcgagtattgcaaatgttcctaagagtacgactggaactgcaatggttggaatgagtgttgcgcggaaattttggagaaataggtacattaccacgaacaccagcataattgcttcaaccagtgtttttaccacttcgttaatagagattttaacgaatggtgtggtgtcatatggatagacgattttcagcccgtgagggaagaaaggttccatattgtttagcgcttcttttactgctttggatgtatccaaagcgttagcgcctgtcgctagtttgacaccgatacccgcagcaggtttaccgttatagcgggcaatgatgttgtagctttgtgcacctagttccacctttgctacatctttcagacggacctgagaaccgtcagtattgacgcgcaagagaatattactgaactcttccggtgaagttagacgtgtttgagcaatgatcgacgcattcaggcgttgacctggaaccggaggggttccccctaattgaccggcggctatttggttattttgcgctttgattgcatttattacatccaaagtcgtcatcttgtagttaacgagcttgtcaggatttaaccagatacgcatggcatactggttaccgaaaagcattgtatcacctacaccggttacgcgacttaaagggtccttgacagttgcaccaacgtagtcagagatatcgtcctgtgacattgaaccatcttcagagatgaatccggcaaccatcaagaaagaggtcgtggacttatctacacgtataccttgctgttgcacttcttgtggtaacagaggcatagcgagttgtagcttgttttgcacttgtacctgtgcaatatcgggatcagtaccggcctcaaaggttagtgtgatattcatgtttccagcagaatcactgtcggaagacatataaactaggttatcgataccattcatgttctgttcgataacctgagtcactgtgttttgcacagtggtggcatctgcgccgggataagttgcagagatagaaatcgccggtggtgcaatagtaggatattgcgctacgggtaatttcataattgccaacagcccagccagcatggtgataattgcgattacccatgcaaagattggccgatctataaaaaatttaggcatgaatcactgactcctatgaatcctaaattaagactttttcgcaggttcagcttggttcgcagcaggttttgcatttaagtccacttcttctgctttaaccgggatgccgggtttaattttttgcaaaccagtaacgatgacccgatcacctgctttcagaccggaagctactagccatttatcaccaatagcttggttggtagtgataacgcgcggttcgactttttcgtctgcaccaaccaccatgacagtagcttcaccacgaggtgtacgggtaactccttgctgaggaaccagtattgaatcctggcgaataccttcttccaattttgcacgaacaaacatgcctggaagtagctcttcatttgggttagggaatattgcacggatagtgatagagcctgttgtttcatctacagtaatatcagagaattctaagtaacctgtttcactgtagtttttaccattttccatgattaggtgaactttagccttattgtcctctttctgcacaatacctttagcgatttcatttttaagacgcagataatcatcacttgactgagtgacatccacataaattggatccagttgttgaacagttgtcagtgctgttggttgaccaacagaaaccagagcaccttcagttatcgtagatttgccggaacgaccactaatcggcgctgtaactttggtatatgccaaattgatacggttggtctctacgaccgcttttgctgcctgtactatagcatccgcttgtgcgtagtcggcgctggctttatcaaattcctgttgactaacatagtttgtacctaacagtgatttatatcggttcgctgtcaagcgtgtgatctctgcatgagcctgagcttttgccaaatcagctttagcactgtcataggcagcctggtaagttgctggatctatctgatataaagaagcgcctgcttttacatcgctaccttctttataatttcgtttcagaattataccacttacttgtggacgaacttctgcaatgcggaaggctgatgttcggcctggaagttccgtcgtgaccatcagaggttcagttttcagcgtcacgataccgacttcaggagcctgttggttcccagcaacttgctgagagtctttgtcgttacatcctgaaagagctaagctgcctgagagtaccagtactgtagccagaggcaaaactcccctgtttattcgcataagtaaacctcaatatttttagatgttgacccttcaatccgtaaaaccattactccattaataacagcatgctataatacaaacatacgtgaatgtatgtaaatccattttaggttaaaaatagagtgtatggcacgaaaaactaaacaacaggctgaggagacccggcaacagattatagacgcagctataaaagagttttctgagcgcggtgtctcggctacttcactgacagatattgccacaacggctggggtaacccgtggggcaatttactggcattttaaaaataaagtagacctgttttccgaagcctgtagaataacagattctaagattgacgaattagaaaaagagtatcaagcaaaatatcctaataatccactcctgattttaagaactttaatcatccatatcctgacgtcggtcgttgatgatccgaaaaaccggctattaatggagatttttttccacaaatgtgagtttgttggtgaaatgtctgccttggtggaagtgcgtcaggaactgtgtgttgcagactatgttcgtattgaagagtctctttctggttgtattgcatcaggccagcttccttataatcttcatctgcggcgagcggctatcatgttaagaggattgataacgggcttgttggaaaattggttatttgcaccagatagttttgatattcagaaagaagcggagtcgttagtggatagttttatcgatatgcttaaatatagtgagcatatgaaaattgctgaaaaatgaagaactagaataatagaggtgaattctattttggtaattgctaacaatgtggttaatggccaaaagtcattatcttatgctctttgcttatctgctgttatataagggattagactgagaaactaagctgaaattatttctaatatcagatactgctgccggttttgttagagaagagatcaaagaaaggctataccctaaggtaaatgttgaagattctggttgtgtaaaatgtactgattaaattcggcaagtgtggagtaagggcttgtaatatcagtaagttggaactgattgataacgctgaaatcagtgtattgattgaattttccctacggattttgcaggtagacaccgtgctaaatgggggcagtgttaagttgcgggccacaattgttaagggataaccatctatgctggaaatacgaaatgtaacgtacgcctatggcgagcgagtgatattgcaagaattaaatttgcagctaaaggaaaaacgcattgccatcataggtagcaacggttgtggtaaaagtacatttgcacgtcttcttaatggattattggtgccgaaaaatggtgatgttttggtggatggtttgaacaccagaacggagggtaaagcgatccggcgtaaggttggtttcgtatttcagaatcctgacaatcagatcgtgtttcctgttgttgaagaagatttggcctttggaatgaaaaatcttggtttttccaaggacacgattcgacaaagaactcaagaggcgctttcacgctatgatttacttcaatttagggagcatccagcccatcttttaagtggtggtcagaaacaactccttgcgatttccggtgttctggtgatggagcccgattacattattttcgatgagcctacaaccttgctggatttacgaaacaagcgccgtgttgccgcagcaatcgataacttatctcaaactgtaattgtagtgtctcatgaccttgattttttggcgggatttgatcgtgttctggtttttgatgatggtcgtgttgttgttgatgacataccctctattgctattcctgaatacgtaaggatgatgttatgagcctgtctggatataatcctggttcatcatttgtgcatcgagtgagtcctgggtttaaaattatttctttgctcattctgggaacattgcttttcgttgttccgcgtatcgatctttctgctgcggcattggcgggcatcgtacttttatacttgttagccaaaatctcattaaaaacggcttggatgcaattacggccggcgttatggatcttcgtgcttatttttatagtccaattgtttctacaccactggaccgcaggtgtacttgtaatagttcgtcttatctctcttttattgttggcctcgctggtcactctcactactcgttcttctgatatgatcgacgcgttggaaaaggggcttgggtggctgtattattttggtatcaatcctggaaaggtgagcttggctttatcgcttgctttgcggtttatccctgttctggcgtcaattacagaagaagtacgggaggcgcagaaagcaagaggtcttgataagagtgtcattgcaattgcagttcctgttattgtgcggatgctcaaaatggcagacgatatttctgccgcgattgaagcgaggtcttatgatccagaatttgacaaaagtaaatcaagcagcaagtaaaacagaggctgtggttttattgaaaagagagggggattaaatgtctaccaaagatattgtttatatagcactatttgcctctttaaccgtagcactgggtttatttccgccactgacacttcccgttgtgggcgttccgataacagcgcagtcaatgggagcaatgcttgctggtgccattattggtgcgaaacggggtggattggcattgttgctcttttgtgtgtttgtttccgttggattaccggtaatgtctggagggcggggaggattgagtgtatttctcagtccaagtggtggttttattttggcatggccgattgccgcttttgttatcggttatttgtatgagaaaaatcttgcaaaactgaatacctttaaagaagctgtatttcttgtctttggcggaattatggttgtttatgtaatcggtatcccgtggattgccgtatttgctaatatcagcacttggcaagcagccgtaggttcaattgggttcataccgggagatattatcaaaatcgtactggttattttgattgcgaaaacggttcgtcgggcttaccccactcttgaaccgcgttcttaagcgtcattgtgcctattgtgacgcttctcctgagataattgttacaataaatacaatgatggtagagtaagaaaaagcaatcttaatattcaggtcccaaatgtttcgctgagatgtattacgaccataaaatcagcttcttctcatttaatacaccgatgaaggagcctgttgcaatgcgattgccacttgcaggcaggacaatatgagggttagttgtgttgaaaataacgactgaaccaacttgaggtcgaaaagtgaaagattcgcaatcaactaatagagaactgtcatacggcttgtatgttttatcaaccacagtactcttgaatggttgattatagatcacggtttctcctccctgagagggagataaaatatagaggttccaagcaagttgagtcgatatatctccgatgattaaattccctttcgcaaaagtgggtgcgtaatctacatgtagatctgagccaccggagataattcggacgataccggcaaaatagggaccgaaccccggctcttctgcgactgaaatgctgaaatttgtatcgtgattggtgtatcgcatgaaccgatcaactggatcaaaagcttgattgataatttggatgcgatcttgttcagctacgctaacttgagaaaaatattgctcttttggtcgatcacgataatgagcgagtgtatttcccaaataaaaccccggccttccgaattcatagggttttgcctttatgctcaggattgcagacgaaagttgttctgtttcttctgtcgttgcaaaatcatctatcatcgcagctggaatcttgttgtctatgattgcctgcaagctttctgatgataatttgacaagctcgtttgatacccaccgtgacgacataatagtcgactcctagccgattttctttatattagaaaaattgatctgttgatggtcagtattcatcatatagcattggttgtataaaaatgcaacatttgatcacatttaggaacgcaacaatgacaatatctctgagaggtcatcaccttttgtgtatttttacctacgctggcaacggatattccactggttttgttgaaaattacaataggattattcctcgaattcgggacgaggatatcttgattgtggcagggccggatgacatatgtattcctttgcttggagaagacaaacctcattgctttggcgagagtgtcattgtccgggatagtcgagctttggacgctgttggttctcttatgggccgatcaattgatataggtcatacgttgaggcttgatgagacctatttaaaacaggcgcgatgggctttcaatcgtgggatcataagatctgcttgtataggctgtgaatgggaatcgctttgcactcgaattgctgcggatgattattcttcaacgcttcttaaacgaaatagtggaaagagtgaatgacgatataaagccgtttgaaatttagcaaaggctgatattgatatgaatgtatgatcacatacttaagacaaataagaatcttttatagtatcgatcaagatatctattaaggtgttgaagtaaatcgctcaatactcctttgccgatggtgattgcttcgctaattttgcttgataatcgtgtttgactatttccagtgcggcgagtgcgatttcaggagtgatttcattgcattccagtaaatagatcagatcaacagcaagttgaacttcgggtggtgcatgttcgacggacataaaacattcctcatctgaatcgttagtccatgttctctttgtattcgattgatttttcaatacgcatcagagattgacggcaacgtgctagtcttccggctaatgccgcgatttctttctgtattttttgttgatgactaagtgtagtttgttgattcaattttagctctctatcattgatcattgcgagcaggcggcgttcataatcctgatgttcagccagtttgtgatacaggtcagtagcttgttgtttatgctcaaatcggctctctttttttctcaatgactgggtagacaattcacgccttaatgcttctatttgggcaactaagcgttcagtcagaaatgcgacctgttcggttcggtgatcttgcacacactctttgagttgttccatgttgtgcctgacttcttgtagataaccacggagtttatcgctgtgtcggttaaataaagcctgatcaaaccgggcagtagagaatggtgtgtctgctaatggtgctatctcttccgccagtatatcgacctgtttttcgagtaaatttaataacggctgcgtattcatttataccttaaaatggttatgccttgcgaagcggaattaatctgggacgacaaaaagtaggctggtgcgtgttcattagttgcttttttctatcagtttgaatagattttagcaccttcgtgttctactcattggcaccgattatgaccgcaaatgcgcagcaactgcaatttattaaagacagtattgaaactattcctgattatccaaaaccgggggttctttttcgtgatattaccactttactggataaccctcttgcctaccaggcaacaattgatcttctggtagagcgatatcagggcaaaggcatcacaaaaatagttggcactgaagctcgcggttttctgtttggagccccggttgcattacgccttggtgttggttttattcctgttcgtaaagcgggcaaactacctcgggaaacattgagtgaaacgtacaatctggagtatggcactgatacgttggaaatgcataaggatagcgtaagagaaaacgataaggtgctggttattgatgatttgctggcaacgggtggtacggttgaagccactgttcgtttaatccgtcgtttaggtggtgaggtttctgaagcggcttttattattggtttgcttggcttaggtggtgttgagcgtctgcaaagacaaggtgtaagtagttttactctacttgaattcccagatcattaatctgcttattttcgtattactaacatatcggcctcgctgtctatagtgaggctgtgttagcatggtgctcaactgtattcgattttcccggtatcaatgagctatcaggtacttgcccgtaagtggcgcccacaaatattttctgatgtaattggtcaggaatatatcctgaccgcgttagctaatggtcttgcccatggccggcttcatcacgcctatttattttctggcacgagaggtgtcgggaaaacaacgatcgcccgtttgtttgctaaggggctaaattgtgaaacaggtattactgataagccttgtggtaaatgtgttaattgccttgaaattgaacaggggcgatttgtcgatttaattgaaattgatgcggcttcccgtactaaagttgaagatacgcgtgaattgctagataacgtgcaatatgctccggctcgtgggcgttttaaagtctacttgattgatgaagtacatatgctttctcgccacagtttcaatgcattattgaaaacgttggaggagccacctgagcatgtgaaatttctactagcaacgactgatccgcaaaaattgccagtgactattctttcccgttgtttgcaattccatctcaaatcgctggatataggtcaaataagcgatcagcttgagcgtattcttaaagctgaacatatagagagcgataaccgcgctcgtcaactattggctcgtgctgctgatggtagcatgcgtgatgctttgagtctgaccgatcaggctattgctatcggacaaggcttggtgacaactgaaatagtcagcttgatgctaggaacgttagatgatgaacagccattatcaatcattgaagcattgattcgagctgacggtcagcaggttatggcattggtggaacaagtcgcttcacggggggctgattgggaggatttgctcgtagaaattcttgcattgctgcatcgtattgcaatgctccaattgttaccttctcagccagagagcgattcttcatcaattgaaggccgtttgcggatagtggcaaaagctgtttcaccggaagatttgcaactttattatcaaactttgctgattggtcgtagggacttgccgtatgcaccggagcgcaggatgggtgttgaaatggctctgttcagagctttggcatttcatccgaaaacagttattgaagaggttgcggcaccggtggtacatcctgcggttataccatcagttacagcacagccgaaacatagtgctcagggagatgtgccacctgctaatgatattaatgaaccggcaccattggatagagcttctcagtcggaaccccagatacctcaggcgcttgcatcaagcccaaccgcgcagttgctgaaagcaaggaatgtgttatcccgacagcaagagcaaacgccaacaaaaaagcctgaatcggctatgcctgttaagatgaagtcagcaacttcagcattggaacggcttgccgcagtgtcaggacagcgacctcagtcatcaatagataaaaaacaggaaaacaaacctgagaaaaaagaagcttaccgttggcgtgccaagaatattgaggagaaaacagaaactcatgtggccacaccaaaggctttaagaacagctttggaacatgaaaaaacaccagagctggcagagaaattaacggaagaatctaaacagagagatgcatgggccgcagaagttggtaaacttaaaattcctaaactggtgcagcaattggcattaaatgcattcaaagagcagattagcgcaaataatatccgtttacacttgcgttcgagccagcgccaccttaattctgctttcgcacaaaagtcattagcgggggctttaagtgagttgtacggcgtaacggttgaattcagtattattgaagatgataatcctgcggagaaaactccgctggagtggcgacaagccatttatgaagagaaattggcacaagctcgccaatcaattattgcggataaaactattcaaacattgcggcaggtatttgatgctgaattggatgaagagagtatccgaccggtttaaccatgctgcaatctgtaccttgttgtacgatgtagccatagcgaagagagaaatctatgtttggtaaaggtggtttgggcaatttgatgaaacaggcccagcaaatgcaggacaaaatgcagaaaatgcaagaagagatcgccagtctggaagtaacgggggaatcgggagcaggtctggttaaagtgactatcaatggtgctcataattgccgtcgtgttgagatcgatccaagtctgatggaagatgacaaagagatgttggaagacctgattgctgccgcattcaatgacgcagcccgtcgtattgaagagactcagaaagagaaaatggcaggcatttccagtggtatgcaattgccaccaggctttaagatgccattctgatgcaaaccagtcctctccttgaatccttgatggaagcattacgctgtttaccaggggttggccctaagtctgcacagcggatggcttttcatctgctacagcgtaatcgcagtggtggaatgcgtttggcacaggcattgaccagagcaatgtcagaaattggacactgcaaatattgccggacttttaccgaacaagaacagtgcacaatttgtgctaatccacgccgtcaacaaaatggtcaaatctgtgtggttgaaagccctgcggatattcatgctattgaacaaaccgggcagtttgccgggcgttactttgtattgatggggcatttatccccattagatggcattggtccaatggatattggtttagatcgtcttgaggatcgtctcgccacggaagagatttccgaggtgattctggcgactaatccgacagtggagggagaggccactgccaattatatcgcagagatatgcgttcagtatggtgtaacagcaagccgtattgctcatggtgtgccggttggtggtgaacttgagatggtagatggtacgacattgtcccattcacttgctggtcggcagaagattacttattgattttacgttaatgttttacggttttatttaggttggaaaggaatggtgttgtaaccctgtgtaaatcaaatcgtaaagactttgaggcgctacatttatgtggcgcgtgtcgctatagcaaaaaatgttgtaaaccctagccagtcgtgttcgtcaaagcatccaaatggaggctccgaggaggcttagatatcgagtactgaattgaactcattattatcgtgccacaggagctatcagtagatcggcgtcatcaaccaatagggctggtttgttgtccataaccgacatcctggacatgtattatctgaagacggcggtttatctaaccgccgttaagaaaattatattgttgttttaatgtaatgattttccgaatattttagtttgattttgctaaaatttgtaagaaatcgttgctttatacgtacggcctttttcttcctgtccttgagtagtattcaggtagtaagaatgctcgttgtaacgtttatcaaagatattatctacgcccaacagtatttcggtatttttaaatgttcctgtttttggagaccaagcgatatatatatcacttacaccatatccagatttatgaacgtctacagcgctattaccacctttaccacctttgcctttggagtttttagataatacaaatcgggagttccagccggcttcaatatcagttttgtcaaacaaataactgccgccaactgtaattgaatcaccaagtgatggttcgaattcaagaccttctttaaataactcgttgcctttgacaattttgtcatttacttttgcataactagctcttaaacctagccccttaatacgataacctgtagataactcaaatccttccagccttgctttagggatgttatgcaattctctgttggctaaagttgttgacaggtttttgaaattggtttggaagactttccctgagatagttagcgtgtcgttgtcagtaaaaatggcagggtaagaaccaatcaatccagcttccaggttgtatcccgttgttgcttttaaattattactatgattagttaatcccagaccaatttctttacctaatggacctctaaataattcagtgtagttggtaaataatgttgttgattttcctagctcatattttaaaccgagtgcttttgagatatgtgaatagcttttctcaaaaggttgttcctttttattaacagtttgatatttatagtggtcccatctgatacccggtattacatggaagttgccaagctggacatcatcttctaagtagaaggaagatgcttttcctttttctatatcttttttgtttatgttttcttctacatcggtataagccattctggtatcaaaatattcatacccataggttaatgaatggaatagattctgtgtatcaaagttggatgtgttgcgaagtttaatgccttgcgtttttacaatagtatcgaagcctttcccatcaccgcttactggcttcatatgggtaaaggtttgttcagtatgatatgcggaaatttttagatcaattaaatcgttatcggttggagtgtaaccataagtgatattatgggtatcacggtctatttcatacctccctttctttccattatttatatcatgtccaaaatttaatctaaagttggtttctgcatcatttttataatgttcttttgataagctaatatactgttcatcggtaagattgaattttgtttttaatagataattgagtaatttcccatctgtaggaattgagtctcttcctcgtccatctctgccggattcagaatcgtgcatattacgatggttaacatatcctaataaatcaacagcacctagtttcccataggcggccagtgatttttggaattcagaaccattacttgaatagctcagtttactttttgctccaaataattgaccgggggttaataagtcatccgtgtctatagtctcaaattttagtgccccgccaattgcacctgtatcgtatgtgatactgttgctaccgatgttgatatcaacttgttttaataactcagggtctattccgtaattgcctgcgtggtggaagtgatatccctcttgtcttgcaccgtcgatagtaatgtttatgaattggtcatccataccacgaattttaaagcgctgacctaatccgctaggatgtccggcttgaacacctggaacattttttaatatttcaccgacactttgaggctgtctgacttttatttcattgctgctaatttttccatcatcttgtgcattgttgttagcaatcacaacaagagtatctcctgttttctcttctgcttgtttaatcgtcttatcatttgcattagagatggtatttgctggagctgcgtgagatagcatagatacagacatcaaagttacatataagcttggttttgctatgtgattgtaaatattgaataatttttccattattttttctctaaatgtatatgagaatcaatattatttacgtttcgcatgaaaatgtaaacaaatgaaaatataactacagtaaaaaaaacaaaagtgattattttgtgtgcgtgctaacgaaggaggagatgatttcaattctgatattctttccactctgagaaacgaggttttacggcccatcggataaaaaatattgttgatgagtggattaacgataaccggctgtccaaaggcgataattgaaagttactgcgaggcaacttgaaagattacgggtatagttattgtttagaaaacaccagacggtctgagcggtggcaaaggtggttttttgggtactggcgatatctttcatcaccggagcaagggaagcagttacttcattctgctatgatcaagaatgactttacattcttttggataatcaaacttgaaattcaacttatttatccccatctgcatattatcgtctgattttgtctgtctgaactggatttagattgaggtaataaatgagtatgaaaggtcaggaaacccgtggatttcaatctgaagtaaaacaacttctgcaattaatgatccattcactctattccaataaagagattttccttcgtgagctaatctcaaacgcttccgatgctgctgacaaattacgtttccgcgcattatctgttccaaaactttatgaaaatgatggtgaactacgcgttcgtctttcttttgataaagagaagagatgcatcacgattagtgataatggcattggtatgactcgtgatgaagtcatcgataatcttggaacaatcgctaaatcaggaacaaaagcttttctggaatctattggttcagatcaggctaaagacagccagttaattggtcagtttggtgttgggttttactctgcatttattgtgtctgataaagtcactgtacgtactcgtgctgccggcgcttcaattgatcagggcgtattttgggaatctgctggtgaaggtgattacacgattgccgatattgaaaaagaaacccgtggtacagagatcacccttcatttacgtgaaggagaagatgaattcctgaatgactggcgtttgcgttctgttatcagtaaatactctgaccatattgccttgccggttgaaattgaaaccaaaaataagagcgaagaagaaggtgaagaggatacagtaacttgggagaagattaataaagcccaagctttgtggactcgtggtaaatctgaaattacagatgaagagtacaaagagttctataaacatatttctcatgattttactgatccgctgatctggagccataaccgcgtagaaggtaagcaggaatatactagcatgctctatattccatctcaggctccgtgggatatgtggaaccgtgagcataagcatgggttgaaattgtatgtccagcgtgtgtttattatggatgatgcggaacagtttatgccgaactatttacgctttgtccgtggcttgattgactccaacgacttgccgctgaacgtttcccgtgaaattttacaagataactctattacccgtaatttacgtaatgcattgaccaaacgtgcattacagatgctggataaactggcgaaagatgatgcagaaaagtaccagcaattctggcaacagtttggtctggtcatgaaagaaggtccggcagaggatagcaccaacaaagaagctatcgctaaattgctacgttttgcttctactcataatgacagctcggcacaaaccgtttctctggaagagtatgttagtaggatgacggaaggtcaggataagatttactacatcaccgcagacagttatgctgcggcgaaaaacagtcctcatctggagttgttccgtaagaaaggtattgaagttctgttactgtcagagcgcattgatgaatggatgatgggatacctcactgattttgatggtaaaaaattccaatcagtcagtaaagctgatgaatccctggataaattggcagatgaaaataaagccgaacaggaagaaattgaaaagcagctagagccgtttgttgagcgtgtaaaaacattgcttggtgatcgcgtaaaagaggttaaattgactcaccgtctgactgatactccagcaattgtcacaacaaatgtggatgaaatgagcacgcagatggcgaaattgtttgctgcggctggtcaacaggtgccggacgttaagtacaattttgaactgaatcctgatcatcagttggtaaaactggctgctgatatcagtgatgaagttcaatttgcggattggattgaactgttgcttgatcaggcattgtttgctgagcgtggcacgttggaagacccaaatcagtttattcgccgtatgaatcagctattgttgtctgagaaagcttgatttaatcattttttggtgacgattagaaaccacgcctctgataatgagatggggcgtggtttatttttacagaaaaatatcacgaaatcgtttacctgtttccttgagcgaaccccatgctaaatggtatggtgactcgttttctcaaaatataaaaactaactagcaaggggatttacgcaatgcgtatcattctgctgggcgctccgggcgccggtaaagggactcaggcgcaatttatcgtggagaaatatgggatccctcaaatttctactggcgatatgttgcgttctgcggttaaggctggcacagaattgggtttaaaagcaaaagcgctgatggatcatggtaagctggttactgatgaactggttattgctttggtcaaagagcgcatcaaacaagatgactgccgcaatggtttcttgttggatgggttcccccgtactattccccaagctgatgcgatgaaagaagcgggcattaatgttgattatgttctggaattcgatgttcccgatgaactgattattgaacgtatcattgggcgccgtatacatgcgccatccggccgtgtttatcacatcaaatttaatccaccggtagtggaaaacaaggatgatgttacaggtgaagagctgacagttcgtaaagacgatcacgaagatatcgtgcgtaaacgtttagttgaataccatcagcagacagcacctttagtatcctactatcaaaaagaagcagaagcagattataccaaatattttggaattgatggtactcgtaaggtatctgagattagtgaagaattatctaaaattttggattaatcagcctgagtgattcttataaggcgactaataagtcgccttatcctatattatttatttactgtatcaggtaaattaatcgatttttcctcattgttttcgtagataaacatgattttcatctgtattttattatgttagggttttcactagcgaaataatgaaggatcgacataatgaacaacggtaaatttggtgttttattagttaatcttggcactcctgataaaccgacaactgcggctataagacgttatttagctgagtttcttagcgataaaagagtcatagatttatctcgatttatctggaagccaatattatatggttttgttttgcctttccgctcttcacgtgtagcaaagttataccagaaaatttggactgatgaaggttctcctctgttagtatatggccgtcggcaacagaaattactggcagaaagacttgctggcatccctgttgaactgggaatgaattacggttctccatctcttgaacaagcgattgacaacttacttaagcagaatgttgagcagctgattgttttaccactttatccccaatattctggttcctcatctgcggctgtatttgatggtgtcagtctggtattgcaaaaataccgcactattcctgggatgcactttattcgtagttatgctgatcatccggcttatatttctgcactgaaagaaactattgagcagagtttcgataagcatggtcaaccagacagattattgctttcctatcatggcattccgcagcgttttgttgatacgggtgatatttatgctgagcagtgtaagttaacaacacgattgctaaagcaagcaattaattatccgacagagcaggtaatgatggcttatcaatcacgttttggccgtgagcaatggctgacaccatacgtagatcaaacgatgaaaacgctacctaatcagggaataaaacatattcaggtactttgccctggtttttcgtctgattgtctggaaacgctggaagagataaaacagctaaataaagagatgtttcttaatgctggtggggaaaaatttgaatatattccggcgcttaacgacaatgctagtcatattttactacttgaagagttggtcaacgggtttgtcagaaatagggatgaatagtgataggattaatctatcattagggttcattggctttttaaggtatattgctacacggatgctagcctagtggaactgccatacttgtttcagagtaaatgggaattaacctataggctcgctcagtgggatgatgttttgtatatcaattagtaacagcatatttggatttggatataaataatgagtaataaaccgattaaaggcactaatttcagtgaagaatattttaattattacaattcaaaacaagatgatgaaattgatttgtttgagttattctctgttttatttcaatcaaagttattgattattactgttaccatcctttttgctgttattggctttgtagcagcatctttgatgccacaaaagtggagcagttcggcttctattgttaagcctcaacttgaagaaatacaaccacttaaagatatcctgactaagttagaggttttaaatctacaaccatcagtaacttcatcatcactgtataataattttttaaataattttaattcacgggttttgcgtgaagaatatctggttaatacagaatattttaaaaatctggtggctgaatcaggtgatcattcaccacttgtaaaaagaaaacttattgaaaagattgtgaatgataatatttcatcttcttcaaaagcggaaaaagatgatgaaaatggtgaaactaaattgactttcagtgctggaaccgcagaagatgcatataatctgttaaatggctatattgactatgtgtcgtctgttgtccatgaacaggtgaagagtgaattaagtgatatggtaaaacaaaagcttaattactctgaaggtttgtatagcgttgatttaaaccgtgtgaataatatacaggaagctaatgttgagcgattgaaacatgcattatctatcgctaattcggcaggaattaaaaagcctatttccagtgaaggggcaatgatcaaagacgatccagattattccattgctttgggggctgatgcattacagcgtaagttgcagattacagaggagataaaagatcccactttgattgatgctgacttacgtaaccgtttgttctatataaaagagctgaaagcacttaaagtagataaagttaacttccaaccatttagatatatgcaggctccttatgagccgacagcgaaagattcaccgaagcgtctacttatcttaataggcagtgctttccttgggctgatcttggctgtggtgtctgttctaattcgtcatatggtacgtagtcgtcagcaagcggcttaagttttccttggcagtaaatgtcgtagtgacatttgctgcctgtccgtttttattgtgctaatatgctgcaccttttggcgttatagcatcaatcaaaaatgaaattccctggtaaacgtaaatcaaaacactattttcccgtcagtctgcgtgatcctttactccagccaattaaagagatgatggatggtgagaataaccgagcttatatcgttggtatcgatcagacattagtggatattgaggcgaaagtagatgaagattttatccagcgctataacctcagccaggggcattcattagttattgaagatgatgtagctgaaaccctgtataaagaacttactgataataatcttattagccacgaatttgctggtggcactattggtaatactttacataattactcagttcttgccgatgatcgttccgtcttactgggcactatgtgtagtaatattcagattggcagttatgcttaccgctacttatgtaacacgtctagccgtactgatctgaactatttacagggagtgaatggggcaattggtcgctgttttacgttagtaacggaaaatggtgagcggacttttgccattagtcctgggcaaatgaatcaacttaaaccggaaagtattcctgagaagattattgctgaagcttctgctttggtattaactgcttacttgattcgttgtaaaccgggagaaccaatgccagaagcaaccatgaaagctatcgaatatgcgaaaaagcatagtgtacctgtggttctgacgctagggacgaaatatgttattgctgatgatccacaatggtggcgtgattttctggttgagaatatttctgttctggcaatgaatgaagatgaagcttatgagcttacgggtttcagtgatccactattggcttcggatgtggcactagattgggtcgatttagttttgtgtaccgcaggtccggctggattatatatggcaggttatacggaaaaagattatatgcgtcagacaacccatccattgttaccgggtgctattgctgagtttaaccgttatgagtttagccgtgctatgcgtaaatctgattgccaaattccgatgaaagtttattcccatattgaaccttatatggggggaccagaaaaaatcatgaatactaatggggcaggtgatggtgctttatctgctttgctgcatgatataacggccaacaatcaccacagaatgaatgtgcctaattccagtaaacatatgcgtacttatctaacatattcatcgcttgctcaggtatgtaaatatgccaacagagttagctatcaggtattgagtcagcattccccacgattaagccgtggtttacccgaaaaagaagatagtttggaagaatcttactgggaacggtaattttaaaatttcggcaccgtataaattaataaggtgccgaaatttagctataaaatcatttattaagattgtaaatgatagttagagtttattttattaatagcaatgatttttcgtctaatttataaaatgaaaagtattttattcttatttatatatctgtttaaataaattgaaataatattcaaaaatgtcctagaatagaatatttatatcactcagatagcaataatatgcaaataaaaatttctatttattttttgtatttaacttatattgttgttttttatataaaaatttcgcgtatcggcacatttctaatatagctatactctatggatttcaagatgcatcgcgacggcaagggaacgaatccccgggagcatagataacgatgtgactggggtgagtgcagccaacaaagaagcaacttgaaagataacgggtatagataccgctaaaatcacccatccgattcatactgatttgattatttacctaatttttctatttattataatagggattagctaaaggaagaatttggactaaaatcacaatttttaaaaatcttggaactgatttttcaattgttgattttactaattataatcaagatgattggctagagaatactcctttattagtaatatactgaaatgatattctttatatattgaaatgatatcgactatatatagaaatgatattagttatatatggattggggctgctatattctagaaatagccattgggttgatacggagtttcatatttttgtatagtattgatatgtggattagtattttttgatgctaattccgatagcgaagttttagctatgattgataacttagaaggatcatttagcgaaatagtttttgtttgctgtaattatttcaatttgtggcctatattaggacaggttttatgtatcttttattattgaattggagttattgagattattaacatttgaagaaaagatgaagctaatagctattaagtgaaagtaatggtatttaatgaccgtaacttattattgttaatttaaagagaggaaggagcatgatgaaattttttattaaaaatttcctattatatttcaaataattaattattatgtataacagccgctgaggatactatgaatagttactacgattatataagaattgccagtatggtgagtatggtcttaattatgccgggaccaacaaatactcttttagtatcatctggatattcacatggttttattagtacactcaggctgatattagctgaggcattgggttatataacagcaattagtttgtgggggttatttttatctacagtctctcatgttttcgtatggtcactggtcatcttaaagatgtgtgcttcgacatacattgcttatctggcttttaaagtttggcatttctcattagacaagaacgtagcaaaaatccattttatcacggtattatttgccacattgctgaatcctaaggcttttgtgtttgctacatatatatttcctcttactgcatttactttgtggtcagaatacattccatgcatgacggtttttgtttgtgcactattacccatttccctgatttgggtgggggttgggaaaatactatatgtaggaaagttgggaaaaggaattttaaaacccgatttgttttatcgttttgcttctttagtgttatgtgttttctctgtttcaatgttttacacgtcaatgaaaggtgttttatatctttgacgtaatcgattgtttgatattgcgccctcccgactgattggctttttcattaatagtctcattaagctaatcgtggttgaaggtagcttggattgtatagagtttccttgttgtagttgggtaaataccatgatcatgttaagtaacgctaaaaattcaatgtatggtatttacccttcctattaataaaaaaatatttacctcaataggttgctgaatcttgtcttgaatgggctaaggattaattgataatccgattgatttttgttgtacagaattgagtaaagcgatacttcaactgaacattttgtcccctctgagccgttcttatcactgatacttaagtgataagaacggctcatgatccttacttggtagggactagagaatgattcatcagcagtcgctttcctcaaagtgatggtgaaaaaggcgatgctggagggggttcaatcgaatagctttgctcactgttggcgaatacagttgccattgttttagcaatttcatgctcaccaataatgacgtggctagctccacgctctgtgatataggtaacttcatcgtcatagtcggctcggacgataatattaatatccgggcgtgcttctcttgcacaggcgacaatctcaccggcttcatagccattaggaatagtcagtaggagggagcaggcgcaatccaagcgagccagtgacataatatctttgctggcagcgttacccatgactgcactaataccttgttcaccgagttcctcaaatttggctcgggtgttctcaataacaaccagagggatctctttttcctgcaagcgttggcatagcaagctgccgacccgcccgtagccgacaacaatagtgtggccgcagatatcgacaggaatctgcgtctcttcttccaacgtttcttccagtaactgctcctcaatggtttctgttttttccagatagcgatctaacagactaaatagaactgggtttagcatgatagaaacaatcgcgccagccagaacaaggttacgggcatttccatcaagcaggccaagtgcaaccccaagaccggctagaataaaggcaaattcaccgatttgtgccagactgactgaaatcgtcaatgcggtccggcgtgagtggccgaacatcttaacgagtaacattgcagccgcggacttaccaataataatgattgccaacgttgccagtatcgatagtggttgttgaatgaggaccattgggtcgaacagcataccaacagaaacgaagaacaatacggcgaaagcatctctgagtggcagcgtatcttgggcggcacggtggcttagttctgattcgtttaataccataccggcgaagaacgcccctagtgcgaatgaggcatcaaacagagcaacggcaccgtaagcgatacccaaggcgataaccagtacggcaagggtaaatagctccctggagccggtactcgcggtttttgccaatacccacgggattagacggcggccaacaacaatcatcagcaagataaaagcgataactttgccgactgtcatggcaagttccataattagctgcccgatattggcttccttattaccaagaataccggcagctgcgggcagtaataccagagtcagtaccatcgccagatcttcgacaatcagccagccgatagctatttgacctcgttggctatcgatgagttggcgctcttctagcgctcgtaacagaacaacggtactggcggttgatagacagagaccaaagacgatgccgctaaataattcccaacccagtattgctgatagccctactccgagtagtgtcgcgaccagtatttgcgcaatagcgccggggatagcaatggattttacggctagcagatctttaagtgaaaaatgcagtccaacaccaaacatcaataagatgacaccaatttctgccagttcgggggccagtgatgcatcagcgacaaaaccaggagtgaaaggaccagcgaggactcccgcagtaaggtaaccaaccagcggtgagattttcaggcgttgtgccagcataccaagcagataagcgataaagaacccgccaacgagagtggtgataagtggtgtcgagtgctccattaagactccttcttgctgaggctagtaaatagcatagtgaagaggtaggtgtaactgtattttatagataattcgaggtaaattcgctaaaaaaatgaataaaacatcaaaaaatatggattgaaaggattaaattacccgtaacaggtatttgtgttgctctatttgaatatttatgaggtaaataagcactattcccacataaaaagtaaattttatgtggggttgtatggtgcttttcctagttcttatcttctatattaggtaataaagcggtaaatatgccaagtaacggcagaaaagcacaaatctgataaaccagttcaatacttgttctgtccgcaatatcaccaagtaccgctgcgccaatacctcccataccaaaagccagcccgaaaaacaggccggataccatcccggttttacctggaataagttcctgagcgtataccaggatcgcagagaatgcagatgccagaaccacaccaataatcactgatagaatacttgtccagtacagagaagcgtaaggcagagctaatgtaaaaggtgcaactccaaggatagatatccagataacatactttctgccgatcctgtcaccaagcggtccaccaataatggttcctgctgcaactgcgaataaaaaaataaacagatgaaactgggcgctttgtacggaaatgccaaatttgtgtattaagtaaaaagtataatagctactgatactggtgagataaaaatatttggaaaatattaagatgagcaaaataaccaaggaacctatcacggtttttcttgataaaactttaatggctgggccagttttggcttgatttttcttgatataattctgaacgttataccatttactgatctgtaacagcacaatgatacccagtaatgcggctagagagaaccagccaacgttgcctctgccatagggagcaataaacagagcggctagcaaaggcccaagggagctgccaaaattaccgccgacttgaaaaagagattgagctaatccgtggcgaccaccggatgccatacgcgctacgcgcgacgattccgggtggaatactgaagaacctgttccgattaatgccgatgctaatagaattaacgggaaattgttggcgtaggccagcagtaatagaccggataaggtgaaactcattccaacaggtaatgaataaggctgtggatgtttatcagtatagagacctaccagtggttgtaataaagaggcggtaatctgataggtcagggtaatcataccgatttgcacaaaacttaggttaaattctaattgtagtaaaggataaatcgccagaatcagcgattggatcatatcgttcaataagtgtgaaacactgattgccccaagaatagtaaaaacggtattcctggtttttttggggtgagatggaactatggtggtattactttgttcgctcatatttgctgccaacctgtcttaatcaatagtcagtatattggttattcgttgaattttaatacatattaggcagagagttgattttttactatcttggatatagttttatagtacactcgcgaagacgaaataaaacatgttctataccctatggatttcaagatgcatcgcggcggcaagggagtgaatccccgggagcatagcaaactatgtgaccggggtgagcgagtgcagccaacaaagaggcaacttgaaagatgacgggtataaatatctaataactgcataacatacataacctgtctcaagaaatgatcaatttatcccgccttgttagctttaaaagctgtttttgcatggcaattcactaaaaaaacatggagatataccatgaaactctcgttcaagacctcagcttgtgctttggttgtatctatagcactacttccagcaatcgcaaatgcatgggagaaagacaaaacctatgacattaccattttgcacaccaatgaccatcatggtcatttttggcataacgattatggtgagtatggcttagccgcgcaaaaaacggtagttgatgaaatccgtcaagaggtcgtgaaaaaaggggggagtgtgttactgctttccggcggagatataaataccggtgtaccagaatctgatttgcaaaatgccgagcctgattttaaaggtatgaatttggtgggctatgatgcaatggcgttgggtaaccatgagtttgataatcctctgtcaatactgcgtcaacaggaaaaatgggcaacttttccatttctggctgccaatatttaccagacaagcaccggcaaacgtttgttcaagccttataccattttcgataagcaaggtgtgaaaattgcagttattggcctgacgactgatgatacggcgaaaatcggtaacccggctaattttcctgatgttgaatttcgtcttcctgcgacagaagccaaaatggttgttgaagaattaaagagagatgaaaagccagatgtgattattgccgcaacccatatggggcactatgacaacggtaatcatggttctaatgcgccgggtgatgttgaaatggctcgcagtttgcctgcgggctatctggatatgattgtcggtggtcattcacaagatccggtctgtatgtccgcggaaaataaaaattataagcagattgattatgtgccaggaaccccatgttcgccagatcgtcagaacggtacctggattgttcaggctcatgagtggggtaaatatgttggtcgtgctgacttccagttccgtaatggtgaattgaagttgactcactatcagttgatccctattaacctcaaaaagaaagtgcagaaggaagatggttctactgaacgtacttactacactcatgaaattgcacaaaacccggatatgttaaagttgctgatgccttatcaagataaaggtgataaacagcttggtgtaaaagtggggtctgttgagggtaaattggaaggggatcgcagcaaagttcgttttgttcagactaatatggctcatgttgttctttctgccatgatggaacgcgcggacgctgattttgcgattatgagtggtggtggtattcgcgattcgattgaatcaggtgatatcacttataaagatgtgttgaaagtgcatccatttgccaacacattggtttacgttgatatgaaaggcaatgaagtcaaacaatatctggcggcgattgctaatatgaaagttgactctggtgcttatgcacagtttgtgaatgttagcctgattgctgatggtaaaagtgttaaagaggtaaaaatcggtgggaatccattagatccgcataaaacttaccgcatggcaatgcttgactttaatgctattggtggtgatggctatccacgtgttgataattatccaacctatgtcaacaccggttttgttgatgcagaagttttgaaagactatatcgagaagcattcaccactgaaagcggctgattatgagccaaagagtgaaattatttatcaataatccctgacagaatgataaatcgaaagggctgcaattttagcagccctttttgggtaataatttaagtttttgcaatatcagcaaagttgcctttcaccaacctacagagatcagccgacgccaattcaatatctaaccctcgtttaccaccagagacaaatatagttgagaactgttgcgcttggttatcaataaccgttggcaagtgttttttctgtcctagcggactgatcccgccgacgagataccctgttactttctgggcgatttggggatcagccatttctgcttttttgactttaaaaactttggcgaccttttttaagtccagctcacttgaaacgggggtgacggctaccaccaaatttttagcctcaccattaagtgcaaccagtaaggtcttgaatacttgcctggcatggagtcttaatttcctcactgcttcatcaccaaaattatgttcatttgtgtcgtgctcataggcatgaagagcgaagctaactttctgtttttctaacaaaatgatcgcaggtgtcataatttcattacatagggtaattttataattaaggataacggatgaaatggaacgatggaattgataatctgactatggctctgttgcttgtatacaaacaggtaatatcccgtacttaataagaacaacgaaaatgacagattattcctcatatgattggccaatattattatagcaatataggtaatattggcctttttttaatgctgtttttctgccagcatcttgggcaaattcccttcaccatacagatgcaaaacgccaacagcaacgaggtatcgaccggcaggtaatccccgtaaatgtttattccattgtttattacgttcagtcatcaatagttggtatatctctttactgaaagttgttggtagagcatgttcttgctgtttaggttgatagtccatccaccaactgatcatggtttgtaaagcacgggcatttgcgtgccaatgggttaatgtatcttctaatagtggcaggccgttattgggaatttgattaagtaaattaatttgtgattcagtaccttctagttcaataatcgtttttcctagagctttggctgcatttagtagctgataatcgataccgtattggggatgtaatccaaggttttgtgcttgtccagcttgtaaaattaaagcgatttgccatgagggcaatagattgaggaattcttcttgctgttggatttcattgcaacagtcctgaaagttctgatacatctcagaagataaacgttgttcgatacggtgatatgattgaaactcatcatgaaatggggagtctgcctgagtaatatctgcttccacgattaatgtatcggattgattaagctgttctatcaatatttctgaaagtgggaacatatttttcgtacccatatgaatactgcctaccagatgcaaatgtctatcacctgccagtgtaatatcgtgagcaggatagggataacggtggagggcattgattcctaatatattggtaaggtgtttaatcagtcgtcccatttgagctccggtttagcatttattctttaggctaactattttttcaggttaatattacaactgtatctctatccatttctattgaatgttcttttactactattcagtatacaaggagattttatttggccgctgtatttacttttctagttctttgaaaatgatataccctggctgcactcactcaccccggtcacatagttctctatgctcccggggattcgctcccttgccgtcgcgatgcaccttgaaatccatagggtataaactaggggtttgttatgtcagatatttatgagctggtaacattgattcctaaaggtcagatcacgttaccttggttcatccgtcaggtattgagtgttgataccggtagcacattggtatttgagttgcgtaatggtgaggttgttgtgactaatgtaagcgttgaatacgaagaccagttaattggggcattccttgacttgctgtctgccgacattcaggtcgggtaccatgtgagtgatttacctaaggaattggacgaggctatgcagcacaatacggggcacgttatcgatctgaatgaaaacattgtcggagatgtgatgatttgatgcagtaacgtggatggacattgctatatgaaaaagtgctggggtagaagtgtaaaatgcgatcatggatatgcatttttacgattcaccccaacatcattaaagcagacttatttctttagtgattcagaacttaggcttaaacctcagtaatcgattagcattactcactaccgtaattgaagagagcgccattgccgcacctgcgactaccggatctaacagggttccagtaaagggatagagcacaccagcggcgatcggaatccccaatgtgttgtagataaatgcgcctaataggttctgtttcatattgcgcagagtgcctttggatagctcaaccgcatcagccacgccatgtaaactatggcgcatcagcgttattgcggcggtttcaatggcgatatcactaccaccacccattgcaatgcctacatcagcttgcgctagggctggagcatcgttaataccatcccccaccatagcaaccttgcgacctgctgcttgcagtttctgaattacctcagctttgccatcaggcaatacacctgcaatcacttgatcaatacccgcttctttggcaatcgcattggcagtcactgggttatcaccggttaacatcactaaacggtagccttggtgatgtaatcgctgcaatgcagtcatagtatcttcacgcagtggatcgcgaatagatagcactgccgccgcttgacctcctgctgccagaagaaccggtgtgatgccttgttctgcctgttgagcgatcaacgattttaattcttgcgtatcaatttgattttgttctagccaagcttgattacctagcaacaaggttgtgccattcacttcaccgctgataccgagtccagccagagtacggaattgttcaacttgcggcaacgtcagccctttggctttggcaagaatggctttggctaatggatggttagaaccttgttccagtgcgccagcccaccgcaatacttcttgttcactgtacccattaaaagtatggatatcagtcacttgaggcataccctctgtcagcgtaccagttttatcgaaaacaagggtatccaaggtgctggcttgttgcagcgcatccgcgtctcgcaccagtaccccgaattctgctgcccggccgacaccagagataattgacataggggttgccaacccaagggcacagggacaggcaataatcaacacagtggtaataatgaccaatgaatacataatctgtggtgctggcccaacgaaataccaaatagcgccggcaatcagggcaatggcgacaacaacaggaacaaatacggcggaaattttatctgctaactgaccgatttcgggcttactactttgtgcctgacggaccagtttaataattcgagctaatgttgtctggctgccaaccgcggcggcagtaaacagcactgtaccgtcttgcaccgtcgtaccggcatgaatgttatcgcctttggttttttgctgtggaatcggctcaccggtgagcattgcctcatctatccaaacctcaccttgaatgatttcaccatcaacgggaacacgatcaccggttgtcagacgtaacgtcatgccgggtttgacatcagccagcggtatctctttttcgccatcttctgtcaccacacgggcagtcggtggtgtcagatccagcagacgctccagtgcttttgaagaacgctgacgggcacgttgttccagagcatgccccaggtttatcagaccaataatcatcgcgctggcttcataatagagatgacgggcttgtggtggaaaaatatctggccataggttgacactgatggagtaaagccaggctgcacccgttcccaatgccactaatgtgtccattgtcgcactgccgtttttcaggctttgccacgcattacgatagaagtgaccaccggcaaaaatcatcacggcaagcgtgataacgccaatagtcagccagatatgatggttttcaggtgtgagcatcatattatcgcccatcatgccccacaccattacgggaataccgacgactaaggctaatgctgactgccaacgaaaacggcgcatattagcgtcagaaacttgttgctggcgttcacgccgcttagtttcgtcctgaatcagttctgcgccatacccggctttttctactgctttaatcagtgcctctggtgaggcactgccggtaattaaagcgctgcgttcagcaagattcactctggcattttccacgccgtcaacaccttgtaatgctttctgaactttattcacgcaactggcgcaagtcatgccatccaacagcaactggatgctctcattgctgtcactcacaacggatacgtcagctttttcgaccggaacagaggaggttgccgctgccaaaggttccggtctgtttgaagcaggtaatgtcagcggctcagattttggggagttttgaccagaagcgagttttgcatggtaacccgcccgctcaacagcggcaatcaaggtatccgcatcggctttaccgtaaactttagctttttcggtattcacctctgcggcgataacaccatctacggcctccagcgctttacgtgtcgtacctgcacaatgcatgcaactcagtccagagagtgtcagttcaacatcgggttggctggcaatcatcgcatcgtaaccggctgcttgaatggtttcgattaatgattcagtagaggctttaccgatgattttggcataatcaattgtaatatccgcctgttccacatctgtacgatttgctagtgcctttttcacactgttaacacagtgcatacaggagagtccctgcaaggttaaaatagttgtgtatgacataaaaaactcctaacacatagtgatgtaattattcttcatacctgtgtgataattggtgatgaatatctacacagttcaagtgagtttctgacttgttggggaggttaaaccttccctcaagggtaaggtcaaggggaaaaaatgaacattagtgagattgcccaaaaaaccggtcttaccagcaaagctatccggttttatgaagaaaaggatctgattacaccgccggaaaggggggataacggctaccgttattatcagcagaaacatattgatgaactaacgctgttacgtcaggcaaaacaggtcggttttacgcttgatgaatgccgtgagtttttagtgttatttcgcaaccccaatcgtcatagtgctgatgtaaaagtggcaacattgcataaagtggctgaaatagaaaaggcgattgaagagttgcagaaaataagaagtaaattgttatccttagcggaagagtgccctggagatgacggggctgcatgccccatcatagatcatttatcgggttgttgctctcatcactgagaactgaccggttttactttcagggtaatgccatcaacagcgatcacttctacttcggtgtgggctggtagttcactattacagtgaactcgccagcttccatcagctagcttgacccggctgtaaccattttcagtatcggtagtcagtttggctcggataccgatgagctggtgctctttctggttcagggtatcgccgccttttgatgggcggcgacgtaaccagtagcgccatagcattgcagaaagcagcgtcagagtggcaaacaaaatgccttgccattcccaatctattcctggtagcagccaggtgacaaacgcaacaacgatagcggctatgcccgtccataacagatagccgccagttcccagaagctctgcaattaacagtaagccgccgaaagagaaccagagccaaggagtttgcgccgcaatctgtgcaatcatggttatttaccttttttgctttcgccaatcaattcagtaataccgccaatcgcacccattaggttgctcgcttccagaggcatcataatgactttgctgttaccggaagcgccaatactggtcagggcatccgtatatttctgggcaacaaagtagttaattgcctgcatgttaccgtcagcgatcgcatcggataccattttagttgcgcgagcttccgcttcggcggcacgttcacgtgcttctgcctggagaaatgccgattgacgttccccttctgctttcagaatttgagactgtttttctccttctgctttcagaatagccgcctgacggataccttctgcttccagaatatcagcacgttttgtacgttctgctttcatctgggcgttcatggcagagatcaactcttttggtggacgcacatcacggatttcaatacgggtaattttcaccccccatgggttagtggcttcatcaacaatatgtaataggcggctgttgatggaatcacgctgtgacagcatttcatccagttccattgaacccaaaacggtacggaagttggtcatcgtcagattgataatggatagttcaaggttgctgacttcataagcagctcgaacaggatcgacaacctgaataaagcagaccgcatcaatagtaacattggcgttatcgcgggaaatcacttcttgtgaaggaatatccaacacttgttccatcatgttaattttacggccaatgcgatcgataaaagggacgataatatgcaaacccggtaataaagttcgggtataacggccgaaacgttctaccgtccattgatagccttgtggcacggtttttacgcaagtaaagacaataaccaccgcaataaatatcagaatgggtacggcaccaaaagcgaataaatccatagcaattccttacaattaaataaatcagtaaagcagtgagtaaacttggcgacggtatttcgaagccaaggtattaccggtccccattgcagacataatatccatcattgttttccgtaccgccccgttggcagcagaaaggtccttttttaggaagctgagtaataattccagagcttcttcattacggctgacttcgtgcagtttcagcgcgagcttaacagctagctcggcattctccggttgaatggcgaattcttgctgcaattgttggatctctggtgtatccgccgcttgcttttgtaactcaatttgagccagtaaactgtgataattagtatcttgatcctgtaatggaataagattcagaatttcctgggcttcctctatattattgagcataatttgcactttggtcaacataagtgcaattgcactgtttttgggcgctaattgccaggcttctttcaataacggtagtgcttcctgatgttttccttcggcgataagttcttccgcctgagcggctttcaactcttccggcttcggtaatacgcgagtcagcatctctctgataacgttttcaggttgtggcccctgaaaaccatctacgggttgaccttgttgcataatataaaccgtaggaatggcgcgtaaaccaaattgtgcggcgaccatttgctctttatcgcaatccacttttgccaatatgaattgatccgcatattctgcggccagtttatccagtgttacgcttaattcttggcaatgggggctacgttcggaccagaaataaaataaaacaggtacagtcatagactgttcaacgatttgatggaggttgctttcgttaacattaattccaatagaggtcggtaacatataattagtctcttaaatttggttatcgcagggtacgattaaatagattgaggttattttcttaactttcaagttgtaccactttgtttgctcagtattttatccattactcttcctggtaaaatccggcgcataatagcgactgcatgggttacccaagtcactgggtaacgtaatttaggattcggactttccagagcatgaattagtttattcacaacggcttcgggagtcagggtaaagtgacgggcgatcctggggtttttgacaggtttatcgctttgcgtttgattcacgttttctgaaaaacgtgtttttatcgggccaggaacaatcaaacaggctttaattcctgtgccggctaattccattcttagcgcatctgaccatgcttccaaggcatatttactggcagagtaagcaccacggcctggggttgaaatcagtcccataactgaactggtttgaataatacggccttcaccatgaagttgcattgcgggaagtaataagcaggtaagttgatgtgtaccaaatagattagtagagaattgccgttccagttgttcacgactgatagtattgagtgggccataaataccaaagccgccattattaaacagcccgtaaagacggccattggttagcttgatgacctcggcggcggcacgttcaacactcattttgtcatcaagatccaattcgataggttccagtcctaattcgcgcatatgctgtaaatctgcgggtttccggcaggctgctaatactctgtagccccgctgatgtagtgttttggccgccaccagaccaattccactggaacagcctgtgataagaactgacttttgcataactttacctgcttatagacatcaatttgttgaaactaatagtttactacttaagaataattaagatgtgctgatagtgtgtcagacatccaatcggcgataaatggttgggctgccagattaggatgtaacccatcttgttgcacccactccggtttaatggcgacttgctccatataaaacgggagcaggggaatttgattatattctgccagtttggggtaaatcttggcaaaagactcggtataacggcgcccatagtttggtggtagacggatctgcatcaataaaggctgaatattagcttgtttcactaaagtaatgatctgttgtagatcttgttcggtgtgttgtggaggaaaaccgcgtaatccatcgttggcacccagctctatcagtacccaacggggtttatgttgtttaagtaattcaggtagccgctcaaggccctgagcggcggtgttgccgctgatgctgccgttgatgaccgtgattttattgccggatttttgccactttttttccatcaaagcaggccatgactgctcaataggcagatggtaaccggcactaaggctatcaccgagaatcagaagggtatcagccgcagtcgctctggcgctaaatagcaccatcagtaaaaggaaaagtaaatggtaacggggaatattcttgaagttcagcatctcagtaagcacgttggtcagggaggacataagatcactatattgcagggagttgagttggttgtcgagtcggcacagactatcgctttggtgggagagtcgggttcgggtaaatccacattgcttggcattattgccgggttagatgatggcagtgacggtgaggttcggctgctagggcataatttaagccagatgaatgaagagcagcgggcgcaactccgggctgaaagtgttggttttgtctttcagtcctttatgttaattccgacattaaacgcattagagaatgtccagcttcctgccttattacgtggtgagtctgaaaatagtagtaggaaacaggcggttgaattgcttgaacaactgggattggggaagcgtttgaaacatatgccagcacaactttctggcggtgaacaacagagagtggcattggcacgggcattcagcagtcaacccaaaattctgtttgctgatgagccaacaggtaatctggatcggcaaaccggtgatcgtattgctgatttactgttttctctgaatcgtgattatgccacaacattaattttggtcactcatgacagccagcttgcggcccgttgtcaacgttgcttgcggttggttgatggaaaattgagggaagaaagatgatttggcgttggttttggcgcgagtggcgcacaccttctttattgattgtctggttatctcttaccttggcggtagcttgtgtgctggccttaggaaggattagtgatcgcattgatcaaagtgttcattaccagagtcgggattttctggcgggtgatttagtcctgcgtgctgcttatccggtagatgaagaatggctacagcaggcgaaaaaacggggattaaaattaagtcgccaactctctttcaccacaatgacttatgctggggacattcctcaacttgcgaatgtaaaagccgcagacagtcattacccgttatatggtgaactggaaacccatccaccgggtttgaaagcggaaaaaggcacagtgctggttgcacctcgcttgcttgaattgttgaaaatcaaagttggcgataatctcgatgtgggtgataccacgcttaaggtgagtggagaattaattcaggaaccggacagtggtttcaatccctttcagattgcgccacggattttaatcaatcttgatgatgcgccatctaccggtgcgattcagccgggtagccgcctgacttatcgttatatgttttcgggtgataaagaagcagtttatcagtatcagcagctcattgatccccaacttaaagctgatcagcgctggtataccttgaaacaggacagcggggcgctggaaaaaacgattgaaagggcacagcaattcttgttgttatcggctttactgacattattactcgctgtcgccgcggtagcagtatcaatgactcactattgccgtagccgccatgatttgattgctgtgcttaaaacactgggtgcggggcgttgggcgttgcgtaaatgggtgattggtcaatggctggtgatattaattgcggcggcgctggtgggaacgcttctgggattgatgtttgaatatctgctcgtgcagattttggcccctatgttgccgaagaccttaccagtagcaggattctggccgtggatatgggcgttaggtgcgttatctgttatcgccttactggtgggaatacgtccgtataagcagttaatggcaacccaaccatcacgagtgctgcgtaatgatattatcgcgcctatctggccgttacgttattacttgccgttggcggtattggtggtcattagtgggctgagtctgttagttggcaccaagcccatgttatgggcgttacttgcaggcatgatgatggttgcgctattactggcggtgtttggttggggaggattgtggttattacgtcatttgaaacttcgccaactcagttttcgtctggcggttaatcgactactgcggcagccgtttcaaacagtagctcaattggcggctttttctttatcatttatgttatttgctttgttgctggtggtccggggagacttgcttgaccgttggcagcaccaattgccaccagatagtccaaactattttctgattaatatgactggacagcaaattccacaagtagaacatttgctggctcagtatcaggttaaacctacggcattctatccggtggtattggctcgcttgacggaaattaatggtcagtcagctatcgcgtgggcagaggccagaggatcggatagcaacacggtacagcgggaattgaacctgacatggaaagaggagttacccccgtttaataccttggtggaaggtcactggccgctaaagaaggatgaggtttctatcgagcaagggcttgctgagcgtttggcaatcaaaatcggcgataagctgacattcagtggtgatacgcagcaattcagtgccatcgttagcagtattcgactggtggattgggaaagtttgcggccaaatttcttgtttattttcccgaaacaagcattagaaaatcagcagcaaacttggttgaccagtttccattatgagggagagggtcgccttctgacggatcttaatcgtcagtttccgacgttgagcctacttgataccggcgtgatgattaagcaaattcagggtattttgcagcaggtaagtaaggcattggaagtcatggttggattggtcatggtttgtggcgcattactgctattggctcaggttcaggtagggatgcatcaacggcaacttgaattagtggtttatcgcaccttgggagccagtaaacagctactgcgtcgtacgctttggtatgaatttgctttgcttggattaatggcgggttttactgcggcattaggggctgaggttgcgctctggttattacagaccaaggtatttgattttccgtggcaaccagaatggcagatgtggctgttattaccaataatcagcagcttgttactttcattgtgtgggagtgggttggggcttcggttattacggggtacgggattacaccggcgagttcaggggtaaaagggcgatatttgcagacgtttagggaatgggtaatcgctcgtcgagatgtggagaatccattccctggcttattggcctattatcgttgtttatatccgtcatctttcaagttgcctctttgttggctgcatgttggctgcactctctcaccccggtcacatcgttatctatgctcccggggatttactcccttgccgtcgcgatgcatcttgaaatctattgggtatagataaattcagctctaagttgtggcaagattttctcgccgaaagtggtcaacccctgaacataatcagggaagatcaacataacgccgtccagttcgcattcacgcagcaaatctgataattgttggcggcacgtttccgggttgccgatagcggtgtgggtcataaaagcgttttgggatctttcaaccatcgcattgcttttttcgccaacatcgacgccaaaactgtgcatcatgcttttaactgcgtctatatccaagccatcacgatagaactcagccagcgttttagcttcttcatctgtttcagcgcaaataatcgtacacatacaaaaggttttggtggttgtgccgtattcggctgcaagacgtttagccatcagactgatttgtcgcgtttcttcctcatctttaccaccaatgaaacacacatcggtgttacgcacactaaaacgtagtccacattctgattgaccggcacagaccaaataagggcgcggaacggaaacaggtttaggttcagaaacacaattcttgaaattaaagtaatctccctgatgattaacctgcttctcactccaaagccgtttgatcaattgggtccactcttcggtcattgcgtaacgttgatcgtgatctaaattgttatcccattcccccatctgttcaaattcgtctttgaatgagccagagacaatattcagcccggcgcgcccatgactaatttgatccaatgtcgcaatcattttggctgtcacggcaggattatgcagcccggcgtgcatggttgcgataagccgagcatgatgagtcacttcggcaatacctgccatcatcgtaacggattccaacgaacagccccaatgttccgtttcgccaccaaagccacgccatttgctcattgacatgatgaaatccaaaccaatttgatcagccagaatagctgcttcacggttttgctgataagaagcatcgagtggtggtgtatttttggaaataatccatccacctttagctatgggtagaaatacaccgaattctttttttgccatgatgaattccttgtttgtctgtggtaaggaatatcttataggttcattttatttctaaattcagttaagtaatgtgctgttatcagaacatttcttcacgatttgtaacggtggttgcattatgaatgtgataatcagaatagttagcaccggtatggcgataatgagaaatgccggtgtaaaactacctgaataatctttaattgctcccaccagaaaaggggcgatacaggcggtagtagagatcagattcatcactgagaacagttccagataaggcgtgcgcccaaaataattgaacagtaaaatactggatgccagaaaagtcatgccataaccgatgccaatacacaacgtgaacaggattaaaaatgtccatgaagtggtggcactgagtgcgataaggccgcagataattatcgacagactaccgataagcaattttttgggatcgagccattcaccaacagcgcctcctgcaaatcgtgagaatgcattgataaaagccaagatactgagcgaggaggcggcaacagactcactgaacccgttttcagtaatatgggcgacagcgaagctattaacggttatcccacacagtaaaaaagaggtataagcggcggcaatggcataaaattgccaagtgtgcagtgcctgtcggacattccatatttccttggtgcgatagatactggtggggagctggtcttgttgatttttgctaattctttcagcgtgggcgttttcctttttaccttcgcgcataaataaaatggttaatagactaatcagggtgagtgatatcccggaaattgcccagtgcatacgccagttttcccaaaatacggttgccaggaaatagatccacggaccgaccacgcctcctaatcccccgatagtgaaatagataccaaaagccaacgactgctttttaaaaagtcggctaatgacataagtgccgggaaccgttgccataagactaaagccgatccctagtagggtggtaccggtaaaataggccgcgatactgtgggtgttatagaggatataaaaactggtgataaaggtaagcgtaccgataattaaggtagcgcggacgccggtacgacgaataaacatcgctggaaggtaactggacagcccacatgacaagcccagtaaagtgaaccccaaaccggcatccgtccaactccagtgtaattccttgatcatgctaggtaatacaacacctagcgaagtaaatgtggttgcggtgaccagaaaataaactaaacccaaaagtatcagtaggagccactgataagtacgtccgaactggtcatgttgagtgggcattttgactccatcaggataaaggccatcagaaaatttctgatattttattccgatatcagaaaaaactatatcgaataaagaccccataactaaattgatccgttcgataataaggggtatctcttattttgtatttattttttattgggttcaggacaatgccagtccataaatgaccgggttgattgccaaggcgttttcctaaatcatagtgcaattctggtttgaaatcgatagtttcaggttgcccatgcaaacctaaggtataatcaaaagtaccgacaacacggaaatcacctaaacggttattgaagggaattccgtagtcgatatggattcgctgatcattccagcttcctttggcattattctcaaaataaaaaattgtacgtaaccagctaatccaactagcttgccagtcgatactgataccggggaaatagtcgtaatctatacctttagttttggcaacccattgagcgaacagaatatcttttaccggcccaaaagagatgtcattaccagtgactttactcaagctcactctagggacaaatttataatagtaggtgcttttgtcaccttggtaatcactttgcagcgaattttgccaaatactatagacgtacatatcgccgatactgtagtcgccgaaagcctctaaaatcggtgaaatggtttttctgggatcgacccgattttcaaattgcatataaaggctggtatcaatcgattgaaaattaacaaaatgaccggcttgagcttgattgattgccgacagcaataatagcattaatagcattgcaggtaatccgcttttctttaatcgggtgccgatccaacgccaagtcattgccagataagcggtacaggaaaatgggaaagagggctttaaggtgaaaaaaagccgggggtagtttttcgtattatggatttttgtggcaagtaacacgaaggttccctttctcatacggtatcgggctggtggttgctaacattgatctaataagacggttttgtcaaagggatatttgattttattgatgaaaggtggagggagtagaaagataaaattattttaaccttggtgatttttcggtgttagtaatatgttgattatttaattaacgataggttgtttattcaactttgttttggttattgggaaaacattgttaattaatggttttatgaaaatatttgtgtaattatattttagttaacttaaatatataatttatttttcttaattaattctgatttttaatgaggaataaccatgataaataacaataataaatgggtgcctgttttggtataatcaaaaccattttcgactttaaataattattgctttgtttttaaaatatagagataaaatatcttttttaatatttattttgagtaattatctttcatggaataaaaatataataaatgtttaaaatgataattcgtttgatttatttataataaaaaagagattatgagttaaatgttgtaaattataattttttgtctgacaattttattgttatatgtttttaattaaataataaatattcaaagtaaagtgtttccataagttagaaaaataatctttgactctatttttgttcatgtttgataattgtcaatttaatagtaaaaaatcatccatttcacaaaaagcttgatataattaaaaattatagggtaaagtggttttttagctttataaatgtgttattaaaattttgatttaaattaagtatatatacccaatggatttcaagatggattgcgacggcaagggagcgaatcctcgggagcatagataacgatgtgaccggggtgagagagtgcagccaacaaagaggcaacttgaaagataacgggtataaaagatattttgtaaatatggggtaggaaaatgtggttaatagagctaataaaactttattaatgtaacaagggcatttctacttaatataaataaaagagggtgattatgtatactggaattgtgcaaggaaaagaaaaggtattatctcttgagaaaaaagagggatttagtacattgaccgtcagtaataataaccatttttttgatgatgtttctgtgggggctagtgttgcgattaatggtacgtgcttgactgtcacccaatttaaaaacgatatcgtctggtttgatatatcagattttacggctgatgtgaccacgttaaagtttttaaatgtgggggatgaagttaatattgaaagatcacatcaaatgaataaagagaatggtggtcatagtttatatggacatattgaaggcgcagcagaagttgttgattttattaaaacaggtgaaacttatcgattagtgattaatatccctggcgataatataaaatactttttccataaaggatttattgggctgcatggctgtagtttaacaataaatggtataaatgaagaagagaaaaccatagagttgaatttaattccagaaactttaagggcgactaatcttggtaatattaaagttaatgatttacttaattatgaaatagatcaaacaaccagaacgattgtagatacgatatccagatcgatgaatgctataccctatggatttcaagatgcatcgcgacggcaagggagtgaatccccgggagcataggtaactatgtgaccggggtgagtgagcgcagccaacaaagaggcaatttgaaagataacgggtataatagatcaatatgataattgaagtaatatagataagttaggataagttaggatgagttgaaatgtgaagcggtaagtcactttacttccgcttctacaattaattccaggcaattaaataacaaacatttgattattttaatgtccgtttgtcatatattccataataaatagttaacttgagttttgtttgaaatagtgaattaaagtaccttagatactatctgagtttttgatgataaccaaagtcgtagaaatcttcagattgattgtaagaagtctcgtaccatctcaatagcatttaaaaataatagattatctgaaggtaactcagttaaatttttgcgatctgaacatccaagattaacggaaatataaataatcaatattttgataaagggattatcattatgcgaatgcaagttaaaaactgatttaaatgaatggttttcataaagtaattgttgtaaatataatgttttctctttttttcttttctgatatttgattctttaggctcttctattaatgcattcggtaaagatttgcctgagaaaatatgggaagatgttttttgtagcttggtagaaatactataaatggtaatgactaactaataagacagagaaacagattgtggcaaagaaagaaaaacggcctcaccatgacggattatttaaatattttttaacgcagcctgaaacggccagagagtttctatccctttatttgcccgaagaaatccagtcgttgtgtgacttagccacattgaaactggagcccggcagttttgtggatgagcatttacgtcaactgcacagtgatgtgttgtactcggtcgaaacggcccggggacagggctatatctattgcctgattgaacatcagtccacccctgacccgttaatggcctggcggctgatgtattatgccatgttagccatggcggctcacctgaaaaaaggccatactgaactcccgttggtggcacctctgctgttttatcatggtgagattcggccgtatccttactcaaaccggtggctggattgtttcacgctccccgaacaggcggctcgcttataccgtcaggcgtttccgttggtggacgtcagtgtgctcagcgatgaagagatcctgacgcataaaggggtagccctgatggagctggtgcaaaaacatattcgctgccgggatatgcaggaatggctcctccaattggtggaactcttgaatgcagggtataatacaaccgagcagctcaatgtggtgttactctatattttactgaatggacatacgctggatctctcacactttgtccatcaactgattgaacaatctccggagcatgaaacgatgctgatgactattgcagaacagcttgaacaaaaagggcttgagcgaggtatcaagcaaggtattgagctaggtcgagaagaaggccgagaagaaggccgagaagaaggccgagaagaaggccgagaagaaggtaaagtggaaacggctcgcgccttattacagcatggcgtgagtttggacattattgttaccagtaccggactgagccgggataaaattgaaacgttaaagcattaaattaatcttctcttttacagcaaaatgccgatattcaaaatcggcatttttgttcttattcaggatgatggctatacaagggacttttacgtttgcccggcgaagctgaaaccggtcagactgaaacagcaatctccggagcatgaaacgatgttgatgactattgcagaacagcttgaacaaaaagggcttgagcgaggtatcaagcaaggtcgagaagaaggcattgaactaggccgagaggaaggtaaagtggaaacggctcgtgccttattacggcatggcgtgagtttggacattattgtcaccagtaccggattgagccgggataaaattgaaatgttaaagcattaaattcatcttctcttttacagcaaaatgccgatattcaaaatcggcatttttgttcttatttataagggagcgaaatgacaccttaagagcatggggaacgtgattaggtgagttgtttgcggaaacaaaatgacttgttctgtttcgtcaaaacctcaatgttcatacgcctgatgtgaccatttattattgattttggcatccgaacagagttcattataacttttaaaatagtagatcactcggagggaactcagtccaatttttgcaatctgatcaattgtcaataatctcaaaccactaaacggactgaattatgcctatcatagcgcctatatcccgcaatgaacgacgccagatgaaaaaaattatccatcagtactttctatcgttactgacataaatggggatcgtgtggcgaagggcagctccgacgcttaaattacccgatcccgagtaccatgaaaaaaatggcgaaaataattgagacgttgtcaatgtgttcagaaaaacatcccgttttttatgtccataaaagccgattggtcagtgattgactggcccgccatcctaaatttaacctattgtttttacacgcttattctccctggctgaataaaattgggcgtctgtggtaatccttgcatgaaacggtgacacgaaatcatggctgtcagtatatgtggcagttgtttgagaaagtgaaaacgtttttaaactcatatccctacaggaatagcagagaataaaaagagtcggtgtccatatcttcagaaatacgaacttttaacatggctgtattcatatgtgcctcgctgtctcttaatttgtatccttaacagtgagactattgcggacacaaatcaagagaacaagatcgataaataaccaatgttagtgttagataattagttaaattaatttttcctgcgcccattcaaggccactttgatattcgggtggcaacatggggataagtttctgcaatgtattttttaattcatttttatcaaagtgagaaagattaaggtgacccactttacgtgcggggcgaacttctttctcataccaatgtaaatgtaccaagggcaaactgagccattgggcattaatatctgtgccaatcaaattgatcataactgacggcgcggtgactactggtcgaggcatgggcaaatccagaatagcacgcagatgtaattcaaactggctgatagatgcgccgttctgagtccaatgaccgctgttgtgaacgcgtggtgcgagttcattaatcaataaattatcaccgacaataaaacattccattgccatcacgccgatatatttcaactcgtgcataatcgctgacaacatactctcggcctgttgttgtaaatggtgatgctgtaaatggtgatgctgtaaatggtaattttcttgaggagagacaatactggcacggagaatgccatcttgatgcaaattgtgtgctaaggggtagaacacacaatcgccatttttattgcgggcacctaccagtgaaacttcgccagaaaaaggaatggcttgttcagcaatacattcaccataaatatcggcgggtaattctgtttcatctccgggatgaatacgccattgccctcggccatcataaccacccatgcggcgcttaacgataacgaaattaccgagctcagagaataattgcggccattggttggtatcagagagtaattgccacggagccgttgccagtccaaggctatccattaactgtttttgcggtaaacggtcggccagacggggaaagatatctcgattagcgaaagccttatggcgggcaagttcctgagtaagagccgtttccggccagcgctcaatttcagcggtaatcacgctattctgataaggaaccgcttcgggttctgcatcgaggccaacaggataaaccgtgatacctaaaggctcaccagcttgacgtaacatgcggccgagctgaccattgcctaatacacaaactggcttcatgcttcctcccgcggatcgggattatcgagtacatcctgagtttgtgtttcacgccaatggctgaggcgtttcagtaaatctttattatgacgagccaaaatctgtgcagccagtagagctgcgtttgccgcgccagctttcccaatggcaagtgtgccgacaggaatcccttttggcatctgtacaatagagtaaagactgtctatcccatttagtgcagcactttgtacgggtacgccgagaaccggtaccagcgttttagcagccagcatgccgggtaaatgagcggcaccaccggcaccggcgataatgacatcaaaaccattttgctcagcttgctcggcaaaactgaatagtttatcgggtgtacggtgagcagaaacaatttcaacatgaaaaggtacattaagagaagtgaggatatcagccgcgtgctgcatagtcgtccaatcgcttttagaacccatgacaatggcgattttggcattgtgttgagctgttcctgctaaatcaggttgggcagtcataaatcaaatgctcctgtgttttaacgtccaccagaatgaaaataacgctttaaggccgcggatcatatcatgctcacaagctaaggaaaacgattgcgttactttatactttcgttgccatacctggatgtgggtgtttttgattaatcagaatgggaaagagataagatcaattgatttatccgttattttgaacatcgatccctgatgatgccatgcgccaagtacaccgcggtagacggttttatcatgcagaggaacttcatgtacaaaagggcggtgagtgtgcccatgaatcatccagtcagcttgataccgctcaaaagtgtcaataacagcttgctggtttacatccataatggcttcggattttctgcggttgaccgattggctgtttgctcgcatttttacggcaattttttgacggatagacagaggtaatagtagaaacagacgttggatccacggggtatgaacccgcttacgatatcgttgataaccttcgtcatcagtacacaaggtgtcgccatgtagaataagcactcgcttaccgtacagttccagtactttttcctgtgggagcaatatgatgccactctctttagcaaagcgtgaaccgagcagaaaatcacggttgccatgaataaagtaacagctaacaccttgttgttgtacagtttttaatgcgctagcgatttcacggtggagagggttgttatcatcatcgccaatccagtaatcgaacagatcgccgagaatatagaggctatctgcctgaatggcatcctcacgcaagaaacgcagaaaaccggcagtgattgccggttcatgttcgctgagatgtaaatctgcgataaaaagtgtacacatatgcagtgaattattcgctgacagtgactttttcgatgataacatcttcgagtggtacatcttggtgcataccgctgcgaccggtagaaacgcctttgattttatcaacaacatccataccttcgatcacttcggcaaagacgcagtaaccccaaccatcagggcgctcagagcggaagttcaggaaatcattatcaacaacattaatgaagaactgcgcagttgctgagtgtggatcgttagtacgggccattgccaaagtaccacggttgtttttcagaccgttattggcttcgtttttgatagctgcatcagtcggcttttgtttcataccaggttcgaatccaccaccctgaatcatgaaaccgttaataacacggtggaaaatagtattatcgtagaaactattgcggcagtagttcaagaaattctcaacagttacaggagctttatcagcgaaagtattaattacaatatcgccaaaattggtatggaaagtcaccataattgaaatcctaataatagttttgattaacccggttagggcatttggaccaggcggcttttatatcacatctaccataatgagtcagtacatattaatttcagtgagctatcttgatcaccaaccttgcaaagcgcttaatatcaggtttcaatatcctattggactatgccatatcgagcacttattgatgagataaggacataaatccagaattatcaattcgttatttttaacacacgtacagtgaatttacggaaaatctcgatgctaaaaattttcaataccctcagccgtcagaaagaagaatttaagccaatccatccagggaaagtagggatgtacgtgtgtggtatcacgatttatgacctgtgtcatattggtcacggcagaacctttgtttcttttgatgtggttgctcgttatctgcgctatctgggatatgatttaacttatgtacgtaatgtgaccgatgttgatgacaaaatcatcaagcgggcggcagaaaacagtgaaagttgtgatgatctgactggccgtatgttggcggaaatgtacaaagattttgatgcgctgaatatcttacgccctgatctggaaccacgtgcgacccggcatatccaggagattattgcgctgaccgaatcgttgataaaacgtggtcacgcctatgttgcagataatggcgacgtcatgttttccgtcgagagtgatcaggattacggattgctttcccgtcaagatctcagccaactacaagcaggagcgcgagtggaagtggctgatgttaagcgcaacccgatggatttcgtgttgtggaaaatgtccaagcctggggaaccaagttgggaatcgccgtggggggcgggccgtcctggctggcatattgaatgttctgccatgaacagtaaacagctaggtaatcattttgatattcatggtggtggtgctgatctgatgtttccgcatcatgaaaatgaaattgcacaatctacttgtgcccatgatggcccgtatgtgaattactggatgcattcagggatggtgatggtggataaagagaagatgtccaaatcgctgaacaacttctttactatccgtgatgtattggcatattacgatgcagagacggtacgttatttcttgttgtcaggccattaccgcagtcaacttaactatacagaagataacctaaagcaggctcgtaccgcacttgaacgattttatactgcgctgcgaggtacagatgcttctgtaccgccggccggtggtgaaatatttgaggcgcgtttcattgacgcaatgaatgatgatttcaatacgccagaggcttattcggtactgtttgatatggtacgtgaaatcaatcgtttaaaatcagaagatatggatgccgcgaatggcttagcggctgaattacgcaagctggcgggtattttaggtttgttgcaacaacagccggaacaattcctgcaccgtggtattcaggctgatgatgaagagattgcgaaaattgaagcgctgattaagcagcgtaatgatgcccgtaaaaataaagattggccgctggcagattctgctcgtaatcagttaaatgagatgggcattgaactggaagatgggccgcaagggacaagctggcgtcgtaagtaagcctgatagagtacaattgctttgataattaaggctcccttttagggagcctgatcctgattacattattatgacttctcaggtagttgcacacgaatattaattactcttccgtctggaatatcgcatggttcagcatcatggtaataaacgacttctcctgttgcagtcacgcttttgacacgcttattttgagcaaattctggagcgtctttattttgacgatggtaacattcgatggttatatcgccgctggttgtgtctaccgattcacgcacccaaatgagatttaacccgttgctgtctgccgggatgatagttccaccgtgaattccccacgcaccatctttggcaaaaccattgcagcctctgatacgatatttccctgtatctatacgcttaaccgtcactccttcagcttcgctggttaactcgtaagttccgtctggatgaatatctacaactgggctggatactctgagaatgccgttagcgtcggagcgggcgtttttatctgtccaaagtcggctaacttttgtgtttccacctccatcatttccgtggataaagctaataccggcatagtcataatgcgcgacaaatcctgcccatatgtcatgcattcttgttatatagccgcccgaccacgcatatccaataccactatcattccctgaaaatctgaatgcatgaccaccctgcggcaatgattttatccatgcggtaagatcacttatattcgcttgattaatatactttggctggataaattcagatccttcggattttgcatatgccccgatatccgccggcgttggtttgtttttcgttgtataaatatcagtccaatcttcttcaaagccataattatcacgagcagagcgataagcaatcccgccgtttctgtactgtactttcaactgaaaagctgggcagcttcctgcgccattattgaaatgagcgatatgctgagaatctattccaggtctcagcaagtcatataacccggtgtctgcattccaagggactggattattaacagagtatccgcctgctaatccgagtctaaatgccccaacatccgctgccgttggtttattttttgttgtataaatatcagtccaatcttcctcaaaaccataattatcacgggcggagcgataagcaatcccgctgtttttgtactgcactttcaattgaaaagctgggcagcttccaacgccattattgaaatgagcgatatgctgagaatctattccaggtctcagcaaatcatataacccggtatttgcattccaggggacttgattactaacagtgttgtttcctgttaatccaagcctaaatgcccccacatctccagcgttcaggctgatatccccggttaacgctttcccattaatttttctactattcggtaccgcatttttagctaaattggcggtttctgctaagccgagatttttcacaaacgcatttttatcaggaatgtctgcgccattttggttttttgctaatctgttgttagcattatcatttacatcagaaacaagtttttgagtgaccgcaagtgaattactgttgcctgttttatctgtgagttgaacaattcctttctgagttagtgaagcacttggaatttctgtcgcgatctttttttctaaggctttatttaactgagtagtgagtttgactatatccccatcatccagaacatcatcgccatattgtgtcgcgataaaattagctattgtagacgatattgctgaagattgacgtaataccttattgagtaaatgagtggtaatattctctggtggaaatccagtctttaaagccgagcttgtttcatacccttcttggctgactacgttagcattattactaatagaaaaagctttaaaatcattcttgggactcatatactttcctcaaattaaataatactattttataattaacatattgaattattgtaaaaataactcccgccaactcatgccgatcatagtctagttaggaatgagaataatggaatattcttatatcttataagattaattatttttgtatggttgatggcagtaaataactagaaattttttaaccaaaaacatattaaagctatttgtatttaatatatgaaatttatacttatatttcttcctgcggtgtttgtcagacgtacggtatatttttttgtttttagcgattgatcagattattcaaaacggattgacttatattaagcggcctactatgtgacgtggttatttagtaatagaaaacatattacatttgttctgagtaatatgttttctatatcatgacgctctgttttatgcctatttctataacttcatattgccaagaattaaagttacagtaataatggataataacgttgtccatgtaataatagatgccattgcctcatgatcaccacccatttgtttagctaatatataagcattgccggcacaaggcactgcggaatatagaatagcgatgtttgcggaagcgcctgatacacctaaatattttattatcaatatggtgatgagtggcattaaaaccaacttaagtatagtcgcataagaaatcgaaagtatcttttttatatgcatgctgatgatcaatccagctcctacggacattaagcttaatggtgtagctgcgttcgataagtaaataaaaagttgtctgattgggccggtaatatgaatgttaaagtagtttagcaatactccaataattgcaccaataattagcgggtttttagctaaagcaaggatagcaccacccagatttttcttacttccgtgaccataatgattcattacgagtacgctcataatattggtaataattatcatataggccacaaaaaatccggataatgcaactccctcactgccgaatagtgattgtgaaagtgctataaaaacatatgaattatatctaactcctccttggaaaatggatgtaaatagatctggtgtagtgttaaataaaaatctaccgatgaaaataataatagcgattattattgttgaacttatggttgatacgattggatagaagttgtcagaaccagagaaattagcctcactaatatctaatattaataagcaaggaaaaaaaagatagtaaacaaacttatctgaaaaattccagaaactagaaacgtcctttatatatattttagataggaagccaagagtaattagcaagaatataggtagaattgaaaagaaaacatttaacatctggtggtccttttagatagaaaaaactctatgctctatttgatttaaatatcgatgattccaaaggttaggtgagataaatacgcgttgtaaccaccgtaatggtgttcctatattatcaaatgttggggtaaatttatctcttgaatgcaaagttagccggttgtctatatagactaaatcccctgggataatacatattcctactgcatttcttttaactgaagcgtagaatttttctagagcaatttcagctttagctgtacttgctgttatcataccgggataaaatacagcactgatgttgggtaatatgtggttttctgctatgagagggacaggatgcgtttcttcttttccaactaatgtggattgtcgccagcgataaggtaattttatgctgtataatggtgaagataatgtttctatatcatctttctttaattgagcaatagataagcgtgaatcagagatgcgtgttaaagggccgccaggatcatgcctgacacctgtaagtaataaacccaatggtgaaatattatattgttctaaatgttttagggctgcgttttcaatatgaaagtcaagttcgacatcaaatcctagaccggtatattcatttttcgactcatgagttggaatgagattgttgatgagttccttaccttcaaaaagcattgaatagggttcaccaatgagtgaggctatgcccgttaaaagattttcactaatattccctgattttgctgagggggtgtattggtttggcgatggagagaaaaagatttcacaatcggttggaacattctttaatataatatatggtctagggtttatagatgttcgttgtttatttagggctgatattactcttgtaggtaaaaaagacatcatggcggatttaactaaatgaatatataaatcactaccggtaggatcgtaatcaattttatttaatgctaaaaagagatcctgtttttcttgcatggttaatttaaatatattttggtaatccatttatattctctttgaaaaataataatgttagttaaccctaaaagtaggagtatattacatatattattcttctttaaaaccaaaattaacggatagtgtgattttaatcacccaaaataaaatgattatatctgatttttttaaatcttaagatgtgataaaaatcacctttttaataggtgatgatcactgtagctagatagtctaaagattaagtgcaatgtattaatggaaaaataaattaatttatctctataactataattgacaaaaactataaaaatcatgtgcttgaattaatgcctctatattaaatgggctgacatgactacaattatatgttaattgtttcattaaataagaatgctaagactcttcttataaaaacacctatacaattttatgagaattcaataagtatttatacccaatagatttcaagatgcatcgcaacggcaagggagcgaatccccgggagcatagataacgatgtgaccggggtgagagagtgcagccaacaaagaggcaacttgaaagatgacggatatattataattattctatgcttcatctggaataaagagaccgctcttgaaggattattacttcattttattaatattttagtggttatttgttttaattacagtcattccaatatcttcaaatttcttgatgtgattattgataatgataatgataatgatgatgagttatctggtttatgagcagtgataataatgagcagattccagcagccattgcctcacatctgagctgtctagattagtggaacggtaggatagtactgataaaatcagctaatgatactgctaattaggcttatttcttctgtatcggaataggcatgattttgagatcatgcgcgatactaaattctgcttcggttttttcccgcagagtctctaatgtgacatttggcgcatgttctttcagaattaactggccttgttcaaagcagaagacgcctaattcagtgacaatcatgttgactttgttgatggcggtaagtggcagagtacactgcttgaggatttttgctgaaccgtctttggtgcaatgttccattgcaatgatgaccttgcgcgcgccagtgacaagatccattgctcctcccataccaaggaccattttccccggtaccatccaactggctagattggcgtgttgatcaacttgcagaccgcccagaacacaggtatttacgtgaccacctcggatcaaagcaaaagagagggcactgtcaaatatggcagcgccgggcaggataccgcaaggttttccgccagcgttgaccagattgggatgtacttctgtaatcggtccaaggcccagtatgccgttttctgactggagagtaatatgaatattatcaggcagatagttcgggacttgcgtgggaatgccgatgccaagattgatcacgtcgccatcttgtagttcgagagcaacacggtgggcaatgacttgttgagtattcattattagttttctcctggataaacgatgtagtcgatcaatgcgccgggtgttataacgcagtccggtgtaatctcaccgacttcaaccaacctgtccggttcggcaagtgtgatgtccgctgccaaggcgatcactgggttaaaatttcgggcgcttaactgataggtcagattaccgtggtaatcggcaagatgagcctgaatcaacgcgagatcggcgcgtagcgggagttccaacaaatagtctgttccattgagggtgattttttgtttcccattttcgacaatagtacccactccggttggggttagaaatccgcccagaccggctcctccgcagcgaatacgttcgatcaacgtacccaaaggaaccagttctacttctatttctccagcaagcattttgcgtccggtttccgggttagtgccaatatgtgaggtgataacttttttcaccctgttattaaccacaagggggccaatgccggtgtcgatacggccagtatcattaacaatcaaggtcagattttttacaccggagttcagcaatgcggtaaccaagtgaggaggtgtacctacgcctataaaaccgccagccataatggtcatgccgtcataaaaatgctccatagcttgctgtgtgctaatgagtttatttttcatatcgattccttatataggatatatggatataggcgcatatcagtaaagcggttggttgctgtgatcaaacgaatgtcggttttaatggtgtggctgccaccaggacattcgaactctttttcatggctgaacaactcgttttcgggtaaggactccggtaaagccccacagttaattttgatgaacggtcctttagcccgcggactattataatgaatggctttagcgattagccctttaccggtaccactttcaccagtaattaatactctggcgtggctacgggcaattttcgcgctgtcacagcacaacgccatcattttgaggctgttagttaagatccgatcccaaccgtagttgtcggatgaggcacggcgtcgttgattgacttcctgcttcatcaattagcctccgagaaatctcgctgttcaggatatagagggaaaggcgctgattgggagtatagaaagcgttaccgaatgggagcaagggggaaaatgggtaagtgtgaggggcttctaatgggtttggttcactttagccttataggtgtatggcgtagggatgatctgttaataccgggaggcacagcattgtattcaatgccgtgctttgaatacattcactaagataattttagatgagggtttctaagagaaatagttatcgttccgacctgattaccgttgcggatatcttttccataattaaaatcaaaatatttcatctgatctccggtttctactacctttccgttaatcgctgtgaaatttttacgtagcaatgtattgaggccataagcattagcatcttttggtgcaacatcaatgacaacttttcctgtattctcttttccttcagccatgaaattgaatacacctttagggtagttttctctgtgaatatttaatggaaagtggatgccatctatagagttgagatttaatgaagttgctccggcttttagagtgaaatttgtgtcgaataaaggttgacctttttcatctaaatcagtttttattcttaatttttgagaagttatggacatctgtgcattatcttgtaagataatattgctattatatatatcgataaaatgacttttaagcatagcgttagagtattctgtgataaagaaatcacaatttagtgaaatattagtttttagcacttcattattttcttgtgttttttctacagtccccacaacctctacagtaagctggctttttcctgacatagccactgttgattcttttaattttgtatttatgtggttgctaattcttacaataccagcattttctattttgaaggtacttgagttttgtagttcaattctatgtccatgtttgcctgaaatttcacgattaagataaaagttaacaggtttttctttttttccagatattatgagatttcctgatgatatttttattgtttttgataaagttttattgcccggattatctttggcagtctgtagtggactaagaataggccacttaatatcatagtcgctagggcgatcatttttatcaaaagacagtgttaatgtattttctccagcatccattgtgaaggtggtgccaatttctttattaaatgagtatattggaggaatagttttgttatcatactcttcagtgtatgtttgatctcgatccggataccaaataaaagagttttcagatttttcgttcatttttagcccttagtattgatttttcataattaaaatttgtttaacataaatatagttcaaaataagtggatttcaagatactttcaatctattttattgtggttttgttactggtgaatggagcctgatatcagtatttttcgttgtttttggtaaaaaactttcaatggtttataccctatggatttcaagatgctttgcgacggcaagggaacgaatccctgggagtatagataacgatgtgaccggggtgagagagtgcagccaacaaagcagcaatttgaaagatgaagggtataaatcataaccctgtaagggaatagtttattactatttgctaaccgaataatgctgtgtaaatgcagatttactcggacataattggtgaagaaaattacttaagttgataaacaattctttgtggttgagaaaataatgataggtgaaaatcctgtgtcgggatggatgtgtttggcgggttattaatgtaactggttacaatatgaagacgatattaatttcaatatgagaattttactctctgtgaatggcgttttttcgctatattttaattgtcatgaagttgtatgattttttataaaaattaaaattagcaatcttataatttcttaattgcagaacaaaggtgtgctttctattgggtatggacaattaagatagctgattgaactaatcggtttgcctatatgtgattcagggtgagatctcacatttttaataaggtcattttggttaaataaaaatcagaatatgattttttataggcatttctctcattaaaacgttaagatctccctcttccataaaaagcgatcctaataatgagtatttttaattttatcagcaagatagaagacccccgttctgacatcaataaaaaacatgagttaatggatgtgatttttttagccttctccgctgtattatgcggcgcttctggctggaaatcgattcaggaatttggtgagttacagagcgagtggcttaaacaatacacgcattttactcacggtattcctcgtcgtcactgtattgctaatattatcaaaatgatagagcaagatgcactggttgaagccttttatgcctggatcaaccagcgtcgggtcagggcaggaaaaagtcttatcgccattgatggaaaaaccctgagaggaacctgtaaggggacattatttgaagccctgcatgtggtcagtgcttatgatgttgaatccggtgtagccctataccatcaggcagccgaaagcaaaggtcaggaaggcccggttgccagacaattgattgaattactggcgcttgatggcgcgattgtcactatggatgccctgcattgccagaaagaaacccttgcgttaattactcagcgcggtggtgattttattgtgggtctcaaaggcaatcaaaagaccctccatgaatgggtcaaatcgtattttgcttcgcattatgagagtgatgagcttgttgaatttacgcagaaaaatagcggtcatggacggacagaatttcggcatgtcatgcaaattcgtgccgtattaccggaggtccttcggcggcaatggccttcaatacaaagtgttattgaagtcgtcagtgaacgaagcgtaaaaggtcagcctccccatcgtaattcacgctggtatgtcagctcgctaccgttggaggcggaaatcgtggctaaggcaataagaaagcacgggtcggtggaaaacgagctgcattgggtattagatgtcacttttcgagaagatgctatctcactcaaagatcctgatggggctgcacaaatggcgctttttaaccgaattgcattaagtgtgattaaacagaataccagcataaaagacagtcaggcagctaaacgtcgaagagccatttggtcaggggaattccgtagtcaacttatctttgattaaattaaatacaaagtggaatcccgccctgatatgtgatttaaatctcaaaaaagaaaatttctaattcccgtgtgcttcattatcgattgtcaaatgaagtgattctccgaaggggattttattagggaaatatatgctgaatattataatgcattgtaaatactgcaataatcgtaaaattaattgtgaatacacctgagtgtgatgattttaggatggttaattctcttatgaaataataataagcatgagcatgatattattctgtcttatattgtttattggtcctcagagaggaataattaactgattttgttttttgatgtaaattattttgtggtttttgatattttggtgtgaaaatgggtaagaggtcatgaaataattttaaaatttagtggaaaggcgtagaactttggctatatttaattaacaacgtaacatgatgaataaaaatggtaatgctttagtgggatagaagagaaagtttattactagaaataaaattaaaattcaaggaggtgctcagagattagttcatcgatttaattaattttgaatttatattgtgtttttgaatgcaaagattggtgttattcaaaatcttattataccttttaatttattaataatataggtgaatgaaatgagtgaaatgaatgaaatgaaagtaaaaatagagaaattagaaagcatgcttgatgcatcagtgcgaacagttattactgcggtcaagaatgatctaagtagtagtttaaaagtaactgttggacctttacctcaaacaccagagttaattccctcagcgtctgagcaatccagatatacaataattcctccggtaggtcctactacatatcaggataaggtacttaaattcactactgtggtacaaagtcaagctctgcttaagaagatttgggtgttccaagattcaagagatccgctacttacaattaagtattgggttggtgaacaatttaactacgatgatgcaaatccggttagggtttctgctgagggtggtggaaataagtttatgataattaatgaagacagtgatgggatagcaggaattgctgttacaatgtactagtttatgattttgcattttatagattgactatgttttagctaattgaaagctggttgtaaactcaaattattttttgaaaaattataaattaaacgagatataatttggaaggaccgtttttaatttaaggctacactttggtgtagcctttcttattttaatgtaattgtgttttttctgatgttggaagtaatgacgtgtgattttatcgaattagcttaaaacctctctatgaggaggttgtcgtaaaaggccaccatttcttgctaagagtgaaaataaatccacagcgatttattatcttttatttgtactattagtctctaatatcagggcagttgccattgataagttatatgttatgacatgcaaggtaaattccactctgacagctggtaagcctttatgctaaaaatgctctagttcttggatagcgtaatgtagaaaatacagctcctcctgattggtgttatgctctgagtgatattgttgtagtgataacttgcttaccctgacgtattgcaattttataacttatattaaaagagtttttatctgctattttgccattgatagcgatgagctctttgctgaatattttatcacttagattggtctccttagaatctggatttgaaatgtcaattataattttccctttattttttccttctgtagtaatgaaattaaataaaccttttggatattctatattgtcaagattaataggataattgattcctgtaagagatgataagtttaatataggagttccagatctgagattgaactttgttttggttttgtctatgttattttttggtactataccatcattaattagtgttacttttgaattatcttgtatatttatattacagtaattaatatttccatctcctaagaagattttattgctttcaaaagtaagctcagatgatccatgcagagaaatatcactagctaaaaaaataaaggcaggagctttaggctgtatttttgttttttgtattattttaaatttactgtttcctgacatagtcagttttggtggcttaagttcgtttgaaataacataatctatgaaaaaaaatacagttcctggatttattatgtttaatattcctgaatctttaaagtcaaaactagtactttcagcacaacctaagtaaataactgtattatttctatcttccgattgataacttacttctaatgtccctgaggatataatgaactgcattccttttccgctgtcagtcattgttccatcattgttacgtttaaactctggccaatatataggtattttattagagtcattttgtaacgttaatgtttcaccttcagcattcattataaaattagcaccacctaatttatcgaacggatagggttgtgcttgttgatcagtcggtgtgaaagtaatgacttgagttccataatctttagtgaattcctgagaatttttagggtcccatttaaaagctgcgctcatttttaattcctcataaaattaaattttttcataattaaggagtggttgaaataagtgtagttcaaaacggatgaatttcaaggtaatgaataactcatattcatattttattgatttatttctcattaaaaaagttaaattttagtgaatggtttagttacttttactgttaatgagtttgtttaaagaataatatttttgtaattaggttattgtttaatactggaatgaattattatgacttttaaatttattctaaagattaaatcgaattaatggttgctttcagtaataattaataagaatgacattttatctttgaacctaaatgttaagcacaattaactttaatattttattcttcgaatggtttagttttatatattgaattatttaaattttataatgtgttgatttgattgaaattaaatttatctattgttttttctgtaattatccatattcaccatataattaacatttaattaaattcatatttaaatcattggcatcttgcagggtaaataatatcattctaatgataactatttgaaattactagattcactaaagaatattgattatattattttattcagaaattaaatattatttaagaaagatatttacgtacctaaaatagccatgagaattaatttcaattagctaataccattatacgataattgaatgattcttaaaggatatacccaatagatttcaagatgcatcgcgacggtaagggagcgaatccccaggagcatagataactatgtgactggggtgagtgagtgcagccaacaaagaagcaacttgaaagatgacgggtatattttgaataaattgcttaaataaagcactgaccaatacttgaatagcgttggattgggtgttttttatccattattgggtagtgttacgtgcaatttaagttcaaaaaacgttcgcgcccttgccctgatatgtgatttaaatttcaaaaaagaaaatttctgatttccatgtgttttattattgattgccaaatgacgggtctctttgatagggattttatattgaatactataatgcattataaataacgtttcataattctgctacacatagccttcttcaactcattgttatacatagaattattggtggtatcagatgtagcactattttggaatcttatttattattctgttttatgttgtttattggtgttaaaagaagaatgattcactgaatttaatttttttaataaatgattttatgggtttttagtatttcaatatgaagatggataagatgtcataaaataattttaaaatttagtggcaaggaatagaactttggctatatttaattaacaacgtaatatgatgaataaaaatagtcatgctttcgtcgaatagaagataaagtttactaccagcaatctatttcaatcttgaggaggtacttagaggattagtttatcaaattaattaattttggatttgtattgtgtttttgaatgcaaagattaaatttattcaaaatctttttatggtttttgtttaatttactaataacataggtgaatgaaatgcaagaaaaaatagtagaattagaaaaactcattgattcacaagtttctacatatgtttatgtactcagtaattacataggtgacatgtgtgatataaacttatctggaggaaatttgcagactgattatatgatcaaggcagatggtgatttgactgatgtacttgtacacgttccagtgataggcccgcatagcgttattaagccactaaggctccatgttatgacacaattttgggattatgttggagttatttgggtgttccaagatgcaaggacttctgacggcataattaaatattatccaggtgataatcctaattataaagcttcaagagcggcggaaggtaataatagtggtggaggatataaacgtttgaaggttatatgtacaacgccaggagatctgaattccgttagaataagattgttctagcgaaaaagaaaaatagacttgttttaaagttggaatttccacagattaattttattcttgatgtattataaactggttgtaaattagaataatcttttgcaatgttataaatgaaaagatataggattttttggctagtttgccggtttttaattttaggtttaaggctacatttttatgtggccttcattttttattttaatattaaggtgttgtttgttttgtttgatattaaagaaatgatgtgtaactcgctaaatatttataatattaatgtgtttttatgagcatataattgttttttataaacattttgaccattttaagcagtgattgaatataacaaagcagagtatttctgatgactgttttgtgaagcaatagctcgatctttttcagttttattaattcatgtctaaatatgctatataagtataaaactgtcattccgcagctatatctgtaatatactgatttcaaattgtttgtataaaattcatatgcttgttaattcttaattaaaacaacaaattacgaattcagtgcggaatgtcggttctatagtctatcatgatgaaataacgacttgatggtgcgttaccttattcgatatcgtaccacaaagagtaaaattaatttttaagtgatattgttacagtggcaatttcatgagcattgataaattcatttccataactgacgttaaagtatttttgatctgctatttgaccattgaggtatatgagttttttattaaatatcttgtttgtgaaagtattaaagtcttcctttagacccggttttgcgaaatgaattgtaacttttcctccattattaccttctgtagtaatgaaattaaatagaccttctggatattttacgttgcaagatagagagggaagtggataccgtcaaaagatttcaagtttagtgaaggagaacctgctttaagcttgaaccatgtcttgtttttttctatgtcatttttttgcattataccattgttaatcaaggtcactgtcgatttatcttgtatgcttatattacagtaattaaagtttccatctccaaggtagagattactactttcaaaagtgagcttagatgattcacttagagaaatttcactggctagaaatataaaagcgggaacatcatcttctatttttgttgtttgttttatttcgaatctgctgtttcctgacatgatgagttttggcggtttattggaaacgacataatctataaacataaatacagttcctggatttttgatgcttaaggagcctgaatttttaagaataaaattagtgctttcagagcaccctaaataagcaactgtatggcttctatcaactggatggttttgatcatttagccgatagtctactaataatgttccagcggatacatttatgcctaatcctttgccgctatcagtcattgttccgtcattgtggcgattaaattctggccaataaataggtatattatcggaatcattttgtagtgttaatgtttcactttcagcgttcattgtgaaattagcgccacctaatttatcgaatgaatctgactgagtagatgaaagagtaatagatccagttccataatctttggtatatacctgagaattatttgggtcccattcaaagactgcgctcatttttaacccctcataaggatgaatagttttttcataatcaaacatggttaaaataaatatagttcaaaatgagagggtttcaaggtgttgaatgagatcattgtgtatttttccaaattttcttgctagaaataaattcagttacagttcgtagaacaattccctttacataaataagtttatctgaaaatatattttattgtaattcggttactgtttaacgctggaattaattattaacattattccatctttttcttatagcgtctctttaattatgactttgttattagcatgattacattacagatgaatagcctgaaattactaacgcttgtggagatattgaaatatttatccagttttaaagcaatatcatagatgtaacttccaatgtactgtcataatatttattttgtcagtattattccatcacgatttgcattatttaaagtatataaatattatagtgaattgatttggttcaggtttgatttaagcgctgtttatccggggtttatctatattgctctgtctaattaatgcttgatgaatgaaaattcatatttaattcattggaatcttatagggtaaataatatcattctaatgataaccatttgaaatcaatatgcggtttttctcatattatatacccaatggatttcaagagggatcgcgatggcaagggagtgaatccccgggagcatagataacgatgtgaccagggtgagcgagtgcagccaacaaagaggcaacttgaaagatgacgggtataaatatgaagaaatttatattagttgcattgcttctcgggattgcgtctgccacaaacgcaggcagtggggccgataagtctattgaactcactgattaagagtgtattgcgaagtggtatatgtctagtgcttcccagtcttgtgatgtattaatttggaaaatcggagatactacttgcgctattacagcacaatgtcgtattgctcatggaccggctgtcgataacggtactcggtttttcccgtatcctaaggtatcacagctcgtgaactgcgatggttatttacagactagatgttagctttattttcattaattttaggttacgggttgtagtctgattagggtgctagggaggaatggtaaattcaaactcagtgccgtaatctcggcaaatagggcttgtggataaaaacctttcataattagctagttatggctatggtaaagccatgcaatatggataaagccgaaatttaggataaatgagaacactaatagaaaaaaataaatgaaattaaaatttgctaatgaccaatcaatgtgatttaatagcgtcactggtttggaagtacagacctatttatgaaaagtattaatgaaaagtattaaaattaaagcagttcaccatttagcgttatccctgataccacttcattgcgaattccttctaattagtacccataagtaaaactgaaaaacagacctcataacgccttatggcaacttaataaatttaaaggaaaattctatgtctagttcaatgactggttcagtaaaatggtttaacaacgataaaggttttggctttatttccccaaaagatggtagcaaagatgttttcgttcattattctgcaattcagagtaataatttcaaaacattggaagaaggtcaggaagtctcattctctattgagaatggcgctaaaggcccatctgcggtaaatgttatcgtattatcttaatttaactgattaagtctattagcaactttacgatagcgatgaaggtaatatcctgagtagttaaagttgttaataagtaaaaacccgcttagttgcgggttttttgcatggaggcagtagcattttgcttggctctttgcttgattattttgccttggcagtttaaagggaactaaatattgaagctcccattgaacttatattctggtagtggtttgtatttagcgatcaaacccgcaccaaggaaggcggcggatttttaggctgttgggttgtgttaggtgtcaggcgctgctcaatatcatcaataaagcgttctaaccaagcttgtagctcggctacgtctacctcgcccaaagggcgttgcgaccacaaaattgcttgtccatccaaatcaccttgaacatgagccggccaatgttgcccaaaaagattgttggcatgactgatttcggaccctaattcgcagaacaactgtagccagttgtcgtgataacagccaatcaatacttgaaaacgcccgtcaacttcgagagtgtagataccatcctcagtaggcgatgcaggtaccccgagtttagagaacagggcttctataagttggtgatagtcgtgtgtcattgtgttttaggctcgtagttgaggacttggaaatgttgcccaagaccgatttccttgttgtacatggatttggaccagaaatcttgagagaaccaattagagaatgattctttgtttggaaagtggaactcgccaaagttagggtcaaagaaagtaacacccttctggtcatctacataagcggctacggcatgcccggccatctgtcctgaaaaactaatctttttatagctagaacctttatcgcctgtgtctagaatagcgtttagtagatctgatgtgccattactgccggtctgaccgttgacttcgattggacgtttgtaattaatgggcccgttggcgctttgataggttatcgttttcatgcgtggttggatgccattttcgctaagccaagattcggtcatagtgtcttgatcgacatcttgggctataccatccatctgtaactgcttaatggaaaccagagagtcgatatgaaactgtcctttttggccgcccacatagagttgatcgaagacactttcccctttggcatgagcgcttatccaatgagctgatatggattcacaaaccccgccggcggtgtcactatgtttcatgatttgatccagaaaggtccccttggtctgggcgaacttgaaggtgatttcgccgccgtgcttactcgcagaatttcgaacactccctaacgtggtgctcaccgcaaagtgaacgattctgtcttttatcatgctgaacgagaagcggctctcttggttcttcttgccatcagtagtgagttggcgatcgagcatggagtggcccggtagattgcgttgaatcgccgctgagaggcgctctaacaaccccggtctgggggaagagactttcagggatttacccgacagttcaccctgtggttgattaacggctgtggtatcgagctgctgggtaggaaatattctttggtgattaatacttgagatgggagacaatggtcactccttaagtggttttttgagatagatgtttggatattaagtagagtgaatcataatgttttgtcgaaatagagaatattaataacggcagaagaaattttcactttccgtcgaaaactggttatctctttgaggcgtgatggcatcgtcaactttgccattggttattgatggctgacatcagtgcttctaattggctatccagactggcatcaatgatcccgacttctgtttctaaaatacagcccccttgatcaagacgctcatcagcagtgatctctaaatagccgatttcagggaaatctttgtgtacccgtgatatttgttcgcgaactgttgcggcctgttcaggattaacgcgcaggataacctgtttttggttactgactaatgacagggcctcacgcactacctgtaaggtgagggaaacttggtcataattcttgaggattttacgtacagcctgcaagactacattgctcatctgttgctcgacctgccggtaatattgttggcattgcaactgggtttgatgaatcaggttagcttgttctgcgcgggcagcatcaatgcctgcttgccaacctaactctttttgttgctcatacactgcctgcgcgtcacgttcaatttcttgtgcctggagccgggcagcctcaagcagagatttggcactgaggcaggtctgatagtccgctttacgcagtatctggagttcaggagacagttgaagatgccctgtcgttattttaataaatggtaacattctgtgttcacttgcttagccaatttgagacacaatgcttgtgccaacggtcgttctgcctggctgacaggccaggctgcgaggttttcataagagggaagccgcaggctcaggcgcttagcgaaatcaataggaggagactccatcgccgttagccagaactgtaaggcactggtacgaaaatagtttgcattgatttctggtggtaacgagcgctgccagccagtcggccagttgccgataatgatgtcgagatactttaagcagaagcgatgtccctcttttcctagtgagtcatgcaagtggcgaagttctgtcgccatcagacaatggcggatagcttgcccatgaagtaaagcacctagccaggtaagaagttgttctaagcacgattgctctaacagggcgatgtttcccaatccagttggtaattcataatccacatttagatcaaattgggttagcagtagtccattaagcctgggagagtgtcgccactcaggtagagaagataagacggtaagccattctggggatagatgatcagaatgaatatagctggcagggcaaaaccgaaactgatagggcgttaatgctgttaccattattgtatcctgctgcggtgccacaggaattgtgccagattgctgataaatagcagggctaataatagcaccaacagcccaatcaaccgtccctgtgactcttccgtcacttggatagagaacagagtggagtagcgtggtgccaacggtacctgacgcacgcccgcggcgggcactaatacgacactgatccgatcataactcaacccttcaatgctgttattaaccagttgcttgatttgagggatgtaagtgtcgagttgcacgtccgctgcgtgtttaataaacaccgaggaagaggctggcgatagctttttgcccagtcggtcttgctcctcgggtaaaacaacgtgtacccgggcgacgagcacgccatcgatctcggaaagtgttcgggcaatctcctgtgctttggcaaagttgagccgtgcccgctcctctattggtgaggagataaggccgtccttggggaagacatcttgtaacgaagagaagttctcccgtggatatcctttacgtttgagcacttcaacagcttgtgccacatcagactcttcgactaacagcttgatattgccatctttgtctggctgcttatcagaggaaatgcccgcttccctgagcaaggctaacatttcgttgccttctttttggctcacatcggtatagagttcgattttacagccagttagcatcaggacagcgagcataacgcagattatatagtgtttcttcacagctcctcactgggctttcattagggtttcaatgttttgattgagtcgtcctaccgttttggcaatcagctcttcttgcagggtgattcgcatcagagaccactgcatttgcatcaggctgttaggatcactaccagagaccgctaactgtgtttccaaatcttgtttcgcctgagtaagttgctgtctaagctgacccaattcattgatcagattgttttcaatcccctgatcttgattggacatagcgtgttcaaaactcgcaatattttcggcactggcctgatgtgtattaagttcatccaggctggtgatcagtgtctcgcttatctgtggtagatccatagttcctccaaatttgaggtgtgtgcagtttatttaggttgtctgtccttgtttcatggtgttgtggctgctccattattcttccaaatcgggtttgtgtgagtttcgtatcaggttatccaccataccgttacgggggatcagcgtttttaactcttgtcggataaggtcactcaggtactcattgccaggaataggcttaatttcgccgagtacctcaagaagaaccgtctcctgttgtcgacctgtgggggcgaattcacgaacaatctttctaagttctggcatatccagtggtggtttgatgttgcctgccaagccaccaaactgcgaccataagcgctcttgtaccggggcaatcagcttggcctgtaactgagcacgttgggagggctgtttatcagacgataaagcctgataccactgccatatcactttgcgttgtgtcgctggatctaagtcgcctaaaacgttttccagcggttctccctgaagccagcgttgctggcgctctttcaacatttgctgatcgggcgtggtttccagtgcttgctcaaagctgtgctggtgcttggaactgaccgaaggctgtaccgttggttgcgacacggtgttataggatagcccttcaatcctattcatgagccagttgttcccgcatgccgtcgacgaaggagagcaattgtggatcgtcactgccagccattcgcgtcagtctctgctccaaggctgatgccagacccaaacgccactcgcacaatgctaaccaaggttccaaacttggccagggaaggtcccgcccaaaatccagagcctgttgatatttgccttggttcgttagagaagagagccgaatcaggtttgcagcttcttgctcttcttcgcctgacatcagccagtcggcaataatattggcttcgtcatggcagtgatggccgcttccaaccagagcaatatctgccagtagccctttaagtgaacgtgtcatgattagatcttctgtaatataccctgcatcaggtctttcatggcccggatgatggtagagttgatgttgtagatgaccgaccatttgttaatcttgtgttgtaaatcagctagcaaagctgggttatcaggcccgcctttgagggccgtgattgcctcatcaacatctttgttggctgcgttagctggctctttcaactggtcagcaaccttatcgaatgtattcactgttgttgcggaactaaaaatttgggccatgatggtctccttctgttgtgttaagtattgtgattgcagcttggatagcatcagcctccagttgccattgttggtattcttgtaccgaaccgccacatctcaggcgttgtttgatatcgttcagcgcctgagaaaggcgatgttgtatttcgttgacataagagggatcagcaccaaacagtcgtgcttccagggatgtcatcatgaagctgggctcctgttaagtttgacgataaattgttgcttacccttggtaataacaatcgcatcttgacggatggcctcgattattaaaccgttttctgtggttgctccaaccgggtaacgcaagttgtttttgagtaccacatagggcacacgcccgagagaaacggcccggacgtcgaaattgagctcatcattgcgggtgagctgcttattattcagtaataccagtgccggctggttgccgaattcttgcttaaatacctgctgtaagcggtagaagttatgcgtttggtgttcatccagttgacctatgaactcgatacgatcatttttatccttgtaggtcagcgtgtcaggtaaatcatgtttagccaataacatatccagtcgcttgaggtggttaccggtgaaccgcgtctggttttctatgccaagcaaaccaggaacatcacgtttgagtagtgactcgatattgttccattgctggctggtatcagtgacttcgcctataaggcggatccaaccgggttgtttaccatcgctactttggatctgggcatagcctaatttttgtaaaatgaaatctaccccctgacgtaactcttccatagtacgtagctccagccgataactgagagagtgggtatcgagatactgttgcagggccagccgttggtggttgagagccacataacctttgagcaacggcggcccgtgattgggcatcatttgtacgctcacttggcgataggctgaatcactactgagaaaacggcgtagttcttgctcggctatgccattggacatgtggtttctttgccacccttcatgtccaagtagcgccagaagaccgagtgccagtaccagacaaagtattaacattccgcctgctacccggctgcgattttgccgggcagggcgctgtggtgtgaccacgggttcagctagttggcttgggaatgtatgttgctggtcacaaaaagcccacaataacgggccaacttcctgacgggccagcgcttgcaatgtcgcacccggtgacagcggttcgccattctggcttggtgcagcttccccggcccattccaacaggcgaattgagtctggttcgacttctaagatcaggtgcacaggagcaacatcttcatccaccagaacgatatctgcctgtagggggtctgagccgatggctaaacgcccctcagctaaattgacctcaatacttttattcagtccgcggtaaaagcgaattttccaactcatctattcgccttattttgtacacgaacacaccaggtttctttcagtgaacattgctgttcaatgactcgccatccgtaagtgttacccattcggcatgagtctaaaaatgagcttttacctgcttgtcgtagtgtttcttgtatttgacgagctgaggataatggttggcattgtgcactccctagaactttgcccaacgataagctctgattagagatatcctgtgttgccagtaatccagggcgtagatcttgtccgttaccaagagccagataatgggctatcccactatcaatcagacgtggctcaataatgaataaccgtactgatcgccgaacttgctcactggtattgcgaaacaagacacccagataggggatatcgcctaaaaatggcaccttgcgtgttatttgactcatttcgtcgcggtagatgccaccaatcagcagactttgcccatgtccaactctggcaacggtatcgacgacggttcggctgatggtcgggatgccatcctgtcctgagctattaggtttctggttaccatcctcaatatgcaggtctaaactgatttcagaagaatcgcctacttggatgactctggggatcatgcgtagcatagtgccataggtaaggcttttaagctcggcaacccgttcgccattaactttcacgtagtaggtttcattgttgtcaatgacggcttgcgtattctcctgcgttaaaagcgttgggcgggaaatcacctgagcgcttcctttactctctagtaaggtgattttggcgagcaggtaatccagaccacggcgatcaaccaggctacctaatgcggctgaaccgatgctttcacctttttctttgatctctgttttttccctggcagacgttgtgatatcaatgatatggcgaggcccggtgttgatgccgacttgccagtcaactcccagttctgaaaggttgtttgcgtcgatgtcgacgatggaaagggcaacttcaatccgggcggagggtttatccagtgcgttgattaaatgggcgtacatggacatcctttccgggttatcccgtacaatgatggcatttagggagggttctgcttgtacgactgcacggcttgagtagctttctcccatagaaggagatgatgcttcaccagtaacagcagttacattggtatcactgagcaggcgggagagaatggtggctatgcccggtgcctcaatactggtatcacgatactggatcttgcgatcgaccactgaggcgtatttgagcgggaaaatttccactgtcaaggcacccgttttttcgctacgcagcaatgactgctgttccagtgcggatgtagtctgatcaaccagttcaagataacgaggagggcctgatacgtaaaccagttggttgcttggatcaggacgccaaccaaagcgtggctcccaaataccggaacgttttagggcttgctgtaactccgttgcgttggttcgttcaagtttaagcaggcgcgattgtatttcactgtttttgaatacataaagcacgctcccgtcgtagtaccagaccagattatagagagaggataaatgttgcaggaattcctgaggagtgtcctgctcaaaatggccgttaacttgatcggtcaccttgtcgctgacaaccactgatgcttcatagttggcaccgaaattaaccagtacatcccgcaagctttctccttttgccagatagctataaggcgcaggaaaccaatccagatcttggctataagcagaggggagcatcacaccgctgatactcaacgacaacagtagcgaacggcatagcttttgaaatggtttcatggttgccatattgcctgtttccattgaggggcagattgggtttccgacaataaagccatgacttgttccagtagatcgacgtgcagagttagcatctgttccagtatttgaacatccaaactatcaaggttaaggcgtgcttccaaaataagattctctgattcatctaaggtcaatgcatggggagcatggcgtccccagcgcgtaacttgttgcaatagtgttttcaataattcagcgcctgacggatcttttgggttatggcgccagcttagcgggctggataacacaagttcagttccctgttggcgaaaaaacaggttgtagttatcaatgtgcaaatggtaatgcccttgtctatcggaaacaaaaggcttctggcctaaacgactggccaaatgattgagtagagtttgcatgtttcctctaataattaggtcgtcgattgccagtgaaaattgtcctgtggcaggcacaggaaacgggcacagagccatttttgcaagtgagtagccgcctcggtgtcatgctctaaagtagtcaaccacgcccaacaggatgacagtgcttcgggaaccggcataaaagcggttaggtcgccgccagtttggagggcatctagcccagtaaaccagttgggccatgcttcgcgcgcctgagtttccgttgtcaacagccgtttttctaatagttgcttgcgttgattaagcgctgtttgcaaagatgtaacctctttatgttgttgttcccggcattgagacgagacgctttcggcttgctgccaaaaatgcgctttagcatgcagttgccgttcttggatttgtagctgatcaaattcagtgaaccagaagtctatctctggctccaacaaacggagccaccagtcaaatagcggctgtaatacccagtgctgtaaaagatgtctgtcagctaggtttatgcggtcacccagtaccttattccagtcacattccagttctgccgccgctctgatgagttgttgtaagtcatcacgccgcaaagcttgcccgcaatttaaccgtctacgaaaccagacggacttcatcaagctttccagcagatgtctgggtagcaaacgctgtaataaaataaactgttggctattaataatgtctctattctgatactgaatagccgatgattttccgagtaattgatcccggcgtggaattcccgactgcgtgacagagatcttgcggccaagaaacatgctggttcgagtctgattatggtcttgctggctcatgctatgctcatcttgctgctagtcactcttgtcgattaaattggggatggccttattttatctgtcaggccaacggttaacttgtaaaaaacgtcagattattttagccaatcgttactctttgccatatctggctcgactgggcgtgcaattaaagcgtctccgatagctttgagtaaagtaggattggctggaaaatcctgcttccatcgagatatcaacaatactcatctcgctattgagtagtagctgatgtgcataaagaatgcggcgttcactgatccaagcgcgtggggatattccgtataccgaacggaacagctccttgaaggtggttaatcccataccaaattctttagcgaattcactgagtttccactccttaaggtagtgattctccataaaactctgtaaacgttccacttggcgattgctcaattgtcgtaatactgacatgagcaaagtaccttgttctccaaatgctaataacaataacaactcttctgttctgagttgacccaacgctgtggggtaatcatgagccaatagatcgaccagcccatttatactttgagataacagaggggatgaggtaaatgcaattaattcgggtgttgacatgttgtgtcgctcgacttcactgagcagagtaccaaagcgttgcagaaacccgtggaggaaagtcgtactcagaggcaaccagagtagtttgcaagtatcgctacgcgtttttgctgcataactgccacgacgaacaaaaagcagctcgttgtgggagatatcgtaggtattggtactgtcctgccatgtcatttcaccttcgagcaggatatatatcccttcttgggggtgctctataacgttaaaggcaggcatgctacgttggagtcgtgagatatccattcccttccctgatgttgtgatgccgttcattctattgtcctggatctgttggtgttatgtcttaaaaatacaaatcagattattattaatagatatttttttggtttcgctgcctggaatagacagtgaagaataattttacgtatttaacctgatgattaactatagcatcttttaattaaaatgatttttgctagtgggcctataatgttctttgggccgaatactgtattattctcacgttttataaacgctttataaacgaagagtgaaaagcgatcagttttttgcacgataacgattgcctgtaaatttttcacccttagttataccctatggatttcaagatgtatcgcggcggcaagggagcgaatccccgggagcatagagaacgatgtgaccggggtgagtgagtgcagccaacaaagaggcaacttgaaagataacgggtatataaaccgagtcttttgtcttgactgatattgatagttatctccttttattcaggcaatctattattgattcataatacgttagtaattgtaatgaatgatagctagagtaatattaacgaattaacaggtgtagaagtcagcgcaaagtgaaatccaaatagctacgtgtaatataaatcacttaataataaattcaatctggtttcagctatttgatcaatcgataaaaacagaaaactcacctaacctaattggattgtttattataatattgtttaagcaatgttaggttattagcagtaattttaatttatattaaatttgttgttattatgtaattaaatcgtaacgcttaagagacaaatataaattgtatttcgtttgttgcaattgagcattggcaaggtatgttaaatgccaatactcagttcatatatgcagtttgactgtcaaaaagtgctgtttgaggacagattacggctccggcgggcgatcttgccactgttctaaccagcgcaaaacttctgcggtagcttggatgagatcagcaggaatatattggtctatcaggccatcttgataaagtgctcgggccagcggaatgcgttgtaacaccggaataccttcctcttcggcaatacgccgaacttgtagggcctgcgcattggtgaacttgagtgtaataaggggtaacggtgtctctcctttcttataacggatacctaccgcaatgtgagttgggttggcgacgataactgatgaattcttgacgctagcgcgcatattgcttgattgtaattcttggtgaaattggcgtcgtttgcttttgatctctgggctgccttcactctctttatactcccgtttgatctcgtctttactcattctaagctgtttaatatgttggtagtgttcaaaagcataatcggcaatagaaatcacgataagcccgatgccgcatacggtcatgagctgggttaacattatgccgagtacaggaacaatacatcttgttccacactccggcagccgcagtagtgcttgtagattgcctgccagagtaatccaaaccaaggtgcagagcagtcctactttaagtatcgatttgatgaattccaccagactcttgatagagaagattctcttagcaccttcaacagggttgatctttttaatatcaggtttgatggagtgtccactaagtagaaaaccatattgagcaaagtgtgataccagcgatagcaaagcggaaacgcttagaattggcaggcagaggtagaccagctcttgcatcaagttttcaaccacatggttgaaggcttggggaaagggtttctctagcagattagccgggatcagcatcagtttactcagatgctccaaatagtattcagacatgaccattatcatgccgattagccccaagattaacgaggtggagacaacttcgttacttttggttacttggcctttcttccgggcgtctctaagtttcttgggagtaggtttttcagtcttttctccgctcatggtgcctccagaatagggattaacatgcgtactggggagagcattaacagcaccttatcataggcatgatgcatcaataactggatatagataaccagtaacaggctggcaattgcgcttttgatcggcattgccaatacgaaaacgttgagagaaggagcgaaacggctaatcagtgccagcccgaactctgccagaaacatggcgattagcaaaggggctgccattaaagcgcagagctgtagtagatagctaaactgaccatagaaaaagtggagccactggttggtaattttggggaaaaactgtgttaccggccaactgttataactctgaaatagggctccgagcaggctaagaaaagcgccgccggaaaaaaagagtgtgatcagcgtttgagtcaataacagacctgttggggaggtctggcttcccagggcagggttgagcactgaagccattgttgctccccgttggttatctataataaaaccggtggcttccatcgcccaaaatgggatagaagcgataaagccaatgagcaaaccaagcaggacttctttaccgagcaacagcgtcaattccaagctacttaatgtgggcaactggctgcctgctactgttggataagcataaagggccagcgagcaggccacgccgttgcggattaacccaccacctagcatctgtttgctgagcacaggaaatatcacaaagcaactcatgatgcgtggtaacaacagggtataagcaagtatttgctgctggagctcaggtagggtcatttgatctgtggcaccttaagaaaggtcatattggcgaagctgtagagttcgttgccaagccaggtagcggtagcgaacagggtgataatgactgcaattaatttgataacaaaacccaatgtttgttcttgtatttgggtgagtgcttggatcaacgagaccaatgttcccactgccgcagccatgagtaccggtggcagggaaaggattaacactaaccagagagattggctagtgaaatgtaaaatatcagcattactcatattcaatctccataactgataacaaggccatgtgtcaggcgtgtccagccatcaagcaggacaaataacagtaatttgaaaggaagtgagatagtcattggagaaaccatcatcatccccattgccagcagaatgttggaaataatgagatcgattgcaataaatggtagataaagaagaaacccaatttcaaaagcccgggttaattcactgacggtaaaggcaggtaacagtatcaataggctgtctggttctagccgatcggcatactggcttggccaaatttgtcgggtactatcgataaagaaagtgcgttcactgggtttaatatgttgtttgagaaaatttcggtaaggtgtcaggccctcttccacaaatttatctactgactgcgcattgctgaatgaaacttcattttgacgcaggtaatcttgagtggcgaaacccaccggagccatcacatagatagtgaggataattgccaaaccgtacatagccatgttgggtgggatctgctgtacgcccaacgcgttacgtagtaaggaaaataccaccgccagtttgagaaaagaggttgccatcacggcaataaagggcagcagagccagcaaagccagaccgatgataagatctaattcgtccggtagttggatcatgattgtttctccacggagagatgttcgactcttactcccagacgtccctcaatatccaccaaccgccctgaacccaggcatttttgattgacaagaatacgaactgcaccgtctgaaggaacaccaagatcgagtaatgagccgggttgcaggctggtgagtgtctgtaggtccaaggtctgacggcccacttcgaaactgacatgaacctccagatcgtttagatctgttactggcagagtgttgtcagaactgtcaggagagagtgtgtgcatagtgattaactccaatttatggtcatgggatttaaagtaggcccaagggcgtccttccagatacgctaataaagggtcatctggttgttgctgtgggggcagtagcagcacatcccctgattccagagtacgaaacacatctaaagtcaggattattgctccccattgcagagaaagtcgtaatggaataggcaggcattctctaggttgacgttctggcaatatggcaattaagggggatggttctggtaaccagagcggcaatgtggcccctggccgttcaaggcggagtcgtaagcaagctgacaaagggcggcgttctgacgtggtactcagtgctgaccatgacagagtgggtagcattttgctctgatattccagtagtgctaacagcagatcttgagggagtgatgtgaggtccgcttgttgtagatcaggtgcgagccacagcgctagctcggctgcatggcagtaaaaggaaaaagtttgtccctgccaatgggcgatcagtaccttgtctaacgtttggggaggagagatcacatctagggtgagatggctattatcccaactaaattgttgctgatggcgactcagggcctgatgcagcgttaattcttccaatgaaactttggataaggtcaggctattcatgcatcttttttccattcttcatatacgctgcgacgttgacgtgatccatgttcactatccgtttggggcggaagggagagttcgacagtttgtgttgggtaaagaagctgtaaacgttcaatcagttcaaaacgtgcttgtttcaggagttgttgagcggcgggattcgctaaaatttctatttgaagtttgccatgctcgctggtgagttggatctcaagtgctcccaagttaggaagtgtcagatgtaatgtcgccggacgcggctgttgggttagttcgatactgatctccacactcagtttgtcgatcaacacttccaaaaggggagatatggttgaagttgcttgcatcgtggcgaggatgcgctcccccggcaggaattgggtttgtgggaagaaaggtgtttttccgtctgatccaccagagtcagaggattgagagtcggactcttttggttttaataccaacaaatgggatgtttcgatttcatctcgtgtttttccttccgcagggttgatttcgttggcattgcgggcaggtataggtaacgtcgggtctgtctgttggtgaggaatggcgctgtgttgtgtgtctggctgagatggggatcggccaggtgttgtctgcatcattgctgtgtcaggattagaagttaccgtgatatcaaccggctttaggtcagaatcagacaaggcattcaggtttgactgacgtgttgggactccgggtgctgacagcgattcctttatctcgttagcgatctcattaaggcggtgagcgggggccgataagttttttttctgattttgatgtggtgcaggcatgtcatggcctgtcaatggtaaggcttgcttgcgcagatcatcaattgccggttggggagagtcgaatagtggaagctcctcatctgagtcatgtgtggcatgttgatccgctggttcatggtttgccgttgtattggttaacggttgttccgtctgccgtgtggttgactggcgcgtgttggcggcatgagaggtgatagcttgctcgaaacggcgttgcaaatctgcgtctgcctctgcgggtgacgacgttgggagggaggagacatcttttctgccgatagctgtcagtgggttcatactcttctgttttacactctttcctggcgatggaactcttcttgttccagctcttcctggtattcaccttgggcccggatcgcctcttgttgctgacgacccaattcattaaatttttcttgctgctggcgtgtgtggtgcagaacacgttgacactcttttaattggcggagttccagctccactttttcagtcatttcagccacttgcttttccaattgcgcttcattttcgcgtaacagggcaacttgttgttgccagcgttcaagacctttgcggtcaataggttggccctgacacaatgcaaaaagccgttgttcttcttctattcgccattgacagtaatcttgcaaggtttgcaaagcctgctgatggtgttgacgggccgtttgcagcttcatttgttgcaaggaaaaatgtttttcagcgcgttcgactcgcaaggcttttatgcgttgtaaacggctaatcattattttgttatctgctgtaattgagctaaggtttgcggtagatcacttggctcatgggtgccttggcgtaaccagttacgtattgcttcaatgtgtgcaatggcattgtcagcaacgggatcttgccctttttggtactctccaatctgcaacaaaagctcaacttcttcatatttagctagccatttgcgcaacaggccggcctgagcctgatgctcaggagtgataatttgattcatcaccctgctggcggaacgtaacacatcgatagctggatagtggttagccgccgccagtttgcgtgacaaaataatgtgaccatcaaggatagaacgagtctcgtctgccacaggctctgtcatgtcatcgccttccaccaagacggtatagagggcggtaatcgaacctttgtcggattgaccagcacgttccattagccgtggcaaagcggcaaacactgatgggggataacctcgtcgggttggcggctcgccggcagctaaacctatttctcgttgcgctcgggcaaaacgggtcactgaatccatcagtaggagtacacgtttgccttgatcacgaaaatattcagcgattgatgtggcgacaaaccctgctttagctcgctccattgccgggcgatctgaggtcgctaccaccagcacggaacgttttagtccctcttcaccgagatctgattcgataaattcccgtacttcacggccacgttcaccgatgagcgccagcacggtaacatcaacttcggcgctacgaatcagcgtagatagcagggtactttttccgccacccgctgcggcaaaaatccccatacgttgaccttcgccacaagtgagtaagccatcaatagcgcgtacaccgagtgaaagcgggtgttcaatccgtttacgactcatcggagccggcgcatcccgataaacgggataccaagcttgtggttccggcaattggccgccggaaaatggattacctagcccatcaaggacttgccctaacagataatcacccacgccaacttggtgcatggctccggttgggcttacttcagtatttgaagagataccaaacatttcaccaagtggagtcaacaaggcttgatgttgttggaatccaatcacctccgccaaaagcgacagtgtgttgtcaggattgcgtaagtgacaaagttcgcctatccgcacaccaggaataacggctttaaggagtgtacccgtgacctgagtaacccggccacgaatctgaattagccggcattcattaatggcgtggcgcattttgccgggaatatggtcaagggaaagcttcatgatcgtttatataacctctgctacgaatactataaagaaggggaggaggaagggattgcaacctgagtcgggagtttttagaaaatggttggagtttacctggctgttctctgctttatcggtgagatttcctattttattcacagtgtgttgctcatgttttatacccgttatctttcaagttgcctctttgttggctgcactcactcaccccggtcacatagttatctatgctcccggggattcgctcccttgccgccgcgatccatcttgaaatccatagggtatatacgttttatatcagagcaatcggctcttccttgagttacggcggtttttgctaaaaattcacgactgattttggcataggcactgggacggtacctttataatttgttcattattaactctgatatgacagggtagactatggatattatccagaatcatcttcattcgataactttatcagaactgggtgccggggttaccgcacaacaggaacaggctaaggtaggtcagtttcagggagagaaagtcgtgctggtatcagcatcccagtcttttgctgatgcggccgaagagatgacttttgcattttcggaacgcaaggatatgccactttccaaacgtaaagttagcgatggacatgccagggtgcgagaaattgaggcactggtgggtgaatatttgcagaaggtgccagatttagagcgccaacaaaaagtcaaggcattgatctctcacttaaatagtgctcagttgactaatattgctcaactacaggcttatctggaaagtttctctggagaggtgagtgagcaattttatgcgctaagtcaggcccgtgatgcgctggcaggcaggccagaggcacatgccatattgacattggttgaacaagaattatcacgtttagcgcaagagcagggaattgctatcgagttgggagcccgcattacgcctgatgccacggcagcagctagaaatggggttggcaacttgcaagcattacgcaatatctatcgtgatgccgtgatggattatcaagggttgtcggctgcctggcgggatattcaatccaatttcaagagtagttccctgatggaagtaacaggattcatcatgaaagcgttgagtgctgatctggacagccaacagcggcaacttgatcctattaagttggaacgtgtgatgagtgacatgcataaactccgtttgcttaacagtttatcggttcaagttgaacagttatggaaaagcgtggtagagggggaaaatcatggcatacgggccttctgaccttatgggggatgtcgtttctctggttgagaaacgttgggccaatgtgcgagatgttgaaatactcggtcatgctttgggattgcaggatagccaaactcaaattcatttctaccgggagttgaagcgattaattcgcttgattccggtggaagtgttcagtgatgaagagcagcgccaaaacctgctgaatgcgtgtcaactggcgctggatgcagcaattgagagagaagaagacgaattgtggtcgggagagggagcatcatgaactggatagagccgcagttactccagttttgtcaggatttgggtatggagatgtctgatgcttctagccccttgatccaaattgattttgagtattctggtacgttgcaaattgagcgctatggtggcgcattaacactttggctgggtcgtgaaattccctggcatcagggaaaagaggcaatggtgaaagcgatgctactcactttcagtggtcagggacccgaactgcccttgcgttgtggctggctgggagaagatcgtctgttattgtttgtgacactagatgaacgacatataaccttgcccttgctgcatcaggcatttcgttctttgctaagagtacagcgtgaggtgctcgcttcgtgagcaaaatcgctgccgcccatataggaattgagcaactaacggcgatcagtcgggaagagatagaggttagtttacccgatcgctacgcgttattgcccgatggtcaatccgttgagactcacgccgcacgtctttatccggccaacaaagctgatcaggctttgttggcttttgcctgcccgcaagatgggtttcacgctctgttgcgtccacatgattttcgtcaggcggttagtggtctgcgtacaattttgcaacaaggtaatgacatcagggtacagcatgctgtctccctgttggaaaacatgaatcaagatgaacagttgttgcagatggctctgcacctgttgcacaaggtatgaccatgactctcagtgctaaacagcagagcgctctgttgctgctcggctggcttcaacttcaatacggtcatcctgaccgagcgcgtattttattagatgcattactggctttgcatcctgaacataaagaagggcgtcgtgccttggtagtttcattacttaaactgcaaaaggggagcatggcaaaagaacattgcactctcttacaagaacagggtgaacaaagcgccgccctctggctctgtgttagccgtgcttgtcaacaggaagggaatctggaagaagcacgcagtgcttatcagcgttatctcgctcaaggggctctattatgaaccgtgggtttgagttattgcggctgattggtgaacgtaaagacatcatgttggcaatattgttgctagccgtggtcttcatgatggttttgccgcttccgcctatcctgctggacattttgatcgccattaatatgaccatctctgttgtgctcatgatgatggcggtctatatcaattcccctttacagttttccgcgtttcctgcggtcttgctggtgaccacgctatttcgtttggcgctttccgttagtaccacccggatgatcctactgcaagcagatgccggtaaaatagtctacacctttggtaatttcgttgtcggtggcaacctgatagtcgggatagtgatctttctgatcatcactattgtacaatttatcgtcataaccaaaggttcggagcgcgtagctgaggttagtgctcgtttttcccttgatgccatgccgggtaagcagatgagtatcgacggagatatgcgtgctggtgttattgacgtcaatgaagcgagggagaggcgtagcattatcgaaaaagagagccagatgtttggttcaatggatggtgcgatgaaatttgttaagggtgatgcgattgcgagtcttctcatcatctttgtcaacattttgggcgggataaccataggcgtcacccaaaaaggaatgtcagcgtccgatgcattgcagctctatgccattttgactgttggtgatggtatggtctctcaggttcctgccctattgattgcgattacggcaggcatcattgttacccgagtttcgtcggaagacgcctctgatctaggtagtgagattggtgatcaggtcgttgctcaaccaaaggcactattaattggcggtgttttattggtggtatttggccttattcctggattccctacattaactttcttaatacttgcactggtggtggcgggtggtggctatttgctgttccagcgtcagcgccaagctaacgccagccaacaagcggatcttcctagcctgttagcccaaggagcaggcgcaccggcggccaaatctaaagccaagagcggcagtaaggccaaagctggaaaactgagtgagaaagaggaatttgctatgacggttcctttacttattgatgtggatgcgggattacaggctgagctggaagctatttcactgaatgatgaattaatacgggtacgacgcgccctctatttggatctgggcgtaccatttccgggtatccatttgcgctttaatgaagggatgaaggaaggagaatacctgatccagctacaagaggtgcccgttgcccgtggtcggctgcgctcagcgcatttactggtgcaggaaccagtcagtcagttggaattactggctatcccttatgaagaaggggaacctctattacctaaccagcctaccttgtgggtagcggaagcacatcaggaacgtttggtgaaatccgggctggcggctttatccatgtctcaggtgatcacctggcatttgtcacatgtgttgcgggagtatgccgaagattttattggcgtgcaggaaacccgttatcttctggagcagatggaagggagttatggggaattggtcaaggaggctatgcgtataattccattgcagcggatgactgagatattgcagcggttggtcggcgaggacatctctattcgtaatacacgtacgattctcgaagctatggtggtgtgggggcagaaggaaaaagatgtggtgcaattaacggaatatattcgcagtagtctcaagcgttacatctgttacaagtatgctaatggcaacaatatcttgcctgcttatctgttggatcaacaggtagaggagcagatccggggaggtattcgccaaacgagcgcgggtagctacttggcgctggacccagcggtgacgcaaagtttccttgaacagatgaagaaaaccgtgggtgatttaacacagatgcagaataaaccggtgttgatcgtatcaatggatattcgccgttatgttcgtaagttaattgaaggtgatcaccacggcttgccagtgctttcgtatcaagagttgacccaacagatcaacatccaaccgcttggtagagtgtgtctatgaaccgtgatccgctcaccccttggtttgaggagcaaggttattcagtacagcctcactgtatggggaatagcccaatccctcttggctggcgtgtgtggtatgaaggctgtgaaattgcctggcgttatgatgcgccgcgagtttggatcgtgatgttacgccgtacccggcagcgtcgagggcttgcgaatccatttgcgcctctttatctgttggcaacagcaacgatggccatgcttgggccgggtagccggctttatggtcaagttaatactttggttgactctccccttaatgatgaacgtttggcccgcttttaccatcgctggacaggcgcaaatgaggtggtgcctggctggttcgagttagaagccagttgcgttatatcgctacatcaaatgagaaaacaacaaaaaaaagtccaacgttgacaggaagaatcaatatctctctttattataggagtcatggatgcaagaggaacctaacgccaaagtactgcaagctgctgaagcagccatcaaagacagtgatcacagactgcaactattgcaggagatgtggcagtctcttggcatcaaccccaatgtgggtacagaactgtttggtcatactgacgttactctggttcagaatgctgagcaagagttgctgacagaagttaatcgcttacgaagcaaccaacctccctctctggaagagggaaagcgtcttcgtcgcccacctcgtatgcgtggcattattgtataaggagtttgaaggtggaaattaggccatatcaaaatgacccacagcttttcttggcagatctagaaaaggtttcgctagctcaactacaaggttctggatcttcggagcttgatagattggttaatcttatttttgataaggggatcaagattacatctgattctagtgttgttactgaaaataaggagctcttgaaaaaactgattgcctatttcctgccagccgacgcggttgtcgagggtggtcacttagatagccaaataaaaaatggaattaataatcttgaatctttcttgaatagctcaacattaaaaacgtggacattaaaagattttttggctgcggttcattttaatttaacaccggatcgtcttgatgatgatgtaatcgatatttttgtttcggttatgtcaggtcatgataaaaaacgacttgagttgcgtgatgaactggcgacattgaccgcagagttaaaaatttacagtgttattcaatcggagattaatgcgaaattagcggctaatggggagcttaagattgatgataactctttcaatttgctggaccataagaagtatggttttagcgatcagcccacttttgagaaaagtgctgaatataagctgctaaggaagatatcttctggttctgaaatctccattaagacatttttggaaagttctaataaacagagtggagctatggcaggtctggagaattcttacgaatatgataaggaaaataatcgcctagccaacttttcgacttcagttaacgatcgtgtaagtccactaaacaatactgtccaggaaaaaacaacacgtttaaatgaggctagttcccgttataacgcggctattgaggcgttaaaccgttttattcaaaaatatgacagcattatacgtaatattctcggcgcaatttaaggaatgattatggagcatcaagaaacatcaaccacttctgaccaatatgcacaagagctggaatcttttcttcatgatggtggcactcttgccatgttgaaggatatttctagtgatacgttggagcaactttactcattagcgtttaaccagtatcagtcaggcaaatggcaggatgcacataagatattccaggctttgtgtatgttggatcactatgattcccgattcttccttggattgggggcatgccgtcaggcaatggggcaactggagcaggcagttcaaagctatagctacggagcgatgcttgatattaatgagccccgttttccatttcatgctgccgaatgtctcctgcaattaggagaacttgatggggctgagagtggcttctactcggctcaacaacttgcggcagcttcgccggaacaggccgctctggctgccagttccagtgcaatgttagaagctattacaataaaaaggactcaggaaaatggttcaagttagtgaatctaaaattcctcaaccggtggtcaatagttctccggttggtgaaatcctcgcaactacaccttcgaaaagcgcggagcacgttacgcccagccaggcgggtagctcgttgtcttctgatgccgctaagtcacgaggggtatcattgccagcgccattgacggtggtgaatactcaccctgatcaagaacaaatggccaggcttaaatcggttatgcaagaggctaagcaggcaacaggtctgataaaggaactgacagcaaagctgacagcaacttcgtggttgacctctctggtgttgcactcacttgaggaaatagagattaatctgggcgagctgaccagcaagcttgatcgtattcagacgagtctcaaaatccaggatatccagcgagcacgtcagcaaagcttgcagaaaatggaagagaaccagcagaagattaaagaagctgaaaattctgccaaagaggcgcagaaatctggattgttttctaagatctttggctggattagtgcaattacttcaattgtgatcggcgcgattatggttgctaccggtgttggtgcggtagccggtgctttgctgattgtcggaggagtgatgggggtagtctctcagggactacaacaagcagctcaagatggtttaatcagcaaggaaaccatgaaatggctagggccagtcataacagcgattgagattacgatggcggtggcggcggcggcagtcagtttcggtggttctgctgccggtttgattgcgaaaatgggcgctaaaatgggcagtaaagtggctgagatgacggctaagatggcagtaaaggcagcggaattttctgcaaaagccgcgggtacagcagcaaataccacgtctcggggcttgagagtggctatgcaggtgggcgattcgggagttgatgttactaatggcgctgctcaaactaccaatgcggccttccagagtaaagcggctaaccgacaagctgacgtgcaactttcacgtagcgaattgaccgcattccaagctgttatggacaggctcaaagaggagttgtcccacctggtagagtctttccaaaatgtgatggaaatgattttccagatgcttaatgcccggggagacatgataaataaccttgccagccgaccacaggaaatttagggaataaaaagatgaaaattaatgataacgccagtagtcaaggggttacttccagtaatggtgttgaagttggaactgacaactttgtgtcgacaccgacagcacatgaagctgctattcaacagccggaaaaaacgaggctcacggataaggttgaattgattgtaccgaaacagggcctcgatcccagtcgtttaggaaatgtcggacaagaattaaataacacgctggatatgatgtcgctactttttgagattgcaaagaggatgcgtgaactgggtattttgcagcgtgacactgagaataaagcgtccattgatgctcaaaaatcacaagtggatgagatgcgacatggtgccaaattgatgattgccatggcagtggtttcaggcttaatgacgcttggttcagggctgataggtagtttttcttccgttaaaaacagtcaggcggttaagcagcagaagacgttggaaagcaatattgctggtcgtaacaaattaatcgagtctaagttgcaacagttgggcaagagtagcgatgcggatcgggcagcaattggtaaagtatggaatgtagcacaagatgctgacaagagcactttgaaatctcttaccttggtttttgaaagtcgtaacagcaatcagcagttattaacctcagtgatgaaatctttagagggtatgtccaataattctgtgcaggtagaacagggactttctcaggctaaagccaaggaacatgaagtgggttcatctattgcccaacatgaaaaacagaagagtgaagaccaaatctcattgaataataatttcatgaaagatgttttgcaattattgcaacaactctatcagaatcatgttcaggcattgcgcgcggcgactggcgtggtgtaatgctggtaaaatagatcagtgttatataataagcttgggcgtaccgagaggtgcgctcttatcaatggataccgttatttgatctcgtttttaaaatccactaacaccaccaaaggtatagaaaaacgaaaatatcaaattaagatttcagtccttaacaggcagaatgtgttaaggaaaaaaagcattttcctatattccggtgtttggtttttgataatcactggggtgacctttttattaaaagaattgcccttgagtgacagaggcgtaaaaggcgatggtagtaaactgagtcccttttctgcgggggtaacccgtttgtttgactacttggtaattcaagttggtctgattgccctctctagtaggagtaacccatggatgtgatagccatcgtcaatcaagttttggctgaatttgctgctaaattcggcttgccgcacttagctttaaatcatgaaggtgtggctgctctctgttttgatgagcaccttcacctctctttgatcttaattcctgaacgtgaccagctcgttttacagatagatgtcgctgatatcactgcggtcggagaggggattttccgtcaattagccagctttaatcgtcattggtatcagtttgatcttcactttggttttgatgagtcaacgctgatggtgcagctttatcggcaaatgtcagcaagtcggctgaatcaggctgtttttgaagagagtctttcaagtatgttggatcatgctgagttttggcaggaattattgcaagctcaacttccgattggctctcaacagaacgaatctttgggaatgcgagtatgaaaattgagaattcgttacccattcatttaacaaatgttccccatgaaaatggtagcctttgttgtggtcgtcgggttacgtcagggtatataccacaaaacgttcatgagccgctttctacgatgctgagtagaggtcttgccatggggcttgaacatgagacaacactacagcgcttgttggatgggcagcatactccgttgtcacaacgtaggatcagcctaacatgaccaaaatagggttggtcttgttgtgtttgctgatgactggttgtgttagtgaggctattgagcatgaagcatcacgtctgattgagggggatgtgaccatgcgggcctctctacccagaacggcaaacgttgaggtgtcattgttgacggtggttgaaggaaaagtgttgacagtaggtgagatgcattatcgtttggatatgctacccgtcactttttctatgcggttgaatccgcagttttctcatggtgagttatttttaagagctcgtctacgttgggatgggaaacgggcagtgcaggcgaaaagccaacaacgcatcattgcaggaaaaagaattgtagtgcaattgtctcccttgccatgttatccagaatgctaaatattttcgcattaataaataagggataatattgtcttttaaatttttaaatgctatttaaatcacatggctttatacctaataatttcatgtaatattttattttccggtataatttaatatattttcaatgttaaatatctataggataatgcattaatattttaatcgcttattttacaattagttgaatagttcctcttatattatcttaaataatttaattataaattagatagagataatattcacaatagtgtttatacccgtcatctttcaagttgcctctttgttggctgcactcgctcaccccggtcacatagttacctatgctcccggggattaactcccttgccgtcgcgatgcatcttgaaatccatagggtatataataatattatttgccaattagggtatgataaacctcacgtctgtcatattattgggattggtaaagatagttaatatttttcacttcctcttctgttatttctttctatttcttatgcttgattatattttactttttcatcctaaaagtatttaattgtatttttaatatagattacataagccattttaaattaatatcatttttaattttatctgctacatttaccgatttatttaaactgttccaatagatttttgatactgttactatctttacaggagatagtaatacctaaattcccaatgcatatttttatcattatcgtacttaatgatttactattttggtagaaattttcaatcccatctataactgatacttaaaacattgtatggtatgtgaatagcaatggggaaaaggggcatttttattatgaaaatggtatttttatcaaaaacaactaactcattaaaaggatggtagatgtttcagtttgatattactattattatccctgtttttaatgatgagaataatataacctatttgttagattcaatttttgcacaagaaaatgttaattttgaagtcattattattaatgatggttcaacagataatagcttagaagtcattaaagaatatgaaagaaaagataatagaatacggatctttaatcaagaaaatcgtggtgtttcaatagctagaaattatggcataaaatatgcgagaggtgagtggattttatttgttgatagtgatgattggctaaaaccacaaatattaagaaaatggcttgatcacgctattgaacagagattagatgtgttaattggcaatggagttagttttacaaaagatccattctcacaaggaaatagaagaataacacgtagacaaccttatggtagagtattaacaggtaaagagtggataaaatattgcgttgaatgtagagaatggccacattttgtttggttacaacttattaaaaaagaattaattataaataaccaaatgagttttatggaaaatatctttcatgaagatatcttatggacaattaatttgtcacttatagcgaatcgaatcggcttttgtgaggagcaattgtattgttatcgacataatttgcaatcaataactcgctcaagagaaagtaaaaaattatatcatcgagctgatagttatattactgtggttaattcaattattaaaatctcaaaagaaattaaaggtgagaaatcgttaaaaagatctcttagtcgtcatgcaattcgagaggttggtagtttttttattttgtatagaaaaaagatacacgatccaagcttaaaaaaattgcttgctaaacgttttattaaccaaattgctttgagagatttattaccaggtgtgcataattaccatgaactatggtttattatacgttgtaatttagtcttaatattaaggaggttcatggatgagtgactacaatgctctatacccgtcatctttcaagttgcctctttgttggctgcattcactcaccccggtcacatagttatctatgctcccggggattcgctcccttgccgccgtgatccatcttgaaatccataggatatatatctatttgttaattattatcattcccttacacataatgatacacccgcagaatttgttgatgagcttggtattatattaaatgtaagtaatcaccttataaaatttaaggctgcgctatgtgtggccttttcttattctactgatttcgcagtattcctattaactcaaaattaaggctacacggcagcctatggattcccatttatgtgagtgggagtgaaggatgaaatacatggataaacagcctgacatctggatgcagctatggttatggctgctgtcagtcaaagaacaaggtataggtgcggcgctggctgccgcaatggcttatctcaggggtcgatataacggtggtaaattttggacgacaattatggattctattatgtgtgccatgattgcttggtttatccgtgatgcgttgaatttttttggtatgagcacggatttggcttacatcagcagtgtcattattggttatctgggcactgactattttggtcagatcttaagaaaagttgttaataacaaaacaggtaataaacaataggagtgaattatgagcagaggtattcgaaataataacccaggtaatattcgttggggtgatgactggcaaggtctgatgcctgcatcacagcgtactgataaatctttctgtcagtttgttggtcctgaatatggtcttcgggcgatgattaaaattttgcataattacaatcggaaatatggccttaaaacagtgaaagagatcatttcacgatgggctcctactaatgaaaataatactgatgcctatattaaccacgtatgtaaaggtacgggagtgacttgcgatcaggttgttgatgtatttaataaagtatttatgacagagcttattaagtccattattaccatggaaaatggtagtcaaccttatagcaatgaggtcattgataaagcattttcacttttgtagagcgatattatgaagtttaactctcgtggttatactgttattgctctggcgcttgcctcgcttctggcttatcactattacggtaagtataccaaacagcttgatacgacagttaagctacagagtgagttgctggagcagcagaatgaaatcgttaatcagcaggagcgaataaggctcctgtctaaactggataatcagcatacaaaggaacttgctaatgccaaatctgaaattgatgttctgcgcaatgatgttgccgctggtcatcgtcggttgcgcatcgcagccacctgtcatcaaggccaagccggctcctccggcagcgtgggccatgcagacaccccacgacttaacccagcaactgaacaagattatttcgatctccgaagaatgattgttgagaacgaacagcaaacgaaatacttgcaagaatatatcaaaactcagtgtcaatagctgagttttgataatgttattgcgtaatgtaaaacaacgtaggtgtgggttggttattagggcaagtatgcttaagatcgattaataatcaagcaaggaatactgtgttttgtaatacaacccgataaccatcaatatcttcaaatgttttaccttcaatatcccaatatgggttgtaagaggggactgcaataaagccagcattttccattaatgatatctgatctaaccattctgaatggtctggtatatagaaggccaataaattgtcctgtgtgggggatcttcctactgttgtgccacgatgatgcgtaaattcgagatgccagagatgatttggatgcccgagaatgatgccatcaaaattttcatgattttcgaattgctccaggagaataaatcctaaacctcggcggtacatttcagcaatttgagttaaattgtcagtgggcctggcgattcttagtatagtagattttttcatggtaatcccagttgataaagtttttgtggaatatgtccaattttcagatcttctactgcgatataaaacaactgctaatggtagttgataaacgtgaaaagtacaaagtggtgatctttaaagttaaaacaatctaaaaatatccgatactaccgagctattatttacaatatgattaaacttagggttttataattggagttgtttgatgaattgattgtctatttttttattttttgtcaccatttcaagcaccaaagtcgatgatatgaacacggatttgatgtaagtaggtatctgttttcttcacaatgtcatcgagagcatgtatcttggtcttgataaattctgataaatatcctcactgtcttttatttgataggtctgctcttactttctgtttgtaataatatcttataagatatattaaataataaaataattaatgaatttactactactattatttaataatctgaatttttcaaagctattaagttgatttctattgtttttaccaagtgatatgaccagtagcctggaatcttgcggcccttaagcaaaatctttatattatattatattttattatattataatctagttttgtgagggggattataattaatactattttctgtattcttttttgtttattattttttaaggataaatttctgatgaatattaaggaattaattatagttctggcattgtccggttctatgctattaggtggttgtactgttatgcctgggagtggtcttactgtttataataaagaaataatcaatgatgatgatagtaactatgatattaataatttggtaaacgtttatccggtaacaccaaaattaattgaaaatttacgggtgaattctgctattgcacgtcctaatcctgagttagataaagaattacaacagtatgaataccgtattggtgtgggggatgtcattatggttactgtttgggatcatcctgaattgacaataccggcaggacaatatcgtagtgctagtgatacgggtaattgggtgcattctgatgggacgattttttatccctatgttggtaaacttcatgtgaaaggaaaaacggtcactcaggtgcgtacgatgattactgataagttatcgaagtacatcgaatcacctcaagttgatgtcaatattgctgcttttcgttcacaaaaagcctatgtaacaggtgaagttgcccgatctgctcaacaacctatcactaacgttcctttaaccattattgatgcgattaaccatgctggcggcttaaccgaaaacgctgattggaggaggatcattttgactcataagggaaaagaaacgattatttctctccaagatttgatgcaaaatggtgatctgaagcaaaatcgtctgctctattctggcgatatcttatacattcctcgtaatgatgatttgaaagtgtttgttatgggggaagtcagaaaacaaaccactctacgtatggatcgcagtgggatgacgttgaccgaagcattgggtaatgctgaaggtatagatcaattatcaagtgatgctaatggcatctttgttatccgttcgctgcgtaatgtacctgataataaggggaaaatagccaatatttatcagctcaatgctaaggatgcgacggcgttagtcctgggaactgagttcaatttgcaaccttatgatattgtctatgttaccagtgcgccagttgttcgctggaatcgggttatcaatcagttggtgccaacgatatcaagcattaatagcctgactgaaacaactaagtggattcgtaagtggccgaattaatgttcaattctattctgattgtttgtgtgggtaatatctgccgatcgccaacgggagagcgtttattgcggcaactatttcctcagaaagagatttattctgcgggaatatcggctttaattggtaaacctgcaaatgaattctcaagtagggttgcggctagacatggattatccttagaagggcatatagcgcgtcaactaaccagtgaattatgccagcagtcaagtttgatcttggttatggaaaaaaaacatattgaggctgtaaataggataaatctaggggcaagggggaaaacaatgcttttaggtcactggttaaatgaaatggtcatccccgatccttataagtctgatatcgaggtttatgaatatgtgtatcagttattatttaagagtactaatagttggttagggaaattataacttataagtatttttatattatgggtttgctgcttattaataaagtaattataggctttttatgactacatcagataaatcaagtcacactcatacggatagtgatgaaattgatttaggccgtcttcttagtgccttattcgattatcgctgggtgattggtggaatcaccctattgttcaccgttattggcctttgttattccttgattgcgactccgatatacaaggcaaatgctttattgcaggttgaaaagagaagtagtgcattacctttaatcggcgacatgtcggatatgctttctggaaaaccgtcagatacatcggcagaattggagttgttaacttcccgaatgatattaggaaagacggtaaaggatctaaatttggatgttcaggttacagcggactattttcctgtgataggtaagggcattgcccgtcttcgtggtatgccaaagcctaatattgttattaaacattttacaatatcacctgaatatattaatgaagggataaaaatatatgttgacgatgcagaaaattatcggttgttttttgacgatcaggttttccacgggcaagtaaacaaagtatttgataccgatggcataaatttgcttatctcaaatatttcagcttctccagggcaaagtttcacgttggttaaacgggggcaattgggtgttattcgcgggctgcaacaggctttgcgggtaaaagaaaaaggtaataataccggtattatcttgcttgaaatagaaggtgatgatcgtgcaagaataaaattgatactggatagtattggtaaaaattacttgcaacaaaatgtgacaagaaagacggaagaggctgaaagtagtcttaatttcttaaaaaatcatttgcctaaagttaaaattgagctcaatcgttctgaagagttgcttaatcaatatcgtcaagcgaatgaatctatcgatttatcacttgaagcaaaatcggctttggagacattggtccaaattgagaaacagattaatgaattgacgttcaaagaagctgaattacagcaattgtataccaaacaacatcccgcttatgttgcgttgcttgataaacgtaaaactttggttgataccaaaaaggagctgaatcagtcaatcaaacggttacctaaaacacagcaggaaattttacgtttgaccagagatgttcaagttgaccaagaaatttatgtgcagttactcaataaacagcaagaattgaatatcgtgaaagcggggacagtgggtaatgtgcgtattattgatgaagctattgtagaaagttcagcggtaaaaccgaagaagtcactgattattgcatcgatgatggtattgggatttatattgtctgctgggttgatttgcatacgagtcatgtttcgtaaaggaatcgaaagtcccgaacaattggaagagataggtgtttccgtttacgccactattccactctctgagactcagatcaaacttgaccaacaacagaaaaagcgaattcatcgtcagaaattgcggttattagctattcaagatcctactgatttagctattgaagcattgcgtagccttagaacaaccttgcatttttcaatgatggaatctgcaaataaaattattcttctttcaggttctgctcctgaattaggaaagtcttttatttcagtaaatcttgccgctgtattggcattaagtaataaacgcgtgcttttaatcgatgcagatatgagaagaggccgtttacataaagtattggaaagtcctcaatctctggggctttctgaatatttggcaggtcaacatcaattaaaagggattattaccagaacgtatcttactgagcttgattttatcaaccgaggtgctattccgccaaacccgtcagaattacttatgcataatagactgaaagaattattatcttgggcagaagagcattatgattatgtcttggtagatactcctcctattttggctgtcactgatgctgcgattattgggagatatgcaggaacttcattgttaattgcacgttatcataaaacaagggttaaagaagttaatgtgactattcgccggtttagacaaaatggcattcatattaaaggtgtgttgctaaacgcggtagagaagaagtctggtctctattatgattctagcggatgttatcaatacagttataaggattgatcgccttttctccggcttataaggccggagaaattttatcaatgagcgcttattttctttcctatgtttcttaatagtgagtcagttcgttcaatttaacggagagtggatcatttttccttttatcttacaagcatagctatggtgaaacccagagacttttcttctgatgattttatagctttacagttgtagaatgtcattataagatgcattttaaatgtaatttatggtcaaggaaccttctatgagtgacctcatttgttataaacgaatacccatctggcagaaaaatacccttcctgaaatgttcactgaaaggcataacacaaaagaggggacttatgcttgtcttgagatctttgaaggtgaactggaatttgtgattttcgatggtgatcaggaagaaactgcatattttaatgtacaaaagcagcctcccattattcagccacagatttggcataaaattaaatgggtaagtgatgatattaaatgccagctctcttttttatgtgaaccacaatatctgttttataaacaaaataatttgtcattacctcactctgaaattatatatttggcaaatattatttctccttgtaagacattagatctgggggccggtcatggccggaatactttctatctggcagaaagaggttatgacgttacagccgtggatattagtcagcaatgtattaacacaattaatgttattaaagaaaaacagcaatttaaaaatatccgtacggctgtttatgatatcaactctcacaatatcaccgaaaaatatgatttaattatttcaactgtggtactgatgtttctacaacgggaaaaaatcaccgatattatttacaatatgcaaaaacagacgaataaaggtggtattaatctgattgtttgcccgattgaaacagattttgcaccatattcattattgccattcaaaagtttcctcatgccaggtgaattggagaattattattctgactgggaaatcattaaatataatgaaaaccctggtcatcttcataaaacagatgaaaatggtaatagaataaaattaaattttgctacgcttctcgccagaaagcgatgaacgttacctttcaaattgcctatttgttggctgtactcactgggctaattaccggtttgcatgatttcgttatattgctgttgatctcggtacatttgcagatagacctgatatttggcttgatgaaataaaaatgtctctttttccggtttgataatgttgccgtcacgtaccatcgattttgctgcttgagcgaagtttgcaaaggaaccgcaagcaacggcacctagcaaagcagagccaagattgacagcatcctcttcctgagtgagatggatctctcgcccagtggcattggcatattcacgtaaccatagagggtttttagttgcgccaccacacataaccagtctgtttatctggtgtcctgcttctactaatgcatcaataatatggcgggtaccataggcgatagattgcagtgttgccaagtaatgacgggccagatcatcacgaccatttgccagcgtcagcccgcttaccattcccttggcattagggtttgctcttggtgaacgattaccatgatggtcacttaaaatatgaagctgtgcggtcgggtatatctcttgtttttctaactgtgtaaccgcttcattcagtagctggtagtaatgatgaccagattcctcggcttcggctgccagctccggccagctattgtgttgacgaattgaccattcaactaatgcgccggcggcgctttgtccaccttcgttgagccagtaaccgggtagcattgcgccgaaataggggccccaaacccccggaaccatgacaggatgaggactgacaatcatgtggcagtttgaggtaccgctgataataaccaagctgccctctggataggcaccagtcagtgccaatccgccggcatgagcatcaataataccaccggcgacgatgattcctgtgtgcagcccaaaatctttagccacctcagcagtcaggtaacctgctttttcgccaagttcaatgatggtagatggaactttatttgttaaatcttctaaccccacatcatagagtagtttttcgctgaactgtttttgatgagccagatagttccatttgcaagtaagcgtgcaggtactggctacatcagcgccagtggctttccacaccagaaaatcagctaaatcaaagaaacgccatatatcctgataacgttgaggaaagtagttttttaaccataagattttcggtagttccatttcagggctgatttcaccgcctacatagcagagtgcagggtcattggtttgatttatcgtgatggcttcttttatggcacgatgatccatccacatgatgatatcgtgttcaggattgccattttcggccacagaaagagagcatccctctgctgctaccgcaacgagtgaacaggtggcatcgaagccgattgatttaacatcaataggattaatatttgccagtgcaacagcttcttttactgttgcacatacttgcgcccagatgtcagcagaagattgttcaacaaaatcagcttttggatgaaattgctggatagggcgagcggagaatgcatgccgtttgccgcattggtcaaaaaccgcagtacggacactggcggagccaacatcaacaccaatgaaatattgttgttccaccatgaggttatctccttattcattaactcaggctgataaaatgagttgagtggaacaataaaacaatgaggttattcaattattgtgaggcggctcgaaaaagattcggtagttttatgatgatagaaaaatatcacatatattttttattgttctttttgctgatgtaataaatacattccggagagtggtttgtttaaaaggaaaagcatgataggtagagtgagcaagatattctcagaaaaatcgctgataatgtctatacccgttatctttcaagttgcctctttgttggctgcactctctcaccctggtcacatcgttatctatgctcccggggattcgttcttttgccgtcgcgatgcatctcgaaatccatagggtatactcaatgatctgtttcttaaaaaatcgtttttaaaaataatattaatcagtccattaattaacaaaaaacggagtataaagaataatattttgttttaattagtttaaataattaaatattccagtaaattattttgattaagatagcggtttatacctaaacattttttaatgtattaggcgtgataaatttttgaacattctaatcttaagattctatcaagtgatatcactcacaagtatcaaatctttttccatttttacgaaattttttctcgcatattttccataaatattctttattaagttgctgcgagtatgttgttattttgttatgaaatgtccgagggaatatatggaattaatcacagaatggctgagtgctattaacggggtagtattgggagtgccgatgatggtcggtcttttgggggttgggttgttcatgcagctccgcctctcttttctgcctatacgtaaattgggaacgggttttaaattactatttgagcgtaatcatcagcggggagaagggcagatatcaccatttaacgcactgatgactgcgctttctgccaccataggaacgggtaatatcgctggcgtggctaccgcagttgtattgggtgggccaggtgcgctgttttggatgtggataactgcattagtgggcatggcaaccaaatattcagaggcggtactggcagtccgtttccgtgaggttgacaaaaacggtcactatgttggtggccccatgtattacataaaaaacggtttaggtaaaaagtgggcctggttggggacgttgtttgcggtgtttggcagtattgcttgtttcggtattggtaataccgtacaagcgaattcggttgctgatgtgctgcaaagtaactttggcgtttctaccatggtaacggccatcgtattggcaattctagttggtgcagtgcttatcggggggattaaacgtattgctgatgtcgccggtaaattagtgccatttatgacggttgcctatctcgctgctgggattattgttctgggaatgaatttcagtgaaattcccgctgcatttgttctgattgttaaatctgcatttacacctgttgcggcccaaggtggttttgcgggtgcagcagtgtgggcggcaattcgctttggtgtcgctcgtggcattttctctaatgaagcgggattgggaagcgcgccgattgctcatgcaacagctaaaactcaaaacccgattcgtcaggggttgatcgctatgctagggactttcatcgataccattattgtttgttccatcactggcttaactatcgtcattactggtggttggttgaacggtcagacaggtgcgacactgacagcgacttctttcgcgatggcgattcctggtggcaactatattgtcgcgggtgctctggtaatatttgcctttaccacaattcttggctggagtttctacggtgaaaaatgtactcaatatctatttgggcaaaaagctattacgcctttccgtgtagtatggattattgctttgatggtaggtgctactcagtcattggattttgtctggttattggcagatacattgaatgcgatgatggcaataccgaacctaattgcattagcattgttaagcccagttgtttatcggctgacgaaagagcatattaaagatgtgaatgcagatagtattgatattaaagccaaaatttaaataaaagccttccgtttggaaggcttttctcatcactggttgagattattcttcactggttttgatatagatgtttttgacctgagtgtaagcatccaacatcattttgtgtgtttctctgccaatgcctgattttttgtagccaccaaatggggcgtgagcaggcagttcatggtaagtgttaatccacatacggccagttctgacagctttagctacgcgtagtgctcggtcgatatcctgtgtccagacagcaccagccaggccataatcagaatcatttgccattctgatcacgtcttcttcttcgctgaatggaatcacggccaatacagggccaaaaatctcttcgcgtgcgactcgcatgtcattagtgacatcggtaatgatagttggttgaataaagaaaccctcgtcataacctttttcagtaatgcgtttaccccccgtgaaaatggttgcaccctcttttttcgcaatttccacgtattcgagaattttttccatttgttcctggctgacttggcttcccatctgagtttctttttccaatggatcaccaacctggatggattcgaattctgttttcagcgatttgaggaattcatcatgaatatctttatgcaggaacaaccgggaacctgattcacacgcttggccctgattcagcaaaatagctttggccgcatattttactgcttttttcatattggcatcagggaagataatattggctgatttaccaccaagctccagtgttgcagggatcagttttttggctgcggcttcggctacggtataaccgactttggtggaaccagtgaatgccactttttcgacatcttcatgatccagaatggcttgaccaacgactgaaccacgacctgtaacaatgttaactaccccggctggcaggactttatccaatattctgcccaattcaagcagagtgattgatgtcagtgttgccgggttaataacaatggtattgcccgctgcaagagcaggagccagtttccatgccgccatcagtagtgggaaattccagggaattacctgtccgacaacaccaatgggttcacggatcaccaagctaagtgtattggtatccagaactgaagcttcatcggtatgggaacggatcacacccgcaaaatagcggaactggtcaatgctggccggtaaatccatatacagggattcatttaatggtttgccagtatccagtgattcaaggatggcaaaacgtttttgttctgcttctagtaagtcagcaattttcagcaaagctgattgtctttcgattgcggaggtttgactccaggcgtggaaggctttttttgcagcgctgacagcaagatcaacatcttcagcattaccggatgcatattcagccaggagttctcctgtcgccgggttataacttttggtcgttgctttggatacactatctacccattgcccaccaataagcattttgtaggattcaacgggcaacatctctttctcaatatcgtgtaatcgtttcattaacatactccgagtactttggtttaagaatagttacatcgagaatctatctcacttaggttattttattttccattcttgttagtaaagagcggatgattccctgcatatatacccgttatccttcaagttgcctctttgttggctgcactcgctcaccccggtcacatagttatctatgctcccggggattcactcccttgccgtcgcgatccatcttgaaatccatagggtatagactgatttttgtaccttgcctgcactcgttcacccaggttacatagtttgctatgttcccggggattcgctcccttgccgtcgcgatccatcttgaaatccatagggtataatttcattatgtgaatatatttttgctttatattacttacccgaatttatcttgtcatgttttatatttttttagcatcaactatagtagatgacaaaataatagatgtctattagcatgttatataaaatattaggtatattaacgaacggaaattataagtaaagggtgtgattaaatatccgttggaatataccaacggattgaaaggtaatattattttgctgtgacccagaatactccgttaccatcaagggcggtaaaagttttatgcagatataggttgtcagcttgtggatcgatatcttcaaataacttcggatgcaggaatttagcaatgatctcaacagcaatgatgttaaacggcgtatcgtaatattggtggtacagtgctattacttgcttttcgcgaaaggctcttaatacgcttaatttggggcgtgtcagtaatttttttagtcgttcctgtgactgttttaaatcgccggtataacctaatggcacagagaaacttccagagcgaactttatcccaatttgcggcggtcatcagataaaattcaggattactgacgattaattgtttttcgtttacctcaccatctatacctgaaaaccagcgagcgccgaggttatcacctcctgcggcagtaacaaattcaccaaaattgccatttccgaaagttttacagcaatgttccgcacctaacatgcctgcatggcgttcgataaacaccggagggcgctgttctttacctagcgtaccaacgcgttgattaatgattttcatcctctcttgataaaactcaataaatttttgtgcattttcttcttcgttgaataccttcccaagtaaaatcatacttggaatcgtatttgttagcggatattgatggaaatcgataaagataacctggatgcccgctttttccagtaacatgatggttccactatcattgagcttggtttgaagaccaatatcaaaaataaccagatcgggtttataagtcagcgctttttcgacgttaaaatcactgtgataagggttagggaataccggaatatcccgcaattgcgggaaatctttctcataagtagttgccaaatctggagatttaatttctagtgcattatcccaggcgacaatacctttaagcggattatcagggtgaagaatattcagggcaatcaatatccggctgtcagccagcataacccgactgactggcgcgtcaattttaaccttccgcccagcaacgtccttgactgtaatgacttttgcttgcgcaaagacaggcagtaatatcaatatggcagtcagaatatattttgcagtgcagtggatgagtgccattatttctccttggttttcggtgctggtttttaaatggttaagcgaggcgataaacgcaagtatgatctcatctaattgtgatggttccaactacattattggtctgaatatcggcagttactgtagtcgtatctggatctgccatattgtcggttggtcgggtgttttaagcatctggtcgatttggcagaaagtcgttttttatgttgttgaagaaataacaagtgatcgtattttggcatcgtagctgctaaccacaaggataattattctggaataacatgatgagaaagttaattttatttgctattttttatcaatttggctaattatatattccatggatttcaagaatggatcgcgacggcaagggagtgaatccccgcgagcatagataacgatgtgaccgaggtgagcgagtgcagccaacaaagaagcaacttgaaagatgacgggtatatacggtttattgcttctgttattattcccttgttgaatattcggtgggggatgaatatgaaaaaattgttagtaatttgtttgttaggatgtgtattagctggctgtgatagccaacctaaaatggatgcttctaatgaaatcgcgttgaaagcatccattgaaaaagtaagagataggctacctgatgataaaaaagtgaagtttgatgaatcaattcaatcggctatgtttaatagtatcgattttaatgatttggttaaatcaggttctaatggtgacatggaaaaatcgaaacaaaagttttataaattgctggatggtaaaacggctgaccaattgattactgaagttgaaaaaattgaatctaagagatcaaaaaatgaataattccttcataggattattctcattaaacggcaaaaggtggaaatctatgccgttttttttattatcatcagaaacttaaatgaaacttaaatgaaacttaaatgaaaattaaacaaactcactttcaattttgaattattacgactcttgtttacaatatgcgccgcattctaagtgcagtatctcgttaggcgaggctcctatacaaacacaggttgctgatctgacgacgtcgagagacgcccaagattaggacaggatatatcgaaccaaggtatatccccatgtaactttctgataattcaggatacgttgtatagtgctaaaaccgagacgtagagatagtcgttgcattctctcatctggtttcgcccctatgtgagtgctgtttgaagttcacaacagtaatagggaccaacatcatgaaagtcacatcccatgaaaaaatggatgcattagcgattgctaatcattctattaatgaaataaatgctgatcagcagcggaaacatcgcgtgaaaaatgcagagacaacggtcagcgcatatatgagccaatgtttcatttctgtatctgttgctgattctgttttgtcggtaaaaagtcatttgattgatcagcttgaaggtgagcagatcccaacttacttatatgttattgatgctgaaggctatcttaatggcatattaccggtgaaagggttattaactgtagccgatgatttatttgtgtcagatattatgaggcaaagctatttttccgtatcaccggaacagtcgcgtcatgatgtttataatttgataaatcacagtggtatggatagtgtcccggttacccattttggtaaattggttggggtactacgatcgcaggatattgctgagttggttgaagatgaaaatacgttggatgctcatttgcagggggcaactttacctctggagcggccttatctgagtaccagcccaataacattatggcgtaagcgtgtcgggtggttattattactatttgttgcagaagcttataccggtgctgtgcttaaagcatttgaagatcaattggaagcggtaatttctctcgcatttttcattccgttattaataggaacggggggcaacagcgggacgcaaattacctcaactttggtcagagcaatggcattgggggaagtgagtttgcgtaatctatgggctgtgttgcgtaaagagatttccacttcatttttagttgcaataacgataggttttgccgcgcttatccgtgcctggatattaggtgtcggtattgaagtgacgattgctgttagtttggccatcattgcaatcaccctctggagtgccattgtttcttccattattccaatggtattgaaaaggctatctgttgatccggctgttgtatctgctccttttattgccacgtttattgatggtacagggctgattatctatttcgaaatagcgaaattagtgatgacagaactcgtttaaaattaccaataagatgcccatattcattgggtatcttattgatttaaaaagagttttatttatatttcatctgtaatggtaattaaaaattcttggttttctgtttatattgttagatgaaagaatgctgtttaatatctttttattaggggtttaaataggatgtttatttaaattaacttaatgttttatatatttaatatcgaatttactatcaattaatatgaataagatgaacgggtttaatagagtgaaaatatatattaaaaataatttaataaaataatttattttctattttaatgagtttatttatttaatttgtaattaatcgatattatttagatatattttcaaatggtttattttttaatttaaaatttatttgtggtggtgtaataggtgttttttatcatattgaatatgcctgaggttttaataaaattctattttaccccaggcatgattagtgacgagcgtcataaggacaattgcgtccgcagaagaagccctttaagttaataaaaatttctcagggatatagtgataaagactattgactcgacaatattcttctaattgaagagtggagtttatgtttattttatgatatatcctgtccgtatggttttcaattacactagaatcaagattcaagattattccaatttgatttatggtgtatttctgtaagaaaaggaaaataatatcccattcacgctcagtaaaaagatctgtcggtggttggagtaaaatggatgagggaagtttattatgatattgatacagacgggttaatgaatagtcctttatcctccagcaatgatatataacgcctatacaacttccatcttcatgataaaaaggcatcttttcacagaaataagatgatagaatttgctctttaccaaatatatgtgtttcaagtgagcatatatttttccctgttttcattactttttgatcatgatgaatatattcctttgcaaattcagcgccatcccaagggagttcatgatcataaagcccgctgtaatcaaatgattgtgagaaatttttgatagaacttaacgctttattaccataaataaaacatgaagaactatcttttattccccaaggttcattacttatttccattgtattgataatctgaggtgatatcgtacagttcttcataaagactccttaataatttgaagattaaataaacgttctacttttggattccctcgtgttttctgggatatagcaataaaattgacttttttcataagaattttctagttttatatgttatggcagatcgaattgttgtttattgttttaatttactgtttatcgtatttaaaacaatgggttataggtaatacttggtaatctgttagttaaaaagtacatttgttggttaattgattatcttacacattcagatccattccaaggaagctcatgattgtaagactttctccaatcaaataatttttcaatattataagtaaattcttttgttgctaaattaccgtaaataaaatatggataaccattttttacaccccacggtttgtaaccttttttccatatattaatgaattgtagagtgatatttgatatacccgtcatctttcaagttgcctctttgttggctgcactcgctcaccccggtcacatagttctctatgctcccggggattcgctcccttgccgtcgcgatgcatcttgaaatctataaggtatataaagtgcattttatgttctcaatgatattttatataattaataatatattattacgatattatcgttgtgaaataattcttccggtttatcgatttattattatctaaatattcagcaggccatattaaagaacggctatgaaaaacagctctgctaaataatcttccatattgaatacctacctgtttttaataataattttttattataggagaattaagtgtaatgtttaaatgggactagttacttaatcataaccttaaatttccggtgttttagataaaccggaacattttatacgagttccacttactttatcttcaaaatttttttgatatctggcaatggattataagcaagatcagaaatcgatacataggtcacattttcacatttcatgaaaccggttacatgaaccgcaaactcatctcacatttcatttgaaataaattcattattctatacttctgactatgagggaattccctatagaacgaatagctattcttgctaattattgaaatatttttccattgatattcaaccttattgaaggccatatatgagtcaaatcacccctcagctaacaaatatgtgggataaaagtcatgaatcatggtttgtaaaagataagaatcttcgttttatgtatgcaaataaagtatttatcaaattaagtaagttacctgaacactttgatgtcacgggatatactgctaaagaattacctacaccgtttaatcatcttgttcacctttttgaagaacatgaccgtaaggttttacaggcgatgcaacgaatatcatctattggggcttatcttcaaagcgatagccagcagcttaagccttatttttgtgaaaaatacccgttaatggatgaaaataatcaatgtattggagtaatttgccacattaaagaaataaatcatttttcagtacatcattatattaaaaatgacacaactatgtctgttaagcatagccccccgaataatatattgacagagaaagagtggatagtaatctttttattttgccgtggcatcagtaatcgatgtattgctaacgaaatgaaaatttcatgtcgtactttggaggggtatttccaaagtatatatgaaaaattatcgatcggatcaattattgaattgaagctattttgcgaaaataatcattatgatctctatattccaccaaaatattttaaatctatgaaccatttttttttggattaagaacgatccttgagttccatatattctgtcacttagtcagggtaaacgatggaatatgatacttaataagtccatgatgcaaatcagcttcatagctcattttcaaagttaggtcgtagatttggttgttaagatctttattgtcggtatattgagaatccaattcatactcccaaccgcttctattagtcggggtatgatttattttacataatcgctgaggtgagagcatgaccacaatgaaagacgtagcccatcaagctggagtatccgtagccactgtaagccgtgtcattaataataccgcttatgtcgaaccgggcactcgtgagcgtgtagagaaagctatgcgtgagttcaattatcatcgtaattctgccgcacttgcattagcgaaaaggtgcgggaatatgttgggtttactcaccggtaatttagctgatccgtttttttcgcttttagctcgcggggttgaaaaagttgcccgacaagaaaaagtaaaactgatggtttgtagtggcggatatcaagctgaacttgagaaatctgccttagattttttaattaatcagggatgcgaagcaatagtagcgcatgttagtaggatgagtgatgtagatgtattacgttatgccgctcatacaccaggattggtgattatcaatcgatatttccctgctatcgccaaccggtgcatttggttagataatgtcagcgcttctcagattgctaccaactatcttcttcaaaacggccatcgaaaaattgcttgtgtaacggcaaatctaccgattgataatagaaggctccgtctggagggatattatgcagcaatggctaatgcgggtgttacagtacctggcgattgggttatcagtgttccatttaatgaaaagggtggagaactggcagcagaaaagctcttagacagcgacatcggctttaccgcggcagtaacattcaatgatgttatggctgctggtatgatgcgctccctacatcaacggaaaatcaaattaccggaacaactgtcgattgttgggtttgatgatattgtcccggcccgatatctttatcctcccttaactaccgtacataatccaatagaacgaatggctcagcgggcggctaatctggcattgcaactcagtgccaaaaaagaaataactccacagatgaatatgttctcagccgaactcgttatcagagattccgtttttttaatcgagtaatgaaaagcgtcgtaataagcgtaaaagcgatatacagatcacatttcacatcttatgaaaccaattacatgaacaagtaatatctgtcacatttcattcaaaataaattcattattctattctgtttcaacaacccatctgaaactggagttttaatatggatgacaagaaaaagcttaatttgggactcgctatactgccaatcgcagcaatgctcttattgttagttattggatatggtcaactgaatttacgcatcgaatccctattactgatatcagcagcaatagcagctaccttggcatattggcaaggttatcgttggaatgacattatcgatgctattgtgacaaagctggctaaagcgatgccggtgatcatgatactgatttgcgtaggcgggctaattgggacttggatgttcagcggaaccataccgtatatggtgtattgggggttaaaactgattagcccccaatacatactgattgcggctttttttatcacgagcgttatctcggtttgtaccggtacgtcatgggggtcagccggcacagtgggggttgctctgatgggcgtcgctgctggccttgatgtatctttggccgcggcagccggagcggttgtttcaggtgcgtatttcggcgataaaatttcaccgttatctgactcaacaaactttgctgccatcgttgccgatactgatctttacagtcatgttcaacatttgatgtataccactattcccggctttgttttagccgctattgtctattttattgtgggtcatacaagcttaacaggtaacgtggcaacaccggaaaaagttacagaaattgtgcaatctcttgaaagcctgtatcacttcaatttattgctgattttgccaccgatattggttttatggggagcaataacaaaacgtccggtgatacccgtcatgcttgctgcctgtgcattagctattgtacttggcataggtctccaagggctcacccttaaacagggccttaatgcgttgatagacggtttcaatctctcgatgttctctgaccagggacacaacattaccggagttgttagcgatgtctcccgtctgctcaatcgtggtggcatgttctcgatgatgagtactatcctgcttgcattttgtgcattcgcgttcgctggtgctttagcactcactggtgctttgaccatcatcattaaccggcttctacaagttgttcacacaaccgggcaacttatcgctgcaaccttggcaacaactattctggtaaccggcgcaacttgcaatggaaagctggctctcctcatcccggctgagctattcaaagatgcttatcgtcgcatggggctggataataaaaatctgtcacgaacaatagaagatggttgtaccgtcatagaaccgttgatcccttggactgccgctggcatttatatggcgacgacattgggtgtcagtacgcttgagctactgccttgggctatccagtgctattctgccatcttctttgctctcatttatggctttactggtttcggtatcgcaaaaatcacgccggagaactccctgaataaaaaggaaatccaacgtgaaattgcctgatttcaaccagataatcgatcgccacaatacaagctctgtgaagtgggactttttaggtcgtgatttgtacttaaataagactgacctgttgccaatgtgggtatctgatattgattttcaatgcccggaagcagtcttgcaaacactctactcccgaattgaacatggtatttttggttatagcgaacgcgacgatctctattatcaagcagcaatagactggttttcaaggcgtcataaactgaccttgcaccgcgattggtttacatcaatagaaggcgtcatacccggattggctttactgatacagatgctcagtaaaccgggggaaggtgtcgttgtgcaagggccttattatgcttcattcgccaaaattattactatgaacggcaggatggtgattgaaaacccgcttcttgaaagtctggaaggttataaaattgattatgatcatctggaacagatattggagcaacacagaccgcctctgttattgttatgtaacccacataatcctactggtagatgctggaatagtgacgaactactccagatattaatgctttgtaaaaggtacgggacgacggtaatttccgatgaaatttgggctgatttaattttaccgtgggggaaattcacctcaatactgcatctggggagtgaatggcatgacaatgtcattgccgccacctcaacaagtaaggcatttggactttcatcactccgtatctccaattttctcattcccaatcctgaacttcgacgtgcctttatcgatcggttgaatgcgcatggactagatgtattcaatgcactatcgatgactgcggctacagccgcatatcaatatggggacgtatggcttgatgaactacagcattatctggcggaaaaccgttgttggtttgagcaggctttaacgtctgttgttccctggtgtcgaatgaccaaagcggaaggtacttatctggcttggctggattgccgcgatttaaacttggatgatgatgctttgcaacgtgctttattacaaaaagccaaaatagccgtttcaatgggatcgagttttggtaatcatgggaaaggatttatcagaataaacttaggttgtccccgcgaatatcttgaaaaggcaataggtggtttagttcagataacatcataaaataaaaaggtaaatagccctgtattaattctatattcatacctgaagctttccacaagaaaagcttcaggtaatgagtatcctctcattgatttttatatgagaagttcatattaattttgaaaatgacaactcatttaaaatatctactcggccatatttcgcaaggatcacaatttaaagcggcagcaataagtcgttcgcctttgggccacggacggtgcagcgcattacttaaggtagatgatgcaagccccgcctctcttgaaatagcagataacgacgttccccgttttttaagtcccgcaataatatccgctgggtgccagtcgttttttacaatcattcctttcttctctcctcagtttggttattcaaggtgctatattcatactctctcttcaatttgatatttttatatttctacagctttttccctgagtccgcgcaggcgcagaatgttaaaaaatagctgtactaagacattaaaccccgccaagtacagccaaatattctccgaatagaaaattgtctaacgacaaaaatgttattaaatgaactctgattgttcaaaattgaactttaaatgttcagaaatgttctttttagatcgctaatatattcaaaaagtttagttatttttggaaatgttgaaagcggatgaaatactttaatgaatgtcttaagctattcagttacagggaatgacaccaacttagttagctcagtgaattaataagaccattaatcttaatgagttgcgaagttatgtacgttcaattttttaaaaacttcttaactaataaaataaatcatataaatgattattgtttaaaacaataacattgtttatattttatagtacttataatgttgtcgtaaaattaataaaaatacactttttggctggatgattgttgtgctgtattatatagttaagctgtctcgattataattaaggtagcaattcattcagataatttcttaatgataattcagtagtcactatgtaaaatataataaaggaacgatgacatgaataataagttaatcatttcacctcaagttattaacacattggcaatcagtaacgatccttggggaataaaagataaaaattcctgttttatttatggcaataaagcgctgaactccatcaaaggtttttctgattcatttgatttcgaagggctttatgatgatgagcttccttgggatggtgccgagtttgcaaaagaatatattcatcatgaccaaaaggtaatgaaagaagaaaaatcatatgtttcactcgaaacccatatttggggagaaataagaaccttatcctcctatttctgtgaaaaacaacctatttatcatgaaaatggtgattgtcttggaattatctatcacttgtggaaagctcaagattattcattaacacgtttatatcatggaaaactccccgcttccattatatttcaaccaccgactcatttatttacccaacgggaatgggatgtcatttttctctctttacataaatataccagtaaacaaattgatagaatattaaatatttcctaccgtactgttgaacactatacccgtaatcattgaagatgcttgattttatccgaaatggagatcattatcctcgctatgaaaatattcattaccgatgaacaaaaagccgaacttgaacatctccatcacacctgccgtgataagagggagtgtgatcgcatcaaagcggtcctgctggcctctgaaggctggagttcagtgatgatcgctcaggccctgcgtcttcatgaaatgaccgttaaccgtcatatcagcgattaccttaatcaaggtaaacttaaatctgataatggggggtctgatagtttgctttctcaagaacaaactgattttttaatcaatcacttatctcaacatcttttccatcacacccatgaaatcgtggcctatgttgctcagctctggaatattacctttagcattcccggcatgaataaatggctacaccgtcagggtttttcttataaaaaaccttgtggcgtccctcataaattcgacgcagaaaaacagcgacaatttattgaatattatgagaatcttaaagtcacagcgaaagacgaacccatcctttttcttgatgctgttcacccgactcaaggcaccaaactcggttatggctggatgcgaaaaggcgagaaaaaaacagtaaaaacaacaggaagccggactcgcctgaatatattgggcgcgctcaacctgaatgccattggtcgtacggtgttccaggaatatcaaaccatcaatgactacaacatttgctgttttttcaatgaaataagaaagtcttatcctgactatcatcaaaaaattcatcttattgtggatggggcgggttacaacaaagctcatcttgttaaggagtgggcttatgttagcaatattgagttacattaccttcctccctatagcccaaatttaaacccaatagagcgattatggaaggtcatgaatgaacaggttcgaaataaccgttattttgcggataaacatgaatttcgagacaacgtcttcaaatttttcaccacaacgctaccggatatagcggactcgctgatgtctagaattaacgaccattttcaggtgctaaaaactgcatcttgaagtttcttgggtatatacggcacaaatatacagaaaagttggtgttagatctgctcggcaattggaggaatactgtcgctttaataattatgatctttatgtaccagaaagatttttacgccctgaaagcagtatttttgtttgaatctcaaattttagcgatgttcacaagaagaaatagacgaactgagttatcgttatatgccgtatttaccggaaaaagcgaacatgaccagcacactatgatcttttttactacccgtttaaggaaggacggggcaatcaataccgggctaaacaaaattgaacgcttgtggtaattattacatgaagcggtaacacgaaatcattgttgtcagtatatgtggcagttacttaaattaaatatgtggaagagtttatagaaagcgttttcgttgcaacaacaatctggagtgaaaaaataagtgtaccaccatatggaagcttatttagtttatccagtcggaccggcgggtctactcagctcctccctaattcccacttcaggtgcaaaaattagtcacgacaatacatccgaaaaagtctagccaaatgttctcctgcgggagttaactttgtatctcttcgttgaacaaggcaaaaagttgcaaagggaagctcctctttaaggtttaacgccacaaattgctggttaaacagagtctcatcaaccacatccacagctacaatagtcacaaagtcactttcggagactaaactcatgcaagccattaatgtttcacacgtgacactaaagacaggtggattatccagcgatgtaaacatctcaaataacctgcgatagtaggtgcctttcggtgttggcatggtccagtcacaatcaattaattcgtctaaagaggttgcattcacttttggatgcccttttcgtacaatcactttgtactctttttccatcaatttttcgaagctcaattctgcatctaagctaccgggataataggtgttcacggtaaaattcagttcaccttgtctgagctgaggtagcatagtcaataactgtccctcaacaactcttaattttactgtaggataatcacggtgaaactgtgtaatcacctttggcataatcgtacgtgcaatactgccagctacgccaatattgactacaccaccgatcaagccaactcgttgttgaatatcttcctgtgcaattcgaagctcctcaagtatcaaacaggcgcgttgtaaaaaactttttccacaccctgtcaaatgaataccttggttactgcgtataaataattttgcaccaagtgaatcttctagttcgcgaatcgatttggtcaaagcaggttgtgagagtaacagaaaccgactagccgctctgatactgccatgacggtaaatttcaacaaaagcgcgcagttgattgagttttattggtgtcgtcatttttctctcttgcgataacttttaattatatagataaagataattgtatcttacttgaacaaaatttattgtatacattaaaaatcagtaatgaaaaatcgggctgtatttaaatttaaaattcaacaaaaatatttttaaattattaaaacaataaaattttaaaaaataaactagttcaatcaaaattaaataaatattttaacaaaatcaatcttggtgaaataaactaaatatattttcttctccgcgataactaaaagagataattattatgggcactttattaagcgaatctattcagcaaattgctgaacaattacgaaactggcgtcgcgatttccaccattttgctgaatcaggctggttcgaattcagaacagcaacgattgtggtggatgagctgcaccgtctgggttatagcctgaaaatgggaaaagatgttatcaaggctgatgcacgaatgggcttaccttcaaaacaggcattacaagcgcaagaacagcgtgctattaaacagggcgctctgactgaatggctaccccatttttcaggcgggtttactggcattgtcgcgacactcgataccggaaaacctggaccaaccttggcttttcgggtggatatggatgcgcttgacctgaatgaggaacaaactcacgtgcaccgcccttatgctgaaggcttttcctcttgtaatacacatatgatgcatgcctgtggtcatgatggtcacacagcgattggattaggactcgcttgtatattgaaaaaatatgaaagccaactgactggaaaaatcaaactgatttttcagcctgcggaagaaggaactcgtggtgcaaaatcaatggttgaagcgggcgttgtcgatgatgttgatttctttatcgctattcatatcggcactggtgtacctcaaggcgaattggtctgtgggagtaataattttcttgctactaccaaaatcgatgttacttatcgtggtgtggcctcccattctggtgcaaaaccagaagcgggaaaaaatgcactgttagccgcagctcaagcaaccttagggctgtatgctatttctcaccatagcgaaggcagctcacgcattaatgtcggagtgctacaggcaggcattggccgtaacgttattcctgactatgcattaatgaaagtggaaactcgcggtgaaactaatgagatcaatgcatttgtctaccgtcaagctctcaatatcattgaaggcgcggcaaaaatgcagggggttgaatatggaatacagttaatgggagccgctcaaagtagccagcctagcccagtatgggtcgatttcatttatcaacaggctcaacaatatatcccagagctttcatctgttgtcaaaagccgtcagcaagctgccggatctgaggacgcgacctattttatggaacacgtcaaatcgaatggtggtcaagccacttaccttattttcggtacagcactcagcgcaggtcatcataatgaacggtttgactttgatgaaaacgtgatgactaccgcagtgaaaacattagccactatcgcccttaacctacctgatttcggagttcatcatgaataactcgttgattgaattcatcaatgaatacattgagcaacgccaaagtgattttacttaccttagcgataagatttgggaacaccctgagaccaattttgaagaaaacttttctgctgaactgctcgcaaatgcgttagaaaatgaagggttcgttgttcagcgtggggtaggcaatattgagaccgcgtttatcgccagttatggcagtggacaccctgtgatttctttacttggtgagtatgatgcgctggctggtttaagccaaaaagcaggctgttgtgaacctaatcctatggttaaaaacggtaacggtcatgggtgtggacataatttactggggacagccgcactcgctgcggcatttacagtgaaagcctggttgcaaaaaaatcaacaaattggaactgtacggttttacggttgcccggcggaagaagggggttccggcaaaacatttatggtccggcaaggtctttttgatgatgttgatgcagcaattacatggcatcctgaatcattcagtagtgtatttaatgtccagtctctggcaaatatccaaacagcatttcattttaaaggagttgcttcacacgccgccaattcccctcacttgggtcgaagtgctttagatgcagttagtctgatgaatgtgggtgttcaatttcttcgtgaacatatcattcaggaagcacgaattcattatgcagtgactaataccggtggtgtgtcacctaacgttgtacaggctgatgccgaagttttataccttgttcgcgccccacaactggatcaggctcaagatatttatcaacgagtcattgatattgctaaaggtgctgccttaatgaccggcacgcaattgaatattcgctttgataaggcgtgttcaaactatattcctaaccgcacgatggaaagagtgatgtatcagtatattcaagcctttggtattcctgaatatactgatgaggaatgccaatttgccgaaaaaattcatcaaacactgacaaaagatgatttacgcaatgccaaactcaatgcagcgcgaacagcgggcgaagagggtaaacgctggagtgagcgacaaggggaaaaagcactgacagatgaagtcttaccctatatagaatcgcaagagttactgtatggatctaccgatgtcggtgatgtcagttgggtaacacccacagcgcaatgtttcagtccctgcttcgcctttggcacaccactgcatacttggcaattagtcgcacaagggcgttcatccattgctcacaaagggatgtgtcttgccgggaaaattatggccgccaccgcacttaaattattaatagaccctgctctgctagcagaggtccagtctgagttcaaacaccaacgggatgagcatccctatcagtgtcctattccgcccgatattaaaccatcacctttgaaataactttgcttcgataaatactggcttgcttacagcggcaagctagcagctagcgttcagtcatttacataatcaaaaaataataacgagagcaaacacaaaggaaaaaatcatgagtgaaacaactatctctgtaaataagagcccaggacgtattcttggttggatcgaaagagttggaaataaaattccgaatccttttattttatttatctatttaatagctgttttaatgatagcgactgctattttgtcttggtttgacttggccgtaaaaaaccctacaaatggagagttcattagagttaaaaacttacttagcgccgaaggattacagtggatcctgcctaatatcgttaaaaatttcagtaacttcacaccacttggagcaatattagctttggtcattggtgcagggctggcagaaaaagtcggtctgttacaaaccctgatgtataaaatggcttctggtattaataaacgttacgccagctatatggtgctatttattgccttttttagccatatttcttcggatgccgcactcgttgtcatgcctccattaggcgcgctaatttttattgcggttggtcgccaccccgttgctggcctactggccgctattgctggtgttgcttcaggatttacggcgaacttattgattgtcactaccgatgtgctgttatctggtatcagtactgaagcggttaaaatgcttgatcccaacttacacgtcagtgtcatcgataactggtattttatggcaacatcagtgattgtactgacgattgcaggcgctatcttaacggataaatttgttgagccacgccttccagcatggaaaggaagtcacaatgagaagttagcaaagctcacgccacaacaaaatcgcgggctgctaatgagcggtctatctgcactaattttcatcggtattgttgcgttgctagttgttcccgaaaatgcactactgcgtgatccacagactggctcaatcattccatcgccattcataaaagggatcgtgccagtcattattttgtttttcttcgtggtttcgattacatatggcgtttccacaaaacagataaaaaagtctaatgatattccagacttactcgttgatcccatgaaaaacatggctggcttcattataatggtcttccctctggctcaatttgttgccttctttaactggagcaacatgggcaaatttatggcggtagggctaaccgatatgctagaagccttgggtatgacaggtgttcctgccttcattggattaatgtttttatctgcctttttgtgtatgttcatcgcaagtggttctgccatttggtcgattctggcacctatttttgttcccatgtttgtcctgcttggctttcaccctgcctttgcacagatcattttccgtatttctgattccgcagtattaccgttggcaccgatgtcaccttttctaccgctttttttggggtttcttcaacggtactataagggggctcagctaggtacttattacacgttggtattaccttatccgctggtgttttttgccgtttggatattgctgcttataggttggtattttgctggattgcccattgggccaggtatttaccctacattgctgtaaccaccataaaggaggaagattggtggtcgaatgaaagcgtcattaaatgcactttctatacctgaacccaacagggtggcaaaaatgaatcgcttttttgccgattgttgaaatgtttttctataccctatggatttcaagatgcatcgcgacggcaagggagagaatccccgggagcatagataacgatgtgaccggggtgagcgagtgcagccaacaaagaggcaacttgaaggataacgggtatatttatattcaaccttattgaaggtcatatatgagtcaaatcacccctcagttaaaaaatatgtgggacaaaagtcatgaatcatggtttgtaaaagataagaagcttcgttttatatatgccaataaagaatttgttaaattaagtaagttacctgaagactctgatatcatgggatattctgttaaagaattatcgacgccatttaattatcttgctcacttttttgaagaacatgatcgtaaagtcttacagtctatgcaacgagtatcatctattattgtggctcatcttaaaagcaatggtcaacagcttaatccttgtctctgtgaaaaatacccattgatggatgaaaagaatcaatgtattggaataatttgtcacattaaaagaataaatcatttttcagtacatcattatattaaaaatgatacaactatacccgtaatcattgaagatgcttgattttatccgaaatggagatcattatcctcgctatgaaaatattcattaccgatgaacaaaaagccgaacttgaacatctccatcacacctgccgtgataagagggagtgtgatcgcatcaaagcggtcctgctggcctctgaaggctggagttcagtgatgatcgctcaggccctgcgtcttcatgaaatgaccgttaaccgtcatatcagcgattaccttaatcaaggtaaacttaaatctgataatggggggtctgatagtttgctttctcaagaacaaactgattttttaatcaatcacttatctcaacatcttttccatcacacccatgaaatcgtggcctatgttgctcagctctggaatattacctttagcattcccggcatgaataaatggctacaccgtcagggtttttcttataaaaaaccttgtggcgtccctcataaattcgacgcagaaaaacagcgacaatttattgaatattatgagaatcttaaagtcacagcgaaagacgaacccatcctttttcttgatgctgttcacccgactcaaggcaccaaactcggttatggctggatgcgaaaaggcgagaaaaaaacagtaaaaacaacaggaagccggactcgcctgaatatattgggcgcgctcaacctgaatgccattggtcgtacggtgttccaggaatatcaaaccatcaatgactacaacatttgctgttttttcaatgaaataagaaagtcttatcctgactatcatcaaaaaattcatcttattgtggatggggcgggttacaacaaagctcatcttgttaaggagtgggcttatgttagcaatattgagttacattaccttcctccctatagcccaaatttaaacccaatagagcgattatggaaggtcatgaatgaacaggttcgaaataaccgttattttgcggataaacatgaatttcgagacaacgtcttcaaatttttcaccacaacgctaccggatatagcggactcgctgatgtctagaattaacgaccattttcaggtgctaaaaactgcatcttgaagtttcttgggtatatatctgttaagcttagaccacctaataatatattgacagaaaaagaatggatagtgatctttttattctgccgtggaatcagtaatcaatgtatcgctaatgaaatgaaaatttcatgtcgtactttggaaaagtatttccaaagtatctatgagaaattattaatcggatcaattattgagttgaaactgttttgcgaaaaaaatcattatgatctttatattccaccaaaatactttaaatctatgagccatttttttctggattaagagtgaacactgggagccttaataaattattatgtgcgtgcaatttttaactggaaaaataaatcacttaaataatctccaataaaaataatatttttccttatattgtttggtatttataataccataataaaattaataaacatacagtctttggctggataattgttatactacattatatagttaaattattttttgtatcatcagaaaacaattcattcagataatgactaaatgataattaaggagttactatgtcaaatataagaaaaaaaaccaatcatattacaccacaattaacgctgatgtgggataaaagcgatgaaccttggggagccagagatcgcgagtcaagatttatttatgctaaccctgctttttatcaactgctcaaccttcctgaatatttcgatattatagggctatctatgggggaattacccttgcctattgccgaatatgcagaagaattccatcgtcaggaccaaaaaaccattcaaactatgcaacgcgtcacttcactggaaacacatcagtttggggagcataacattaaacaaacttatatttgtgataaatttccactttatgatgagaataatgattgcattgggatcttctttcatatgtataaaactcaagatttttctgtttcgtactattatgaaaaaactcctccggcaacactggcattcaccccacctaatgacacactgacgcaatttgaatgggaggttctctttctaactctgtgttcattagatgaagagaaaattagtgaagaattaatgataagttccgaagatgtgattaatcatatccaatcaatttaccaaaaattcaatttgcctttacatgcagaattaaaagatttctgtaaagaaaataaacttgatctttatattccagcaagatttgtcactattggcagtagagagttaaattgattataaaatatcaagaatctaactttaaggctagcgaaaaaaggagtagtaacatggataataaactaattatttcacctcaagtcattaatacaatgaagcaaagtaatgagccttgggggatcaaagataaaaattcatgctttatttatggcaataaggcacttaaacatcttgaaaaccttccagactcatttgattacgaagggtggtatgattatgaacttccttggagtggcgctgagtttgcaaaagaattcgttcttcatgatcaaagtgtaatgaagagcgaaacaacagtatgttcgcttgaaacacatatgtatgggaacgataaattcttatcatctcatttttgtgaaaaatacccactatataataatgaaaacgaatgtgtcggagtcattttccacgggtgggaagtccaggatttttcattaacccgtctattttatggaaaactccctgcctccattatatttcagccaccgactgatttatttactccgcgtgaatgggatgttgtttttctctctttacataaatataccagtaaacaaattggcagaatattaaatatttcctaccgtactgttgaacactatacagcacaaatatacagaaaggttggtgttaggtctgctcagcaattggaggaatattgtcgttttaataattatgatctttatgtaccagaaagatttttacgtcctgaaagcagtattctggtttaagtctcaaattttagcgatgctcacaagaggaaatagacgaactgagttatcgttatatgccgtatttaccggaaaaagcgggcatgatttattacgcaataacctcctttactgtgcgttttaaggaagaaacggcagtaaatatcctttcttaccgcctaagaactatctatacccgttatccttcaagttgcctctttgttggctgcactcactcaccccggtcacatcgttacctatgctcccggggattcgttcccttgccgtcgcgatgcatcttgaaatccatagggtatattcgtatatctatgataaatgagaaaagaagatattttatcatcacgaaagcctaaattttaaaagctactgccgtttgtaataagacaaaaatgtgacgtaaattagcgctcagttctgccaaccgagctaaaagtcatcatctgacataatcataaaaggtaattcctaatcacaaatttacgataatcatcacattaaaagtaatttcatacagaaataaaaagataaaaatgtgatacgaatcacacaatgaaaataaaacaataaaattaatttgaaattattaatgttgattattaaatgattaatattaatctgttttttatacaatcctgtcacaaaataatcacattggcctgttttttgctttgtcatataacctcttgtttttgctgctatcttgaccaactccctattttagttgcccggttgataatcaacactaaatattgatcgctaagttaaattcgtggttaatgctgtttcaacattgtggaatagcaagtcaatgaaaagcagtattgtattattaatagttttttgtagcgcagtctcaggtagtcaagccgccgacatcgcagatcaacaactcattcatcaacaggcccgccagcaagccctggagacgcaattagccccgccgcctgcggaggttcacctgtcggtaccggaaaccggggaatcatccgcctttgcggtggaaactccgtgttttcccattacccacgtcagactggcaggtaccgaaaatttcccgcactggttaccgttccggcttgtcgcccaacagggcgaaaaccattgtctgggcgataaaggcattagccggctgataacccaattgcaagatcagctcattaatcacggctatgtcaccagccgggttctggttcctcgtcaggatttgcgtacccaaaccttaaaactggtgatgataccgggaaaaatccggcatatccgctatacccctgacagcgggaactatatccagcggataaccccctttcccgcgcgtgaaggaaaattactggatttacgggatatcgagcagggactggaaaatctgcaacgtttccccaccgtgcaggcggatatgaatattgtcccggcagagcagccgggggagagcgatattgtgctggactggcgtcagtcccggcactggcgagtcgccacgtatctggatgataccggctccaaaagcaccggacgttatcagggcggactcaccttctttctggataatccgctggcgctcagcgacctgttttatctctccggtggacgcgatattcattcgtctgccgggaaaggcagccaaaatgacacgctctattactctttgcccttcggctactggatggcgagcgtgacggccagtcattacgattatacccagacaatagccgggctgaatcaggcgatccaatatcggggcaaaagccaaaacctggcggttcagcttagccgggtgctgcaccgtaatgccgaccagaaaaccctgcttaacggtgaaatttatcgtcgggcgtctcgcaattttattgataacactgaaatcgacgttcagcgccgggaaaccgcgggctggaagctggggctgtcccatcatcactttatcggcagcgcgacgctggatacccgggtgacttatcaacagggcatgcgctggtttggcgcacaaccggcaccggaagagtaccgcaatgaagggaccgccttacctaaaatcacccagttctcggcgacacttgccgggccgttaacgctgttttctcagccctttttttatcagacccaatatttgcgtcagataagcgccagcccattgacgccccaggatcgcttctcgattggcggtcgctggacggtacgcggctttgatggcgagctgaccttatccgctgatcggggttggtacagccgcaacgaactggactggcaaaccccgctgcgcgggcaatcgctgtatctggcaatggattatggcgaagtgggcggacggggcagcgatacgctgctcggaaaacacctggcggggagcgcgctgggctggcgaggcagcctgaaaggggtgagctacgacctgtttgtcggcgtcccgctgtccaaacccgccggcttccaaacctcccccgtcacggccggattcaacctgtattggcagtattaattcaaatagcaaaactgccagtgggtagtgttgtgtggagtaaaaatcatgaacaagcagttatatcgtattatctttaatcaggcccgccagatgtggatggtggtggccgagatagcgcgggccggacggggaagaaccggacgccgcgctcatcgctccgcttcaccgcagcgttgttgccggctgactgcgctacggtttggggtgttattcgcccttggcggaatttcgcttacggcacaggcggcgattgtggccgacggacaggcaccggggcgtcagcagccgactattattcgcagcgccaacggcacgccgcaggtcaatattcagacgccgggcgccgatggcgtttcccacaatacctaccgtcagtttgacgtggataaacagggagttatcctcaataacagccatcaggctacgcagacgcaactcggcggcatggtggcgggcaatccgtggttagctaaaggggatgcccgcgttatcctcaatgaagtcaacaaccataaccgcagtcacctcaacggctggattgaagtggccgggcataaagccgaggtgattattgccaatccggcgggcatcacctgtaacggttgcgggttcattaactcacatcgcaccacgctcactaccggacaagcgctgatggagcgaggccggctgaaagggtttgatgtcaatcagggggaagtgcggattgacggacacggtatggacagcacacagcaaagttacaccgatattatcgcccgctccgtggcgattaacgccaaattacacgcgcaagacctgaaagtgaccaccgggcgcaatattgtcgatgcgacgcatcagcagatgaagaaaaaatcgattgacgatgaaaagcacccggcgtttgcgttggatgtggcggcgctgggcggcatgtatgcccataaaatcaggctgataggcaccgaagcgggggtgggcgtgcataatgccggtaatatcggcgcgtctgccggcgaggtccatatcaccgccgagggccggatagagaaccgcggcaccctcagtagtcgggatacgttgcaattaacctcgtctgccgatgtcactaacaccggcaaattgctgtcacaatcggcggtgaatttacaggctaaaggtgcgctcaataatcagggccgggtggaagcccgcggcgataccaccgttactgcgggcacgatacacagcagccatgacagcgtatgggctgcggggctggatgataacggcaacactacccgacccggctcattgactctgaccgcgcagcacgttcaggctaagggcaaaaatctggccgccgatacgctggctatccacagtcagcggattgacctgagcgacagccagaccgcagccagccagattcaactcaccgccagtcaattgggcatcagtaccgctcgcgctaccgtcaacgccgaccgtttgaccgcgaaaaccccgggccagtttaacaacgacggcggccagttagtggcgcgagcaatccacctcacgacgcctgatatctctaacttgaagggaaaaattaatcagaccggtactggtgaactgacgctccatacccgcaccctgaataaccgtgaggggaccgtgttcaatcaggggaaattgaccctcaccactgaccggctcgacaaccatcagggcactattgccagtcagggcgaggacctgcatctcaccgcgcatcaggccgataacaaccagggaacggtgcaactggcaggcaacgggaaactgtcgctcaacacgcaacggtggctgggtgataagggcaaactgctgaccaatggcaccctgacgatacaggccggtgaactgcaactcaaccacgccgaaactcaggccgggcagataaccatcaacgccgacaccctgagccatcaaggcggcgtgatgcaacaatggggtaaggatgacttgtccctcactacccggatactggataaccacagcggcactattgcgggcaatggcaacctgaaccttaaggcaacgaccgtcgataatcgtcacggcaatatcgtggccgccgaccaaggttcgctgaaactgaccgtcaaagacacgctggataatcagtcgggcaaactggaagcgggccacgcgctccaacttagcgccactcaactggataatcgccggaggagcattgttgccgccggggacagcgccaccctcaccgttggcaaaactattcaaaacgctcacggccatcttgaagccaaaacccgactgactacgactagccagacgttggataacacccagggggtgttgctggcacaaaacattgacagccagaccacaggccatcccttcaccaataccgccggacaggtgatagccgaagacaccctgacggtcaacagtggtcaactggataatacggcggggctgttacaggccggtcgcgagatggccgttgatacccacgggcatgggctcaccaatacccaccatgccgaccaaaaagcgggccggttattgagtggcgggcagttaactttgcgcaccggcgacatcgacaacaccggagggatgatcgcagcggacggcaaaaccgtgctgaccagcaccgcgctcaataatactcagggccagatagccggaaatagcgggctgaacattcacagccgacaactcaccaaccgcgagggcactttacaatccgccgacgccctgactctggataccgacgggcagttactggataaccagcagggccagattatcggtgagggcaaaaccactatcaccagtggcccgctggacaatcgccacggtcatcttcaaggcggacagttggctatcgatacccgacacgccgcgctggataatcgggatggcaaactgttatccacggacaccttaactctgaacactcaccaactcgataatcgtcacgggcaggtgcaggcggtgggcgacactcagcttgatgttgacactcaaaccgataacaccggcggccttatccgtggcggtcagcaattgaccctgaacaccgctcgcctgattaaccgcgagacggcgcacacggataacgggctggaagcgcaaaacctgacggtaaacgcgcaacaggtggacaatactcagggcgctttacgggcggccaaccacctgcaagcgaacatccgccagacgttgaataatacccagggactggtctccgcaggtaaacaactgacggtgggcgacaagagcgggcctgcctcgctggcgattaacaaccggcaaggcacgctaattgccggggaacacgcagctatcaccgcacacgccttgagcggggacggccaactgttatcgcagggcgatatggcggtcactttaaccgaggattttcaccataccggcaacacggcggccaatggcaatctgacgctgaaaacgaccggcaatatcaccaacaaccgccagataaaagccggtcgggcgctgtatctgggcgcacagaatctcatcaacagcgcctccggtgaaatcagcgccaaacaaacgcaaatccaggttcacgatacgctgaacaacaccggactgattgacggcggcttaacccatctcacggccaacactctgaacaataccggcaccgggcgcatttacggtgaccaaattgccctccagacaggcacactgaataactccgcacaggacggcaaagccgcggtgattgcggcgcgggaccaactggatatcggcaccggaacactcaacaaccagcatcatgcgcagatttacagtgtgggcgacatgcacatcggcggtcagttggataacgccctgaaagctaccggccaagctggtgtgctcaataaccacgcggcgacgattgaagccgggcgccatttgaagattaatgccgaccggattaacaacaccaacgccgggttggtgactcaggtcgtcgaaacagaaaagtctcagcatcacgatgcagtactgagcggccagaccactcgctatgactggtcacaggtggacacctcccaccgcaataaatacaaagtgcacgatgccatcatgccggacggcagcggcagtaatgacttttacgaatatcagtacacccgcaccgtcagggaaactcaggttaaacagagtgaccccggtaaaattctggccggcggcaatatgacgctcaacagtgcgcaggtcaccaatcatgacagccaaattatcgccggtggggcgctggacggggtgataggcgaactgcataatattgccactcagggggaacgcatcactaccgataaaggtcgccagacccactggtatgcgaaaaagaaacgactgaagccccgattccgtggtaccaaaacctcgcagggaaaaagccgcagcaattatgcccccgccccagtgatagaaaccatcgacctgaaaacgctggcctggcaggagcatacccgtccgcagggtaccgatatcacgattacagaccgacaaaccggtcagatacacgcggcccccacgacagtcacaccggtgagcggtatcaaaaatcagccactggtcttgcctcccggtcagccgtttgagctgagtttgcccccggagaccgtcaaagggcaaacagtcgatccggtgatacgcgtggtgacgcccgatacccgcttgccgaataacagcctgtataccgtgcaaccgggcagtgacagtcactatctggtcgaaaccgacccgaaatttacccagtacaaaccgtggctgggctcggactatatgcggcaacagttaacgcatgacccggcgctggtccacaaacgtctgggcgatgggttctacgaacagcggctggtgcgggaccaaatcacccaactgaccggccggcgctatctgccgggctacaataacgacgaagcgcagtttaaagcgctgatggatgccggtgtcgcttttggaaaacagcaacaattaacgccgggcgtcgccttaagcccggcacagatggcgctgctgacctcagacattatctggctgactaaccaaaccgtcactttgccggatggcactaccgaggtggtcaccgtgccgcaggtttatgcgcgcgtccgtcagggcgacctgcgcagtgatggcgctttgctggccgggaataccgtggcgctcaacagtcagggcgatatcaccaacagcggcacaattagcgggcgggatgtgactcaactgacggccaacaacctcaccaacagcggctttattcgcggcggcaaagtagatttaacggcccaacagacgctcaccaaccggggcggccggattcagggggatgaccgggtgaccctgaaaggccgggatatcaccagtgcatcaacggtgcgcggggatgaggctaatcgttggttagatcgtccggcaggcatctatgtgcagaacgataacggcaccttatcgctgaacgccatcaacaatgtgcaattaaccgccagtgacgtcaaaaacgccggtaaagacggccacaccgagataacggcaggccataacctgacgctggacaccttaagcacgcgtcgcacagagcagggcaactgggggaaagataacactcgccatctgacccaacaacaagatatcggtagccagataaccggtgccggtgaggtgaccctgcaagccgggcaggatttgaacgccaccgctgcccacgtcaacgccggtcaacacctgacggcgcaggccggaaataacctgacgctgaccaccgggacggcctcatccgatttagtggagcacagtaaacaaaccagcaaaggctggctgtcgaaatcgtcagtggaaacccacgatgaagtgcacgaccggcaggcgctcagcaccacattcagtggcgataaagtgactttacaggccggtaaagacctcaatatccgcggcagcaatgtggcgggcacgcaggatgtcagcctgaacgccggtcatcagctcaccgtcaccaccgccgcggaatctcacgatgaaacccatttgcggcaggagaaaaaatcgggcctgatggggactggggggattggcttcaccttaggtaaagccagccagaaagtcaccaccgacagtgacagccagctgagcaaaggcagcacggtcggcagcagccagggcaatgtcacccttaacgcaggtgaacagctccgggttcacggcagcgaggtgattgccggtaaagacctgacgctcgccggtcaacaggtcgatatcaccagcgcggaaaaccgccatcacaccacgacaaaaaccgagcaaaaacagagcggcttaactgtggcgctgagtggcacagcaggcggggccgtcaacagcgcggtgcaaacagccagagccgcccacaatgaaagtgacccgcgagtgaaagcgctgcaaaatactaaagccgcgctgagcggggtacaggccgtgcaggctggccgactggcggaagctcagggcagtgacgacaaaggcaataacaatctggccggggtgagcctgtcttacggtcggcaatcctcccgttcagaacagcagcaccgtcagaccacccaacagggcagccacctcaccgccggggataacctcaccataaccgccaaaggggatggcaaaggcgcatcaggccagaatggcgatatccgtattcagggcagtcagttacaggcgggcaaagacctgcaactgaatgctcaccgggatattcagctctcctccagccagaacaccgaacagacgaccggcaagaacagcagtcacggcagcgcgctgggcgtgggcctgaccgcagggccggggggcaccggtctgaacgtctcggccaatgtcagtcggggcaacggtcacgaaaacggcaacggcgtcagtcatactaacaccacgttacaggcgggacagaccgtcgggctgaacagtggccgggacacgacgctaaaaggcgctcaggtcagcggcgaacagattaccgccgaggtgaaacgtcatctgaccctcagcagcgagcaggacagccagcgctatgacagcaaacaacagaatgccagtgcgggcgtcagtgccaccgtgggtcccctcaccaatggtaccgcgagcctcaatgccagccgcaataaactgcacagcaactatgacagcgtgcaggagcagaccgggctgtttgctggcaaaggcggctatcaggttaacgtcggtgaccacacccaactggacggggcggtgatagcgagtcaagccgacaaaaccaaaaacaccctgaacaccgggacgctgggcttcaaggacattcagaatcaagcggactttactgtcgaacagcagagtgcgggcgtcagccttggtcaaccgaccgccggtcaggtcctgaataatctggcggtcaatgggctgacggggactcataactcaggccatgacagcagcaccacgcacgccgcggtcagtgacggcaatctgattatccgggacaaagcgcaccagacgcaggatgtcgcgaacttaagtcgcgataccgataatgccgccaatgttctgagtccgatatttgataaggaaaaagcacagcaacggctgaaacaagcgcaactgattggcgaactcagcgcccagatgaccgagatagcccgtacggaagggaaaattatcgccaccaaagcggcgaaagcgaaactgaatcatatcagtgaaccggacaaagccgcggccagagaaaaattgatcaacgcaggtaataaagacccctctccagcggatatcaataagcaagtttatgacaccgcttacacgcaggcactgaatgactcgggcttggggaccggcggaacctatcagaaagccttacaggctgctacggcagcgattcagggcttggctgggaacaatctcggtcaggcgctggccgggggcgcttcaccgtatctggcgggcgtgataaaagagctgacgacggacccacaaacccatcaggtggataccgccaccaatacgctggcccatgcgattttaggcgcggtagcggcagaggtcagcggcaataatgccttgtcaggcgcagccggtgcggcttccggtgaactggccgctcaggtactgatgaagcaactttatggtgacggggccaacgtcagtgagttaacggaggagcagaagcaaactatcagcaccctttccaccctggcggcagggctggccggcggtattgccggtgactccaccgggagcgccatcaccggggcacaggcagggaagaatgcggttgagaataactatctgagcgtgaatgagctggacagttttgcgcatcaagcccgcacctgtgaaggcgaaagctgcaaacaagtgatcaaggatatggtagacactaatatccgcaatcagcaggaaatgatggatttctgcaacagcaacccgacccagtgtgcacagaagtatggttatctggttgatcagtggccggtgtttgaacgtaccctcaaaaatatggaccgggatggcacattgccggttgagttcagaaattacctgtcggcggtgaatacgttaggtcaggcggccacaggcaaggtaggcgaactcggctggacaaaacgctttgaggcgatgggcatgagtcaggagactgccgctgcaatggcgatgacgctgcctattgtgatggagggagccaaagggccgaagtcgtcaccaaaatcatcgcaaaataatgccggcaaagatgctcagcctgagttagcagggaaaaacacaagtggtgcggaaaatgcggcaacttatccgaagttaaaagaagacttggtgcaacgaaacctcagtcatattgcttcgcaagatccaaggttggcggctgtagttaaaggtgataatggtaagctcaattatggcattggcactggaactcgaacagaagcggatagattaggcaaaatctgggtaggagatggagccaagaagactaccggaaatggctgggttagtgcggatggtacgagaggttataggccgccatcagagaaacctaatagtgcccatgccactactggtgtgcaagccaactttgaaacttattccattgattctaaaggaaaaataaataagactggaaacggtcatttaaatattctggattaaaagaggatgcattagtgaaagcagtactaaaaggcatagattgtatgcataaagatccagttatgtactccggtgaagatgacggaactattaatataaccttatccctattaatcgggccagagttggaaagtgggagtgaatattttgatctttttatctgtacacctgaatggctgtgtaatcatcattggcagccggaattgatacgtcatacgcttctggtacgtgagtataatttggatgaaattaaaaagaccattacaaactatatcgatcagtgcgaggggcaagattggatggagatagcgcaaaagctatctcgtgtctttgcctgggaatatgaggattatcaaccttaacctgttgttatccaaagggtccagctaaaaaactggactcttcctttagccgtcagtcattctcagccagttgaatgattaactgcccggcttcgctggtaatagtgatcggcttccctgtggtaaagcccaacgcagccaaccagcgccccttaatggtgagctgcgggtacggattgggcttgccccggttaggccggtagcccacggtgtaatgccgtggctttacagcctgcactttagttgtaatggtttttgctttagaatcgcatttagccatgatgaactacctctgatagttggtgatggttagcggcgctggagtgttcccgcacttcagcgccgtgctgtgttaactctcttccttcgctgttgttgaaatacaggccattgtgccggcaatctgagttttgatgatcattgcatccagcaactccttaataacctcctgctcatactgcggcatacgagaaattgcctcaaattgatagcgcagccgctcactaggaccgcgctcctgttcatcaaaaaccagcatatccgcactgacaccgagcgaaatagccaagcgacgtattacctctaaggtaggttgtgctgagcctccctcataacgccggatctgtaaaactgccacaccagccatatcagccagcgcctgctgagtgagcccgcgttccttgcgtaatgtggtaagccgttcagggaactgcatatcgagaaaccaggttgttgaacttgatatcactatatatcccccttttaaaaagcttgtttttagatatcttatcagatatgttttaaatatcaatatagcatcttgacaggtttttacaggaggtcattgatgacccgcgttcccgacaccgatttagtccacttaaagcaaaccgtctcgttactggggctggcgcgtaagcaaggccgtccgatgaaaaaacgcggtgaggattatgtgctgcgctgtccgttccataacgagaaaacgccctcaatggtgatatcgccggctaagaacctgtatcactgctttggctgtggcgcagcggggtcggtgctggactgggtgatacaaacggaaggggtgacgctgaaaatcgctatccgccggctgcgggagctggccgggttgccggacatggacaatgcagttgtggccgcttcttctttagccgccccgccggagtcacaggcggcccccctgccgcgcccgaaactggccgacctggacgatgacgggcaggcgctgttgcatcaggtgattgatttttatcatcagcacttactggcatcaccggaagccaaagcctggctggcacgacgcgggctgaatcatcctgaactggtcagccacttccggctcggttatgcgggtcatcacggtatcagcggttccgcgggattgttgccgtccaaagacagtcaggaaggtcagcagttgcgcggcaagctgtcggggctgggcgtgttgcgtaccaccacccggcaggaccacttccggggctgcgtcgtggtgccgataatcggctgggccgaatcgaccagtgtggccagccgcgggcgggtgctgcaactgtatggtcgccgaacccagccggattacaaagtcctgaaagacagcccgaagcatctgtacctgtcctcaccgctagccggggtctggaatgaggcagcgatgaaagccgctgcggaaattatcctgtgcgaagcgctgatcgatgctatgaccttctggtgtgccgggttccgcaacgtgatcgccgcgttcggggtgaacgggtttaaccgtgagcatctcgaagccttgcagtatcacggcgtgaagcgggtgctgattgcctttgaccgggacgaggccggagaccgtggcgcggctaatgtagccgctgatttactggaagccggtatcgaggcgtggcgggtgcagttcccgccaggtatggatgccaatgactatgcgctgaaaagcggcaatgccgaacatgcgctggggctggccttgcaacaggcggtctggctgggacagggaacagcgccgggcgcggtgttcagccatgagcggcccgtctcgccgagtgtgacggaaaagccccaaagtgccggggtggctaaatcttcttctttagccgccccgccggcgctgaccgttgcccccgtgccctgtgagcgcacggcgtccggtgagttgttgatgaaaagcggcccccgggtctggcggatacgggggatgaaaaaatccccggtaccggacgtgatgaaagtcaatgtgcaggtgcgggatgaaacgtccggcctgttccatgtggatacgctggacatgtatcacgcgcggcatcgtcagaactacatcagcacggcggcgcaagagctggaatgcgagctgtcggtcatcaaacgcgaagccgggcgggtcttgctgatgctggagcagcaacaggacgcgcaacagcaagccgacgccgaagcctcagggacaacggcggtcacggtcagcgcggaagacgaagccgccgcgctggcgttgctgacatcgccgaacctgacagaacagattatcaacgacatggccgcctgtggcgtggtcggcgaatccaccaatctgctgaccgggtatctggcggcagtctcgcgcaaactcgataaaccgctggccgtgctgatacaaagcagttccgctgccgggaaatcgtcattgatggaggcggtgctgaacctgatgccggaagaggagcgtatccagtactcggcaatgaccgggcagagcctctactatctgggggaaaccagcctgcaacacaagatactggcgatagccgaagaagaaggcgtgcggcaggcggcttatgccctgaaactgttgcagtccgacggcgagctgaaaatcgccagcaccggcaagaacgaacagagcggcgaactggtgacgcgggaatacaaggtacagggcccggtgatgctgatgctgaccaccaccgccattgatgtggatgaagagctgctgaaccgctgtctggtgctgacggtcaacgaatcgcgcgagcagacgcaggccatccacgccatgcagcggcaccgccagacgctggccgggttgctggctgactcggaaaaaggctatctgacgcagttacaccagaacgcccagagcctgttaaggccgctgaaagtggtcaatccttacgcccatcaactgacgttcctgtcagacaaaacccggatgcggcgcgaccacatgaaatacctgacgctgatacaggccattgccctgctgcaccagtatcaacgtgaagtgaagaaaacgacccaccgcgggcaggtcatcgaatatatcgaagtcacccaggacgacattgccctcgccaaccggctggcgcatgaggtgctggggcgcacgctggatgaaatgccgccgcagacgcgcaagctgttgctgctgatacaggactgggtacgggaaaccgccggacaacaggcggtcagggtcgatgaactgcattttacccggcgggatattcggaccgctttgcactggggtgatacgcaactgaaagtacatctggcgcggttgctggaaatggaatacctgttgctgcatcgccgcgggctgacctatgaatatacgctgttgtgggatggtgaagataccgggcaaccgcatctgtgcgggttactggagatgactgaatcccggtcagaaacggcaggcaatgtgtttcagtcggggtcagaggatgttcagtcgggcacgggtcggggcagggtcggcagtcagtcggtaaatcagaatccggcctcaaggcaggcaacatcagacctgtcggcggaagtggccggggtaaagcaaaaagcagttattaagacagaaaaaaaaccggcttcaatccccctgcccgaagaaacagaaatgacgaatgacgctgttgcgggcaaggcgttccggtcggggtcagagggtgttcagtcgggtacaggtcggccccaggtcggtacacagccggacagacaaaatccggcctcagcacagacagcacaaggtttaacaacagaaccgggcggggccggaaagaaaacggttaacagacataaaacgcaaaaggccccaccgcccgctgcctcagccgcccatccccaatccgaaacggaggttaatcatggcaaaccgtaaaccccgcaaggggagtcttctgaccgttaatgacgtctaccgtcagcctgtggggccggcgcatgacccgaaaagcctgtatgcactgctgctgcgcttcgtggcctggcggcaggaacggaactggtcggaaaccacgctgaaagtgcagacccatcacacctatcactttatcctgtgggccacggaccggggcctgtactatgccgcggacatcacgcggccgatactggagcgttaccagcgctacctgtaccagtaccgaaagaccaacggagagccgctgagcatccgcacccagcgcacgcagttgcagccgttacaggtgtggttcaaatggctgacgaaacagaacctgatactggcgaacccggcagcggacattgagttgccgcgggaagaaaaacgcctgccgcggtatatcctgagcattgatgaaatcgagcatatcctgtcgctgcctgacccgaatacgttgcagggcgcgcgcgaccgggccctgatggagctgctctggtcaacggggatacgacgcagtgaagcggcccggctcgatatctacagcattgacgggtcacgcaaaacggtgaccatccggcagggcaaggggaataaagaccgggtattgcccctcggcgaacgggccttaaactggctccagttctatcagcaacaggttcgcccgcaactgctggtcaccccggacatccagtcgctgttcgtggcaatggacggtctcgacgggttgcagccgaacggtatcacgaatgccgtaagcggttatatccgggccgccggcattgagaaaaaaggtgcctgccacctgttccggcatgcgatggcaacgcagatgctggagaacggcgcggacctgcgctggatacaggccatgttaggccatgccagcgtggagtcaacccaggtgtatacgcaggtctctatccgggccttgcaggcggtgcacgccagcacccatccggcggagcaaatggccgacgaaaaagtccgcgacgccgatgaggtgggtttactggccgacctgtacgccgacgataacgccgacacggacacgccgccggacagttcagagccgacctcaaccgccgatagccgctgagcgtccgcacgcccccgttgagttgggcgggttcggtgtgggggcagaccgtggccggactgcccgtcggcatcggcgcacgcgggggtaaatagtcgtcaggcggctcaaccacgagcgtccccgttaagccggtccaggccgcccaacgcctattgaacataatgcgggggaattatacgcactgcgccggtgagcccgggcaaccgcctgagcattgatgagcggcttaatgcgtataattggcattatgtcttgcgcccccgcgggtcagcattggcgggtgtggcgcacaaggctgcgccttatgctctaaccgactgagccggacatcggcaactctgagttcttctttagctgccgtgccaacgtccggccaacaaccctgaaggcagatcggcctgcggcctccgctcattgacttccccccgccccaaccccgctgcactggctgcgcccggttcgcagtcgcaggctccttgctcattcccgtgctcgccatcgccgccccgtgcagcccctgtctcttgatcagatctccaaatcaactgatttagccagcaaatagccgtctatcagggtttgcagccgaaaccagccttcccaaagtcgttcccatccgactcgacccgtgcgtttggaatcgtaccagccggccagttttcccagattgatgaaggcccaatgcaaactcggggcttttttcggcacacggcgtttttcttgttttgaccacagtaatttccacgccagggggcttaatactgtctcacagctctctttctctgcctcttctttgttcagacccataaaacgcagctggtgtattcgtaccgcaataaaggccagcagcactatcatgcgctccagattatctttgctttgcatacgcagcgcttctacctgcgtgccgcccgttttccacgctttgtgaaattcttctatcagccagcggcgctcgtaataactgaatattttatgggcgtcttcctgactgttgacgggttcggaggtcagaagatgccagcaaagcccatcctccggacctttttcgtagcaaccgacataaaatatccgcaccgcctcaccgctttttccttcggggattttcaacgtcacttcggcataactgatatcacaatgcgcgacacgcgcctgacgcccgcctttctgtctgacctgaactaatcgttctccagcactctgtaaccggctaataaagtcataaagtttatcctgactttcctctatacgccggttttgcatcgaacggatgacgaaacgttgtttttggctcgttttataacgcagatattcgatgatatcggcttcacggtcacagacagaaatcacgttggccatctgctcccctaaccggctgtcgacggcttgtgaggcccgttcccacttataactctctttcccttcataagggcgtgtatcgcgttgtcggcttttgccataatcactgacatctcgacaccagcgctgttgctctatcaaccccacgacctgttgttcttcaggcgcaaataacaacaccgagtgtgcctgcatgccccgggatttttcctttgaggtggtatagccgagttcatcggcgaccgacgcatgggaaaatgacagggttgtcgtgtcttccagcgctaacaggcaatgataacgttgagcgtgagcgacggtggcggtaaatccggcttcggcgatggcctgaggcgcaatggcggaatttcgggtcagtcggtaggccgcttcaacatcggcaggagagtcaagagattgcacgagcgattgtcctatatggttagccaacgaacaggccactttcaccaggcggttggtacggcgtttatcacctaattccgcatgttgaaacgtgtcatttgcccattgttcggcgctggttgaaaacataaagattacctcaagtcgtgttttttattgagatcaatctatgagggaaaagttcaataacgcgggggcgggttaaaatatttgtgtaggaaagacaggtgcagcccccgggggcttccctgaacaaaacaaaaccgcgtggtcatgcaaggtcatacgcaaaccgaagccacagtgcctcagagcgtcgcaggggcgccgcttgcgggctctgtgccgcccgcgcccgcagaacgggcacccgccgcccaagcgagttgggcgacgttcgcccgttgccgaagaaggcgctacactgaccagagtgcggcgggaaaaaccggccttcgggggcgaaaagcgcgtcagggggttttgggtccggcggtgaacgcccattggaaaaaacgggtggtaactggctgagggcattgggaaaatcggtgtttggcggtcaacttcgcaatggaatgggttgttgcggataataatgcccttagcatgggaagtctgtttggtgccgaaggcgctaaacattttgaaggtgcgggttcactggctcaaaaaatggcccaatctggggcaacatccgaagaaatcaacgcagccttaactcactatctaaaagggcaagtccctgatggtcaggacccagcaaaaggtttgattattgcgtggggtaatttctttggtgttccgttggatgtcgtgttatcaaatgagcagatgacgccacagaaagcggcggaaattgttgccggagggatacctaccagtgaagcaaagctgatacagtttgcagccgcgaaagcatatctgtctttgagtaaatatcaatcgatagaagctgttgatagaaaaaatagttcaacgattgataatttgatgaaagaaaaagcacagacagcgaaaattggagaaatagcccttggtgctgataaaaacatctcgcatacaaatgttaattccaaagcttcactaggaacgaaaatagataagagtatagttatagtagataaggaacatttacctacaagtgtgtcctcgacatttaaggctggaaaatatgaaactgttattacacaagaacctgtaacattatttagaaaatttggtggtgttaatgatcaagccaaattagatggtggttacgcaacaaccacacaaaatgcgggcagaaacgaaactgccgtctataaaaactggagtacaactcgatttgaggctgagatagaagtacccaaaaatactaagctaaacattggttctgttggggaacaaccacctttgagtaataatcctaaatacataggtggagctgatcaaattctactgccacggaattatcctatggattggattaaatcaatacgagatggaaaaacaggtaatgtttacacttacgaagaatttaagaaaacatttccagatcaaataacaaataaaggaaaataaaatgtcaacaaatgaagatatgatagaaatcgcaagattaatatccttattgaaacaagttgttacgtatttaaaagaatcaggaaatggagagtcatcttatgcatacttaataaaatccattaatattcttgagaacaaagcaagtaatggtatgaagaatttatacaaatatattatgaatgatttcagaatgatgggggatagaggccaatatggggaagatatagacccaataacagatgaaatttacgcaattataagcaacaacccattgttcactaagtgataatgcgttgttattgagaataactatctgagcgtgaatgagctggacagttttgcgcatcaagcccgcacctgtgaaggcgaaagctgcaaacaagtgatcaaggatatggtagacactaatatccgcaatcagcaggaaatgatggatttctgcaacagcaacccgacccagtgtgcacagaagtatggttatctggttgatcagtggccggtgtttgaacgtaccctcaaaaatatggaccgggatggcacattgccggttgagttcagaaattacctgtcggcggtgaatacgttaggtcaggcggccacaggcaaggtaggcgaactcggctggacaaaacgctttgaggcgatgggcatgagcaaggaaacggccgctgcgatggcgatgacattgccaattgtgatggagggggctaaagggccgaagtcatcgccaacaacaaagggaagcacaggcgcggctgttaatacagagaaaacggcgctggaaaagattgggaaaaacagtcaaggcacaacgaatctgggtgataaatcggataatactgtttatcatcaacagcttatcaaaaatgctgaaaagatatctactgcgaaaccaggacaacaagttgctgcgccaagggatctgaatgagcaaactttctggaaacaggttgaatcaaatccgtcacaaggaagtaaattgttaggtatgaataaagatccccgttttcctacagcggctggttttcagaaaatggaagcaaaacataggctccctaatggacaaacaataactatccattaccagtacaactcaaatactggtaaagcctatgacatgaaaattactactcctcagagaatccaacaggatcctaaaaaggtaatagattcaataaaggataatgttaaatgaaaatacaagaatcagatggctctattgttgatgtttttgccatatattggtttggtgatgaaacatatttttatgggttaccaccaaattatggaggtttacaggcatataagtctcatgaagtctcagttatcgatacaacgatagattttaaaactgtttttttctcaaatgatgatgctaaaagtgttcatcattgggcattaatagaagaacagttgctggatgatctacttgagttagatgaaactgcttatcaacgctttttggcaatcctaaaggcagaaggtaatatagaacaggatttttgttaattaggcgtcccggtcagtggccgggagcttcctgcttttaaccgtcaactgttctcaacgagccggataatcaactgtccgtgctcaacactgacctgcactggctgcccggtcacaaagcccgcttcttccagccaattacctttaagatgcaagctgggatgctggctgtaatagcgggtcatgccagtgtggcggtcggcgtgacatcggctgatatagccgaccttatagcggcgttgcgctttcgaactgcctgaatttacattacaatcgcgttcagccatagctaactacctctgatagtgggttgtggttagcggtgctgggatgttctcagcatctcaacaccgcgtaagtattgtctcttcttgagcggctaacgttttaccgtccaacgtttagcatcatgcatatgcaacatactgctaatcactgtctcaatcgcttcccgctctttctcatccaactgtgagactgcttcgaactggagttttagccggtcatcgggtccgcgctcattgggatcaaaaagaagcatatcggcactgacattcaacgctaatgcaatccgccgaaacacatcaatcgtcggctgggatgtcccggcttcatagcgcttgtattgtgaaacgtgcataccaatcttgtcagccatctgttgttgcgtgaaaccaagctctttacgggaagccgccaatttatcagaaaagctcataggaaattccaaagttgctgtaactgacgtcactatacccctcccgtttttatcgcttgactaaaagtatcatatcagggactatatatattatcaatatgaatcttgacgcattttacaggagtagaggcaatgacccgcgttcccgataccgatttagcccgcttaaagcaaaccgtctcgttactggggctggcgcgtaagcaaggccgtccgatgaaaaaacgcggtgaggattatgtgctgcgctgtccgttccataacgagaaaacgccctcaatggtgatatcgcctgctaagaacctgtatcactgctttggctgtggcgcagcggggtcggtgctggactgggtgatacaaacggaaggggtgacgctgaaaatcgctatccgccggctgcgggagctggccgggttgccggatatggacaatgcagttgtggctgcttcttctttagccgccctgccggagtcacaggcggcccccctgccgcgcccgaaactggccgacctggacgatgacgggcaggcgctgttgcatcaggtgattgatttttatcatcagcacttactggcgtcaccggaagccaaagcctggctggcacgacgcgggctgaatcaccctgaactggtcaatcactttaagctggggtacgcgggccatcacgggatcggcggttcagcgggcttattaccgtccaagagcagtcaggaaggccagcacctgcgcgacaagctgtcggggctgggcgtgttgcgtaccaccacccggcaggaccacttccggggctgcgtcgtggtgccggtgatcggctgggccgaatcggccagtgtggccagccgcgggcgggtgctgcaactgtatggccgccgaacccagccggattacaaagtgctgaaagacagcccgaagcatctgtatctgccgtcaccgctagccggggtctggaatgaggcagcgatgaaagccgctgcggaaattatcctgtgcgaagcgttgatcgatgccatgacgttctggtgtgccgggttccgtaacgtgattgccgcgttcggggtgaacgggtttaaccgtgaacatctcgacgcgttgcagtatcacggcgtgaaacgggtgctgattgcctttgaccgggacgaggccggagaccgtggcgtggctaatgtggcggctgatttactggaagccggtatcgaggcatggcgggtgcagttcccgccgggtatggatgccaatgactatgccgtcaaaagcggcaacgccgaacatgcactggggctggcgttgcaacaggcggtctggctgggacagggaaccgcgccgggcgcggtgttcagccatgagcggcccgtctcgccgggtgtgacggaaaagcctcacaatgccgatgtggctaaaccggctgccttagccgccccaccagagctgactgttgcccccgtgccctgtgagcgcacggcctgcggtgaactgctgatgaaaagcgggccacgtatctggcggatacgggggatgaaaaaatcgccggtgcctgatgtgatgaaagtcaatgtgcaggtgcgggatgaaacgtccggcctgttccatgtggatacgctggacatgtatcacgcgcggcatcgtcagaactacatcagcacggcggcgcaagagctggaatgcgagctgtcggtcatcaaacgcgaagccgggcgggtcttgctgatgctggagcagcaacaggacgcgcaacagcaagccgacgccgaagcctcagggacaacggcggtgacggtcagcgcggaagacgaagccgccgcgctggcgttgctgacatcgccgaacctgacagaacagattatcaacgacatggccgcctgtggggtggtcggcgaatccaccaatctgctgaccgggtatctggcggcagtctcgcgcaaactcgataaaccgctggccgtgttaatccagagcagcagcgcggcaggcaagagcagcctgatggatgccgtgctgaacctgatgccggaagaggagcgtatccagtactcggcgatgaccggacagagcctgtattacctcggcgaaaccagcctgcaacacaaaatactggcgatagccgaagaagaaggggtgcggcaggcggcctatgccctgaaactgttgcagtccgacggcgagctgaaaatcgccagcaccggcaagaacgagcagagcggcgaactggtgacgcgggaatacagggtacagggaccggtgatgctgatgttaacgacgacggccattgatgtggatgaagagctgctgaaccgctgtctggtgctgacggtcaacgaatcgcgtgagcagacgcaggctatccacgccatgcagcggcaccgccagacgctggccgggttgctggctgactcggagaaaggctatctgacgcagttacaccagaacgcccagcgcctgttaaggccgctgaaagtggtcaatccttacgcccatcaactgacgttcctgtcagacaaaacccggatgcggcgcgaccacatgaaatacctgacgctgatacaggccattgccctgctgcaccagtatcaacgtgaagtgaagaaaaccacccaccgcgggcaggtcatcgaatatatcgaagtcacccaggacgacattgccctggctaaccggctggcgcatgaggtgctggggcgcacgctggatgaaatgccgccgcagacgcgcaagctgttactgctgatacaagagatggtgaacgcacaggcgcaaatccagcactgccagccaaatgaagtccgctttacccggcgggatatccgcgcctttacccactggagcgacagccagctcaaaaaccactgtcaacggctgacggaaatggaatacctgctgttgcatggcggcagccgggggcacctgctgcattatgaactgctgtgggacggagaagacaacggcgcagcccacctgtgcggcctgctggatgtcggagaagcggactcagaaaccgccggcagtgaacgcaagtctgacccggaaggtcataagtcttccccaagtccggggcaagtctggcctgagtctggggaagaaaaacccgcgtcagcccagacagcacaagggccagtgggggcacaagtccgggcagatgaaaacgcagttatcaaggaaaataatcacagagacgcattgcccgtacccgacagggataaaacgccggcagccgtcccgacaggtcatgagagcaagtctgacttaaatgaacacccgtctgcctcaagtctgggccaggtccgggctaagtctggggtgaaaaaatccctatccgggcaggcagaacacgggttcagcgtaccgcaagtcggggtaacggaagacaccgtgataaaaggaaaaaagaaaacgcgccccttgtctgcgcccgcccctcaatctcaaccggaggtcaatcatggcaaaccgtaaaccccgcaaggggagccttctgaccgttaatgacgtctaccgtcagcctgtggggccggcgcatgacccgaagagcctgtatgcgttgttgctgcgctttgtagtgtggcgacaggaacggagctggtcagaaagtacgctgaaagtacagacgcaccatacttaccactttatcctgtgggcaaccgagcgcggcttatactacgcagcggatatcacccggccgatactggagcgttaccagcgttatctgtatcagtaccgcaagaccaacggtgaaccgttaagcacccggacgcaacgtacccaactggagccattgaaagtctggttcaaatggctgaccaaacagaatctgatactggcgaacccggcggcggacattgaactccccagactggaaaagcacctgccgcgctatatcctgaccatcgatgaaaccgaacagatactggcgcagcctgacctgacgacgttgcaggggatacgtgaccgggcgttgatggagttgctctggtcaaccgggatgcgtcggggcgaattaacccggctggatgtgtacagcgttgacggaaaacgcaaaacggtgaccatccggcagggcaaggggaataaagaccgggtgttgcccctcggtgaacgggccttaagctggctacagcgctatcagcaacaggtgcggccacaacttatcgtcaatccagacgtcaaggcattattcgtcgcaatggatgggctggacggcttacaggctaacggtatcagcaatctggtgacagcttatatcaacgcggtgggtatcgagaaaaaaggtgcctgccacctgtttcggcacgcgatggcgacgcagatgctggagaacggcgcggacctgcgctggatacaggccatgttaggccatgccagcgtggaatccacccaggtgtatacgcaggtctctatccgggccttgcaggcggtgcacgccagtacgcatccggcggagcaaatggccgacgaaaaagtccgcgacgccgatgaggtgggtttactggccgacctgtacgccgacgataacgccgacacggacacgccgccggacagttcagagccgacctcaaccgccgatagccgctgagcgtccgcacgcccccgttgagttgggcgggttcggtgtgggggcagaccgtggccggactgcccgtcggcatcggcgcacgcgggggtaaatagtcgtcaggcggctcaaccacgagcgtccccgttaagccggtccaggccgcccaacgcctattgaacataatgcgggggaattatacgcactgcgccggtgagcccgggcaaccgcctgagcattgatgagcggcttaatgcgtataattggcattatgtcttgcgcccccgcgggtcagcattggcaggtgtggcgcacaaggctgacgccttctgctatcagcggctgagccagtcctcggcaaaaacccgtgttcttctttagctgccgtgccaacgtccggccaacaaccctgaaggcagatcggcctgcggcctccgctcattgacttccccccgccccaaccccgctgcactggctgcgcccggttcgcagtcgcaggctccttgctcattcccgtgctcgccatcgccgccccgtgcagcccccgggggcttccctgaacaaaacaaaaccgcgtggtcatgcaaggtcatacgcaaaccgaagccacagtgcctcagagcgtcgcaggggcgccgcttgcgggctctgtgccgcccgcgcccgcagaacgggcacccgccgcccaagcgagttgggcgacgttcgcccgttgccgaagaaggcgctacactgaccagagtgcggcgggaaaaaccggccttcgggggcgaaaagcgcgtcagggggttttgggtccggcggtgaacgcccattggaaaaaacgggtggtaactggctgagggcattgggaaaatcggtgtttggcggtcaacttcgcaatggaatgggttgttattgagaataactatctgagcgtgaatgagctggacagttttgcgcatcaagcccgcacctgtgaaggcgaaagctgcaaacaagtgatcaaggatatggtagacactaatatccgcaatcagcaggaaatgatggatttctgcaacagcaacccgacccagtgtgcacagaagtatggttatctggttgatcagtggccggtgtttgaacgtaccctcaaaaatatggaccgggatggcacattgccggttgagttcagaaattacctgtcggcggtgaatacgttaggtcaggcggccacaggcaaggtaggcgaactcggctggacaaaacgctttgaggcgatgggcatgagcaaggaaacggccgctgcgatggcgatgacattgccaattgtgatggagggggctaaagggccgaagtcatcgccaacaacaaagggaagcacaggcgcggctgttaatacagagaaaacggcgctggaaaagattgggaaaaacagtcaaggcacaacgaatctgggtgataaatcggataatactgtttatcatcaacagcttatcaaaaatgctgaaaagatatctactgcgaaaccaggacaacaagttgctgcgccaagggatctgaatgagcaaactttctggaaacaggttgaatcaaatccgtcacaaggaagtaaattgttaggtatgaataaagatccccgttttcctacagcggctggttttcagaaaatggaagcaaaacataggctccctaatggacaaacaataactatccattaccagtacaactcaaatactggtaaagcctatgacatgaaaattactactcctcagagaatccaacaggatcctaaaaaggtaatagattcaataaaggataatgttaaatgaaaatacaagaatcagatggctctattgttgatgtttttgccatatattggtttggtgatgaaacatatttttatgggttaccaccaaattatggaggtttacaggcatataagtctcatgaagtctcagttatcgatacaacgatagattttaaaactgtttttttctcaaatgatgatgctaaaagtgttcatcattgggcattaatagaagaacagttgctggatgatctacttgagttagatgaaactgcttatcaacgctttttggcaatcctaaaggcagaaggtaatatagaacaggatttttgttaattaggcgtcccggtcagtggccgggagcttcctgcttttaaccgtcaactgttctcaacgagccggataatcaactgtccgtgctcaacactgacctgcactggctgcccggtcacaaagcccgcttcttccagccaattacctttaagatgcaagctgggatgctggctgtaatagcgggtcatgccagtgtggcggtcggcgtgacatcggctgatatagccgaccttatagcggcgttgcgctttcgaactgcctgaatttacattacaatcgcgttcagccatagctaactacctctgatagtgggttgtggttagcggtgctgggatgttctcagcatctcaacaccgcgtaagtattgtctcttcttgagcggctaacgttttaccgtccaacgtttagcatcatgcatatgcaacatactgctaatcactgtctcaatcgcttcccgctctttctcatccaactgtgagactgcttcgaactggagttttagccggtcatcgggtccgcgctcattgggatcaaaaagaagcatatcggcactgacattcaacgctaatgcaatccgccgaaacacatcaatcgtcggctgggatgtcccggcttcatagcgcttgtattgtgaaacgtgcataccaatcttgtcagccatctgttgttgcgtgaaaccaagctctttacgggaagccgccaatttatcagaaaagctcataggaaattccaaagttgctgtaactgacgtcactatacccctcccgtttttatcgcttgactaaaagtatcatatcagggactatatatattatcaatatgaatcttgacgcattttacaggagtagaggcaatgacccgcgttcccgataccgatttagcccgcttaaagcaaaccgtctcgttactggggctggcgcgtaagcaaggccgtccgatgaaaaaacgcggtgaggattatgtgctgcgctgtccgttccataacgagaaaacgccctcaatggtgatatcgcctgctaagaacctgtatcactgctttggctgtggcgcagcggggtcggtgctggactgggtgatacaaacggaaggggtgacgctgaaaatcgctatccgccggctgcgggagctggccgggttgccggatatggacaatgcagttgtggccgcttcttctttagccgccccgccggagtcacaggcggcacccctgccgcgcccgaaactggccgacctggacgatgacgggcaggcgctgttgcatcaggtgattgatttttatcatcagcacttactggcgtcaccggaagccaaagcctggctggcacgacgcgggctgaatcatcctgaactggtcagccacttccggctcggttatgcgggtcatcacggtatcagcggttccgcgggattgttgccgtccaaagacagtcaggaaggccagcagttgcgcggcaagctgtcggggctgggcgtgttgcgtaccaccacccggcaggaccacttccggggctgtgtcgtggtgccgataatcggctgggccgaatcggccagtgtggccagccgcgggcgggtgctgcaactgtatggccgccgaacccagccggattacaaagtgctgaaagacagcccaaagcatctgtacctgtcctcacccctggccggggtctggaatgaggcagcgatgaaagccgctgcggaaattatcctgtgcgaagcgctgatcgatgccatgaccttctggtgtgccgggttccgtaacgtgattgccgcgttcggggtgaacgggtttaaccgtgagcacctcgaagccttgcagtatcacggcgtgaaacgggtgctgattgcctttgaccgggacgaggccggagaccgtggcgcggctaatgtggcggctgacttactggaagccggtatcgaggcatggcgggtgcagttcccgccgggcatggatgccaatgactatgccgtcaaaagcggcaacgccgaacatgcactggggctggcgttgcaacaggcggtctggctgggacagggaacggcaccgggcgcggtgttcagccatgagcggcccgtctcgccgggtgtgacggaaaagcctcacaatgctgatgtggctaaaccggctgctttagccgccccgccggcgctgaccgttgcccccgtgccctgtgagcgtacggcgtccggtgagttgttgatgaaaagcggcccccgggtctggcggatacgagggatgaaaaaatcgccggtgcccgatgtgatgaaagtcaatgtgcaggtccgtgatgaaacgtccggcctgttccatgtggatacgctggacatgtatcacgcgcggcatcgtcagaactacatcagcacggcggcgcaagagctggaatgcgagctgtcggtcatcaaacgcgaagccgggcgggtattgctgatgctggagcagcaacaggacgcgcaacagcaagccgacgccgaagcctcagggacaacggcggtcacggtcagcgcggaagacgaagccgccgcgctggcattgctgacatcaccgaacttaacagaacagattatcaacgacatggccgcctgcggggtggtcggcgaatcgaccaatctgctgaccgggtatctggcggcagtctcgcgcaaactcgataaaccgctggccgtgttaatccagagcagcagcgcggcaggcaagagcagcctgatggatgccgtgctgaacctgatgccggaagaggagcgtatccagtactcggcaatgaccggacagagcctgtattacctcggcgaaaccagcctgcaacacaaaatactggcgatagccgaagaggaaggcgtgcggcaggcggcttatgccctgaaactgttgcagtccgacggcgagctgaaaatcgccagcaccggcaagaacgagcagagcggcgaactggtgacgcgggaatacaaggtacagggaccggtgatgctgatgttaacgacgacggccattgatgtggatgaagagctgctgaaccgctgtctggtgctgacggtcaacgaatcgcgcgagcagacgcaggctatccacgccatgcagcgacaccgccagacgctggccgggttgctggctgactcggagaaaggctatctgacgcagttacaccagaacgcccagcgcctgttaaggccgctgaaagtggtcaatccttacgcccaccaactgacgttcctgtcagacaaaacccggatgcggcgcgaccacatgaaatacctgacgctgatacaggccattgccctgctgcaccagtatcaacgtgaagtgaagaaaacgacccaccgcgggcaggtcatcgaatatatcgaagtcacccaagacgatattgccctcgccaaccggctggcgcatgaggtgctggggcgcacgctggatgaaatgccgccgcaaacacgcaaactgttactgctgatacaagagatggtgaacgaacaggcgcaaatccagcactgccagccaaatgaagtgcgctttacccggcgggatatccgcgcctttacccactggagcgacagccagctcaaaaaccactgtcaacggctgacggaaatggaatacctgctgttgcatggcggcagccgggggcacctgctgcattatgaactgctgtgggacggagaagacaacggcgcagcccacctgtgcggcctgctggatgtcggagaagcggactcagaaaccgccggcagtgaacgcaagtctgacccggaaggtcgtaagtcttccccaagtccggggcaagtctggcctgagtctggggaagaaaaacccgcgtcagcccggacagaacaagggccggcaggggcacaagtccgggcagatgaaaacgcagttattaaggaaaataatcacagaggcgcattgcccgtacccgacagggataaaacgccggcagccgtcccgacaggtcatgagagcaagtctgacttaaatgaacacccgtctgcctcaagtctgggccaggtccgggctaagtctggggtgaaaaaatccccatccgggcaggcagagcacgggttcagcgtaccgcaagtcggggtaacggaagacaccgtgataaaaggaaaaaagaaaacgcgccccttgtctgcgcccgcccctcaatctcaaccggaggtcaatcatggcaaaccgtaaaccccgcaaggggagccttctgaccgttaatgacgtctaccgtcagcctgtggggccggcgcatgacccgaagagcctgtatgcgttgttgctgcgctttgtagtgtggcgacaggaacggaactggtcagaaagtacgctgaaagtacagacgcaccatacttaccactttatcctgtgggcaaccgagcgcggcttatactacgcagcggatatcacccggccgatactggagcgttaccagcgttatctgtatcagtaccgcaagaccaacggtgaaccgttaagcacccggacgcaacgtacccaactggagccattgaaagtctggttcaaatggctgaccaaacagaatctgatactggcgaacccggcggcggacattgaactccccagactggaaaagcacctgccgcgctatatcctgaccatcgatgaaaccgaacagatactggcgcagcctgacctgacgacgttgcaggggatacgtgaccgggcgttgatggagttgctctggtcaaccgggatgcgtcggggcgaattaacccggctggatgtgtacagcgttgacggaaaacgcaaaacggtgaccatccggcagggcaaggggaataaagaccgggtgttgcccctcggtgaacgggccttaagctggctacagcgctatcagcaacaggtgcggccacaacttatcgtcaatccagacgtcaaggcattattcgtcgcaatggatgggctggacggcttacaggctaacggtatcagcaatctggtgacagcttatatcaacgcggtgggtatcgagaaaaaaggtgcctgccacctgttccggcatgcgatggcaacgcagatgctggagaacggcgcggacctgcgctggatacaggccatgttaggccatgccagcgtggaatccacccaggtgtatacgcaggtctctatccgggccttgcaggcggtgcacgccagtacgcatccggcggagcaaatggccgacgaaaaagtccgcgacgccgatgaagtgggtttactggccgacctgtacgccgacgataacgccgatgccgacacgccgccggacagcccagagctgacctgaacctccgatagccgctgagcgtccgcccgtccccgttacgttgggcgggttcggtgtgggggcagaccgtggccggactgcccgtcagcctcggcgcacgcgggggtaaatagtcgtcaggcggctcaaccacgagcgtccccgttaagccggtccaggccgcccaacgcctattgaacataatgcgggggaattatacgcactgcgccggtgagcccgggcaaccgcctgagcatccgtgagcggcttaatgcgtataattggcattatgtcttgcgcccccgcgggtcagcattggcaggtgtggcgcacaaggctgacgccttctgctgtcagcggctgagccagtcctcggcaaaaacccgtgttcttctttagctgccgtgccaacgtccggccaacaaccctgaaggcaggtcggcctgcggcctccgctcattgacttccccccgccccaaccccgctgcactggctgcgcccggttcgcagtcgcaggctccttgctcattcccgtgctcgccatcgccgccccgtgcagcccccgggggcttccctgaacaaaacaaaaccgcgtggtcatgcaaggtcatacgcaaaccgaagccacagtgcctcagagcgtcgcaggggcgccgcttgcgggctctctgccgcccgcgcccgcagaacgggcgtccgccgcccaagcgagttgggcgacgttcgcccgttgccgaaaaaggcgctacactgaccagagcgcggcgggaaaaaccggccttcggaagcgaaaagcgcgtcagggggttttgggtccggcggtgaacgcacatcggaaaaaatgggtggtaactgactgagtgcgcagggaaaatcggtgtttggcggtcaacgtcgcaatggaatgggttgttgctgacaataatgcactgagcttgccaaaagggctggcggattacggtcggtcagcatccagtctggctaccgctatgctaaatgaaggtaaatcccctcaagagatttcagcggcgttgtcaaaacatgccaaaagtgatcacctggaagggcaagatccggcaagaggattgttagtcgcttggggtgcaggtgcttctgttgtgggaggcactatagtgcaatagatacactgatagcggtaggaacaggcgcattaactcaaggtaaaggaacactatttagcacccttgttaatacaggaggcacttatttaggaagtaaagttaaaggggaagatcctacaacctcaatgttaggtaaagcagttagtactgtaattggtaataaagtggttgtgtcgtttctttatagatggaatctttcttttttcacttggagatgtaaataaggttattaaaaacaggggtatttatcgggctaataagttattggtttatatactattacctatacgatttacgtaaattaataatcaatccttggattaaggttactatttggagaagttttatgaagtgtattaaatgtgaaaacccagcattacatgaatcagatttttgtgccgcatgtgaagagaaataactgaattaaattggcgggtttctctattttccggcaataaatattatctttgcaatattaagttctttatttagtgcatataaaacaatgacaatcttgatctctggttatgattttctcggtgaattacgtatccttacaggatttgagtttatacccgttatctttcaagttgcctctttgttggctgcactcactcaccgcggtcacatagttacctatgctcccggggattcactccctttccgccgcgatgcatcttgaaatccattgggtataaattaggattgagagaatctattgatttagcaataagtttttctccgcatttttggcagatataatgactttctcctcgcagaattttattatggcgtcgtagggttagttcatgttgctggcaattacagtaataagtaaaagtttgactacgtactgaatcgattttaaatttgtgtgtacggttagctggaacgttcagtacttcttccatcatccaacgccactgtttcccatgtggaggcactttcccaaagtagcgataaactaatagatgagctaattcatgtggcacaacttcatcaataaaagcttgttggttttcaatcagtaacactggattaagacggatttcccaattttttatataggcactgcctgcggtagttccccgttggcgatagtttattgtaggttcaggaaaatcacggttgagatataagtttgcttgttgcagtttttgccgcaaagtattcatgatggcttgttgtaaataaattggaatgctagctgatttcatgtgttgaaaataaataggtaaggatcagtgaattctattagaaatctttgaacaaccgataataatattttgagggattcttcaatcattagctaatgctaaaaaagccaggtttggttattcaaacccggcttccatttttatatttttacatattcatcgctgatagtttcaaacccgcagcatcacgcagcgcttctgctttatcagtggcttcccacgggaactgtggtcgaccaaaatgaccataagcggcagtatcacgatagattgggtgcaatagatccagcatctgaatcaaaccatgagggcgtaaatcaaagaattcacgtaccagtagagtcagagttgctgttgaaactttttcagtgccgaatgtttccaccatgatggaagtgggttctgcaacgccgatagcataagacacttgaatttcacaacgatcagccagaccagcagcaacaatattttttgctacatagcgtgcagcataagccgctgaacggtcaactttggatggatctttaccggagaatgctccgccaccatgacgtgccatgccaccgtaagtatctacgataattttacgaccagtcagaccacagtcacccatcgggccaccaatgacaaaacgaccggttgggttaatgaaatatttggttgttggatttaaccattcagcaggcagtaccggcttgatgatctcttccatgaccgcttcttgcagatctttctgactaatattttcagcatgctgtgtggaaagtacaaccgcgtcaacgccgacaattttgtcgttattgtattggaaagtgacttggcttttagcatcagggcgtaaccacggcagtacaccatttttccgaacttcagcttgacgctgaaccaaacggtgcgcataggtgataggcgcaggcatgagtacgtcagtttcgttggttgcataaccaaacattagcccttggtcaccagcaccttgttgcaggggatcttcacggtcaacaccttgattaatatccggtgactgtttaccaatggcacttaatactgcacatgagtttgcatcaaaacccatttcagaattaacataaccaatctctcgaactgtttgtcgcgtaatttcttcaatatcaacccaagcgctggtagtaatttcaccaccaaccatgaccatgccggttttaacataggtttcgcaggcaactcgtgcttttggatcttgttctagaatagcatcaagaacggcatcagatatttggtctgcaattttatcaggatgcccttcggaaacagactcggaagtgaaaaggtatgtggtcattatataacgttaccttaaaatataatttcagtttggaaatggatggattaacatctagatggctattttagggtaattcttatccatgtgctagatttttttagctcagtgagtcattttcatcgggtgaataaataatttcttggtttgtatgtcagttttgttcaatttcattttgcaattttatgtgattgcgagtataaactgcggccgtagttgaactatttttgctacagactcgcagaaagctaactagcttctgtttctcaatcgagaaaatggctccttaaatatgagtcatgtgtggggtgaatggggtaatgaaccattatctgctgattgcttatggccaacagccacacttgtcgtcggatgtatccgcgtctttttcctttcttttcaatatgtctttaattcgatgttatctgttgtcagcaaacaggccggatatgtcggacaggcgtattgtcactcggtaattttgtcgttgtttagtagtaactaaacgctttttacaacctgagagcatgctgttccctgatatttctcaacacgcgagattatagtgttttgggttatttattaattacaggcgaaggcgaaaaactctaactcccttaaggagactgccatgaatgataatatcgctcgtaaaatgcaacagacttacaatattgcatattggggagggagttactactacgtcaatgatcttggcaatgttagtgtgtgtccaaatcctgatttgccgggggcaaaaattgatcttgcggaattggtgaaaagagttcagcaggagcagaaacatttgcgtttgccggcgctattttgtttccctcaaatcctgcaacatcgtttgcgttcaatcaatgccgcatttaaacgtgccagagagtcatatggttataaaggcgattactttttagtttatcccattaaagttaaccaacaacgccgcgttattgaatcactggccagttccggtgaacctttagggcttgaggctggctccaaagcggaattaatggcagttctggcccatgcgggtatgactcgtaccgtcatcgtgtgtaatggatataaagatcgtgaatatattcgtctggcgctaataggtgagaagttaggtcacaaggtttatttggtgatcgaaaagatgtctgagattgcccaagtattggaagaagctgaacgattgaatgtgatcccgcgcttgggagtccgcgcacgtttggcatctcagggttcaggtaaatggcaagccagtggcggtgaaaaatcgaagtttgggctggcggcaactcaggtattgcaattggttgagactttgcgtgctgtggatcgacttgatagtctgcaattgttgcattttcaccttggctcacagttggcgaatatccgtgatatcgcaacaggtgtccgtgagtcagcgcgtttttatgtcgagttacataaactcggggtaaatattcaatgttttgatgttggtggtggactgggggtcgattatgaagggacccgctctcaatctgattgttctgtgaactatgggttgaatgaatatgccaacaatgtcatctggggtattggtgatgcttgtgatgagcatggtttaccccatccgactgttatcacggaatccggtcgtgccctgaccgctcaccatactgtcttggtctccaatgttatcggagttgagcgtaatgaatttacgcagacgacaccaccggcagaggatgcttcccgcccactcaccagtttgtgggaaacatggcaggagatgcactctgaaggaaatagacgctctttacgtgaatcgctgcatgatggtcaactcgatctacatgatgttcatacacaatatgctcatggcatgctggatttgacagaacgggcatgggcggaagagttatatctgaatatctgtcgccgtattcaacaggatcttgatccaagtaaccgtgctcaccggccaattattgatgagctgcaagagcgtatggcagataaattctatgtgaatttctcactgttccagtctctgcctgatgcatggggtatcgatcagttatttcctgttttacccattgagggactggataagccgttggatcgccgtgcggtattgttagatatcacctgtgactctgatggtattgttgatcattatgtggatggtgatggtgtagccgcgacaatgccgatgcccgcttatgatcctgattgtccgccaatgattggtttctttatggtgggagcatatcaggaaattcttggcaatatgcataacctgtttggcgatacagcggctattgatgtttatgtattcgataatggcgaagtgacctataaccaaagtgaagagggggattcagtcgcggatatgctgcaatatgtgaaactggaccctaatgtactgatggctcgcttccgtgatcaagtaaaaggcgcggatttggatacgggtttgcaagagcaatttttactggaatttgaaagtggtctttatggctacacatatctggaagatgaataatcttctggtgttaattaagcctcctgtatacaggtaatgttatttgatataaaccagatgcggagatgcagataaatggggttatctcagacataccccatttcgtcatggcatgtattctggaattaaatagctttgttctgtcgggaaacttttgaggatatatctcatgacaataagtaccttgggcaaccaacaagatgactctctggtttctaatgccttcggtttcctgcgctttccgctgaatttccagccatattccagcgatgcagagtgggtaattactggcgtaccatttgacatggcaacgtcaggccgtgcaggtagtcgccacgggcctgcggctattcgtcaggtttctactaacttggcatgggaaagccgccgttggccgtgggattttaagctacataattgtctcaaagttgtagattgtggtgatgtggtcttcaattttggtgatgctcaggatatgagtgataaattacaagctcatgctgaaaaagtgttggcttccggtaagcgtatgctctcttttgggggtgaccattttattactttgcctttgttgcgcgctcatgccaaacatttcggcaaaatggctctggttcattttgatgctcatgctgatacctatccaaacggtagccaatttgatcacggtactatgttctatcacgcgccaaatgaagggttgatcgacccgcatcattctgtacaaattggtattcgtactgaacatggacgggacaatggttttacggtgctggatgctgatcaggttaatgaccgtagtgtggatgatttgcttgctcagataaaagagacggttggcgatatgccggtttacctgactttcgatatcgattgtcttgatcccgcttttgcgccgggtacgggtacgcccgtcattggtggtttgacaaccgatcgggcactgaaattgctgcgtggtttgcaaccgctaaatattgtcggtatggatgtggtggaagttgctccagcttatgatcagtctgaaattacggctttggcaggtgcaactattgcactagagatgctttatttacaggcgtctaagaagcgttaagtagtacatagtcttaatatagttttaggggatatatagttctaggggatagtgaaataagctcgtactgagttgtggcgctatccccttgaaacttagctattatttggattggtgtaacctttatatgcttttttggtaccctttatcgtgtttcacttgctaccttcaaaattgagatgccgcagtactgaactgggcatctatggcgtactttttgaatcaaagaatgatattttttagcgttattgtcgtgctactgctaatttcttttctttttcccacgcatgagattcagcgtttctactgccattgagaagaacatagcaaaatagatgtaacctttaggtatatgcacttgtacactttccagaataagggtaaagcctacaaggattaagaatgacagcgctagcattttgacggaagggtgacggtcaacgaattcaccgataggacgagcggcgagcatcataacaccgacggctatgataacggctgccatcataatgaatagatgatcggacagaccaactgcggtgatgactgaatccagactgaaaataatgtccagcaacataatctggatgatggcccccagaaaggagtgaacagggcgttttagctctccttcattgtcaccttctatcgcttcgtggatttctttgctggctttccagatcaggaacagaccgccaaagaataggattaagtcacgggcagaaatatcatgctcaaaaactgtcaatatcggggaggtcagccgaataacccaggcaatagatgctaacagcgccaagcgcattagcattgcacccattagtccgatcttacgtgctttgttttgttgatggttagggagttttgccacaacaagtgacaaaaagataatgttatcaatccctaaaacgatttctagaattgtcagggtggcaagtgccatccaggcgtggggatcaacaatccattctaacattgcttattaaaaccttaaggtaaaaatctaattatacgcgtgattagatgtaaggtaagtatgtcgatgtaaaaatcagtcagagctcaacgttaaatcaaaaaatgacgagccagtaggggagcagtgaaatttttccttagatagaacccgcgaggcagagtcataataggctggccgtgtacgccgattgcttcggttaatgctttgctgttagccgcttttgggcgcaactgtaatacttcgccatgacgggcggtaacgctctctactttgccaagcacgatgaaatccatcaattcttcccagtcgcgacgtagtaactcttcttcttcttgattgggactccacaataaaggagagccaacccggcgtttggctagaggaatttcccgttcaccttcaacaggtatccacagcacccgcgataatttgcgtctaacatgacagcttccccaggtaataccactgttccctgttaatggtgcaacgcagacaaatgttgtctccagtggataacctcttctgtctaccgggatggttttaagctcaataccgatatgttcgaaatcttgctctggcttactgccggcacttgcaccgaggtaatattctagcaacatgcctacccagcctttatctcgtttcagattgggtgggataggtaaatttgcttttgccgcgagttctcccattgataagccagccagaagctgggcgcattcaaacagttgttgttcgttgtctggtggcgatggaggggaaaaaagagtgttcatttgagatatccgttttttaggtcaaaaaacagccttagtttctgtgaataataaatctgaggttcattcaatagctaaaaagtgataatagcatgatatacaaacattttttattgctgtttcaaatattgtaaaattgactgccgttcttgttcacctattgccggtaataatgaacaggatcttacactatgttatccacagttttatgggataagtagacaaaaatgagatcactggtttgatttacaggtttgactaacacttttttctacaaaaaccgctgttttttgcttaactaaaaagcataacctgtggataacatgatgtttgattgttttttgttctcatcaactaacgtcgtccattatagctgtgattgacgctagaaatagcgaggtaaatagctgctatttcaatgaaaagtaaatactatttcattttttgtctatagattgataattcataatataaagctatacctgaattacccttgcctttttcacatagatatccacagaaaaagtgaataaaagcaagtttgcacacctgtgtatgttcataactctggctttttctgtgaattacccttcatatgggttgaaccaggcagatttgaaatcaaaccaaccaaaggtgttcattttgactccccgcatacttctttgtccctgtaactcaagccagtggtggaacagtggatgcagccaatgttcatcaactattttttcgcaccactcttcaagcgataactcttgtcgtcgccattgtgatacttctttacttaagtcattaccaaggcattttttcaataatggcatctcgtacagcgtagcgaacagcgaaaactccagaggattataaaagttggcggtagcaagccagaagtcactttcggtgttaccattgaaccatgtgtcataatccacgatgttgattttcaattcgacgccgcatttggtcagtatggcttgaaggatctggctgattgtgtggtattcgtgatgttgatgacaaagcgtgacggtcagatgggtaatatcctctggtttgttcaattcggatatgagcttactgtgatgccagcgtagtaataaaccataagcaggtgaccaatggcgttgataaaaggggtcacaatgcgctagcagattgatcggtgttagcaggctgcatagccattggcgaacgtcttctctcttacatttagttgaacgatggtcatgtaataggaaataacagccttcttctatcctgctatctagcgagttattatccgtgctgtcactttccagatgcagagttgtacaaaccagtttctcggcgagttctggtagaaaccatatattcacctgatcaatcagtgcccgaaagccaaagtaattatcaaaggcacgaatttgtagtttctgagcgctgttttttatgacctggtaagggccggttcccactggcatacgagagaagttcggtaacttttgccactcttgaggcaagatcatggcatgtgggctgccgattaataaagagagccagagatcaggttctgaaagaaaaatatcaatcacatagggggtgggcgtggtgactttttcaatatgagaaaaaaggggcaggttgcgtaatctttgtagcgaagcgatgacatccgccatctgtaattctctgccgtggtgaaaatggatagccgggcgtagataaaagcgccaatgatttgaggataattgttgccaatgatgagctaagtcagcttctggttccccattttcctcatttattcgggttaggctattaaatatctgcctgaccagatgaatttcagaacggcgtaaaggtgaaccgggtagaagattagggaaggggcgataatagagtatccgcagtaagttttttccctgacggaaacggcgttcaatctgggatagtaccatatggcggactgtatctttatcaccaaccagttggaccaacttctcaacgttatgttgctcaagcaactcttccgctcgttgttgttgaagttcccatccatcacgtaagaaattcagttgagaacgtttccctcgaccagactcagcctgccactgtaaccagcccgctttctgcatattgttgagcagtgaacggatatggcgttttgaacaatgcagtacatttgccagttcttgtaacgtggtttcagcctcttttccttgatggtgttgccataatcgaatgaattgttgttgtaagcgtgaactgggcataaaagaggaactccagagtattattcatcaatttttatttccttatattgagacgataattatccatattgaaagtagctcaataggccagacgaaatctggcttctcccccaattttcttgagtaatggtgatttgccagccagtaagaaagcttactggctttttttcttattgtacattatgtactccccgcttcttttttacatatcagtttaaagcgagtaataatccggtattggaggcgttttgtccagccactatagctatttctatctgttaatttcttttaaatgtgatatgggatgactaaatattagttaaaaccctgtatatgactgaaaaaatgattgtctgcatgagtattgacgtggtggtattgtttttgcttgtgatagaaaaatcccgtagtagaaaactacgggataaatcaataacggaaaaattaacgtaggaaaaccggttgttcttgctcgtaggttattatggcatccagatgttgtaatgtcaggccaatactatccagaccattcatcatacagtgacgccggaaactatcgatttcaaaatcatagcttttattgccagcgtggactttctgttgttctagatcgacagtaaaacgacaagctttgttttgctgaacccactcaaatagctcattgacatctgtatcgttcagttttaccggcagtaactggttgttgaaagcgttaccgtaaaaaatatctgcaaaacttggggcgataaccactttaaaaccataatccgttagtgcccaaggtgcatgttcacgagaggagccgcaaccaaagttttcacgagccagaaggatactagcaccttgataacaaggctgatttaatacgaattcaggattaggtttttgtcctgcatcatcaagaaaacgccagtcatgaaacagatgctgaccaaatcctgtacgagtaactttctgtaagaattgcttaggaataatggcatcagtatcgacgtttgcagcatctaaaggggcaaccaagccggtatgttgaataaacttttccatcattctctcctttatgacttctgtgctgggtggcgtatatcgataaaatgaccattaatcgctgctgctgctgccatcgctggactcaccaaatgagtgcgtccaccacgtccttgtcgcccttcaaagttgcggttactggtagaagcgcagcgttcaccgggttgcaggcggtcattattcattgccagacacatggaacatccgggtaagcgccattcaaaaccggcctctatgaaaattttatctaaaccttctgcttctgcttgtgcttgaacggggcctgatccgggaacaacgattgcctgaacaccaggtgcaactttatgaccttgtgcgatagctgcggcagcccgtaaatcttcaatccgggagttggtgcaagagccgataaagactttatcgatcttcacatctgttagtttaataccgggtttcaaatccatatacgccagtgctttttcagcagatgctcgttcaacaggatcactaaaagattccggtgcaggaattgtttgatcaatggcgatcacttgcccagggtttgttccccatgtaacctgcggagagatctcttctgcattaatcgtaacaatggtgtcatattgtgcatcaggatcggatttcaatgtcttccagtaagcaacagcttgttcccacagctctccttttggtgagaactggcggcctttcatataagtaaaagtggtttcatccggtgcaaccaaacctgctttagcacccatttcaattgccatgttacataaagtcatacggccttccatgctaagtgcttcaatcgccttaccacagaattccaccacataccctgtaccacctgcactacctgttttgccgataatcgccagaacgatatctttggcggtaatagcgtcaccgacatcacccatcacttcgattttcatagttttggcacgggcttgttttagagtttggctggcgagtacatgttcaacttcagaagtgccaataccgaaggctaacgagccgaatgctccgtgcgtggcagtgtgggaatcaccacaaacaatcgtcatgcctggcagggttatcccctgttcagggccgatgacatgaacaatcccctgatagggatgattgaggtcatataatgtgataccgaattcggcacagtttttcatcaactcctgcatttgaatacgtgccatgtcaccacaagcgttaatatcttttgtttgcgtggatacattatgatccattgttgcgaacgttttacctggttggtgcactgggcggcctttagtacgcaaaccatcaaaagcttgcggggaggttacttcatgaaccagatgacgatcaatatagagtaacggggtttcattcggtacttcccgaacaatatgagcgtcatataatttttgatataaagtcttagccatgttaaacaccctcggctatgtaacgggcgatagtgctgcccatttcatcagtgctaattgctttaccgtttccggctaaatctgttgtgcgatagccctgttccagcgcgtagttaaccgcttgttcaatcgcattagcggcgtcattgtgacctaagctatagcgcagtagtaaagcggcagataggatctgagctatcgggttagcaataccttttccggcaatatctggtgcagaaccaccagcaggttcatacaggccaaaacctttttcattcaggctggcagaaggtaacatgcccattgaaccggtaatcatggcgcactcatcagataagatatcgccgaaaatattggagcacagcatcacatcaaactgagacggatctttaattaattgcatagtggcgttatcaatatacatgtgattgatttctacatctggatacgcttttgcaatctcagtaacaacttctcgccacaatacggaactctgcaacacatttgctttatcaatagatgtgactttattactgcgtttgcgagcggattcgaaggcgatgcgggcaatgcgctcgatttcaaaacggtgataaacctcagtatcaaatgctcgttcatatttaccttggccttcacgtcctttgggttgaccaaaatagataccgccggttaattcacggacacataaaatatcaaagcctttggcagcaatatcattgcgtaaaggacaaaatacctctaatccggcatataagcgggcagggcgtaagttactgaataatttgaaatgcttgcgcaatggcaacagtgcaccacgctcaggttgttctgctggtggtaaatgttcccatttaggccctcccacggagccgaacaatatggcatcagcctgttcgcaacctgctacggtttttgccggtagtgaacagccgtggcgatcgatagcaatcccacccacatcatattcgctggtggtgatacagatattgaaacgcttacggattgcgtccaatatcttataggcttgtgccataacttcggggccaataccatcaccgggtaaaactgcaatatgataattgttcgacatgtttacaccatttcctttgtattttgctgtatgcgttgtttctctttcttaacttgctctgtacgccaaacgcagttcagagcatgaaccattgctttggcagaggattcaacaatatcggtttctaatcccatgccgtggaagcgacgtccaaagcattcgacaacgatattgacctgacccaatgcattttttccttggcctttacctgataactgataagaaaccagttcaattgggtattcagttattcgactgattgcctgatagacagcatctaccgggccgttacctgtggccgcttctgatttcaactctttaccacacactaaacatacagcggctgttgccatcacgttggagccagattggatattaaagttgtccagatggaaaaattcgggttcttgttgttgcaaattgatgaacgctaaggcttccaaatcatagtcaaatacctggccttttttatctgccaggcgtaaaaaggcttcgtataagctacccagatcgtaatctttatcctgatatcccatctcttccatacggtgtttcactgcggcgcgaccagaacgggaagtcaggttcaattgaatttctttcaggccgatggactctggtgtcataatttcgtaagtttcacgatttttcagtaccccgtcttgatgaatcccggatgagtgggaaaatgcattgctaccaacaattgctttattcgcggggatcggcatattgcataattgactgaccaactgactggtgcggtaaatttcctgatggttgatattagtataaacgcctaacatttgctgacggaccttaatcgccataatgacttcttccagtgaacagttaccggcacgttcacccagaccgtttatcgtcccttctatctgacgggcaccggattgtactgctgtgatagagttggcgacagacatccccaaatcatcgtggcaatggacggatattatcgctttatcaatattaggaacgcgttcgatcaagttagtgatgatgccgccaaattgatatggcgtggtgtaaccgacagtatctgggatattgatcgttgttgcgcctgctttgatagcgttttcaacgatccgacacagattatcaataggtgtacggcccgcatcttcacaggagaattcgacatcatcagtgtaacgacgtgctcgtttgattgattgcgttgccatttccatgacattttcgaatgtttttttcagcttggattcaatatgtaaatcggaagtggctaaaaaaacgtggattcgaaaagcgtctgcaacttttaatgcttctgctgccacgtcaatgtctttttctacacaacgggctaaggcgcaaacacggctgttttttatctgcttagcgatcgtctgtacagattcaaaatcaccaggagaggaaactggaaaaccgacttccatgatatcaacacccattctctccaaggccaaggcaatctggagtttttcgttcacacataagctggcctgtaatgcttgttctccatcacgtaacgtggtgtcgaagataataacttgctggttcatatgtaggttcctcttatggttattttttgcgcccagcaggtaaaaaaaacccgcgcttggcgcgggttcttgttaatgtctggtttggaccaactctgttttgaatcaactctgttttctgtccaccagcataccgcgcatatcagatacgatgagtagtaggtttagtagacaaattgagtgaatcatatcgatccaacctttcaatagtattaatgagtgtttgtgattcgtatgcttttattgatacgttatcttaaaagtgatgtcaagaattcatttaggcatatgattcttggttttacttttctcatggtggtaaattgaagtgttgatctgtttatatttaaaaagattttattttatccttttttgttctggtttgactttaatgataatctcagatttatataaaaaatagcgcattatactgattaattaaaattaagtattttttgtgtgatgagctggaagtcgatttgtatttttccgaaaaacatcatttgccattggaaaaatagatacaaataggaagttatgttatatatctttgaaaaaataattctataatataataactctgataaaattgtttaataataataaatcagtaattttattatgaattgtgtaattctttgatttatcatcatatacaaaatagcagggtgaataaattgttaacatgattgtacttttttgtgaatgaataatgagcactacattgtctactaattggaattatatatttttaacactaataaggggatgcgcgggttagctatgcgtattcagatttgtacaaggacgagtcttaattatttgttatccaaatgattaagacaattgatctcgttaatagttagagtcatcgtaatatctgagtaataaatgaaggtatttccgatgttttgttattagctgggatcatctgcatgagtttagtggagttaaacaatggctgaatacacctcagtaactgcaatcaaaaaagatccaaatgaaattcatttacgtaatgtggatctcaatctgctgactgtttttgatgcagttatgcagatgcagaatgtaacacgtgcggcacagatgttaggaatgtcacaaccggctgtcagtaatgcggtttctcgtttgaagctcatgttcaatgatgaattatttgtgcgttatgggcgtggaatacaaccgacggcaagagctcatcaattatttggtccagtccgtcaggcattacaattggtatataacgagttacctggggttggttttgaacctgataatagtgatagggtttttagtctttcaatttgtagccctctagatattagattggcggcaaaaatagttgaacaggtgaagcaaaacacacccaatctgggtgtgacgattagatcatatctgcatgataatattgaacatcagctcaggtatcaggaaactgagtttgtcattagctatacgcagctagaacgtatggattttcatcattacccgttattcaatgatgagttggttttggctgtttctaatcatcatccaagaattgaaaatagtattagtgagcagcaattgtatgaggaacatcatgccgttgtatcactggataatatatgttcattcagcgttccctattatgatggaggtaaacgtttgcgttcggtggtttatcaggggaccgatttgaatagtgtgttgcatattgtttctcaaacctatttggttgcgattgcgccaagatggttagttgagcactatagcgaacaattagcaataagagcggtttcattaccgtgggataaagtaagtcgtccgtgttatttgatttggcatgaatctacaacgaaagataaagggcatcaatggatgaaatcgttgttgagtcaacttagtagcagataattaacttgaaaactcactactggataagggtagtgagtttttttattttatcacaaatttttcaacttttgataaataggcttttcctgttgttcaggaatcggtagactgcaaggaaatagctaacacctgtaagctgaaaagcgaataagtgatgcggaaaggtattatcagagaataaaattactgttttttctccgataagaaaaaaaattttcgaacaggaaaaaaattgtgataactaaaaatttacatccttatcacttgataaaccggttgcaacaacaaataaaacaacacccagagaaaattgcttttcgccaatggtctccggctgaacaactcgaactaaactggcatgatattggcaaaaagaccgacgctattagccgggcgttgttggagattggtgttgatgtgcaagaaaaaattggcctctttgcacataacagcatggcgtggtcattggcagatatcgctgtattacaacttcgggcggtcactgtccctctgtatgcaaccagtagtcaggaacaggctggtttcatacttaatgatgctggtgtgcgtattttgtttgttggtgggcaggcgcagtatgatgttgctattacgttgacagaatgttgccctcagttaagtcacattattgtcttagatgaatcagtcgatttgcgggattgttcattagctcagcatttatctgatttcatggtcgataatgaattaccctgtcagtccgagttggaaactcgtattgctaaccacaatctggatgatctttttacacttatttatacgtctggtaccacgggtgagcctaaaggcgtcatgcttgattaccgcaatttagcctatcagttgtattcacatgatcatatcctggcattaactgatcaggacatttctttgagttttctgccgttatcccatgtctttgagcgtgcatggagtttctatgtcatgcatgtaggggcacaaaatgtttatctgactgacactaattttgttcgtcaagctatggcggatgtctgcccgacagtgatgtgtgcagtgccgagattttacgaaaaaatttatagtgcggtttttgaaaaggtttctaaggctccttggcatcgaagaaaactttttaattgggcgattaaatgtggtgagcgtcagtttttacgtaagttgcagagtaaaaaaagctgcccttggtcaacagcaatgcatcgactggctgataaattggtgttgagcaaattacggaatgtgttggggggcagagttcggtttttacctgctgctggtgcacgtctggacgaaacgattatcctgttctttctcgctgttgggataaatatcaaatatggctatggcatgacagagacttgtgccacggtttcctgttgggaagagcaaggttatgtacttggttctattggtaaaccatcgcctggcattgacgtccgtatcggtgaagaagatgagatacaagtgcgtggcccaattgtgatgaaaggctatttcaataatcagcaagaaaccaccaaggcatttactcaagacggttggttgcgtacaggtgatgccggtaagttggatgaaaatggtaatttgttcattactgaacgcctgaaagatttgatgaaaacatcgaatggcaaatatattgcccctcaaatgattgaaggcattttgggacaagatcgttttattgaacatgttgctattattgctgatgctcgtaaatttgtatcggctcttatcgtgccttgtcatgaagcattggaagagtatgcaaggtcaattaatctcaaatatcatgaccgggttgaattactgcgtcatagtcagattatcaatatgtttgagcaacgcttgaaagaaatgcagaaaaactttgctcacttcgatcaggtaaagcgtttcatattactgccaaaaccattttcaatggaaacgggtgaattaactccaacactgaaattgaggaggaaaattattatgcagcgttactatgaagaaattgaatctatgtatcaggattgattttcgggattttatacaaagagtgagtattacacgttattcatgggaagtatgggggatattgtagtaatatcccgctttgggttttccctgaaaaatacccgtatttcaagatttaaatactagaaaataaactttatttcagccttaaaatcgcatataaattatattgtctaagaccattttgtgattattaaatattgcagattgaatgatgataattttaaaaattatcagatatttttttctgaaaaatcatattgataagataatataaagtttgtatggtaaataaaatacattttgtgtaattaggtgaattgatgaattttaataatgtagttattgttcatggttttttagcaactcccgatcaccattggtttccttggcttaaagatcagtatgaaaagttaaatatcaatgttattgtgccggaactgcctgaatctcatgttccttccccccatttatggcaagaaaaattgcaggagagcatttcaaatcctaatgaaagaacactttttatcgggcatagtctgggttgcattgctacactccgttatatctcatctttacctgataatataaatattggggggattgtattaattgcaggattttatgaaaaactatcaactttacctgaattaaatacatttactgaagaggggctggattttcacttgctcagacagaaaataaaccaacgaataacaatattatcgcttaatgatgagattgtatcgccacagtttaccttaaatttgagtcagcagctccgggctgaattatatggttttcctgatggcgggcactttttagatcgcgacggttttactgtttttcctaagctagaaaaggtattaaaagataactcaatgttgtgaatcagaatttccttatataaatgaatatgacagaattttttcatgttttatgtaattatgatagactttgtgtgttttaaataagttgtcaaaataatcatttacctactgtaaaataatccgctctgaatacagagcgggattataagtatatttttagttactttttcctactaatgggatgggtttatatcccatgagaattaaaaaattatcccaatgatttattatttcttgagatatttctttttccacgatgcccttttcagcatttattttaatataatgaaatgccttttctaaatcctgtgggctattccctaaaccatgtaaataattcacccctattatctgatacccatttattatgccagaatctccagctctttgaagtagatcattggcttttatttgatcttcttgtactccataaccaaaactataaattataccgagattatataaagattccgcatggtttttatctaactttaatgccttgctataatactcgatggctttttggtaatctctttctgatttctttaatgaactgtcggtataaagttttcctaataaaaaataggcattagagctaccattctgagcttgtttttccagttcccgaaactcttcaactgttctcggtactttcagtggcagttccttaaccatacctgtatatttaattccatcaaatacagttctaggaatatttgttttcgtcggttctgcacatgcattggtaaataatacgattatcagcaaaagtatatatttcattctactagtttatcctatcgagttgacggtaagaagttgaattggtgttatcccgacagagatagtgttgttaatttctgctgtttgctggctgacaaagcaggccatcgcattaattagattatgtaattcgttacttagttcagcttcgtgtatagatattggctcctgtttaaaccagacatccgtgatctctgtctgatatccatttgaccagttgacggtagatgtcagtccgtggtaattaccttgtaggtcaaaataatcgctctcctgatagtttagttgaatagatttaatatcggtttcttcaaggctgttaagttcatctggggtactgagtccgtctaaattcctatcctgccagatttttaatgtgttccaagttacatcttggttatcaataataccgtcctgattgctgtctatatcagctaaagccataaaaccatgttgtgcttttactccagatgacagttgggaattttccccaaacaattcggtgccattattgattaatccgtcattgtttttatcccagactaataggctatcatttgcatcgatccaacctgtattgactttctgcccttgaccgtcaaaatcaaatattactcctaattcactggttactgtttgaacgccatcgccatttaaatcaattactaatggtgttatgtaagttttcgtaacttttttcgggtttgggaaaatttgattgagtacttgattaggagtcttctctaagtttagagtaatgccagagtaaccagcatgtcctccctttctgtgaaacgtctcttttacaaaatcaatacagttatttgttaataaattataggatggtggttgcgtttttccatcccggtaatcaatagttttctgaaaaaccatatcaaggtccatcaagaattgaaggttttgggataccattgttagtgatgaggccgtagggtagcgtatatggtcattaaacgacaaattgtctttaacggtaccccaatcttcccccggacttaatcctgcggtaatggactcaaaattaccagttttggggttgttatttctgatggtatagaaaacatgacccgtaagtgatttacctatattgattccattttctcctgctataggagcaccttggggggctacatgcaaggttatagacggtgtgttttcaaagtatgaaagtttatcgtcgggcataatttcttgatagttttcaaatattcctattgttttatgtttaggttgttgtagcgtttcatcaggcatatgtggtttcttcctcattgatttaaaaaataattcttatctttcagataaagtgttactaaattggttctttttgttttaaaaaatgaattgagaagtcattatcgttcctaaaaggctttcttcggttttggtttttaacgggctgagcccatagtcaataattttcagtcggtcagtttttgtttctacctttatgttaatattggcaactagcatcatttgttcaccattaacagtcagatgatttttatctaactgaatgatagncgaataaattaggttgtatccgtttatatttcttaggacgattattgaattgagggacacaacttggtttccttggcacgaaatgaaatgttgtttataccctatggatttcaagatgcatcgcgacggcaagggagcgaatccccgggagcatagataactatgtgaccggggtgagtgagcgcagccaacaaagaggcaacttgaaagatgacgggtatatctgtattccagacagccctgcataaggcaggcggaaaaaatcttttttgagacttttagtctttaaacacatagtctttaaacacatagtctttgaacccatagtctttaaacccatagcctttaaacccaatttattagcagcaagtaaccactgggttttatctaatcctgcaagcgacaaatcagaccccatcaaacattagaagttaaaattgaattatctatatcataactcattattgcctttgataaataattttaatgatatggtttgattatattgtaaccaaatagtctgattaatttaaattaccatttaattgtcagccttaaatcatcttcttgggagatgatcttttacttattatttaatttgcgtatatgagtataaaaatcatacattaaaatctctgggcaaatattgaatggttgagactgagacgacagggaaataatagactctatcgtattctctaattaaaatggagtaaaaaaattctactcgaattcattatttgcaatggctatccaaaaacgaggaaatgacggtcaaattatctgaggcatttgtctgcatttcctttatcagcttcataccttggtgactgaaacgatcttgaaaactgctttttagttttttatcgtatatatactggataatgcctatacgttgtcgttctttttaggtatagccactcatattctacttacctttagccttttaatagtaagataacgcttacaagagacattttgaatggctagaaagttgctattctgccttgtactcacattgctaacacccgtttctagcgttatgttaattaactcagcatcaatatatcgctgagaggccattcgccttactaaaataaaagtggaaggaatttccgatttattaacttgcaaacagagcctggaggaaaacctatggagatgttatcaggagctgaaatggtcgtccgatcgttaattgatcagggcgttaagcatatattctgttatccggggggggcagtactggatatttatgatgccctgcatacggctgggggcattgagcatatcctggtacgtcatgagcagggggcagttcatatggctgatggttatgctcgatctaccgggaaggttggtgtggtattaatcacctacggtccaggagcaaccaatgccattaccggtattgccacagcttatatggattcaattccgatggttgtattgtccggtcaagtcgccagttcgttgatcggtaatgatgcattccaagaatgtgacatggtagggatatcccgcccgatcgtaaaacacagttttttagtgaaaaaagcagaggatattccgaaggtactgaaaaaagctttctatctagcttccagtggtcgtccgggacccgtcgttattgatttaccaaaagacacggtaaatccggcagtaaaattaccctatatttatcctgatcagataagtatgcgttcttataatccaacgattcaaggacacaaagggcagattaagcgggcattaagaaaactattgaatgcgaaaaaaccagtcatatatgtaggcgggggggcgattaacgcagattgttcagcagaattactggtattggcagaaaaattcaatatccctgttgtgagctccctgatgggcttaggcagtttccctgcaactcatccgcaaagcctgggcatgctcggtatgcatggtacattcgaagccaacaaagccatccataattcagatgtcatttttgctgtcggtgtacgttttgatgatcgtacaaccaataatctggagaaatattgcccggaagcaacggtattacatattgatattgatccaacatcaatttcgaaaacggtttccgcagatgtacctattgttggtgatgctaaacaggtgcttggacaaatgttgtcgttgctggagacagtagaagacacacaagatccagatgcgctaaaagattggtggttatctattcagcaatggcggagccgtaaatgtcttagttttgatcgcagtggtgaaaagattaaaccacaagcggctatcgaggttctctatcgtctgacgaagggagaagcttatgtcacttcagatgttgggcagcatcagatgtttgttgcattgcattacccatttgataaaccaaggcgttggatcagttccggtggtttggggacgatgggatttggtttaccggcggctttgggcgttaaactggtgaaaccggaagcgacggtagtctgtgttacgggggatggtagtattcagatgaatattcaggagctgtccaccgcattgcaatatgggttgccggtactggttctgaacttgaataatcgtttcttggggatgataagacaatggcaagatatgatttatgctggtcgtcactctcaatcttatatggaatccttgcctgattttgtcaaattggctgaagcttacggtcatgttggcatttctattcaacgttatgatgaattggaaagtaaattggccgaagccttgaaagaggtgactgaaaatcagcggctggtatttgttgatatcactgtggatgaaactgaacatgtatatcctatgcagatccgtggaggagcaatggatgagatgtggttaagcaaaacggagagaacctgattatgcgccggattttatctgtattacttgaaaacgaatcaggggctttgtcccgggttgttggtctgttttcccaacgtggctacaacattgaaagtttaactgttgccccaacggatgatccgacattatcgcggatgacaattcagactaagggcgatgcaagggtacttgaacagattgaaaaacagttgcacaagttggtggatgtgttgcgagtcagcgagttggcaccgggttctcatgtggagcgtgagattatgctagtcaaattgcaggccagtggatatggacgtgaagagatcaagcgcagtactgacatcttccgtgggcagatcgttgatgtgactgcgaccttatataccgtacagttggtgggaaccagcgataaattggatgcctttctcgatgctgttcgggatgttgctgaaattgttgaagttgctcgttcgggtattgtcggtgtctctcgcggggataaaattatgcgatgaaaaatcgcaaactgcggggctatgtgcatacatttatcaggctctgcgataaagtagggccttttttgggtctatgaaggagttaatgtgaaactggatgaaatcgcccgccttgcaggtgtttcacgcacaacggccagttatgtaattaatggtaaagccaagcaataccgtgtcagtgataaaacggtagaaaaagtgatggcagtagtcagagagcataattaccatcctaatgctgtggcagccggtctccgtgcagggcgtacccgttctattggtttggttattccagatttagaaaataccagctatacccgtattgctaattatttggaacgtcaggctcgtcagcgtggctatcagttattgatagcctgttcggaagaccaacctgagaatgaaatgcgttgtgttgaacacctgctacaacgtcaggtggatgcaattattgtttctaccgcattaccgccggagcatcctttttatcaacgctgggctagtcgttctttgcctattattgctctcgatcgggcacttgaaaatgaacactttatcagcgtagtgggtgatgattttgaagatgcaaagatgttggcacaagaatttcgtcaattcccggctgaatctgtgctttatctcggtgcattaccggagttatcagtcagttttctgcgtgagcaggggttccgtgaagcatggaaagatgaccctcgtaaagtgatgtatctttactcaaacagctatgagcgtgatgcggctgctgaagtattcaccaaatggttagaaactcatccaatgccacaagcgttgttcaccacctcttttgccctgttacagggggtcatggatgttacccttaaacacagcggccgtttaccaaatcaattggttattgcgacttttggtgatcatgaattattggatttccttgaatgtccagtgctttctgtagcgcagcgtcatcgtgaaattgctgaacgggtattggaactggtgttagcaagtctagatgaaaagcagaagccagggccaggtatcacacggatacatcgtgacttatgtcggcgaggaagcctgagtcggaaaatatgataaaaacccctcattaattttctgatggggggttttggttgtcagattgtcctaaaagaagtgtgtgagggcaacttttaactagttcttacgttgggtgttttacacgatcaaatagcaattttgttcatacataaattattcagtagcaagaagagcatggaacagcgcttatttcagtttgagatttgtctatttacccctgtcttttactgttttttatatattaaattgattttaataatatttatcttgaagtgtttttgttgctagttagttttaatgttgaatgcatcaaatgaaatgataaatatttctgcataatggttaaatagtaatgaaatgtaaattatgtaaataaattaatcacacaactattttttcattattttgccgtaaacattcattcgccctgtgcttgtaaaattattcagaattatcatggtgttaattattattgatattgctaaatttaataattatgcctcccaatagccaaaatcctgccatcaaatatagctaaagcgcatcggctctggcttgacaaggttttcgtcccatccgtaaactccttattgtggggattagtgggataaagtggtaatttttgatcaccaggggcggcctgaggatgtttcgtggagcaacgcagataaatctcgatagcaaggggcggctcaccgtacctacccgataccgggctatgctaaatgaggaatcacaagggcaaatggtttgtaccattgaccttcatcaaccgtgcttgttgctttatacattatctgaatgggaaattattgaagaaaaactttctcgcttatccagcatgaatccggcagagcgtcgggtgcaacgtttgcttttaggtcatgccagtgaatgccagatggatagtgcaggacgtcttttgttagctaatacattgcgtcagcatgcagggctagtcaaagaggtcatgctggttggtcagttcaacaaatttgaattgtgggatgaacaggcttggtatcaacaggttaaagatgatattgcggctgagcaatccacacaggaacctttatcagtacggctacaggaattatcactataaatatggcaaatagtcattttaaacataccagcgtattgttggatgaagcagtcaacgggctgaatattcgtgaaaatggcatctatattgatggcacatttggccgtggagggcattcacgtctgattttgtcgcaattggggactgagggtcgcttaattgccattgatcgagatcctcaggcgattgaagtggcgaaagcgattacagatccacgtttttcaattgtacatgggccattttctaaattggctcactatacagaaaaagccgggctaatcggcaaaattgatggtgtattactggatttaggtgtttcttctcctcagttggatgatccggaacgcggtttttcttttatgcgtgatgggccgctagatatgcggatggacccgactcgtgggcagtcagcagcagaatggctgatgaacgcaacagcagatgatattgcctgggtattgaaaacatttggtgaagagcgtttcgccaaacgcattgccagagcaattgtggcatgcaatcaggaagagccaattactcgaacaaaagcgttagccgatttgattgctcaggccagcccgataaaagaaaaacataagcatccagcaaccaagagcttccaggctattaggatctatatcaacagtgagctggaagagattgagcaggcgctggagggagcattacaagtgcttgcaccgcaagggagactttcagtgattagtttccattcgctggaagatcgtattgttaaacgatttattcgtcagaatagtcgagggccacaagtaccggcaggattgcccctcaccgaagagcaactgaaagcacgcggtgggcgtagcttgaaatcgattggcaagatgaaaccttcagaggaagaagtggctgataatccacgggctcgtagttctgttttgcgttttgctgaaaaagttagtgaataatggcaggtgaacgtcacggattaaccggtattatcggcagcgatttgctcaagaatgccaagataccgttaattcttctagtcgttgtactggtttcggccatagttgttgtaaccactgcacatgaaacccgcttgttgacggctgaaagagagcatctggtggtggaacgtgatgcattagatatcgagtggcgcaatttgatcctcgaagaaaatgccttgggtgatcacagccgggttgagcggatagctgttgaaaaaatgcatatgcagcatgttaatcctgctcaggaaaacattgttgtttcacagtgagttaatttaattattaaaaaggtaagagatgaaagcagtacgctccgtgaagttaaaaaggcaagaagataaagccagttttgttagctggcgttttgctttgttatgcggggggattgccgtagctttaattgccttattgctgagagtgacttatttgcaggtcatcaatccggatcaactggttaaagaaggtgatttacgttccctgcgcgtgcaatcaatccctaccgctcgcggtatgatcagtgaccgaatggggcgacctctggctgtcagcgttccagtcaatgctgtttgggcagatccgaaagaggtatttgaaaaagggggtattacggatgatacccgctggaaagctttatctgatgccattaatttacctcttgaacaacttaacgacaaagttagcgctaatccaaaaggccgttttgtttatttagcgcgtcaggttaacccatcggttggcgattacattcataaactgaaattgccggggatttatttacgtcaggaatcccggcgttattacccgtcaggtcaggtaacggcacatattattggcgtgaccaacgttgatggtcagggtattgaaggcgtagagaaaagttttgatcgttggttgacaggtcaaccgggtgagcggactgtacgtaaagatcgctttggtcgtgtcatcgaagatatctcatctgttgatagtctggcggcccacaatctggtattgagtattgatgaacgtttacaggcgctggtttaccgcgaattaaccaatgcggtggcctttaacaaagcagaatccggtacagcggtgttggtggatgttaataccggagaagtgctggcaatggcaaacagcccatcttataacccaaataatcgcatcaatacgccaaaagaagtcatgcgtaaccgggctatcaccgatattttcgagccaggttccactgttaagccgatggtggtaatggctgcgctgaatgatggtatcatcaaagaaaataccgttattaatacagtaccttataggataagcggtaaggaaatcagagacgtatcccgttatccagaattatctatcactggtattttacaaaaatcgagtaacgtcggtgtttctaagctagcgttggcgatgcccgcgacagaattggtggatgtttattcacgttttgggttaggaaaggcgaccaatctggggttggttggagaaagcagtggcttatatccaacaggaaaacaacggtggtcagatcttgatagagcgaccttttcttacggttatgggctgatggtaacaccattacagttagcgcgggtctatgcaacgattggtagcttgggtatttatcgtcctctgtcaattaccaaagttgatccacctgtgccaggcacaagagtatttcctgagcctattatgcgaacagtcgttcatatgatggaaagtgtggctctgcccggcggcggcggagtgcgagctgcgataaaaggttatcggattgcaattaagacgggtacagctaagaaagttgggccggatggcaaatatgctagtcgatatatctcttacgccgcaggtgttgcccctgcaagtaatccaagatttgcactggttgtgatcattaatgatccactgacaggtaagtattacggcggtgtggtttctgcgccggtatttggtgccattatggggggcgttctacgcatcatgaatgtggagccagatgctttggcggcaggtgataaaaacgaatttgtgattaataagaaagaggatacaggtggcagatcgtaatctacgcgatttactcgcgccgttgggtattgacgccccagtgcgtgagttacgcgaaatgacattggacagccgtaaatcgtctgccggagatctgtttgttgctattaaagggcaccagacagatggtcgacactacattcctcaagccatcgcacaaggggttgcggcggttattgcagaagcccaaggcgaggttgataacggaaccgtacaaattatgcatggtgttccggttgtttatgtgaacgatttgaataataagttgtcacagttagctggtgagttttattgtcaccccggtgataaattgcacttgattggtgtaaccggaaccaatggtaaaacaaccactactcaattacttgcgcagtggagccacgggttaggggaaaccagtgccgtgatgggaacggttggcaatggtttactggggcgtgtggcgccaagtgaaaataccacaggctctgctgttgatatccaactggatttgcaacaacttgttcggcaagaggcgacttttgcggcaatggaagtctcttctcatggactggttcaggggcgtgtggctgcgttgccgtttgaggcggcagtgtttaccaatttgagccgtgaccatcttgattatcacggtgatatggaacactacgaagccgctaaatggctgctattttccactcataatgtgaagcaacaaattattaatgctgatgatgagattggattgaaatggttatcccgtttaccacaagcggttgctgtaacgatggaaaaccgtctgccggaaaattggcagggccgttggttggcagcgcgtgaaataaagtatcacgataaaggggtatctatcaccttcgagtctagttgggggggcggtacaattgatagttccctaatgggggcatttaatgttagcaacctgttgttggcactttccaccctattagctctggattatccattggaaaaactgcttgaaacagcttcctgcctggaacctgtctgtggacgaatggaagtattcactacaccgggcaaaccagttgtcgttgttgattatgctcacacacctgatgcgttggaaaaagctttgatggctgcacgtttgcattgtcaaggtaagctttggtgtgtttttggttgtggtggtgatcgtgataaaggtaaacgtccactgatggggggggttgcagagcagttggccgattatgtgattgttactgatgataatcctcgcaatgaagaaccgcaggcgattattgctgatattctgacgggttttcttgatccggggagagcgatagcgattcatggccgtgttgaagcggtaaccaacgctattatgcaggcaaaagcagatgatgttgtattgatagcgggtaaaggccatgaagattatcaattggtcggccatcgtcgactggattactcagaccggttaactgttgctcggttactgggggtaattgcatgatttccctcactttgcaacaactttcacaagtaacagatggcgtattgaatcaggtgactgaacaacaggctgccaatatttgtatcagtgatgtgactactgacagccgtcgggttggcaatggcagtctgtttattgccttgaaaggtgagcgctttgatgcgcatgatttttttgctgatgcagtcaaagctggtgctggtgctttgctcgtcagccgggtattagatattaactttccacaggtcgtggttaaagatactcgtttagcaatgggtaaattagcgagttgggttcgccagcagagtaatgcccgtgttgttgcgttgacgggttcgtccggcaaaacatcggtaaaagagatgaccgcagcgattttgcgccaatgtggcaacacgctctataccgcaggtaacctgaataatgatatcggtgtgccgctgacattgttcagactgacagaacaacatgagtttgctgtggttgaattaggtgcaagccatgttggtgaaattgcctataccgtagaaatggctcggccggaaacggcgttagtcaataatctgtttgctgcgcatttagcggattttggttctcttgcgagtattgcaaaagctaagggcgagatttttactggtctttcagagaaaggtacggccattatcaatatggaaagcaatgattgggctcactggcagcaggttattggcgacaaaacagtacagcgtttttccatgcaacaagcatcaggtgctgatttttacgctacagatattcaggttaaacaactgacgacggatttttgtctgcatacgcctattggtagcacagaaatcaatttgccgttgcctggaaaacacaatgtcgccaatgcgttagcagccagtgcgttagcaatttctgttggcgcaaccctgcaagatattcgtctgggcttatctgagctgaaagcggtaccagggcggttgtttccaatcaatctggcagaaggaaaattgctgcttgatgatacttataacgccaatgtcggctcaatgactgttgcagttcaggtgttatcacagatgccgggttaccgagtgctggttgtaggcgatataggggcattgggtgaacagtcagcagattaccatcgtcagattggtgaaaccgtagcttcttgcggtatcaatagtgtgttcagtgtgggcaaattaagtattcatgttagtgaagcgagcggttgtggtcagcattttgcggataaagctgcattgatcgcaacattggttccactattacaacaacacaaagtcttttcagtgttagttaaaggttcgcgtaataccacaatggaagatgttgtccacgcattacaggagagcttcacatgttagtttggctggccgaatatttggtcaaatatcactccggctttaacgtcttttcttacttgacgtttagggctatcgtcagcctgctgactgctttggctatcgcattgtggatggggccgcgtatgatcgcctttctgcaaaaattacaaatcgggcaggttgttcgcaatgatgggccggaatctcactttagcaaacgtggtacgccgacgatgggtggtttgctgatcttactttcaattacgatttctacactgttgtgggtgcgcttgaataacccctatgtttggtgcgtgctgattgtgctgattggttacggcattgttggttttgtggatgattaccgcaaagttgtgcgcaaagatactaaggggttgattgcccgttggaagtatttttggcagtccgtcctggcattgggggtggcgtttgcaatgtacagtttcggtaaagatactccggcaacacaattggtcgtgccattctttaaagatgtgatgccgcaactgggtgtgctttatattctgttgacctactttgtgattgtcggaaccagtaatgcagtgaatttgaccgacggattggatggtttggcaattatgccaaccgtttttgttgcagcgggttttgctttggtggcatgggcgacaggtaatgtcaattttgctaactatctgcatatcccttatctgagccatgctggtgaactggttatcgtctgtactgcgattgtgggtgctggattaggtttcttgtggttcaacacttacccggctcaggttttcatgggggatgtgggctctttggcattaggcggtgcactggggacgattgctgtgttgctacgccaagagtttctactggtgattatgggcggtgtatttgtggtggaaaccctgtcagttattttacaggtgggttcttttaaactgcgcgggcagcgtattttccgtatggcacctattcaccatcattatgaattgaaaggctggccagaaccgcgtgtcattgtgcgtttttggattatttctctgatgctagtgctgattggcttggcaacattgaaggtacgttaatcatggcggattatttgggtaaaaaagtcgtcattatcgggttggggctgacgggtctctcctgtgttgacttttttatggcacgaggcgtgatccctcgtgtgatggatactcgtacggcaccacccggcaaggataaactgcccgatggtgttgagtgtcacagtggaagcctgaatgctgactggttgatggatgctgatttgattgtcgtaagcccgggcattgccttggcaacggcggtattgcaggctgcggctaatgcaggtattgaaattgttggtgatatcgagttgttttgccgtgaagcaacagccccgatagtcgccattaccggttctaatggtaaaagtactgttaccagtcttgtcggtgaaatggcgaaagcggctaattggcaggtgggtgttggcggtaatattggcctacctgcattagaattgttgaagaaatcttgtcagctttatgtcttagagctctccagtttccagttggaaactacatatagcctgaacgcaacagccgccgctgtgcttaatgtaactgaggaccatatggatcgttatcctcagggggtatctcagtaccgggcggctaaactgaggatttatcatcaggcgaaaagatgcattgtgaatgctcaagatcccctgacactgcctgaaatgggtatggatagccgttgtgtcagctttggtgtcgattgtggtgactaccagcttgatagtgaaaatgcttttttgaaagttcacaaccaatcactgctggcgacaaatgaaattaagctgactggacgacataactacgccaatgggttggttgcattggctttagctgatgcggttggtattcctcgtgaagccagtttggcaacattgacggtttatccggggcttgaccatcgtttccagcttgctcgtttgaacaaaggagtgcgttggattaacgattctaaggcgaccaatgttggcagtacgatggcggcgcttgatggtctgaatctggagggaacgctttatttgctgttaggtggtgatggcaagtcggcagacttttctccgcttaaacctttcctttgtgggaataaagttcagctttactgctttggtcgagatggaaaacagttggcgcaactacgcccggaaatagcgacattgaccgaaactatggaacaggcgatacgtgatattgctccgcgtctggtggctggcgacatggtgttgttatctcctgcttgtgcaagccttgatcagtttcgtaattttgaacagcgtggtcatgagtttacccgtttggcagaggagttgggctgatgtctattccgggattcagtagattaaaagactgggttattggtggccgtgaaactgatgccaccaatatggtgttgtatgatcgcacactggtttggctgacactcggattgggaattatcggctttgttatggtgacatcagcatcgatgccggttgggcagcgtcttgcagaagacccgtttctgtttgctaagcgtgatgcaatttatctcttgctggctttcgggttgtcattgatcacattgcgtatctcgatggatttctggcaacgctatagcaatctgatgctgcttgtttccgttattttgttgttggttgtcctggtggtgggaaattcagtcaatggggcatcgcgttggattgccattgggcctttgagaattcaacctgctgagttatcgaaactttctctattttgctacctcgccagttatttggtgcgcaaagtagaagaagtgcggaataacttttggggattctgtaagccaatgggtgtgatggtcgtgttagcggtgttacttctggctcaacccgacttggggacagtggttgtactgtttgtaacaacgttggcaatgctatttctggccggggctaagttatggcagtttctagcaattattggttcaggggtattcgcggtggttttgttaatcattgctgaaccttaccgtatacgccgtgtaacttcctttctggatccttgggaagatccatacggcaaaggttaccaattaacgcaatctttgatggcttttggtcgtggggaatttttagggcaaggactaggaaattcagtacagaaactggaatacctgccggaagcacatactgactttattttctctgttttagcagaagaattaggttacgtaggtgtggttttggtgttgttaatgatattcttcgtcgcttttcgcgcaatgacgataggtcgtcgcgcattacagatggatcagcgtttttcgggttttctggcttgttcggtgggtatttggtttagtttccaagctctggttaacgttggggccgccgcaggtatgttaccgactaaaggtttgactttacctttgattagttacggtggttcaagtttgctgattatgtcgacagctatcgtattgctattaagaattgattttgaaacacgcttggcaaaagctcaagcgtttgtaaggagcccccgatgagtggcaaaacccggcgtttgatggtgatggcaggtggaactggaggacatgttttcccagggctggctgtcgctcatcatttaaaagatcagggctgggacgttctctggttgggaacagcggatcgtatggaagccgatttagtgccaaaacatggcattgatattgaatttattcagatttctggtctgcgaggtaaagggatcaaagcattgttggctgccccggtccgaattttcaaagcaatccgtcaggcaaaggcgattatgcgtcgctatcagccagatgtcgtgcttggcatgggaggatatgtttctggtcccggtggcattgctgcgtggatgtgcggtgttccggttgtattgcatgaacagaatggtattgccgggctgacaaaccggtggctggctaaaatcgctacgactgttttacaagcatttcccggtgcatttccaaaagcgcccgttgttggtaatcctgttcgcgaagatgtgttggcactgcctatacctgaacaacgtttgacagggcgtgaaggtccgattcgggttctggttgttggtggcagtcagggggcgagaattcttaaccaggcaatgcctgaaattgctgcccgtatgggtgataaaattactctttggcatcagacaggcaaaggggctaaagaaagtgttcagaatgcctatgacaattcagttaaatgcgaacataagattactgaatttattgacgatatggcacaagcttatgcctgggctgatgtggtgatttgtcgttctggcgcgttgacggttagtgaagtgtcagcggcgggattacccgggatttttgtgccatttcagcataaagatcgtcagcaatactggaatgcgttacctctagaaaaagttggcgcagcaaaaatactggagcaaccccaatttacagttgatgcagtaattgaattattaactcagtggcaacggccacaattgctggaaatggcggaaaaagcccgttcagcagcaattgttgatgcaactgagcaagtatcggcggcattgatcgatgcagcaaaaaaatgatttagaccgccttaaaaggggcggtgaagcaaacatatatagcgaagaagaaaacgtgaatacacaacaactggcgaaattaagagctttcgtgcctgagatgagaaaagtcaggcacatccactttgttggcattggtggtgctggcatgggggggatcgccgaagtgttggctaatgaaggttatcagattagtggatctgatttggcaccaaacccggtaactcggcaactgactaaattgggcgctcagatttattttaatcatcgtcctgaaaatatactggatgccagtgttgttgtggcttcaagcgcaatcttggcggataacccggaaattgttgctgctcgtgaggcccgaattccggttattcgcagagcagagatgttggcagaactgatgcgctaccgtcatggtattgctattgccgggactcacggtaaaacgacaacaacagcgatgatttctagcatctatgcacaggctggtttagatcccacttttgttaatggtggtttagttaaagcagcaggaacgcatgctcgtcttggcagtagccgttatttaattgcggaagctgacgaaagtgatgcttctttcttgcatttgcagccgatggtggcggtcattacgaatatcgaagcagatcatatggatacctatcatggtgacttcgaaaacttgaaacagacgtttatcaacttcttgcacaacttacctttttacgggcgtgcagtcatgtgcattgatgatccggttgtcaaagagttaattcctcgtgttggtcgctatatcacgacgtatggttttagcgaggaagcggacgtacgtattacccattatcagcaaaaaggtgctcagggatattttactgttagtcgtcaagatatggcggatctgaaagtcgtattgaatgcaccgggtcgccataatgcgctgaatgcggcggcagcagtggctgttgcgactgaggaagggatttctggcagtgatattttggcggcgttggcaggttttcagggaaccgggcgccgttttgattttttggggaatttttctctggaacatgttaacggcaaaggtggtagcgcaatgttggttgatgattatggtcatcatccaacggaagtggatgcaaccattaaagccgctcgtgctggctggccggataaacggattgtgatgatatttcaacctcatcgttatacccgaacccgtgatttgtacgatgactttgccaatgtattgaatcaggtagatgtattgctgatgttggatgtttactctgcgggtgaagtggttattccgggagcagatagtcgttcgttgtgccgtactatccgtagccgcggtaagttagatccgattttggtctctgatccggcaaaagtgaccgctgtgttggcacaggtgctggatggtcatgatttaattctggttcaaggggccggcaatataggcaaaatagcgcgtaatctggctgaaacaaaattacagccatctttgaatgaggaaaaacacaatggctgagaaagtcgcggtactgttgggaggaacttccgctgagcgtgaagtttcgctgttatcgggacaagccgtgttggctggattgagagaagcgggtattgatgcacatccagttgatacaaaagattttcctgtgactcaacttaaagaggccggatttgagaaagtctttatcgcgcttcatgggcgtggtggggaagacggtactttgcaaggggtattggaatttttgcagttaccctataccggtagtggcgtgatggcttctgcactgtcaatggataaattgcgtacaaaacaggtatggcagggaattgggttgactgtttcgccgtatgtttcaattaattctcagcaagttgaacgattgactgattctcaactccaagaatatgtagcagatttaggtttgccattaattgttaagccaagtctggaaggttccagtgttggtatgactaaggttaatgagatttcggagttgcgtggtgcattagaggctgcgtttcgttatgacgttgacttgctggtcgaaaaatggttgcacggcccggaatacacagtagccatccttggtgatacggctttaccttctattcgtattcaacccgctgctgttttttatgactatgatgcaaaatattggtctgaagaaacacaatatttttgtccaagtggcttaagtgatgaaaaagagcagcaattggcagaactggcgcttaaagcttatcagtcagttggatgcagtggttgggggcgagttgatgtcatgatggatactgatggtgatttctatctgttggaagtgaatacctctccggggatgaccagccacagcttggtgccgatggctgcgcgtcaggctggattaagtttttcacagttggtggtaaagattttggagttggctgattgatatgtctcaagcggccctgaaagtgaggggacgggataatgaaagtagcagttcccgtcctagtaacggctcttacctggcagggcttatcttcttcctgatggtacttgggaccattatttggggaggtttggccgtccttaactggatgaaagatgctaacagattgcctatttcaaaactggtggtaacgggtgagcgtcactacacgaccaacgatgatatccggcgggcaattttgtcattagggcaaccgggaactttcatgacgcaggatgtgaatatcattcagcaacaaattgaacggatgccgtggataaggcaagtcactgtccgtaaacagtggcctgatgaactgagaattcatctggtagaatatgttccttatgtgcgctggaatgacacacagatgctggatgccgaaggtcaggtattcagcattccggctgaatggggagctaaagggtattttccgatgctttatggcccacaaggcagtgaaaaagaagtccttgatggttaccgggccatgactaaacttctcgctgccaataaactgaaattaaaatcggcggcaatgactgcgcgtcgttcctggcaactgactctggataatggtatccagctaaagctgggaagaatggatacaacaggccgtattaaacgttttatcgagctttatccgctgttacagcagaacacagagaaaagggtagattacgtggatttgcgttatgacagtggtgccgcggtaggttgggcgcctttacccattggtgatcctaatgctccggtcaaaaggcaataaacaattactggcaataattatatgaggcaggcagaacaacgatgatcaaatcgacggacagaaaattagtagttggcctagagattggcacagcaaaggtatctgcccttgttggtgaaattctgcccgatggtatggttaatattatcggggtgggaagctgtccatcccgcggtatggataaaggcggtgtaaacgacctggagtcggttgttaaatgtgtacagcgggctatcgatcaggctgaattgatggcagattgtcaaatttcctctgtttatctggcgttatctggaaaacatatcagttgtcagaatgaaatcgggatggttcctatttccgaagaggaagttactcaggaagatgtagacaatgttgttcatactgccaaatcagttcgtgtacgtgatgaataccgaatactgcatgttattccgcaagaatatgctatcgattatcaagaaggtattaaaaatccggtggggctttccggtgtgcgtatgcaggctaaagttcacttgattacctgtcataatgatatggcgaaaaatattgcaaaagcggttgaacgctgtggtttgaaagtcgaccagcttattttttccgggttggctgccagctatgctgttttgaccgaagacgagcgtgaattgggcgtttgcgtggtagatattggcggcgggacgatggatattgcggtgtataccggcggagcgttgcgtcataccaaagttattccttatgccggtaacgttgtcaccagtgatattgcttatgcctttggtacgccaccaagcgatgcagaaacgataaaagtacgccacggttgtgcactaggttcgttggtcagcaaagatgaaagtgtggaggtacctagtgtcggtggacgcccaccacgtagcttacagcgtcagacgttggctgaagtcattgagccgcgttacatcgaattactgaatttagtgaatgatgaaatcttgcgattgcaggaacagttacgccagcagggggttaaacaccatctggcggcgggtattgtcttgactggcggtggtgctcagattgatggtttggctgaatgtgctcagcgtgtgttccatgctcaggtgcgtatcggccaacctcttaatattactggtctgacggactatgcgcagcaaccctattattcaacagcggtagggttgctgcattacggaaaagcctctcatcttaatggtgatgcggatattgaaaaacatgtttcagtgagccgttggtttaagagagtcagtagctggctgaaaaaagagttttaattttatacagaggctgagtttttttagtctcgatataaaggcacaaagcggagagaaactatatgtttgaaccaatagaattaaccaatgacgcggtgattaaagtcatcggcgtcggcggtggcggcggtaacgctgttgagcacatggtgcgtgaacgcatcgaaggtgttgaattctttgcagtaaatacggatgcccaggcattgcgtaaaactgctgtcggccagactatccagattggtaatggtattactaaaggtttgggggctggggcaaacccggaagttggtcgtactgctgctcaagaagatcgtgatgcattgcgcaccgcacttgatggtgcagatatggtatttatcgctgccggtatgggtggtggtactggtactggcgcagcgcctgtggtagctgaaattgcaaaagagcttgggattctgacagttgctgtggtgactaagcctttcaatttcgaaggtaagaagcgcatggcgtttgccgaacaagggatcactgaattgtctaagcatgtagattcattgattactatccctaacgacaaactgttaaaagtgcttggccgcggcatttcactactggacgctttcggcgcagctaatgatgttttgaaaggtgcggttcagggtatcgctgaactgatcacgcgtccaggtctaatgaatgttgactttgctgatgtgcgtaccgtgatgtccgaaatgggctacgccatgatgggttccggtattgcgcagggcgaagatcgtgcggaagaagctgctgagatggcgatatccagcccattgctggaagatatcgacttgtcaggcgctcgtggtgttttggttaacattactgctggctttgatctgcgtttggatgagttcgaaacagtgggtaacacgatccgtgcatttgcatctgataatgcaactgtcgtgatcggtacctctctggatccagacatgaatgatgagttgcgggtgactgtggttgccacgggtattggtatggataaacgtcctgaaattacgttggttaccaataaatcttctcagtcaagcgtaatggaacaccgtcatcagcaaatgtctggcggtatgtcttcattgtctgaagaaaataaaccagcagcaaaagtggtgaatgaccaaagcgtacaaacgagtaaggagcccgattatttggatattcctgcatttttgcgtaaacaggccgattaatagctaaaaaattggattctccgctttttgtgctaaacttgcccgccaatcatagtgtatagtgattggcaggatggataatattgcgagataaaacgatgatcaaacaaaggacacttaaacgtattgttcaggcgactggtgtcggtttacataccggtaaaaaagtcacactaacaatgcgcccagcaccggctaacaccggggtcatctatcgccgtactgacttgaatccaccggttgattttccggcagatgcaaaatccgtgcgtgatactatgctctgtacttgcctggtaaatgagcatgacgtgcgaatctcaacggttgagcacctgaatgcagcgcttgcggggttaggtatcgataatattattatcgaagttgatgcgccagaaattcccattatggatggtagtgccagcccatttgttttcctgctgctggatgcgggtattgaagagctgaacacatctaaaaaattcctgcgtattaaggaaaccgtgcgcgttgaggagggtgataagtgggcagagatgacaccttataatggtttcagtctggatttcactattgatttcaatcaccctgcgattgattcaagcactcaacgttactgtctggatttctcggcagaggcgtttgttcgtcaaatcagtcgtgcacgtacatttggctttatgcgtgatattgagtacttacaatctaaagggttgtgtttaggtggcagctttgattgtgcgattgttgttgatgactatcgtgtgcttaatgaagatggcttgcgttttgaagacgaatttgtccgccataaaatgctggatgcaattggtgatctgtttatgtgtggctataacatcattggcgcatttactgcgttcaaatctggtcatgcgttgaacaataaactattgcaggcagttctggcgcaagaaagtgcatgggagctgactactttcgaagatgaagctgaaatgccattggcttttcgtgctccatcaactgtaatggcataactctctagtatgctgataataatttaatgatatatcagtgggttatgttatcagtgattttattttcgctgatgttttttactcggcgttagcactattcagcgttagcacttaaatttatttagcgttatcgcttagtcgttttagctgtactggcactctctccggccagtgcagctagtcgttctaatctttccttcagcttttttggactacggttcgctagcgttattaattctttcgcactctcttgacttaactgacgtgtcggtaaagttttatgatcatctctcatcgtttttgcgaagctctgcgcactattgccatgcttaatcatgagtgatgggttaatcctgatgtcgatagatgacaatgatggtagaattccgcttcttagtgtagaaagcagcgttggcagctcgtaacgtaatctggtcatccaactggcgtttcctgcttccagtaccagaatttgtttgcgataattagcgacccggcaccacggatgtaattgtgcgggaagcaagctgataacggcacggttaagttttaacaaagcgacggcacgttgctggataacatgaagcgggcttttctcaacggcggcggcgtcttcaaaaagaacatctaatgattgtgggcggctatcgcgcataatgaaagtagctccggtatgatgaaggattaatgggtattctaaatctttggcgacaatttggcagacgttatttctggtcacatctgttattaggggtggttgcggcaagtattggcgctcctaccattttagcgggtgttaccgataatatctcacaagctaatacctcgcctagtcagagctggcaaaatcaggctttatcggcttttgataatctattttcattgcagaatgttcaacaccagccagccaatggcgttaattactggcaacaacatgctgtacgtaacgtgatcagacagctttcttttgctttttctatttcgcagcctatgagcgatgaaacagcaaaacaaagtatccggttaagttcttccaatattcagcagcttgtgctggaaaccctgaatacactattaattcgggaacctaagccacctgagccggttttagatataccgttcctgaatgttgcatcacaatcttcttatattctgacgctttggattgctaaagcccaaggtatccgtgcaggtcctactgcttacctctgaatcttcgtttttttacaaattttcgaaataaataactatttgctggctgcgaaataacggccttatctgagatgtaattaactatgctgattaaattattaacaaaggtttttggtagtcgtaatgaccgtacattgcgtcgtatgcgtaaagttgttgatgtcatcaaccgcatggagccagagtttgaaaaattgtctgatgatgaattgaagggtaaaactgccgaattccgtgcccgtttagaaaaaggcgaatcgttggaaaatctgttacctgaagcatttgcaacagtacgtgaagcaagtaagcgcgtgtttgctatgcgtcatttcgacgttcagttactgggtggtatggttctgaatgaacgttgtattgcggagatgcgcactggtgaaggtaaaacactgacagcgactttgcctgcttatttaaatgcattaactgggcgtggtgttcacgtagtcactgtgaatgattatctggcgcaacgtgatgccgaaaataaccgcccactgtttgaatttctgggattgagtgttggtattaacctgccaggtatgccggcacccgttaaacgccaggcatatgctgcggatattacctatggtactaacaacgaatatggctttgactatctgcgtgacaacatggcatttagcccggaagagcgtgttcagcgtaagttacattatgcgctagtggatgaagttgactccattctaatcgacgaagcacggacgccattgattatctctggccctgctgaagatagttctgagctttatatcaaagtcaataagttgatccctaaattgattcgtcaggaaaaagaggattcagagactttccagggagaaggccatttttctgtcgacgaaaagtcccgccaggttaacttgacggaacgcggtttagttttgattgaacaattactgtcagaagccagcttgatggaagaaggtgaatccctatattcgccaaccaatatcatgttaatgcaccatgttacagccgcactacgtgcccatgcactgtttacccgtgatgttgactatatcgtgaaagatggtgaggtcattattgttgatgagcatacgggccgtactatgcaggggcgtcgctggtctgatggattgcatcaggctgttgaagctaaagaaggtgtagaaattcagaatgaaaaccaaaccctagcttcaattaccttccaaaactacttccggttgtatgaaaaactggcgggtatgaccggtacggcagatacagaagcgtttgagtttagctctatttataagcttgataccattgtggttccgacaaaccgtccaatgatccgtaatgatttgccagatctggtttacatgaccgaagctgaaaaaattgaagctatcattgaagatatccgcgaacgtaccggtaaagggcagccggtattggtggggactatttctattgaaaaatctgaactggtttcccgtgaactgactaacgcgggtatcgagcacaacgtacttaacgccaaatttcatgcaatggaagcggacattattgctcaggcaggtcaagcgagcgcggtaaccattgcgactaacatggcgggtcgtggtacagatattgtgctaggcggtagttggcaggcagaaattgctaagctgaccgagccaacagaagctcagattgaagagattaaagctgcatggcaggaacgtcatgatagggttctggcggcgggtggtttgcatattatcggtacggagcgtcatgaatctcgtcgtattgataatcagttacgcgggcgttccgggcgtcaaggggatgcgggatcatcccgtttctatttatcaatggaagactcactgatgcgtatttttgcctctgatcgtgtcactagcatgatgcgtaaactgggtatgaaaccgggtgaggcgattgaacatccgtgggtaaccaaagccattgccaatgctcaacgtaaagtagagagccgtaacttcgatatacgtaagcaattgctagaatacgatgatgttgctaacgatcagcgccgtgctatttatgctcagcgtaacgacttgttggatgtgagtgatgttagtgaaaccattggtagcattcgtgaagatgtatttaaagcaaccattgatgcttatattccccctcaatctctggaagagatgtgggatgtggaaggtttgcagcaacgtttagtgactgatttcgatttagagctgccgatcaaagagtggttggataaagagcctgagttacacgaagagacgttgcgtgagcgtatccttgaacaggctgttgaagtctataaacgcaaagaagagattgttggcattgaaatgatgcgtaatttcgaaaaaggtatcatgttgcagactctggatatgttgtggaaagagcatctggctgcaatggattacctacgtcaaggtatccatctacgtggttatgctcagaaagatccgaaacaggaatataaacgtgaatctttcgctatgtttgcaagcatgctggaatcgctgaaatatgaagtgattagtacattgagcaaagttcaagtgagattgccggaagaagtagaggcattggagcaacagcgccgggcggaagctgaacgcttggcaaagcaacagcaattaagccatgaggttgaaaaaggcgcattgatgtctacaacagaagctcagattgccagtggagctcgtaaagtagggcgtaatgatccttgtccttgtggatcgggtaaaaaatataaacattgccacgggcgcttgcagtaacgatgaaaaggcgggaaaccgcctttttactctgttagttttaagtgagcaacgtcaacgttggatatagtatttggttgttgagcaatcaaaaagaagagatgaagaagtaagagtaatatggaaaagaaacacctacatatagccgctgggattatcagaaatacgcaacatgaaatttttattactcagcgtcatgctgatgcccatatggggggggtctgggaattccctggtgggaaagttgagcaagaagaaacgcctgaacaggctttaatacgtgagttacaggaagaaattggtattacagttattcattatgatctggtaaaaacggttgaacatgattttcctgacaggttgattaccctgtatttcttcttggtggatgaatgggaaaatgagcctttcggtaaagaagggcaactttctcggtgggtattacagaaagatttaattgctgatgaattcccgcctgctaaccgcagcattgttgcattacttaccgcttgagttgtcaatagccgcattattaataacgcggctatttattattgctcaggttgtccactccaatcatcactatcagagttttcactttggcttggtatccgcttctcttcatttgcccactggcctaagtcaattaattgacagcgtttactgcaaaatgggcgatatgggcttatttctccccaaaccacagttttaccacatgttgggcattcaatcgtgagtaattcagacataataattttcctgataattagttcgtaatattagcagcatgccaattcaaatggtaaatgagcaggcacggagcctttttcactatccaatggtaaaaaacggatagcaaagcgggtcttatgaccggaaatttggggaaacaataaaggggttaatggcaaacgtaatctcagtaaatctgcgccttctgctgtattctgatggaaaccgtttttactgatttctgaacgaaaaatagcagattggcggatgagttctaaaatactgtccagggcttgttggagaggtagcaaactatcaatccagaatgcgaccattttatctctttctgattgtggtaagtgaagccatagatgtagggtgggtagatcaaaaccacaacaaccactgggaatactgaggcgctggcgcactaggctgataattttatcttctttaagggattgccctaatcgtggtgctttacttaatgcaatagcccgctctttcaattttaatctgaaactattgacgatatttatatcaacatcgggtatttcagcccattgttttaattttgcctgttgacgttctaattcttttagcaattctgaacgtacttccccgcgttctagcacttcaagtaactcagttattgtgcggaaaaaggcgaggctgcttgccaatgagtttaaatggcgttgacttgtgagttgttgtagggaagattcaattctcaaccatgctcgcattttttcattcagtggatgttcaaaaatgattgtagaagttgtgtcactcatcatgattgtcctgtctggctgattcagctaatcttaagtattgttgatgtaattcggcaacacgaggagtaattgcctgtacgttatcatgatttgagataatgtcatcggcataagccagtctctcgctacgggatgcctgtgccgccaaaatattttcaatttgttggtagttaataccatcacgagtggctatccggctgatttgtatttcaggtgaaacgtcaacgactaaaatccgatctgccagatgccttaaattattttcgactaataatggaataacccaaataacataaggtgctattatctgttctaattgccgtcgggtttcttgatgtattagagggtgaagaagttgattaacccactgtttttcttgattgtttgtgaatattttctggcgtaacagtgctcggttaaggttaccatcgggtgtcaatatgtcatgaccaaagtgttctgtgatggcttgtagagcgggcgttccaggaacaacgatttctctggcaataatatctgcatcgacaagaggaacaccaagcgcagcaaaagcattggcgatagtggttttaccactgccaattccacctgtgagtgcaataatataagtcatcctatcccttaatattacttgataatatttcaggattgtaaccgaaaggaggcagatgacctagagacaaagctatggaatcatttttactttaggtgagtatcgtacctagctgaaaaatgggtaaatacattgccagcaatagcgtaccgacaataatcgctattatgactataagtattggttctagtaactgtgtcatattatcagaaatctccaatgcttgttgttggtaccaattagcaagatttcctaataacagttccagattgccagattcttcgccaacactgacaaactgttgacacagagcaggaaaacaagattgttgtttcagtgtttcgctcattggtaccccttgattaatttgagctcgtaagaatttagtcgcttgcaaaaataccggatgatttattgatgcaatagcactgtctaaccctgcggtgagtgtcaggccggctttttgtgtcataaacagaatatggaaaagttgtcctaattgctgacaactaattaattttgcaataacgggtaaacgtaacattagatttttttcacgagtaatccatattgtatggcgttgacgtaattgtagataaaatagaagcagtagaattaatccaataacaccatagccaccgtattgaatcagccagttggaagtgattaataaactgcgggtgagcagaggaagttgtgcatcaaatgaatgataaatatgttcaaattcaggtaaaacaaaaataagcatcaataaaataatgatgctggcaacaatggtaataatcagaggataacgtagcgcttttgttattttcttctgtaacttatcttgttgctcctgttgtttaaccaataattgacagcagacttctaattgcccggttaactcaccaacagaaataagttgacaaaataaaggtgggaatagaaatggataattttttaatgaggaggaaaatgattctccacgggtaattttcttgctaatatctaataatacacaatgccataatggatgagcgcattcgcgaataagaatattgaggcaattcagtaatggcattcctgatgataatagtgttgccaattgacgaatgaaattcaaacggtaggcaatttgttgatgatgataaaatatcaatttttcacattttatattataaggttgcaatccagaatgaataagctgctgatataaagctttcctgttatcacatagtgatttcccttttgatatttcgcctttgttgttcactgcttgccaattataaatataatgaattttcattactattcctgacctgtgacttgataaatttcttctaatgtcgtgatgccttgttccactaataaaataccggatgaaagtaaagtgtcttttctttgagccataatggtgttttgaacatttttaggattctgttctgataatatttgttgaatatcataagttatttctaaaaattcataaatagccgttcggccataataaccggagaaacaatgttcacaaccaactgctaaccattgattaataaatagagaattgttttcaatattaataacggtttcttctgtttgttgtttacggcaatgaagacataattttctgacaagtcgttgggcgataattaatttgatacaagaagcagccatataacctgaaatacccagattttgtaggcgcgataatgtatctatggttgaattagtatgcaatgtagaaagaaccaaatgacctgtttgtgccgcttttactgaaatttcagctgtttcgccatcacgtatttctcccaccataatgacatcaggatcttggcgtagtaatgcccgtaatactttggcaaaattgagctcgattttgctattagtttgtgtctgattaatgccattcagtgggatctcgacgggatcttctacactgcaaatattctttttattctgattcagatattgtaagcagctatataaagttacggttttcccactacccgttgggccagtcactaaaatcattccttgtggtaatgcgagtttttgtcggagctgatttaataatgggtcaggaatacctaattgatctaacgataattgctgcattgtatttaatattctaagcacaactttttctccgtgtatggttggcaaagttgccatacggatagcatagttgtgtcgggtgtcaaaccaatcaaattgtccatcttgaggtaaccgtttttcagcaatattcaatttcgccattattttaaggcgtgcggcaatgcttgcattcatttgataagatggcgaagacaataagtgtaatgagccatcaactcggatacggatacggtaaccttgttggaatggctcgaaatgaatatcggatgcacgccgttgaattgcagttaataaagtttgattaataagttgaatgacgggggcatcattttcatctgtattgatatcagttttaagtggtaatagagaggattcttcctctggtacatgactcagtgaaatattttgatgtaatactgattcgatccttgccagtggccaaatttctacattaacaatacatccggaaataaagcgtaatgctgataataaatcatcattgggtaattcgctgctggcaattgttatcgtattatcatctttttttatcacaacagattggtggcgttgacaaatatcatgaatttctttttccattaatgtattttccgttgctgaaagtgagttcattattgcttcctgtgtaagtgtgtattgatatacccgtcatctttcaagttgcctctttgttagctgcactcgctcaccccggtcacatagttatctatgctcccggggattcactcctttgccgtcgcgatgcatcttgaaatccatagggtataagagttaatgaattaaaattcaaatatttcctgacaacgactttttaatgaattgtttgtcgattcacatttaatattccatttaattatacctgtttgtgtattttgtgtcggctttaatgtaacgctgaggtttttaagactctgtttaccgttaatggtaacttccccatttttaactgaaatgttatcgatatatctgctgttatgttcttttggaattgacactgctcctgcgttgcaaccattgaaatcttcagtttcaaaaccgcaaagttctatacctgatttataaggtacaatattttgtagtatatctgttaaagcggctttctggatatatccttgataactaggaataccaatggcacttaagatggaaatgatagcaatagcaaccatgatctccattaaagtaaatccttgttgtttcatattttttctccgtgttgtggtattgcgatatagagaatgaaggaaagagaaaaaaatgaaataggatatatgaaggttatggaattgactcgaaaaagaatttttggattacaaggtttgcaaaaatatttacggtggtgttcgcaaatttgtgagtaactaattgctgatttacaccaccatcaatataattattgctaattaaagcgcatggagagatctaatgctctaatatgtttggtgagtgctccaacagaaataaaatcgatgcctgtttcagcatagctgcgcaaagtatccagggtgatattaccggatacttctaaagcgactttacctgatgtgatagcgacggcttctttcatcattggaatagtaaaattatctagcataataatatcaacattagctttgagtgccagaatgagttcatctagcgtttctacttcgacttcaacagggacatcagggtgagaataacgagctttatctactgcctgtttaatagagccattggcaataatatggttttctttaataaggaaagcatcgaataatccgaggcggtgattattaccacctccacaaagtacggcatattttaaggcggtgcgtaatcctggtagcgttttgcgtgtatcaagtaattgagtttttaaaccggtaagacagtgaacataatgactgacttccgttgcaacgccagagagagtttgaataaagttaagggcggtgcgttcaccggtcagtaatatctgtgctgggcctcgtaataggcaaagtttttggttggctgtaattgcatcactatctttgactaaccattcaatggagatctggtcgcctaattgagtaaaaacttcattcagccattgttgtccacagaaaatgccatcttcccgagtgataatgactgcggtggcttgtttatctgcgggaattaattggccggtaatatcagcggtgaaatttgtatttccacccagatcttcttttagtgcgagggttacactggcaggaatgtcgttttgcaagtgttccataagaacagcacggcgctgatccgtattgcaattttgttttgtcattaaaaagctccagaggtgataacaatattgatggtcttaacatgctaccctgttgtgtagtgaacaactactatcttggttttatcatctagattaaggaaaagaaaaaatgtggttgcatgatgaattgagttagaaaaattctttcacacgatttgtgcccacaggtgagcaactgttttattggttattcatcgtattagtttgtctccgggaaagctttgttgtactgacacaatggtttataggtagacccggatatataccctatggatttcaagatggatcgcgacggcaagggagcgaatccccgggagcatagggaactatgtgaccggggtgagtgagtgcagccaacaaagaggcaacttgaaagatgacgggtataaaagagcatatcactggctataatgatgttgttctgggaagaaaaattgatctgggactttatttcgattggacacattaccagcaattgttacaggagcagaaagaatgactctctttatactgttgttagtgttggcgtgggaacgagtttttaaaatgggtgaccattggcaattagagcatcgtcttgagccattgcttaccggtatgaaatccttttcgttatggaaaagcctgttgatgacgttagcagtcatgttgatagcatggttactgattgaaatattaaatgattttatgttcggtgttcttgaactggtgttatgggtgttcatttgtttgctgtgcatcggagcggggcgcttacggcatgactatcgtgaatattttcgtactgttcatcaggataatagggaacaacaaagggaatatcttacgcgtctcgcaattattcatggtttaccctctgatgccagcaaagagaatatgttgcgagagatacaaaatgcgttgctatggataaattttcgctattatctggccccgattttttggttgattgtggcgggtaaattaggtcctgttgctttgatgggatatggctttttgagggcttatcagggatggttggcacaatatggtacaccggttcagcgggcgcaatcgggtgttgacagcttgttgcattggttggattgggttcctgctcgtttggctggcgttgcctatgctttattagggcatggtgaacgggctttaccggcgtgggttgcttctcttagtgatttaagaacttcacaatataaagtgctctgtcagcttgctcagttttcattaagtcgtgaaccccatcttgattcaattcaaactcccattgctgcggtgatactggcgaaaaaagtgactttctctgtcatcgttgtcgttgccttactgacaatttatggggcattggtttgatgcgttggcttaatgactctgattggttcgggttttattcatactatatatggagttgtttggcttacctttagctattagagccgatttatgcagcgccgactggcgctgcaacaattgcaacaactaagaagagggttcgatgaagtcaatatccgaccatactgaaataaccgcaacagcttgagctagccctccggcaccgtcagttttcaacagaactggtacaacagaaacttgtgtcgatgccgtgtagttatcgttcctttgtttaacgtatcttgcgttcttgagtgataaggggggggtggccgcatcagtaaacatgaaggcgacatcctctattgaagaggctaaggcattctgtttccccggaacaaatggcccatcgatccggtagagtaagcgtgaattttgaaatacatcatcatcgctggagcaggtgctgtttatccctatttgcctctttgattatcactgtcaggttgcccgcactcccggtggtatagaggtcggtgaaccgaaacggccccggtgctacggtggtttgatacacgatattgccattctagaataccgtcacctgcgcattggagttcgccacaccggttatctccggggcaaaaccgtgctgactgtcgggtaacatcgcctcctccgaagccagtttcatgtcccgaaatgggatactgtaaaaaatatcgccaccggtataggtttcacccgccgtgaactcactgcgcagtgctgggatgtcacgttgcaggtaggtattgttcacctgccattgggtctgtgtcggcgcggaaaaacaggaggcgtcctcgtggcgctgatgattgtaactgtaggtttgcgggctgcgcagacgccacagtcccagattcagcccattacgaaaagaagcaaacagattacgagaacgtgatccttcccagtttccctgattgtcataatgcttttccgagccattgacggtgtagttcatcaaaaaagctgggatctcaggatcccacagtgacgggttaaccgttccagaataacggggctgcatggcgctctgagggacgctgagatcgagacgtaaacggacaaaatccaatgtcacgcgggcgtgcgggatctgtttcgtcagctcggtgatggggctgtcatccgctttaccctgaaaagccggtaactcgcgagtattgaccccatacctttccagttgtgcgacggtgaataccggctggagatggccgttaaccagcctgaattcaatctcgcggctgtccaccttattctggttcatgtagacatccaccagatagcgcccgggtgcgacatatctcgcgttttcatacgccaagagatcgacatgactgtgttcaccatcagcgcccattaggaacatgggattaaagtattcccgcgccgaggcgggcagggtcgttgccgtcagtgaacacagcagacataggtataccggacggggccagaaaccgcctggttgaccgggcgcgtgttggttatcctcccgcagtgcaggcggaaatgaagtttttgttgccatagctcatctctgcttataattcagcctatgctgttgatattaaggtcactctgcctgaataccgtccgccgatgcggcggggttataacgggacgtggcgatcctgactgtccccacaaacgccggggcggttttcgccataatcgccatttttcaggtagctccctagcccgcctcccggtaattgatagcgcaggccaaatcccacgtttcccgccacagtggaagccttatcccgatataatgtcgggtggttttctggtgtggggccggctattttaatggccggtgtacgaccagctctggctgacctcgcacaacctgacaacgctagcgtaataggcttgttgtccgctgcttcgatatgttctgtacttcgttaagcggtatgggtgaagactcgacgtgggatgtctgcacgttgagttcacaggttggctgttccagcgttaatgccagagtcagttctgccgtgtttgaacttgccccgggaagaggacggtacaaagcagaccagcgagtgttgtccgtctgataaaggctcacggttttaacattacggtatctccccctgataggtagatcctcctccaaggtcattaatcaccgtccaactcactttagccgggtaatgcacccctttgaggggtaaaaaaagggtcgagaacggtgagaccatgttctctttctgttgctttgtcatcagctcttgtccgcctactttcagggaggtgaaggtgatgtaatagggtgatggattcgtgatcgttattccctcggctgtcgttttgaagcgcaaagcgccgaagcccttttccggtgcaaccggcagccctgacgggcgatacatcaatttaattgtgttagccagaacttgtacgcccccggagctctgcttactagagagattattggattcggtgcttaacgggatagcttgcgcggtaaaccagaacagggattcccggtcagcaggcagcgcctggccggttttgatgatacgcacctgattctggctgccgggttccatacgaaacagggggggagtcactaaaaatggcgcagtcttgctcccatcagggatagaactgaccgtcacctgcatcagatagacggcctctttactgctattacgtagcaaagcggttgcagcgtagctatccgcccggtagataatgcgggtggcatcaatccccaccctctccgcctgtgtggaagtgatcgggcagcctaacaggccggccatcatcatcgctgtcatcaatcttttcactgagtcacctgaatgtgtctggtttggtgttgcatcagcaagagttggacttctctgtccaattccgctgctatgatgcccttagcacttgatggcgtgtgattatttataaaccacttggaatgttactggtgctattacttcttgggctgctggtacggcgctggacttggaaaccagcgccattttgcattttttcatgccttttccatcttttggactggttggctcgaattctgtggtatcagcgataacaataggagctgccttagtaacagcggtattcccgtcatacacggccacctctacgtcagcattagcattggcgtttaagatctggttgctgttagtaagagtctgttccaaaacctgtatttgaatatcttgtgaaggagtgatttagcattgcttatggtttttcccattttggaactacagttagctagtttaacctctaactcttttcctgatgaatgagcgctattgatgtcagcactaatgtctgacgttctaactgttcccatatctaaagtgtaagcacctttactaccaacaatgcccgtaccttcgacgttgagatcaggggtcgaggcgcctatggaggccatcacgttgaccgtagcgccatctgaagcgtgtgccatacctatctccatgcttaggagtactgcggctaatatgttggtcttcatcatttgctttttcatttcatacattccttatctacatctactgaatacattttgcccaaaacaacaccatgacaggttaaacaatcggaccgccaaggcggtgcgtttactggtcatttagagttattttgttcagttattaacttgatgaaatatatgaatataaatattaaattaatgaaattacttctgacttataccatttagtttcaggatttctgcctttgtcataagaaattgaatataaaatcgatcaaaaaacgatcttgcaacaggtcgcaatatccgtaatgcaagaaataatttcaattttaaatcaaaaaactaggtgattttttacaaaaaaatacaaaaaatctcttttaagtgatgaaattttccgtatactcccccgcgtttgaagaagaccgaacaaaataactctaaatgttcggttttttgtcccatatcagaaactgatgtcattgaaagccacatcactactttgagtaaggtttttcctcgttcttacaccttcttacccttgcgcagaaacacgaatctccagcattgcaaaagcattatattaattattcttattaatttcagtgttgaggggattggttaagacctgatatcaggtttgttttgaaccatcatcttcgattcactctgtattgaaattgaccggcatggtgctggttttgaaaggtgccctgagtaaaccgttctgtgtttgtcatacaatcttcacagcaaactatcgctgtaaaccatgtaatggcgggatgatagaacagtgaccaagtaacatatactgtttgctgtttcagataaatgatgacttttttctttttctatcaataaattaatggtagctttcaatgattatcactctgatttatctatcactttgaaccatattctgtctatttagtgataaaaaattattgtcatacgataacttttaaagtactttagcgaaagtttagttgaacatgtatatggaatgacacaagatgtgtgataaacaggagtttgtaactaatcccagaatcaagctactcagctttctggctattattattgcttccattatggtaattggtgatttggggttccatattgcatcttggtcgttatggcacgataccactcgtcaggccgttcttcaggcgtatagcgatcttatgcctgcattaactgcaaaaggatttaagcaatctttattaagtcaggtgctttatatctctctggatacgatacctcggattatatcaacgtcatcttatatattaattggcattctgtttttccggtttgctaaaggtgaaatatggagtaaccgtaatatttccgcttcatttattattggtttcctgatgattctagagcaacttctctaccctgtgattaatatgttacaaggaatggcgttatctgtggatttagtgaaagggcaacgggtatttagtttttcatttggcgttaattcagaatctctgtttattattatgtttggtgtattccttctgatatttagcttaattatgcgtgaatctaagaagataagcgatgagcaacgttattttatctgagaatcatcatgagtattataataaggttggatgtgatcttagcaaaaaggaaagtaaagtctaaagaactggctgccattattggtattactgagcagaatttatcattgctgaaaaatggcaaaataaaaggtatccgtattgagacgctggaaaaaatttgtaaacatttgcagtgtcaacctggagatatattggaatatgtggaagatggagaggataaccgctaatacaataaataaagtcattgtgtgtcttttggtatcttataagatagaactttatattcattagccagttttaaatgcatgaaaatattaattatttcatgttttttatctagcctgttactctgtggtgttaatggttcaccaataaagcaggtttctcctcgcgataagaatatatatttctctctggggggatattgttctgatattccgtggaatgccagaaagataaaatgcatatgtagatattatttactcgatcataagaaatgatctctctttttatatggttttcatttaagttaaatttttataaaaacagcaattcaaggatgttaacaatgaataaattttttattgttttattctcaatatttgtgattacaggatgttcttctatgccacggcttactgatggctatatttcaacctgtggttattttgaatgtaatgtcaaggatatagtttcaggtagtgaagttaaagtagataatataccttctactcctgatatttaccgggatatctcaatccaagatagacaaattatacaatctggtggaagaccaccttttgaagataagagttacagtattggggggacttttaaattctaatttaatttctttggttatttctttatttttaattaaggtattgttatatgaattttataagaaaaatagctgttatccctttatttaccttatttactctattggcgggttgtacatcgtgggaaaaaccaggggcaactcagtatgaaagagatagggattacgctgaatgtaaagcattaggttattctcaattaccatcagactggaccagcgaagttgttcattctttcgagacaaaacatttttcttgcaaagataaagacaaggacgaagataaatcctgtaatcattacattactgtgccgaaaactgaggttaagcgttgggataaaaatgaatcatcaaggcgttggataatttcatcctgtatgtataaaaaagggtggcatgaagagacgcgttattggttttaatgtagtccatttttttccatcagcaggagttacctggagctgttgctggtggttcctcacatatttgtcattattcctttctaattgccagttttagccctcggttttattgatttgagctacatttataacctgatggtatgcatttgtatttaaaatcaacaggtgatgatttggtcgctatatttttttaataaagattcaactattttcttgctgtaacgattcactgcacctatttatacgttcataaaggttaggttaaaatattatcttaggatgtttattaacctattggttatcaacttttgcgaatttttaaaaaaaactgttaaaatttgcaggtttttatgatttgggacaaggtctttatggacagttggtgaatactttgttacttttatggcccggtagtttaaattggtattaccaattgactttggcaaagaccgaaacaatgtttatccatatatactcaatagatttcaagatggaccgcgacggcaagggagagaatccccgggagcatagataactatgtgaccggggtgagcgaacgcagccaacaaagaggcaacttgaaagatgacggatatatgtagttaccttaagtaggtgctattgatgcaggtggtttgagcattgtccaggttttaaacgacaaacaaaatagcctcatgagacatgagataggttctaactggcttagttctaactgacttatagtaaatatggcttataataaaatccgccaaccaaaattatcagatgttattgagcagcgtcttgaacatctcatccttgaaggatctgtgcgtccaggggagaagttgccgcctgaacgtgagttggcgaaacagtttgatgtgtcacgcccttcactgcgcgaagccattcagcggttagaagctaaaggttttctttttcgccgtcagggtggggggacgtttgttcagagtaacctttggcaaagtttcagtgatccactggtacaactactggctggtcaccctgaatctcaatttgacctccttgaaacccgccatgctttggaaggtgttgctgcctattacgcggcactgcgtggaactgacgaagattttgaacgcattcggcaatatcaccttgttattcaacaagctcaggaaagtggtgatgtcaatgctgaatctgaggctgtgttgcaatatcagcttgtcgttgccgaagcagcgcataatgtggttctccttcatttattacgctgtatggcacctatgctggaacaaaatatccggcagaattttgagtttttgtatacccgccgagaaatgttgacggctgtcagcgatcatcgggcgaagatttttgcagcgataatggcgaggcaaccagagaaagcccgtgaggcctcccatcgccatttagcgtttattgaagatgtcttattggatctcagccgcgagcacactcgccgcgagcgatcattacgatgtcttcaacagcatcaggaataaaattagctgtgtggatcttgaaatttgctgcgtctgcatagctaagttgagtccctttactgagggcactagcggcaacaacagtgagggcctatcttccagtcatgaccggctgaacgtcaaagggtatgacgggaaggtaggctccaaaacaatcattagaaacagataacagataaggaatacaccatgtcagacattttgaaaaatgacgtggatccgatcgaaactcgcgactggttacaggcgatcgaatcggtcatccgtgaagagggtgttgatcgtgcccagttcttgattgatcaggtactgaacgaagcacgtaaaggtggcgtgaatgttgcggccggtgctgctaaccgcgattatatcaacaccattgctgttgaggatgagcctgcttaccctggcaatctggatttggagcgtcgtattcgctctactattcgttggaatgctgtgatgactgtgctacgggcatctaaaaaagatctggaattaggtggtcacatggcttcattccagtcttcagcaaccatgtatgaagtttgtttcaaccatttcttccgtgcccgtaatgaaaatgacggcggtgatttggtttatttccaaggtcatatctctccaggtgtctacgctcgtgctttccttgaaggccgtttaactgaggagcagatgaataatttccgtcaggaaattcatggcaatggtctctcttcttatccgcatccaaaattgatgcctgaattctggcagttcccaactgtttcaatgggattggggccaatcggtgcgatttatcaggctaagttcctgaaatatctggaacaccgtggtctgaaagatacctccaagcagaccgtttatgccttcttgggtgatggtgaaatggatgagccagaatccaaaggtgcgatcactatcgcaacccgcgagaaactggataatttggtatttgttatcaactgtaacctgcaacgtttggatggtccagttacgggtaatggcaaaatcgttaatgagctggaaggcatttttgatggcgcaggttggcaggttattaaagtgctttggggcgatcgttgggatgaactgttgcgtaaagataccagcggtaaattgatccaagtgatgaacgaaacgctagacggtgattaccagacattcaaatccaaagatggcgcttatgtgcgtcagcatttctttggtcgttacccagagaccgctgaattagttaaagatatgaccgatgaccagatttgggcgttgaaccgtggtggtcatgatcctaagaaagtctttgctgctttgaaaaaagcgcaagaaactaccggcaaaccaacggttatcctggctcagaccatcaaaggttacggtatgggtgatacggcggaaggtaaaaacatcgctcatcaggttaagaagatgaatatggaaggcgttcgccatttccgtgatcgttttaatgtacctgtggctgatgatcaactcgaaaagctgccttatgtgacgtttgataaagactctgaagagtacaaatatttgcatgagcatcgtgcagcgctagggggttatctgccaagccgtcgtactcattttgaagagaagctggaactgccaactctggaagattttggtgcgttgctggaagaacagaacaaagagatttctaccactatcgcttttgttcgtgccttgaacgtgatgttgaagaacaaatcaatcaaagatcgtctggtgccaatcattgctgatgaagcgcgtacatttggtatggaaggtctgttccgtcagatcggcatctacagctctaacggccagcagtatactccgcaggaccgtgaacaggttgcttactataaagaagactctaaaggccagattctgcaagaaggcatcaatgaattgggtgccggttcatcatggctggcggcagcaacgtcttacagcaccaataacctgccaatgattccgttctacatctactactctatgttcgggttccaacgtattggcgacctgtgctgggcagcaggtgaccaacaggctcgtggcttcctgattggggggacttccggccgtacaaccttgaatggtgaaggtctgcaacacgaagatggacacagccacattcagtctctgactatccctaactgcatctcttatgatccggcatttgcttatgaagttgctgtgattatgcatgatggtttagagcgtatgtatggtgagaaacaagagaacatttactactacatcaccacgctgaacgaaaactaccacatgccggcgatgccacaaggtgcagaagaaggtatccgtaaaggtatctataagctggaaagcttggaaggcagcaaaggtaaagttcagctattaggttctggttctattctgcgtcatgttcgtgaagcggcacagattctggctaacgattatggtgtgggttctgatgtgtacagcgtgacctcattcactgaactggctcgtgatggtcaggattgtgaacggtggaacatgttgcacccaacagaaacgccacgtgtaccttatgttgctcagatcatgaatgaagcaccagcagtggcttctactgattatatgaagttgttcgcagaacaaattcgtaacttcatccctgcaagtgaattccgcgtattgggtactgacggtttcggtcgttccgatagccgtgaaaacctgcgtcatcattttgaagttgatgcttcttacgtggtagttgctgctttgggtgaattggctaagcgcggcgaaatcgctgtgagtgttgtggaagaagcaatcaacaaatacaacattaacccagaaaaagttaacccgcgtctggcataagaggtaaagaatcaatggctatcaaaattaaggtaccggatatcggtgcggacgaagttgaagtcaccgaaatcatggtgaaagttggcgatacagtggaagctgagcaatcgctgatcaccgtggaaggtgataaggcttcgatggaagttccatccccacaggcgggtgttgttaaagagatcatcattgcggttggcgataaagttgaaaccgacaaactgattatgatttttgattccgcggaaggtgctgtagaagctgcgccagcggaagcgccagcagcggtaacattgtcttcgcgtatggcagagccagaacccgtagcttctgcggctatgaaggttcatgtaccggatatcggcggtgatgaggtcgaagttaccgaagtgatggtgaaagttggcgatgcagtggaagctgaacaatcgttgatcaccgtagagggcgataaagcctctatggaagtccccgcgccattcgccggtatcgttaaagaaattcaaatcaaagccggtgataaagtggaaaccggttctatgatcatggtattcgaagtcgcgggtgcagcacctgttgctccggttgcctctgcgccagctccaactgctgaaccagagaaagcagcagtaccggttattgctagcagaagcttcgcagaagaagacaaaaatgatttcgctgaaaatagcgcttatgttcatgcaacgccggtgatccgtcgcctggcgcgtgaattcggcgttaacctggctaaagtgaaaggtacagggcgtaaaggccgtgttctgcgtgaagatgttcaggcttacgtgaaagacgcggttaaacgtgcagaatcggctcctgcatcagccggtggtggtctgccgggtatgttgccttggccgaaagtggatttcagcaaatttggtgaaattgaagaagttgagctgggtcgtattcagaaaatctctggtgctaacctgagccgtaactgggtggtgatcccacatgttacacagttcgacgaaacggatatcactgaagttgaaaacttccgtaaacagcagaatcaggaagctgagaagaaacagcttggcgtgaagattactccgctagtattcatcataaaagcggtagcaaaagcgctggaagagatgccgcgctttaacagctctatctcggaagatggtcagaaactgacgctgaaaaaatacatcaacattggtgtggcagttgatacacctaatggtctggtggttccagtgttccgtgatgttaataagaagggcatcattgaattgtcccgcgagctgactgagatgtctaagaaagcgcgtgcaggcaaactgaccgcatctgatatgcaggggggatgcttcactatttcaagtctggggggtatcggtggcacagcattcacgccaatcgttaatgcaccagaagtggctatcctgggcgtatcccgctcatcaatgaagccagtatggaatggtaaagagtttgttccacgcctgatgctacctctgtcactctctttcgatcaccgtgtgatcgatggtgctgatggtgcgcgtttcatcacatttattaatcatgcgatgagcgatatccgccgtctggtgatgtaatctcaaaggccggccatgtgccggcctgattgttattgcggtgacagagagacagcttacatctggtgagtttgttgcgagttctgtcacgttaacgcacttttcaggttattaacaattctgtaaactgctcgcggtgtgtaggtcccggtggaatatatcgtttttggcgcctgacccgccggacaaacaattaagaggtcatgatgagtactgaaattaaagcccaagtagtggtacttggggcaggtccagcagggtattctgctgcttttcgttgcgcggatttaggtttagaaaccgttctggtggaacgttactctaccttaggtggtgtttgtcttaacgttggttgtatcccttccaaggcattgctgcatgtagcaaaagtgattgaggaagctaaggcgctggcagatcatggcatcgtttttggtgaacccaaaactgacatcgaaaaagtccgtgtttggaaagaaaaagttattaatcagctaaccggtggtttggctggtatggctaaaggccgcaaagttaaagtggttaatggttttggtaaatttacaggggcgaacacgctggttgttgaaggtgaaggtggcgcaacaacgattaattttgataacgccattattgccgcgggctcccgtcctatccaactgccatttattcctcatgatgacccgcgcgtttgggattctaccgatgctttggcgctgactacggttcctggccgcttgttggtcatgggcggtggtattatcggtctggaaatgggaaccgtttaccacgctctgggctctcagattgatgttgttgaaatgttggatcaggttattcctgcggctgataaagacgtggtgaaagtctttaccaaacgtatcagcaaacaattcaatctgatgctggaaaccaaagttaccgtggtagaagccaaagaagatggtatctacgtcacgatggaaggcaaaaacgcaccagcagaaccacagcgttatgacgcggttctggttgctatcggtcgtgtacctaacggtaaaatgctggatgcaggtaaagccggtgttgacgttgatgaccgcggctttatccatgttgataagcaaatgcgcaccaatgtaccgcacatctttgctattggtgacatcgttggtcagccgatgttggcgcataaaggtgttcatgaaggtcacgttgcggcggaagttatttcgggtaagaaacactactttgatccaaaagtgattccatccattgcttacactgaaccagaagttgcatgggttggcctgactgagaaagaagcgaaagagaaaggcattagctatgaaacggctactttcccgtgggcagcttctggccgcgcaattgcttctgattgtgctgacggtatgaccaaattgattttcgataaagaaagtaatcgtattatcggtggtgcgattgtgggtactaacggtggtgaattgttgggtgaaatcggtctggcaattgaaatgggttgtgatgcggaagatatcgcattgactatccatgctcacccaacgttgcatgagtcggtaggtctggctgctgaagtctttgaaggcagtattactgatttgccaaatgcgaaagcgaagaaaaagaaataatttcttaaatcgatcaatctattaatgtaatttaccgaagcggctttcatttattgaaagccgtttttttatctggtatgacctgtttgaggagactcaatataaaaagtatggtttttgtgggtgctactggcaaaaatcagcggaataatctgttttaatagctttgtctgctgttaattcagaatattactatcagttaatgttacttttctgtgaacgaattaacatcgtattcaaattttggtatgctgagcgcccgaagctgggcataacttgttttgcacttgttaagttatgccggcaatcctctgacctggcacccggaaccataactaacaacctgtttcaggaggggctatttgttgcgaaaacacatattgttacgcaaagataatagcttggtgaggcaggttctaaggcgggtgcagagccgggtagataaaatgacaatgagagcgaggagaaagtcgtgctagaagaataccgcaagcacgtagccgagcgtgcagcccaaggtgtcgtccctaaaccattggacgcgacacaagcggcggcgctggttgagttactgaagagtccaccaaaaggtgaagaagatttcctgttagatttgctgattaaccgtattccccctggcgttgatgaagcggcttatgtaaaagccggttttcttgccgccattgtgaaagatgaaaccatttcaccgctaattacgccagaaaaggcggttgagctgcttggaacgatgcaaggtggttataatattcatcctttgattgatgctttggataatgaaaaactggctccaattgcagctaaagcgctctctcatactttgttgatgtttgataacttctatgatgtagaagaaaaagcaaaagcaggtaatccacaagccaaacaaattatgcaatcttgggctgatgcgcagtggtatctggaacgccctgaattggcagaaaaaattacagtcacggtatttaaagtgacgggtgaaacaaacactgacgacttatctcctgcgcaggatgcatggtcacgccctgatattccgctgcatgctctggcaatgttgaaaaatgctcgcgaagggattgtcccggatcaagctggtgttattggtccaatcaaacagattgaagagctgaataagaaaggctatccgctggcttatgtcggtgatgtggttggtacaggttcttcccgcaaatcggccactaactcagtattatggtttatgggcgacgatattccctttgtgccaaataaacgtggtggcggtgtcgttctgggcggtaaaattgcgccaatcttcttcaatacgatggaagatgccggtgcgctgccaattgagctggatgtgaacaaattaaatatgggggaggtaattgatatctacccatataaaggggaagtacgtcaccacgaaaccaatgagttactggctgaatttgaactgaaaacagatgtattgttggatgaagtgcgtgcgggtggccgtattccactgattatcggccgtggtttgaccagtaaggcgcgtgagtctcttggtttaccccccagtgatgtcttccgtcaggcgaaagcggttgaagaaagtcgtcgcggtttctccttggctcagaaaatggttggtcgggcatgtggcactgtgggtattcgccctggtgaatactgtgaacctaaaatgacctctgttggttctcaggatacaactggcccaatgacccgtgacgaactgaaagatctggcgtgtttgggtttctctgcggatctggtaatgcagtcattctgccatacggcggcttatcctaagccagttgacgtcactactcaccataccttgcctgatttcatcatgaatcgtggcggtgtttctctgcgtccgggtgatggcattattcactcatggctgaaccgtatgctgttgcctgataccgttggtaccggtggtgattctcatacgcgtttcccgattggtatttccttcccggcgggttctggtctggtagcgtttgctgctgcgacgggggtgatgcctttggatatgccagaatcggtgctggttcgttttaaagggcagatgcagcccggtattactctgcgtgatttggttcatgcgattccttactatgcgattcagcaaggtcttctgacggttgaaaagaaaggtaagaaaaacatcttctctggccgtattctcgaaatcgaaggtttgccagatctgaaagttgagcaggcatttgagctggcggatgcttctgcggagcgctctgcggcgggctgtaccattaaattggataaagcaccgattattgaatacctgcaatccaatattgtgctgctgaaatggatgattgccgaaggttatggtgatcgccgtactttagagcgtcgtgtaacgggcatggagaattggctgaaagatcctcaattgttggaagctgatgctgatgcagaatatgccgcagttatcgaaatcgatctggctgaaatcaaacaacctattctgtgtgcaccgaacgatcccgatgatgcccgtttactgtctgatgtggctaacagtaaaatcgatgaggtttttatcggttcttgtatgactaacattggtcatttccgtgcagccggtaaattattggatcaacataaaggtcaattaccaactcgcttgtgggttgctccgccaacgaaaatggatgcagctcaactcacagaggaaggttattacagcatctttggtaagagtggggcacgggttgaaattcctggctgttccttgtgtatgggtaaccaagcccgcgttgctgacggtgtaactgtggtctccacttcgactcgtaacttcccgaatcgtctggggacgggggcgaatgtttacctggcatcggctgaactggcggctgtggcttctttgttgggacgtttacctacaccggaagagtaccagcaatttatggataaagttgatgagactgcggaagatacttaccgttatctcaattttgatcaactgaaccaatacactgaaaaagcggatgatgtgattttccaaaccacggtgtaattgcgataccaatgaatgggaggtaaaaacctcccattttagataatgataaaacgagtgttagttaagaaaattcgttttttgcctgttagtgtggctttaaatactggaaaaaagacaagcatatcatgaaaaaaaataaaaactttaatcattaaaggtaaaaaaacagtgattaaggattttttaaaggaggtaaaaagtttcattctataactgatattaaaagagaaaacattaggaagaacggattttaaattgattgaagtgataaaataacaatattaaccgcattaaaaaattaacaatgaaaaaagaaaaagcgtttagtagtattaaaaaccattaaataaattggattttattttaatgctattaataaacctgttactctttatggttttaagcctaaaaaaataaaaacagaaaaaacctaattatcggcataataaaatcccaaaatacatggttttacagcatacagatcgggttaatttcagtgctattatgttgcatttattatgcaaaatcatgataaattaaatactccttaaatactccttaaatactccttaaatactccttaaatactccggtttaaactggttttatattgttttaacccatccggttgttatatctttttaataattttcaatgatatataccgttatcctccaagttgcctctttgttggctgcactcgctcaccccggtcacatagttacctatgctcgtcgcgatgcatcttgaaatccataaggtataattattgattaaatatttaaattccccatgaaaagatgcgtaattttatttctaccaataatcggcgtacctaattattcttagacgtgccgacaatattcattatgttgaacattgattagcagatggttatttaccataaatgaaaattacacttcataatcaaagacgatgatatcagcgaccgaatctataaggagatcttttaatttatcatgcgctgggtgaggcaaatagtttgcaatagctttatgatcatcaaatgtcatggtgatagcatgtgtaaaaccttttttttgttttcactacttacatgacttccccactcgatagaagaaatgcctttgatctgatgctgcatggaaatagcggtatctcttatcgtcgttaattgttgttgttttatctcggatgtgaattttaacaaaagaatatggcgtatcataatggctcctgaaaggtgtttttgtttttgctgacaagatagaaaataaatttttctattacaagatccttgaatatatctcatcaattagtggatgtgtattcgattttgctgtttttgtttctctgagatattattaattatagtgtatttgcctatatttgcactgaggctggactctcctccgatgaaagccatcgcggacacaaacctcaagaataacttgggggtgtatatttcggttatcccggtgaaaaccatgccgttgtgtcagcatagaggctttaatctcccacttcttggcagtttgtgggctgattttgaggcggaattgccaggaaatattaaaatggaaagaacgcaccagaggtaatgatggaatacgaatttttgctggatgtcactggactggtgactagccggttctcgatggatcacgaagctattggtcagtggctgaatgaagaagttaaaggtgatttggcggtgatagataagattgcctcagcgttggccgaaattaaaggtagtgaacgtcaatggcaacttgtaggtcatgaatatacgctgttaatggatgacgaagaagttatggttcgtgccaatcagcttgagtttgaaactgattcgatggaggagggcatgagttattacgataaggagagcctggctttttgcggtaccaaggattttattgatatgttggccgattatcgggattttattttgcaaaagtacgattggtgagaggctgtatatagacaaaaataattctctggcacgataggtttttttcttactgttatatggttgctatgaaggatagtcatcgagtaattttactcaatggtaggttaaatagttaaagaatcaaggtggttttaaatggaagatatcaatctgtctggtggcattaatgaagctacaagttggcttattaatcatcaggatttaatcattcaatatctggtcaatgctgttgctgctattctcattcttgttctgggattgatggcggcgaaactcattagtaagggtgtaaaaagagttatgtcattgcgtggcattgatgtaacggtatcagatttcctggctgctgttgttcgttatttgattattgcgttcactattattgcagttttgggcaaattaggtgttcagacggcttctgtcattgcggttattggtgcggctggtttagctgttggtttagctttacaaggttctttgtccaattttgccgcaggggtattgttagtggcttttcgtccaattcgtgcgggtgaatatgttattctgggcgcggttgaaggcactgttgttcaagtgcagattttctctactacattgcgtacagcagatgacagaattgtcgtgatcccgaatgggaaaattattgcagataatgttattaataccagccgtgaaccgaatcgtcgaacccagattatggtcggtgtggcgtataatgcggatattgacgaagttaaaaaagtattaggcaatgttattgccgcagacaatcgtattcagcatgaaaaaggcgtgacgattcgtttgcatgaaatggctccctcttcactgaattttattgtgcgtgtatggaccaccaatggtgatgcttgggaggtttattgggatttgatggaggactttaaacgcacattggataaacacaatatcagtattccttatccgcaaatggatgtttatttgcatcagaaccaagctgtgtcgcagaatagggtgagcgattaaagtttgattatcatcacgatcctcttcgcatatattaaggtatcgatgttggcgttattattggcagaattcagtccggttggtgatttattgattttgtgatcgttcagaccggattgagttactgcgaaataatcccttatttttaacaaccatctggttgttttataccctatggatttcaagatggatcgcgacggcaagggagcgaatccccgggagcataggtaactatgtgaccggggtgagtgagcgcagccaacaaagaggcaacttgaaagataacgggtatatctcggtatgatgatattgttgagttaaatagagagactaataacctatcccattaggctgttttatttgccattgtttgcaataattacgcctattagggatagactctgatattgatagttcaataccagtcgtttaaaaaggttctatttcttttgtcatccataatactgtattagaaccatctatttgcaaatcaatgggtttatacccaattttcatataaaatcgcaaaatatattcattgtttttatagagttgtatcgccaagccaacattttttacgttaagtcgttgataacaaatttcttctactttgcgagagagaggaagtactatgccatttctcctccactttggattaacccaaaggtcatggagttcaataattccctgatcattaaatgatgtgcgttcagatattaagagaatatgtgccataccgacaaactctgtattatgactacatagtataactattctctttgattctttaatctcattctggcataacttaaggtattcaataggtcttaattctcctgagttcaccattatatcatgtatatcaacgacttcttcattgctcaattttgattctacaaaagtgaatttattcatttcagttttattaaagttagtgtttttattgttattttccatcataaaactccagaaattgtattaagtagcttgtcagttccgcaacatgctaatatatctgagtacattttattatgtttcctgttacttattctcgtttgtgggcatccaccgtgacataaatgaaaccactggcaatttttcatgttgttattattagtgatttcttctttttctgatttttcataatgtatagaattctctaataatgtttttaagtcattatctagcaatgaaccatagtaaaaattttcgcttccgacgtatttatcacatgcagatacggttgcatttggctcaattgtaacaacttcttgatggcatttttctgaccaataacatgacatcagaacattactagcacctttcaaaacaccaacaaatgagttaaataaaggaatgttaattgtgtctttatattccttccaccaaattagaaatagttccgagagaaagtccatgtattcgaagtaattgacataactgtcacctggagactctcctggaagcaacctgttatctggaacgatatctagaaaaacaagatcattgaggtttattcttgcaaaatagcttaatagttctcttttatttgcttcaagaataagccgatcaacgacaactagccctccatatttaatattgttatttctaaatgtttgtattgttttttctattcttttcgaagtgccaacgccttttagatcaactcttctgctatcattaatttcggggtgaccatcaagacttattccaacactaatattcaatctttttatcaatgctatccatttttcactgatattcacagcatttgtttgtatcgcattggtaacgaattggttatctctcttaatatgttgttgtaaccaaatgaattttatgaaaaattcaggtcttaatcttgtaacttcaccgccatgccatacaaattcaattctaattaaatcaggaatatcgaggatccttttcgtcatagcaactaaactgctaaaactcatggtattatttttcccttcagcccatgaatggcagtaggaacatcttagattgcataatctggtcgctttggtaacaacaacaagtttgttagatcccaacggttttgcttttatttttttctgcatttcattttcataaatttctatttcctcatcagaaaggatatcttggattggaattttctttatatcttcatatgcgtatagttcctgagggattttaggtctttttttagtgtaattagtactcatatcgctatttacatctatatttcttacttctattttttcgttcatcttaacctctcttttaagtgttatttttgtagatggtttttattcaaactgtgtaaagttattaatacgcatatacagtacatcagtattgagaatgtaaaatgataaataaaatagcgttaatgggattaattttaggtataggtactgactaccaatgccgttgtttaagttaaattgttagtgtttagaatctaaaggtccattgagaaagctcaggataattttcgtattctgatttatctctgttatcattaatctctctattatctttatttttactattctcccccggaggggataatttagcatcatgattttttgtagatacgttcatatgcaaccccattttctattggcttgatagtcagtaattaaagagtagttaatgttgtgaataaattccaataatccatggtttttttatggtttttttatcattgtctcattttataaagtaaacggttaagtgtttgcaatctatcgtaacaggttatttttttatgtggttatcattaagaggtttatggcaagattcgatattggtaatatttgattgctgtattaatatgatattaaattgttttagattggtttagtatcttttcagcattgcttcggaaaaaatagttatttatgatagtgagtgcgctagtaataatgattgctaatataattcaatcgataatttatttttcttaatttttacagaattaagggtttattaatgttttgaatgggtattagcttgatttttttgaattaattaaatgattttcctgtaagaatctgatttttggttggttattaaaatttcttatgatcgattagaaacatttatttcctctaatgagctattcttcttaatattctgaacattgaaatagcaaagtgaataattattgaggagtttttttatgttatcgacatttgtgcagggtttttttcttagcgcagcaatgatcttgcctcttggcccacaaaatgcctttgtcatgcagcaaggtagcaggagacaatttcatttgatgagcgcaactttgtgcgcgatcagtgatggttttctgattggtgtcggtgtatttggtggtagtgcattacttagtcagtcaactttactcttgcaatttgtcacctggggaggtgttgcttttttattctggtatggatggggggccttacgtgtggttttgtttgccaatgttgaattggcgcaggtaaataattcagtaaaaaaccgttggcgggtagttgcgatcatctttgcggtcacttggttaaatccgcatgtttatttagataccattgttgttctgggtagtattggtggtcagttatcttcagacctcaggccttggtttacttttggggcggcaagtgcttctgttagttggtttttttctctgtcattgctggctgcatggttttcccctgtgctaagtaagccgctttctcaacggattattaatgggtttatttgtatcataatgtggtatatcgcatggcaacttgctaagcagggattgctaatttctgattaagctgaacacttctttgcatacactctctgtgttagtgttttattcatcccatgtatatttcggtttttccgtgggatgaacattttctgtaacaggttttcttcggaggttgtgtgaaattaaaatcattggggttggccgccatgttaagtgccggggtgccacttgctgcacaggctgctgatttacccggagtccctcatgttattacttctggtaatgcggtagtgaaagcagaaccggatatagcaacattgctgattaacgtcaatattgcggctaaagatgcttctggggctaaaaagcaggttgatgaactggttgctaagtattttgattttctgaaaaatcacggtattgaaaagaaagatattgatgccgcgaatttgcgtactcagcctgattatgagtacgataatgtatcgggcaaatcggtgctgaaaggctatcgtgcgatccgttcagtggaggtgaaggttcgtaagttagatcaacttaatgatctgctagatggtgcattaaaagcgggtttgaatgaaatcgtatctgttcagtttggtgtggacaatccgcaaaaatatcgtgatgaagcccgccagaaagcgattgagaatgcaattgaacaagctggtgccttggcgaaaggctttaatagcaaagttggctcgatatacagtatcaattaccgagcaccagaggtgattgatcacatgaagtatcgcaatactgatgtgatgatgtcgggaggtgctgctgctggagtgggtgaaacttaccagcaggatagcatcaacttcagcgatcaggttgatgtggtttttgagctcaaaccttaattaatatcatcttgtcttaacatctgacgcccaagtttcaacagggcgtcagtcacttttttcatagtcctgctttccggtgcaaaacgatgccagtagagcatccggcgctgacataaacccggtgtcaggtcgatcagttcaccatttttcaattcttgatcaatctgcaaatgtgggatcatacaacaagtggaaccctgttttgccagttgtacaaaggcttcagatgagttgacgatatgacatggaacgctacccggtgataattcgaagttctgttgtaaaaatgcctgatgcatatcatccagatggtcgaatgcaactgctggggcttttagtaacgccgaacgggtaaccccatttgggaaatggcgggtcgcaaattctggtgaggcgacaaacagataatccagtgcgcctagtttatcaatcagacaactgggtaaaggctgtggttgaatactgactgcgccaacgacttcacctcttcttagctgttcttgagtccgagtttcatcttcaacttgaatattgagtcggataggtaaatcagcgagtaccggatgtagagctggtaacagccaggttgctaagctgtcagcgttgacggctaatgaaagcagcaatggagtatcggtcccctgttcattgcctagccattgttcttccaacaactctacctgatgcaatagtgccagtagtttttgtccttgttcggtagggcgtggaggaacggtgcgtaccaatagaggctgaccgaacagattttccaactgtttgatacgttgagaaactgcggattgagtgatacagagtttctgggcagcgcgctcgaagccgcgttctcggatcactgcatccagggcttgtagtgttcggtagtcagggcgtttcattatagaaagattctccatttatttttctgaatatcactatgccatatttttctgatgtatgaggcaatttatctggtgggccgtaaaatcctacttttcagaaatcaagcatgttatacccaatttggataaatttttgttggttggtcgcctttgggaagggggttccatttttgaaggttgagtttgttgacgtggttgaataggcgatatgctcaggagaaagcactgggtgaagctgtttttgatagcttaatgatgaatttttgatcgagctaaaggtggtttgcatgtttcgcttaagtgtagtctttcaataaagttgttaaaaaatcgttatttttggctatttaataacaatataagtaaggttgctttttatgctgtcactgaaacatgttgcacaattaacgtataatactttgcagttatatatggatcagagaggaatagatttggcggttggtcctatctctgacagcgatgcaaacatgctaacaaaagcgtatggtgagcttaactgggaatattatattacagaagtcggtaatcgacatgactgcttcagcttatgcataaaatttgtcgtatcaagggaaaatctccaaattgaatctgctccggctggagtcgctttatcgacatatgatttgaacgataaaagttttaacatccatgtattggaaaattttgtgaaggatatggaaaatcatccgttgcatagaaagatgcttttgtatactctgtatgcaactttgattttcatgaatgtggctgatggtgaagacgtcaggattcatgaacccgttaaggataaaatagcttactatcgctcgtttggttttgagctagagcgttgtgggtatgtcatgtcatgtgatattaagacattaacggcaaagttgaagagtaggtctaaggcgttagttctttgacatctctgcatttatatgcgtgttatataccttatggatttcaagatggatcgcgacggcaagggagtgaatccccgggagcataggtaacgatgaccggggtgagcgagtgcagccaacaaagaggcaacttgaaagataacgggtatagtatcttggtagaccaggtgggataattattttgttcatttagatttgttgaaggtgaaatcttactaaatttgttgcatggccataacagagagattttgtcgggaattttttgtcctgtatgactaaatcagttcagtaatgtgaagttgttttagaggtgttgctatgagaacacaaaaagaaccgatgttcgatactattcaaacttataaaaaagctggagagaccttagattttcttatgaaagtaggtccggttttagaagatcatgcacaggcaccaagtcaagaaaagcaaggtcgtcgtcgtaacaaagaggctgcatagacatcactctttttgtagcccgctagtatggcgggtttttcacattatttagtcttaattttccatgattcatctcactcaacttatacctaatggatttcaagacgcatcgcgacggcaagggagcgaatccccgggagcatagaaaactatgtgaccggggtgagtgagtgcagccaacaaagaggcaacttgaaagataacgggtataattgcggtttctttgttgctatcaaggtttatactagtcgacaggctttccttgtaactgataataggcaatgaattgatatgactcaggacgaactaaaaaaagcagtaggttgggcagcactcgaatttgttacaccaggaacagttgtgggtgtggggacaggctcaacggcttcacactttattgatgccctcggttccattaaagatcagattgaaggggcagtatccagctctgaggcttctactgagaagttaaaaagtttggggattcctgtattcgattgtaatgaagtcgattcccttgatatctacgttgatggcgcggatgaaatcaatggcaatatgcagatgattaaaggcggtggtgctgcattgacgcgtgaaaaaatcattgctgcaatagcaaaaaaattcgtttgtattgttgatgcttctaaaaaagttgaggtattgggtaaattccctctgccggttgaggtgattccaatggctcgggcttatgttgctcgtgagttggttaaattggggggagtaccaaaatatcgtcagaatgttgtgactgataacggcaatgtgattcttgatgtgcataatctagccatactcgatcctgctgagttagagaataaaattaatcgtatctcaggtgtggtgactgtgggcctatttgctaaccgtggtgcggatattgtattgatgggaacacttgatggagtggaaaccatcactcaataatattatttacaggggcggaatttttcgcccttaaaaattttttcacttttagaataggtggagaatttagtgatatatttcatatctctgattgttatttgatctaaatcctaattttgttctttttcagatcattttattcctcataataactactttattaagacttatgtgatgggaatagcaatcgtttatattgctgtgttcgttttttttgttatgttgagagaatgaatcttaaatgtaacgaagcgtaacaataggcaggataaatggttaaggtatctctggaaaaagataagattaaatttttgctattagaaggtgtacatcagagcacggtagaaaatctacgagcagccggttatagcaatatcgaatatcataagggagcattagatcccaaagagttaaaagaggcaattcgtgatacccattttgttggtatccgttcccgcacacaactgaccgaagacatttttcaggcggccgaaaaattggttgctgtaggctgtttttgcattggtaccaatcaggttgatctgaaagcggctgcaaaacgtggtatccctgtctttaatgcgccattttctaatacccgttctgttgctgaaatggtccttggtgagctgttgttattgctgcgtcgtatccctttggcgaatgcgaaagctcatcgtggcgtgtgggataagcaggctaaaggctgctatgaagttcgtggtaaaaaactgggcattatcggttacggtcatattggcactcagcttggtattctggctgaaaatattggtatggatgtctacttttacgatattgaaaacaaattgccgttaggtaacgctcatcaggtacgtcacttgtcagaattactgaatatgagtgatgtggttagtttgcatgtaccagaaacgccatcaactaaaaatatgattggtgcaactgaactgaccctgatgaaaccgggttctatcctgattaatgcttcacgcggaacggtggtggatatcccggcattatgtgatgcattggaaagtgaacatctgtcaggggcggctgtggatgtgttccctgttgaaccggcaaccaataatgatccatttgagtcaccgttacgtaaatttgataacgtgttgctgaccccacatattggtggttctacccaagaagcgcaggaaaacattggttatgaagtcgcaggaaagttagcgaaatactctgataatggttctaccttatcagcagtaaacttcccagaagtgtctcttcctgttcatgctgatgataccaaccggtttctacatattcatgaaaatcgcccgggtatattgaacagtattaaccaggtgtttgctgaacaggatatcaatattgccgctcagtatctgcgtaccagtggggacatgggttatgtggtgattgatattgtgactgaaaatccggctcaagctgaaatggtatttcagaaactgaaagcattgccgggtactatccgttctcgtctgctttactgagtattttgatatgtcaaaaatgggtgctttgtgtaaggcacccattttttactgccattgccagattttttcaggtgtgatgatttcgggtaatgggatatcccattcggctatgggcagtgtatcgactaactgacagttatgcgccagacctatcgggtagaaatttttttgttgccattgcctcaatgtacgatcgtaaaagccaccacccatgccaagccgttgtcctgtgcggtcaaaagcaaccagcgggatcatcatgatatccagctctgattacggtaaaacctgctcaacattcagcggtgggctctctatattgaagcgatttctgacaagccgactattgggttgatagtttaaaaataacagatggtgatgacggaaagggtgcaataccggcagatagatctgtttattttgttgccagagttggttaatcagtggacgggtatcgagttcaccatcaaacgaaaggaatagcgcgattttgttggcttggtgaattttggggtggttgattgctcgctcagcagcctgtcttgcaaaaagagattgttgttcagaagtgagttcacggcgttgttggcgtattttctttctaatgctttgtctgagtgataataggtgctctgattgcatagaacttgccagtggatagcagcagcgattaaggttgagattctccaagatgccgttacaggtagtaacccttgaaccctcggttcaaggtgaacgcagcgtcgcagctttaaggcttctcggctggaccgagcatgcacaccagactacggagcaccacattctataatgtatgaaatatcggctcaggggactttccccgttaacgaacatctcagagaaatttattcagcgcttgtaagcaactttatgacacctattgtatgaaactaaacacagaaagcaactaattctcgaatgattcactcactaatgcatgatttatcaatagaattcattcatttgatgaaatagtactctcagtgatgcgaccttgttccactaatgcttgttctatagtctgttgaagcatctttattttctgttccatattataggcatagtcacgggttttcactttttcttgtgccaattcgtgacagatattcagtgctacaataaaaatcagttgttcagtattggttactctggtgcgctcttttaaatcgtctaaacgttgctcaagttccacagccgcagccagcaatgcttctttttgctctgatggacaattgacacgtagtgaccgcccaaaaatgtggatatctactggttgtgcagacatgaccccttcctgacttattgctgcgtcccggttttaattctgaattatagaagaattgaaaccggcgccaatcattataacgccataccgacagacaactcacgattacctaaggttgttgtctggtatagcgactccccttggtggtagcatagcatgaacttacaccgtcaacgatgaccaatacacatgtctatacagaattcattaccagattatcaatcttttgacgaaacattgcatcaacagtcagtggcactgacggcagcggagatgcatgggttgattagcggcctgctgtgcggcggtaatcgcgacagtagttggcaggtcttagttcatgacttagcgaatgatgggttagctttttctcatccattagcccaaaaattgcgtgaattacgtgaaatcacattcgaatcattggatgacagtaattttgcattcggtttattgctgccagatgaggaagataatgtatttgaacgagcagatgcattagctggatgggttaaccattttttgctgggattaggggttgctcaaccgaagttcgcggatagaaaagagattagtgagattattggtgatttgcgcaatatcggtctgcttggttatgaagaaggtgatgatcaagaagagttgtcccaagcactggaagaggtccttgaatatgtgcaagtggccgcacagctttgctatatcgcctttactgaacctaaaaccgttttaatcgccaaaaatgataaaccaacattgcattaattggtgtttattgaacgcaaaataattataagtcgcaggagagggtatgatcaaacaagaatatttatcccgccgtcaggctttactggcaaaaatggctccggccagcgcagcgattattttttcttctccgcctgcgccacgaaattcagataatgaatatccctatcgtcagcatagcgatttcctttatttgactgggtttaatgaaccggaagcggtgctgatattaattaagagtgatgatacgcataatcatagtgtgctttttaatcgagcgagtgacttgactgcggaaatttggtttggtcgtcgtcttgggcaagaagcggcaccggaaaaactgggtattgatcgcgctttgccttttgatgatatcaaagaagagctttacctgttgctgaatggtttgaatgtggtttatcacgcgcaaggtgaatttgcctacgcagatgaaattgtctttcatgcgttggatatattaagaaaaggcggtcgccgtaatctttcagcgcctttatcgataactgattggcgcccttgggtacatgaaatgcggttgttcaaatctaaggcagaaattgaggctatgcgccgggcaggtaaaatcagtgctcaggcccataggcgcgcgatgaaagtttgccgcccaggaatgtttgagtatcaactggaagctgaaattcatcacgaatttacacatcaaggggctcgctatcctgcttacaacacgattgttgggagcggtgaaaatagctgtattctgcactacaccgagaatgaaagcaggatgaaagagggtgacttggtgttggttgacgcaggttgtgaatatctggggtatgccggagatatcacccgtactttccctgtcaatggcaagtttactcgtgctcagcgtgaaatttacgatatcgtactgaaaacgttaaatgtttcgttggaattgtataagccaggtaccagcatcaacaaggtcacagaacatgtggtgcggattatggtggaagagttggtgaaactgggcattatgcacggtgaagttgagcatttaatcgaaaccaaagcctatcgccaattctttatgcatggcctcggtcattggttaggattggatgtgcacgatgtcggtgactatggcgtagagcgcgaccgtattttgcaaccaggaatggtattgacggttgaaccggggctgtatattgcaccagatgccgatgtaccgatggaatatcggggtatcggtatccgtattgaagatgacattttgatcactgaaacaggtaatgaaaacctgacagccagtgtcactaaagaagctgatgagattgaagctctgatggcggaagcaaaacagggttaagttaagaatgaacgtgattatcgttggtggaggcatgaccggcgcgacgcttgcgctggcgatatcttccctgagtaaggggcagatccatgtgtccctgattgaagcagcagagccggagcagaaacatcccggctttgatgccagagcgatagcgctggcttacggtacttgtcagcgtttacaacagattggtgtttggtctgctctggaagattatgtgataccaataactcacgttcatgttagtgatcgtggtcatgcagggtttgtgaatctttatgcaaaagaatataacattccagcgctaggtaatgttattgaattgtatgatgcagggcagggtttgttcggattgctgaaaaatgcgcctggtgtaacgctatattgtccatccaaggttatggctgttgaaagaactttgtcatcggttgctgtcattttggacagtggcgaacgattgcaaggtgaattgctggtagcagcagatggcagtcattctgccattggtcacgcttgtaatattcagtggcagcggcatgcttatgagcaggttgccgtgattactaatgtactgacttcagagcatccgcgaggtagggcatttgaacgtttcaccgaatatggcccacttgctttgctgccaatgtctgaggggcggagctcgctggtatggtgccatcagttggcgcggagaaaggagatagcgggttggaataatgagcaatttcttaggcagttacagcaagcatttggctggagactggggaaaatattggaaaccggccagcgttatcgctatccattgacactatctactgcaaatcaacaaattagccaccgattggcgctggtgggaaatgctgcacaaacattacatccgattgcgggtcagggctttaatcttggtatgcgagatgttatgacactggctcagattgtttctgaggcttttgctgctggtcaggatattggtgcttaccaggtcctggctaactatcaacagcaacgggttttagatcgggaaaacaccattgatattaccgatggattgatacgggtatttgccaatcgttattttccattacaaatcgggcgtaactttggcctgatgatgatggaaaaatgccctcctatgcgggatatactggcccgtcagactctaggttgggtcgcccaaagataaccgcagataaagcagacaaaataagaggacgttatattatgcaatcatttgatgtggttatcgctggtggcggtatggttggtttagcgcttgcctgtggcttacaaggcagtggcttgcgagtggctgtggtggagagctatccgccgactcaatccgttgttgctggagaagagtacactttgcgggtttctgcgattaatgcagctagtgagcgcttattgcagcatcttggtgtgtggcaagatattttggatatgcgcaccagtccttatcaggaaattgaggtttgggagcgggatagctttggccgtattcggttcagtgcggctgaatatgggctggaatatcttggtcatatcattgaaaaccgagttatccgtgaaacattatggaaaaaagtagatagcttatctgacgtgaccattttggcacccgcggctttgaaacaggtagcttggggtgaaaatgaaacttttatgactttatccgatggtcgcatgttaactgctcgtttagttgttggtgctgatggtgctcattcatggttgcgtcaacatgctgatatccctctcacattctgggattatgaacatcatgcattggtagccactattcgcaccgaagagccgcacggctgggttgctcgtcaggtcttttatggtgagggtattttggcgtttttgccgcttgccgatccccatttatgttctatcgtctggtcactaccgggtgaagtcgcagaacagtacaaacagcttgatcataggcgtttcaaccagcaattggcggtagactttgatctgcgccttggtcaatgtgaactgatgagtgagcgtctgacgattccactgacgggtcgttatgcccgtaattttgcggctcatcgtctggccttgttgggagatgccgcccatactattcacccattggcaggccaaggtgtgaatttgggctttatggatgtcgctgagctgataggtgaattgcgtcgtttgcatggtcagggaaaagatattggtcagcacttttatttacgtcgttatgagcgccgacgtaaacatggtgctgctgtgatgctggccgggatgcaaggttttcgtcaattatttgatggcaataatccggcgaaaaaacttttgcgggatgtcgggttgtctctggcagataatttaccgggaattaaacctaaattacttcgtcaggcaatgggattgaatgacttgccgaattggctctgttcggctgaaaaaatctaatttagcctctgcttatcgataactttttctcataccttgctgaaatatgaataggtgattttattcatatttcagttagcttgtaacagaaaatgggtgttttctaaagttaattgttaattttgagtattatgactcattttaatagttgaaaattctgcatactcacaacacgttttttgatggtcactggattgaaccctatttttacttatggttcattttggttttcagtgataactttcattttaagatatcgtttgcgtcgcgttttttagccgctttttgttcatgattcacagtatctgtcggttaatacgcggtatgttttcatgtaggaaatgaaaagagggaaataatggcaaaacaaaccccattgtatgaccagcatctggcttgtggtgcacgtatggtagattttcatggctggatgatgcctttgcattatggttcacaaatggatgaacatcacattgtccgcactcatgctggtatgtttgatgtttcccacatgacgattgtggatctgcatggtactggttgccgtgatttcctgcgttatttgttggcaaatgacattgctaaactgacagaaaagggtaaagccttatacaccgggatgcttaatgcttctggtggtgtaattgatgacctgattgtttattaccttagcaatgatttttatcggttggtggtcaattctgcgactcgtgagaaagatctggcttggattaatgaacatgtcgccaattacccggttgatattcaggttcgtgatgatctggcattgattgcggttcaggggcctgacgctcaggcaaaagtagagtctctattgaatgatgaacaaaaacagactattgccggaatgaaacctttctttggtgttcaggcgggggatctgtttatcgcaacaacgggttataccggtgaggcgggttatgaagtggcattaccaaaagagcaagcagccgatttctggcaaaaattgctgagtgtcggcgttaagcctgcgggattaggtgcgcgtgatacgctgcgacttgaagccggtatgaacctctatggacaggaaatggatgaaaccatttctccccttgtggctaacatgggttggacaatcgcttggaaacccgaagatcgccagtttatcggccgtgaagcgctagaaaaacagcgtgaagagggcactgaacaagttggttggtttggtgatgagagaaaagggtgtgttacgcggtggtttagcggttagttttactgatgagatgggcaccttacattctggcgttattaccagtggtacgttctctccaacattaggattcagtattgcccttgcccgtgtgccgcaaggaattggtgaacaggcggttgtccaaatccgcaatcgtgaaatgccggttcaggtagtcaaacccagctttgtacgggcgggcaaacctctcgtatagtcatttttatcgaataataacttgatgagtaaatagtcatttatcccggtaagcataattggtgcaggagcacaaaatagcctaataggggtagattctaggattgaaggagatgatggtaatgagtaatgtacccgcagagttaaaatatgttgaatcacatgagtgggttcgtgcagaaggtaatgatgaatacacggtaggtattaccgagcatgcacaggagctgctcggtgatatggtttttgttgatttgccggaagtaggtgatcaaatcaatcttggtgatgattgtgcggttgttgaatcagtaaaagcggcttctgatatctatgcaccactgagtggtaaaattattgccgttaatgacgcgctaaatgacgcgcctgaactggttaacagtgagccttatcatgaaggctggctgttccgtattaaagcctctgataaaagtgaactttcgagtttgctgaatgccgaaggatatcaggcacttctggacgaagaagaataatatacttaccgtcgccctgtttcacattgtgagcagggcgtttttatttgtatgccatttctggccagcttcaggaattagtcacaaatgacccagacattaagccaactcgaaaatcagggcgagtttatccgccgtcatattggctcttccgccgaacagcaaaaagagatgttggcgacagtgggggcaagttcccttaatgatttaacacagaaaattgttcctcgtgatatcgcgttgccagagccgcccgatgttggtggcggtgcaactgaacagcaagcactagctgaattgaaagcgattgccagccaaaataaacgttaccaatcctatattggcatggggtatgcgcctgcggtgcttccgccagttattttgcgtaatttattagaaaatcctggctggtataccgcttatacaccttatcaacccgaagtttctcaaggtcgccttgaatcactgttaaatttccaacaagtgacgatcgatttgacggggttggatattgcttctgcttctttgctggatgaagccaccgcggcggctgaagcaatggcaatggcaaaacgtatcagcaaactgaaaaatgctgaccgtttctttgttgctgatgatatccatcctcaaacattagatgttgttcgtacccgcgcggaaacctttggctttgatgtgattgtggataaagcagaaaaagtcttggagctggacggtgtatttggtgtgttgttacaacaggttggcacgacaggtgaagttcatgattatgcggatctgatcgcacaactgaaacagcgcaaaatcattgtcagtgttgccgctgatttgatggcgttgctgctgctgactgcaccgggtaaacaaggcgctgacatggtgtttggttcagctcagcgttttggggtaccaatgggatatggcggtccccacgccgcattttttgccagccgtgatgaattcaaacgttctatgccgggacgtattatcggtgtttcccgagatgcggcaggtaatacggcactgcgcatggcaatgcagacccgtgagcagcatatccgtcgtgagaaagcgaattccaacatctgtacggctcaggtgttgctggcaaatatcgcggcgatgtatgcggtatatcatggttcgaaggggctgaaacgcattgcaggtcgtattcatcgtctgactgacattctggcggttgggttacagaaagctgggtttactctacgttacaaaacttggtttgatacgctgacggttgaagttgctgataaagcggcggtattagcccgggcagagaaagctgaaatcaatttgcgtaccgatacttacggcgcggtggggatcacattgagtgaagctacccgccgtgatgatgtgatcaaattgttctctgtgctgacaggcacggatgacaagctagatgttgaagcactggataaagagctgatgacggaaagtcactccattcctgcctcaatgttgcgtagtgatgaaatcctgctgcatccaaatttcaaccgttatcacagcgaaacggatatgatgcgttatatgcatcgtcttgagcgccgagatttggcactgaatcaggccatgatcccattgggttcttgcaccatgaaacttaatgccgcggcagaaatgttgccgatctcttggcctgaatttaatgaactacacccattttgtccgccagagcaagcgcagggttatcagcaaatgatcagccaattatctcactggctggtgcaactgacaggttacgatgtcgtttgtatgcaaccaaactccggtgcacagggtgaatatgcgggtctgcttgctattcgccgttaccatgaaagtcgtggagaagggcatcgtcatatctgtttgatccccagttctgctcatggtaccaacccggcatctgctcatatggcaggcatgaccgttgtggtggtgagttgcgataaagagggcaacattgatctagttgacctgcgtgaaaaagcggaagaatcaggtaatgagctttcctgcatcatggtgacttacccatcgacccacggcgtatatgaagaaactattcgtcaggtgtgtgaaatcattcaccagtatggtggtcaggtttaccttgatggtgcgaatatgaatgcgcaggttggtatcaccgcgcccggttttatcggagctgatgtttcgcacctcaacctgcataaaacattctgtatcccacacggcggtggtggcccaggtatggggccgattggcgtaaaagcccatttggccccgttcttaccgggacactcggtagttcaaatggatggccttactgaacagagagctgtctcagcggcaccatttggtagtgcttctattttgccgattagctggatgtatatccgtatgatgggctcgcaagggttgaagcaggcaagccagacggcgattttgaatgctaactatattgctgctcgcttaaagaatgattatgacgtgttgtatacgggtcataacggttatgtggcacatgaatgtattctggatattcgaccgttgaaagaagagtttggtatcagtgagatggatattgccaagcgcttgattgactatggcttccatgcgccaaccatgtcattcccggttgccggcacgctgatggtggaacccacggaatcagaaagcaaagtggaaattgatcgctttgtggatgccatgctggcgatccgtgctgaaattggcaaagtggcaaaaggtgagtggtcattagaagataacccattggttaacgcgcctcacgtacaagctgaactggtttctgactggagccatagttacagccgtgaaactgcggttttcccaaccttggaaaccaaagccaataaatattggcctgcggttaaacgccttgatgatgtttacggtgatcgtaatctgcattgctcttgtgcacctgtcagtgattatcaataatcactcataaaatagccaacgccagcataataactggcgttgctattatttatatttattggcgaagtcgatttaaatatataccctctggatttcaagatggatcgcgacggcaagggagagaatccccgggagcatagataacgatgtgaccggggtgagcgagtgcagccaacaaagaggcaacttgaaagatgacgggtataaaattaatttatatatttaatacctttttctcccaagctttacatgctatttctaatctaacagcatctttcattattgttatttttatttaataaaatgtttttattgatattttatttaaataagtttttatgggtaatgatatttcattaatataaaattgaaactattattaatataataatttattattattgtatgatattcacaatccttagtcttttccttctactccgtcaccatttaatatctccagccttatcgcgattttctggcatttaatatatcagattcgccattagcaggattaaaaacccagacgctgatcacatttcgtactgatgatttagacaagcaaataattaaacattagaatagttttattatgccactatcaaattatcaatattttctatggaaagattatcgctttatcgccgcagcttggcagtacttatcctgcgggcaacatccgaatggacatatgtttcaacatcgggtgcattgggatctatttgtcacattatgcaccggattgaatttgcaggggcagaaagtttgtcccggtcagaccaagaacactcgatgcattcttatttatccgcgggtttaactttgcaggatatcaacgcacgggtacgaaaaaccgctaatacctcattgggtaatttattagtcagcatgactgactttgtcacacttaaattaggaaaagggacagtacgatggataaacgccacaactcgatggctagggtcacaagttatcttttaatttacctgacggcaatccagccattgcacccggctatggctatcggcataacaccggataacaaccgcacacaggtacaaaatcagggcaatgtaccggtggtgaatatcgccacgccgaatgatgcagggatatcccacaacacctatcaagagttcaatgttgccactcagggggccgtacttaataacgcgacacaggcggctcaatcacaactggcagggcaacttaacgcgaaccctaacctgaaaggcaaagcagcggaactgattattaacgaagtcaccggcagtggccgctctgacctgcaaggccagttggaaattgttggcaataaagccaacgtgatgattgccaaccctaacggcattacctgcgatggttgtggttttattaataccgccagcgcaaccctgaccaccggtaaaccccaatttgataaacagggtgcgttggaagcactggaagtgaaaaaaggccagattaccattggcggcaaagggctggacggcaagacgacggattatgtcgatatcatcagccgggcggcggagttgaatggaaaaattcaggctaacactctgtcgctgactcagggggccaaccgtgtcagcttgaaagacggcacggttaaacctatcgccggagaaggggcaaaaccgcaattagcggttgatactaaagccttaggcggcatgtatgccaataaaatccgactggttgccactgaagacggggttggggttaatctcaccaacctgaccacaacccaagacgctatcagtttaaccgctgagggtaaaattatcttgggggaggtacaagctaagaccgatatcaacatcaacagtaaagccattgaaacggcggcacaaagccatgtgcaggcgggtcaacatctgaaattgaccaccgaaacactgaggaatcaaggccaaatccgggcggatggtgatgtcacgattaaagcgactcaacttgataacgtaaacccgactaagcaaagccacccgattattaccgcgggtaaaaacaacagcattaccgcgaacgagataaataatgttggtgagttaagcgcgggacaaaatctcaccctgacaggcaaaaatttttcaaccaaagcgataaaagacaatcagcagaatatcattggtaaactgagtgccggtggggatttgacggctgtctttaaagagggatttagttttgattttaataaagaacattttaaagcgggaaagaaacctacggatctggcgttaatcaccgggaaaaacatttctctcactgcccgagatttagcaaatcgtgcgtcaatgagggcagaacaaaacttagccgttgacgcagaaacaatctatttaggccaggggaatttaaaagccgggaaccatgtcatgctggatggaaaatcacatcttgatgtgaatggttatgatatctccggtcgggatgtgaccttgcttgccagccgggggctgctgtctgttgtctctggagatgactatacccctgagggaataagggtattaaccacgctttctgctgataacatattacgcattatcgccgagggtcctattaatatcgccgatactctgattaaccgggcgaaaaatatctttttggcaaccaatgataagcttgagatttatgcctctggtgatttaattgatgagcagagttcactcaatgacggcgctaaacaagcattcattaatcagcgtctgcgccagctcagccaattgcaagcggatgaaaatattgagatccatgcaggaaagattgtcgatctgagaagcatttccttgacggcggggaaagatatcacgctgaccagtggcggcacgcttgatgtgagtaaaatcacagcagaggacccctatgaatatgaagatgaacacggaacgggttatgaaaagcattatgaatatgaaaatgctgatgacgaggaagacgaacaatcttacccacaatttcaattacccatagcgagcagtatcatcactgccggcaataatttaacccttaatgctggtggtgacattattgatactgaggcaactttgtcggcaaaaggggtgactgccattgtcaaaaacaacgcagagttacattcaccgtcagggaggtataactcagttgaagggaaatatacgccagtcacttctgcgctgattgcatgtgcgttaagccatgctcctcaactgaccataaacgcctcagaagtagaaggagaagtcccagggattaaactggcggataagcaaactcggatcacctcgaaaaacaatcaccctattattcatattgcggcacctaacgcccgtggtgtttcacataaccgttatcaggagtttaatgttggggcttccgggctggtgctcaataatgctaccgaagctacccaatccgtactggcgggacaaattggggcgaaccctcacttcaacggtcaatcggctgaactgattattaatgaagtggtgggtaccttagcctcaaatctgcaagggctgttggaagttgcagggcagaaagctaatgtcttcattgttaacccgaacggtatgacctgtaatggttgtcgctttgttaatactccggctgtcaccttatcgaccggtaaaccggtatttgataaagatggcgcattagcggccttggaagtgaaaaaaggcgctatcaccttgggtgaaaagggactggatgcaacagcgcaagattcgatcgctatcatcagccggaccactaagcttaacggtaaactccaggcgaaaagcctgacattgacacaaggccccaaccagattgatttcaaacgcggaacccttgttcccatgacaggggaagattatggcccttgggaagcgattgataccgggttattagggggaatgtatgccaataaaatccgtctggtgagtaccgagccgggtaaggttgtcaatctgaccaacctgacggcaacccaaggcgacatcagtctgacggcggatggcaaggtgactctgggggatgtacaggccaaaacggatatcaccgttaacggtaaagacattgacatggtgaaaaaaagtcatatgcaagccggtcaacatctgatattgacaaccgatacattgcagagttggggacgaattcgtgccgacggtgatgtcactattaaagcgaaaaccttgtctttagatgggggaaatatcaccgccgggaaccaggttctgctacagggaaagaacagttttacggtgcgtggcacggatatttcaggtcatgacattaccttgattgccaatagttataatacttctgtttcacctagtgacacgtcggaaagcacacaagtattacctattatttctgcggttaatacgctgcgtattctgtctgaacagggaatatcgctttcagatacgctaattaaccgggcgaaaaatatctttatggcgagtaatgggtggattggtattaatcagcatttggcggcggatgagaatattgatcttcacgctggaggggggataaagttggatgggatttccctgaccgccgggaaagatattaccctgaccagtggtggctcgattaatattggcaaggtcaccgctggcaacaatttagcgctgattgccgacagcaatataacagagacagcattatcggcagaagggacggccgcagtcgcccaatatagtaccgcgttgcacttagccgacgggagatatactccggtgacttcggcgttgattgacctcgcattagataatgccccccaactgaccatcaatatcccagaaatagctggtggaatacccgggattcaactggcggataagcgagcgcggattgctgtgagaaataacctgcctattatccatattgcggcaccgaattcccggggtgtttcacataaccgttatcgggagtttaatgttggggcttccgggctggtgctcaataatgctaccgaagctacccaatccgtactggcgggacaaattggggcgaaccctcacttcaacggtcaatcggctgagttgattattaatgaagtggtggggactttagcctcaaatctacagggtctgttggaagtggtggggcaaaaagccccggtcttcatcgctaacccgaacggcataacctgtcatggttgtggttttatcaataccccggctgtcaccttatcgaccgggaaaccggtatttgataaagagggcgcgttagcggctttagagatgaaaaaaggtgtcataacctttgatgaaaaggggctggacgcaacggcgcaggatgctgtcgacattatcagccgtgcgacgatacttaacggcaaagtgcaggcgaaaaacctgacattgacacaaggggccaaccggattgatttcaaacgcgggactcttatccctattgcaggcgagggtgatacctcttggaaagcgattgataccgggtcattggggggaatgtatgccaataaaatccgtctggtgagtactgaggcgggtaagggagttaacctgaccaacctgacggcaacgcaaggcgacattagtctgacggcggatggtaaggtgactctgggcaatatacaggccaaaacggatatcaccgttagcagtaaaagcattaaaacggcggaacagagtcatgtgcaggcagggaaagagatcacgcttgccgcgaacacgctgaacaacaccggtaagattatcgcagaaggtgacatgcggttatttatcgaccatttatacaatcagtataaggggctgattcaggcaaataatcatctctggctgcaaaaagacgcgagcggtaatttaagcactgaaattaacaacacttcagcgacactgaaaacccataacggcgatattattattcgcgcaaaagcgttaaataatgcctgggatgccagcgtcgcggcgggaatgaacgcttatatccatgcaacgaagctggataatgatgaaagtcagtttcatgcgaagaaaaatctcatcttaaccggtcacgattttaaccgcgggatggacggtaaactctccgccgatctgaatgtggtggctgattttattcatcaactccgcggaacggcattcatctcggcgaaaaatattctgctgcatgccggtgaaattattaacatagggcacctcaacgcgggcaatgatctgtccgtcatcgccgagcgtcgaatgtatgccggccagagtacactggaggcaaaaagaaatctgaccttgattgcaggtaaagatattgaggcttttcaagtcgggttgaagggagaaaatattgaactgcttacgcgtgaaggcgacatccagatgtggggggacggttcgcgtatttcggccgacaacaatttgcggatattcgcggatcacaaactggatctctatggtcttttgttcgataaatcaaacacgataacgttaaacgcgggtcatgaaattgataccagccgggttaaattggccgtgcagaaaaatctgacactgattgcgggcaaaggtatcactgcccgtgaaaccgggctgaaaggggaaaatattgagcttctcgcgcgtgaaggcaacattcaaatgggcgggcatgattcgcgtatttcggccagcaataatgtgcagatgttcgcgagcaacaaactggatctccagggtcttttgttcgataaagccaacaatataacgttaaatgcgggtcatgaaattaatgccgaccgggttaaattagcggcaaataaaaatctgaccttaattgcgggcaaggatatcaccgctcgtcaggcagagttaaaaggggaaaatgttgagcttctggtgcgtgaaggcgacatccaaatgggacggaatcggcctcatgagttattagcctcaatttcggccgataatcatttgcggatttccgcgggcaacgatctggacctttccggtactcagttagataaatcacacaatctgacattaagtgcgggtcgtaacctgaatgccagtcgaagccaattgaaggcggcgggcaatattaatctgtttgcgggaaatgatttaatgttgcggcaagcgggtatccgggcgggacaacaagtcatgctcagtgcgggtcgcgatattgatatctctcggcccaatacgccagagagcctgttttatttatccgaattagatggattagacaaattctctgaattaggtacgcaaattaccgcgggtgatcacctgcaactcagtgcagggggcgatattgcgggtatcgcgagattaatatcgactaaaggaaatgtctcggttaacgctggtcgggatttactgttctctgcccggaaatattcgccgattaatgatggcgattgagaataactatctgagcgtgaatgagctggacagttttgcgcatcaagcccgcacctgtgaaggcgaaagctgcaaacaagtgatcaaggatatggtagacactaatatccgcaatcagcaggaaatgatggatttctgtaacagcaacccgacccagtgcgcacagaagtatggttatctggttgatcagtggccggtgtttgagcggaccctcaaaaatatggaccgggatggcacattgccagttgagttcagaaattacctgtcggcggtgaatacgttaggtcaggcggcaaccggcaaggtaggcgaactcggctggacaaaacgctttgaagcaatgggcatgagtcaggagactgccgctgcgatggcgatgacgttgcctgttattgttgagggcagcaaagggccgaaatcatcgccaacaacaaaaggaagcacaggcgcggttgttaatacagagaaagcggcgctggaaaagattgggaaaaacagtcaaggcacaacgaatctgggtgataaatcggctaatactatttatcatcaacagcttatcaaaaatgctgaaaagatatctaccgcgaaaccggggcaacaagttgcagcgccaagggatctgaatgagcagattttatggaaccaagttaaagctaacccatcttcaggtgatccacttagaggaatgaataaagatcctcgtttccctactgatgcaggattccagaaaatgcaagttacacatgagttaccagacggttcaaatatcaccatccattatcaatataactcaactactggtaaggcttatgatatgaagattacaactcctaaacggcctgaaatccaacctaagccttcaatcacggataaaaaatgatgaaaataaaaaagttcaaatcagaaaaaattattgaagtttttgccatatattggttcggagaaaaaacatacttttacggttttgctaaaggttatgacgggctgcttagttataacgcagaggaagtagaaattatagagtcatcgttatctggtgattttgttttctttgaaaatggcatattttacaagccactcattgaaaaaaatatattagatgacctgttagaagcagatccagttgcttatcaatgttttttagaaacattgaaatcggaaggcagaatagaacaagatttttgctaaccccagatcccagcccaagcgctgggatctcccctttagcggttagccgttctcgacgagccggataatcaactgtccgtgctcaacactgacctgcaccggctgaccggtggcaaagcccgcttcttccagccagttgcctttaagatgcaaactggggtgctggctgtaatagcgggtcatgccggtgctgcggtcttcgtggcgggtgcgggcataccccaccttatagctgcgccgggcttttgaaatcgctaaatctgcattacaatcgcggttagccatggtaactactcctgttagttgcctacggttagcagcgttaccggatggccgtctggtaatgctgcactaaataaaaatcgtctttcctgtagcaaattctttctacgatgtcagtaactgcgtcatcttcgaacgtttaagcaaactgtccatcaacacaatcagcgcctgctgatcttcatctgataatgaatccatctgcatcacaagcgcctgtaaacgcggattatgtatctgtggcggtgtcatgggttccagtccgacaagtgaatccagactactttgtaatacctgagcgatcctgaccacggcatccagttgaggaacggaagcgccgcgttcccaacggttataaacccggcgatcaacgttgagcagttcagctaatcttgcttgtgtcatcttgcgggcttctctggcttcctttagccgtgtagcaaacagttgcatatcttcctcacaaatccagtgtggtaatgagatgtgcattgtaagccctccttttaaactgcttgactcaatggctatattatagtctcatattaatgctactacaatgtctattgacaggtttttacaggaggtaatccatggcccgcattcccgataccgatttagcccacttaaagcaaaccgtctcgttgctggggctggcgcgtaagcaaggccgtacgatgaaaaaacgcggtgaggattatgtgctgcgctgtccgttccataacgagaaaaccccctcaatggtgatatcgccggctaagaacctgtatcactgctttggctgtggcgcagcggggtcggtgctcgactgggtgatacaaacggaaggcgtgacgttgaaaatcggtatccgccggctgcgggagctggccgggctgccggacatggacaatgcggttgtggccgcttcttcgttagccgcccagccggaattacaggcggcccccctgccgcgtccgaaactggccgacctggacgatgacgggcaggcgctgctgcatcaggtgattgatttttatcatcagcacttactggcgtcaccggaagccaaagcctggctggaacgacgcgggctgaatcatcctgaactggtcagtcactttaagctggggtacgcgggccatcacgggatcggcggttcagcgggcttattaccgtccaagagcagtcaggaaggccagcaactgcgcgacaaactatcaggtctgggcgtgttgcgtaccactacccggcaggaccacttccggggctgcgtcgtggtgccggtgatcggctggacagaatcggtcaatgtgaccagccgcgggcgggtgttgcaactgtatggtcgccggacccagccggattacaaagtgctgaaagacagcccgaagcatctgtatctgccgtcaccgctagccggggtctggaatgaatcggcgatgcaggcatcaaatgaaattatcctgtgcgaagcgctgatcgatgccatgacgttctggtgtgccgggttccgtaacgtgattgccgcgttcggggtgaacgggtttaaccgtgagcacctcgaagccttacagtatcacggcgtgaaacgggtgctgattgcctttgaccgggacgaggccggagaccgtggcgcgaccagtgtggccgctgatttactggaagccggtatcgaggcatggcgggtgcagttcccgccgggcatggatgccaatgactatgcgctgaaaagcggcaacgccgaacatgcgctggggctggcgttgcaacaggcggtctggctgggacagggaacagcgccgggcgcggtgttcagccatgagcggcccgtctcgccgacagtgacggaaaagccccaaagtgccggggtggctaaaccggctgctttagccgccccgtcggcgctgactgttgcccccgtgccctgtgagcgcacggcctgcggtgaactgttgatgaaaagcggcccccgggtctggcgggtacgggggatgaaaaaatccccggtgccggatgtgatgaaggtgaacgtgcaggtgcgggatgaaacgtccggcctgttccatgtggatacgctggacatgtaccatgcgcggcatcgtcagaactacatcagcacggcggcgcaagagctggaatgcgagccgtctgtgattaaacgtgaagccgggcgggtcttgctgatgctggagcagcaacaggacgcgcaacagcaggccgacgccgaagcctcagggacaacggcagtcacggtcagcgcggaagacgaagccgccgcgctggcgttgctgacatcgccaaacttaacagaacagattatcaacgacatggccgcctgtggcgtggtcggcgaatccaccaatctgctgaccgggtatctggcggcagtctcgcgcaaactcgataaaccgctggccgtgttaatccagagcagcagcgcggcaggcaagagcagcctgatggatgccgtgctgaacctgatgccggaagaggagcgtatccagtactcggcgatgaccggacagagcctgtattacctcggcgaaaccagcctgcaacacaaaatactggcgatagccgaagaggaaggcgtgcggcaggcggcctatgccctgaaactgttacagtccgacggcgagctaaaaatcgccagtaccggcaaaaacgaacagagcggcgaactggtgacgcgggaatacaaggtgcagggaccggtgatgctgatgttaacgacgacggccattgatgtggatgaagagctgctgaaccgctgtctggtgctgacggtcaacgaatcgcgcgagcagacgcaggccatccacgccatgcagcggcaccgccagacgctggccgggttgctggctgactcggagaaaggttatctgacacagttacaccagaacgcccagcgcttgttaaggccgctgaaagtggtcaatccttacgcccaccaactgacgttcctgtcagacaaaacccggatgcggcgcgaccacatgaaatacctgacgctgatacaggccattgccctgctgcaccagtatcaacgtgaagtgaagaaaacgacccaccgcgggcaggtcatcgaatatatcgaagtcacccaagacgatattgccctcgccaaccggctggcgcatgaggtgctggggcgcacgctggatgaaatgccgccgcagacgcgcaagctgttactgctgatacaagagatggtgaacgaacaggcgcaaatccagcactgccagccaaatgaagtccgctttacccggcgagatatccgtgcctttacccactggagcgacagccagctcaaaaaccactgtcaacggctgacggaaatggaatacctgctgttgcatggcggcagccgggggcacctgctgcattatgaactgctgtgggacggggaagacaacggcgcagcccacctgtgcggcctgctggatgtcggagaaccggactccgaaaccgccggcagtgaacgcaagtctgacccgaaaggtcgcaagtcttccccaagtccggggcaagtctggcctgagtctggggaagaaaaacccgcgtcatccccgatagcacaagggccggcgggggcacaagtccgggcagatgaaaacgcggttattagggaaaataatcacagagacgcattgcccgtgcccgacagggataaaacaccggaagccgtcccgacaggtcaggagagcaagtctgacttaaataaacgcaagtctgcctcaagtctgggtcaggtccgggctaagtctggggtgaaaaaatccccatccgagcaggcagagcacgggttcagcgtaccgcaagtcggggtaacggaagacaccgtgataaaaggaaaaaagaaaacgcgccccttgtctgcgcccacccctcaatctcaaccggaggtcaatcatggcaaaccgtaaaccccgcagaggaagcctgctgacagtagatgaagtgtaccgcaaacctgtcggtccggcgcacgacccgaagagcctgtatgcgttgttgctgcgctttgtggtgtggcgacaggaacggaattggtcagaaagcacgctgaaagtacagacgcaccatacttaccactttatcctgtgggcaaccgagcgcggcttatactacgcagcggatatcacgcggccgatactggagcgttaccagcgttatctgtaccagtaccgcaagaccaacggtgaaccgttaagcacccggacgcaacgtacccaactggaacccttgaaggtctggttcaaatggctgacgaaacagaatctgatactggcgaacccggcggcggacattgaactccccagactggaaaagcacctgccgcgctatatcctgaccatcgatgaaaccgaacagatactggcgcagcctgacctgacgacgttgcagggggtacgtgaccgggcgttgatggagttgctctggtcaaccgggatgcgtcggggcgaattaacccggctggatgtgtacagcgttgacggaaaacgcaaaacggtgaccatccggcagggcaaggggaataaagaccgggtgttgcccctcggtgaacgggccttaagctggctacagcgctatcagcaacaggtgcggccacaacttatcgtcaatccagacgtcaaggcattattcgtcgcaatggatgggctggacggcttacaggctaacggtatcagcaatttggtgacagcttatatcaacgcggtgggtatcgagaaaaaaggtgcctgccacctgttccggcatgcgatggcgacgcagatgctggagaacggggcggacctgcgctggatacaggccatgttaggccatgccagcgtggaatccacccaggtgtatacgcaggtctctatccgggccttgcaggcggtgcacgccagcacccatccggcggagcaaatggccgatgaaaaagtcagcgacgccgatgaggtgggtttactggccgacctgtacgccgacgataacgccgacacggacacgccgccggacagttcagagccgacctcaacccccgatagccgctgagcgtccgtacgcccccgttgagttgggcgggttcggtgtgggggcagaccgtggccggactgcccgttagccccggcgcacgcgggggtaaatagtcgtcaggcggctcaaccacgagcgtccccgttaagccggtccaggccgcccaacgcctattgaacataatgcggggggaattatacgcactgcgccggtgagcccgggcaaccgcctgagcattgatgagcggcttaatgcgtataattggcattatgtcttgcgcccccgcgggtcggcattgcggggagtggcgcacaaggctgcgccttatgctctaaccgactgagccggacatcggcaactctgagttcttctttagctgccctgcaaccgttgggccaacccccctaaaggcaggtcggcctgcggcctccgctcattgacttccccccgccccaaccccgctgcactggctgcgcccggttcgcagtcgcaggctccttgctcattcccgtgctcgccatcgccgccccgtgcagccctgtctcttgatcagatctccaaatcaactgatttagccagcaaatagccgtctatcagggtttgcagccgaaaccagccttcccaaagtcgttcccatccgactcgacccgtgcgtttggaatcgtaccagccggccagttttcccagattgatgaaggcccaatgcaaactcggggcttttttcggcacacggcgtttttcttgttttgaccacagtaatttccacgccagggggcttaatactgtctcacagctctctttctctgcctcttctttgttcagacccataaaacgcagctggtgtattcgtaccgcaataaaggccagcagcactatcatgcgctccagattatctttgctttgcatacgcagcgcttctacctgcgtgccgcccgttttccacgctttgtgaaattcttctatcagccagcggcgctcgtaataactgaatattttatgggcgtcttcctgactgttgacgggttcggaggtcagaagatgccagcaaagcccatcctccggacctttttcgtagcaaccgacataaaatatccgcaccgcctcaccgctttttccttcggggattttcaacgtcacttcggcataactgatatcacaatgcgcgacacgcgcctgacgcccgcctttctgtctgacctgaactaatcgttctccagcactctgtaaccggctaataaagtcataaagtttatcctgactttcctctatacgccggttttgcatcgaacggatgacgaaacgttgtttttggctcgttttataacgcagatattcgatgatatcggcttcacggtcacagacagaaatcacgttggccatctgctcccctaaccggctgtcgacggcttgtgaggcccgttcccacttataactctctttcccttcataagggcgtgtatcgcgttgtcggcttttgccataatcactgacatctcgacaccagcgctgttgctctatcaaccccacgacctgttgttcttcaggcgcaaataacaacaccgagtgtgcctgcatgccccgggatttttcctttgaggtggtatagccgagttcatcggcgaccgacgcatgggaaaatgacagggttgtcgtgtcttccagcgctaacaggcaatgataacgttgagcgtgagcgacggtggcggtaaatccggcttcggcgatggcctgaggcgcaatggcggaatttcgggtcagtcggtaggccgcttcaacatcggcaggagagtcaagagattgcacgagcgattgtcctatatggttagccaacgaacaggccactttcaccaggcggttggtacggcgtttatcacctaattccgcatgttgaaacgtgtcatttgcccattgttcggcgctggttgaaaacataaagattacctcaagtcgtgttttttattgagatcaatctatgagggaaaagttcaataacgcgggggcgggttaaaatatttgtgtaggaaagacaggtgcagcccccgggggcttccctgaacaaaatcgcgtggtcatgcaaggtcatgcgcaacccgaaaccccggtgcccccgagcgtcgcaggggcgccgcttgcgggctctatgccgcccgcgcccgcagaacgggcatccgccgcccaagcgagttgggcgacgttcgcccgttgccgaaaaaggcgctacactgacaatggcacggcgggaaaaaccggcctttggaggcgaaaagcgcgtcagggggttttggggccggcggtgaacgcccattggaaaaaacgggtggtaactggctgagggcattgggaaaatcggtgtttggcggtcaacttcgcaatggaatgggttgttataaacaatacctttatgccaccagcgccatcaatgctgccaagaatctcacactagttgcagcaggcaacctgctgacctccggggccagcttgacatccggcagtgatatgctgctgtccgcgggtggcaatgttcgctttgaatcgcgacaagaatttatccgcgaggggaatattgagcgctttacgcaacacgccagtcggctgaatagtggtggcgcattaactattcgctctcagggcagtattttattccaggcgacggcgttaatcgccaaaggggtgatggatattgcggcaacaggtggctttctctatgcgcaagcgatggaagaagtctacaggcgggaagaaacagagaaaagctgtaaaggtttggggcccataaagtcgtgtaaagtgtttgggtctaaaaccgaacatagaatacaaatcaagaagaccaacaaagtcacggaatttacggccgggggtgatattaacctgatggcaaaagatgaggtgacattggaagcgagtcggatagaaaccggtaaaaacgcgaaaatcaccagccagacagggaaagtgaacttcaaggcgatgcccaatattgattttgagcagagcatcacgacatcaaaaggcttttttattacacagcgcgataaaggtcaccgtgaggagacttggataatcccctcagtgcatgttggcggtacgctgacggtggaggcggcgacaggcatcaatgcggatgtgaaagtgaaagaggggcagttactggaagacgcgttaggggtactgagtcacactcccggtacggaatggctgaaaaatcttcaaggccgcaatgatgtccagtggaatcaggttaaggacgcttacagtagctgggacaaaaaaagcgaaagcttaaaccctgtagtgggtgcggtgattgcgattgcggtcgcggcggtcacggcgggttcgggcctggcggcctgggcgggaagtggtgccgtgggggcgacaggcgctacgggagccacggcgagcgcggtttatggggcggcttatggcggaatgatcgggttgacctcgcaggcggcggtggccttagttgaaaataaaggggatctcaccaagacactggctgccttagcgaagcgcgaagccgtcaaatccctcgtgacccaaatcgccgtgggtggcgcattagggggcttagaccacacgatgggctggggaaaattagtggagggaaaaggcgttgtcgatccgctaaaagcgcagcttcccttattgagtaatcagaattggagtcaggtggcccagcgtgttgcggcacaatccatcgtgagttcaacaatagggacggcgattaacggcggcagttttacggataacctgcaaaccgcgttgttgagcaatataggtaaccagattaatgcggaaggtgccaaactgattggtgataatggggagattttaggccattcaggcaagatattgagccatacggttgtggcaggcattagcgctgaaattgccggcggggatgccaaaggggcggctgtgggtgcgctggcggctgaattagcggcaatcacaatggaaagccggctatttgaaccggcgtataagaatgaaactgagcgacaaatccataagctacaggaagcgctgacgggtaatgaagttaaggctcagacggctaaatttatcggggcattatcaggtgccctgattagccataccccggaaggcgcttacagtgcggcgaacagcgcggagcttgtctatcgtaataacatgactgagcacatgttgtatcagttatcggtagaaaatcaaaaagacatcttagcggcaggaaaaggggataaagctgcggaagcgcgcgtcattgcgcggcaggatgcggcgattgccgttaccgcggtggcggcaggcggttatgcgctggtttatggcggccagatactgattgccgcctcggctgaaatggcaacggcagggcgtgttgcgcttgagggctgtaaaaccaatccggcgctgtgcctgaataacgtaggtatttttgtcgctgatgcgattgcgccagaagcggcggttgggacgggcgttttggctgcgggaacggtaaaagtattaggtagcaccaaagaaggtgccaaggatttggcagaaggattgagtcatgcgggtatgcaggtcgctgaggcattaacaccgggtggtgtgggtgctgcgggtataatcggtgcgggtaaaactgcggcggaagcggtacaaacagaagctgtagcggttattgcagctaaaaatctgcttaataagtctgttgctcaaaaaatagatgcagggaaatttggcaaattagggttagccgaacttgctgaaacaggaactaaaattgatccggcagctaaagctggaaatttcactgttgctggtagagctttgcagaagcatggaagccgtgagggcagcgcattccctgctgctaaaggaaatccagaacaggttaatcagcaaggacaaaaaatcttggaggagataattaaaacaccaagagctaaggttcaacaaggtaatcgttttggtggttttgatatagtagcaccggatggtcgtggggcgagatttgatcctcaaggtaactttcgtggatttttggagccataatgaataataggtatcaactgaaaattgtcatagcaagcgatatagattacgaatgtttggtagctgaaatttattgtaatggagagttttttgctcttttgcaacaagaagagggggttgaaaatattaaggtagaattttctcctagcaccagaataattgatcttgattggcttcaatatgctttatcaaaagccaaagaacatttattgaacaattgaactcgctcttgctttgtgaactgaaccttaatttttgggcagtttcatcggcggctaactttgtttaggtccagaccagatataactaactgagtgtattaaggaaaaagcatgtttatggtcagatttcatgatagagaatgttgttgctgaaaataatgttctaggagcagcaactggctcagacttgggggattttggttaagcaaaacactagactgcgatatgaccttataaggctaatattactaaaggtatagctaagggcgacaggtgttacgggagccttagttgaaaataaaggggataaagctgcggaagcgcgcgtcattgcgcggcaggatgcggcgattgccgtcaccgcggtggcggcaggcggttacgcgctggtttatggcggtcagatactgattgccgcctcggctgaaatggcaacggcagggcgtgttgcgcttgaaggctgtaaaaccaatccggcgctgtgcctgaataacgtgggtatttttgtcgctgatgcggttgcgccagaagcggcagttgggaccggtgttttggctgcgggaacggtaaaagtattaggtagcaccaaagaaggtgctaagaatctggcaggagaattgcacaatgcgggtatgaatacattgaagaatgtatctacaggtttgccaagccctcaggggttatcaaaagaaattcatctagggcaacaaggaaaacacattacagggcataacaactatattcctggacgttctccattagcggaaggtgtagatcctcaaaaattacttaatggtgttcactcaggtgaatatcccatcatacggatgactccacgtaatcaacctattgttaattttggtaaaccaatagggaaatatgaaggacagccaacaaattatggcattattcattatggaaaaaacggggcgcatattgttccagctaaccctattcagcattgaggtttttttatgatgttaaaaactataccagacgagttgtttatatgggtgtcaaaagctcttcttggagaaatttatccggctatcagagcaatagccgttggattcaataatgaaaaaaagctcctaacattaagatattatcttgatcgtgaaccgacagaggaagattacgaaagtttagatatagtcatagcgaatattttagctcacacatcatctaataacgatattagaggtgtaaacgatgaggtagttttctctacaaatccatttagagatcttgatagcttaagtggttttatatacataagaagagaatattagaggttaatgtaggtatcgcgattaacggcggcagttttacagataacctgcaaaccgcgctgttgagcaatatcggtaatcagattaatgcggaaggtgccaaactgattggtgataacggggagattttaggccactcaggcaagatattgagccacgcggttgtggcaggcattagcgctgaaatcgccggtggggatgccaaaggggcggctgtgggtgcgctggcggctgaattagcggcaatcacaatggaaagccggctatttgaaccggcgtataaaaatgaaaccgagcgacaaatccataagctacaggaagcgctgacgggtaatgaagttaaggctcagacggctaaatttatcggggcattatcaggcgcactgattagccataccccggaaggcgcttacagcgcggagcttgtctatcgaaataacatgactgagcacatgttgtatcagttatcggtagaaaatcaaaaagacatcttagcggcaggaaaaggggataaagctgcggaagcgcgcgtcattgcacggcaggatgcggcgattgccgtcaccgcggtggcggcaggcggttacgcgctggtttatggcggtcagatactgattgccgcctcggctgaaatggcaacggcagggcgtgttgcgcttgaaggctgtaaaaccaatccggcgctgtgcctgaataacgtaggtatttttgtcgctgatgcggttgcgccagaagcggcggttggaacgggtgttttggcggcgggaacggtaaaagtattaggtagcaccaaagaaggtgctaagaatctggcagaaggattgagtcatacctcaaacccgctgttaagcaatgctaaatctgatacccatgccgtagctagtttgatcgaaaatgagaagttgtatatagagcgcaactcgtcaacagcgacggaagctgttgctgtaggtatggcaaagaatggcacacaaggggcaactaatcagcttgttgatggcaaatggcttgatgcaaatggattacccctaccagtacctccaagcgtcggagctgctggtagagtaccaactgtattacaaacaggtggtaatactttaaataagagcacagctaatacactaaataatcaacttggtgagaatctgacaagtcgtgaatggggtcgggctcttgaggctttgaaaaaagaaaatggattgaggaatgatttccacggtcgaattttagataatgggaactatatagatgatgccgggaaggttattgggaatattggagattatttaccatgagtactattaaatctagggttaccccagtatcgagtgattatccgacttgttctgagtgttatgcacaattattgatttatccaggaatgatgcaccctgataatgtgagcaggctactgaaacttgaacctacacagaagaatattgttggaacaacagtaactaatagtcgaggaaaaacccgagaaattaagttgtccagttggtttttatcttcaaaatcatatgtagagtcgaaggatctaagggatcatatagattggctgttaaggaaattaaatcaatctgaaataggattaaagcaactgcaacgtactgagggtattagtataacattgagttgtgtgtggcgttctaaatttgggcatagtgggccggtactatggccggaacaaatgagatctatatctgacttagatctagaatgttcctttgatatatattttgatcctgataagtaaaacaaggcccgaagttgaaccggcatataagaatgaaacagagtgacaaatccataaaattcaggaagcgctgacgggtaatgaagctaaggctcagacggctaaatttatcggggcattgtcaggtgccctgattagccataccccggaagacgcttacagtgcggcgaacagcgcggagcttgtctatcgtaataacatgactgagcacatgttgtaccagttatcggtagagaatcaaaaagacatcttagcggcaggaaaaggggataaagctgcggaagcgcgcgtcattgcgcggcaggatgcggcgattgccgtcaccgcagtagcggcaggtgaacggtaaaagtattaggtaacaccaaagaaggtgctaagaatctggcagaaggattgagtcatacctcaaacccgctgttaagcaatgctaaatctgatacccatgccgtaacttgtttgatggaaaaagaagattcgattgctgagatcggtgcggggctgaagctcgcgcttagtcgttgtaccagttaaatcaagatcccagttataaaaaaagctgggatttttttccctttttggacgattggcaagctgttttcttttcggtgatgagttatctgaggataaaaaaacaggtatccattaataccagattttgaaaaggtacagaatcactaaaaacggcgtattccctgttatgtttaatgtattcaccgacaatgttatcctccagttattttacatttaactgccctgccatggctatttaaaagaatgaaaacagagatattaaagattttatataaaagacagctttaactataagtgaaattttaaaaaggatgttaattaagtttaatcgaagtccattaactatcaccattagcagcgagttgaaaataaatcatcgaggaaaagaatattatcttaaaaacctgatatgaatgtgatttttagtcgtttctttataataaagggataaagcggttaatctgacaggatttaaactcttaaaaaaatgttgaatatccgaaaaaacataaggtatgtttatatcgtaaaactatttatatgtttatttatgaagataaaaaatttataaaatctgctcagaatcaccagtaaaacagcgtcagaaaagataaaaatcgagcatggttaacgttgattaaacttaataaaaccagaggttaaaaaatggattttaataacatcttaaaaccagcccatcataaaaccatcagtgaaaagtgagaaaaaataatgaatttattaatatatacccgtaaaaaatgacaaacaagagtatataataggtttaatcagacagtatattttaaaaaagtaaccgactttaataacactttcaactgtagataaatttttcatcaaccagttaaataattattcatcaaaaacaggaataacaaaacctgaaaataaacgacgcaacagaatacgaactggattactgacatcgttgttatgttgaatttattatgcgacactgcgatacattaaatacatccgtttaaactcgttttacactattttaccctgtccaatagcattgcttttctatcattttatttaagttattcctctttttacacctttaatgtgattaaacgcttaaatacccacttagtcattacaacctttttggatggttaatccgacagaattttcactattgttaatataataagacgttattaaattaatttaccgatttatctaaacatcatttaaataaatatgagtgaatggagttaaatgaaaatataaaatcacatgacgaacctattttaatgaaaccaggataaaaagcgtaaaaaaagatatcctaaatataaaataaatctcttttttaaaatttaaacactttttatttaaatctgtgccttgaatcattaaaagcgcgtaaaatttttcaaacttttagtcaaccagtctatttaaaaacaccgctaaacaatcaaatcacgcttgaaaactgacaccgttactcgcttaccggtcaacaaatgcgctggagaatagtcagcaggatatcgcacgcctgctggatttgggacgcaataccattaagcaacttgaagaattggtattgatgtataaaaaattaccttcattcttatcaccactttacagcatttaatatatccgatttcccattgtcaggattaaagatccagacattgatcacatttcacactgcccactcagacgggaaattaataccacattagaatagtttaataatatcattatcaaatttttaattatcatctatgggaaaattaccgttttatcaccgcagcctgactgggcttattctgctgacaatctccgcactggcacaggcggcaattcctgtcagctcggcggatcaagaaactatcacgcaacaacaaaaagccttgttgcagcaagcccaacaacagcgggaagcgctgcgtaacaatatcaccgtatccccatcccccgttttaacgtcggatgcagctgaatttgtttgccacaccattcaacagattgaatttgtgggtgcagaaagcttgtcaaagtcagtcaaacagaacgtgattcacccttacttatctcattgtttaactttgcaagagattaatgagctggtgcgtaaagtatcgaatgcctatatcaaacggggttatgtcacttcccgtgccgacctcaaagcgcaggatttatcctccggtaccctcatgattaccgtgaatgaaggcaaaattgagtcaatcagccttgatgatgaaacaccatactcactcaaaatggcctttccgggcatgattggcaaaacactcaatctgcgagatattgaacaaggcatggagcgcctgaaccgcctgccctcccaacaggtcgccattgatattcagccaggaaaacaacccggttattctgcggttatcttaaaacgaacctcgacacgtttaccgatcagtgccagcttgggtggggataacagtggccagaaaagtaccggcaccgggcaaatcaatgccagtgtgaacctggataatccattacatctcgctgatcagtggtcattgtctgccagccataacagtgattttcgccatagccaccaaaaccgaagcctcacttctaatgtaacgatcccttatggctactggttgttcagttatcagtatgcgtggaatgactcttttcagaatattccggctgactcgcaagcctatcgctacgaaggcgacagccagacgcaccggctggcaataaaccgggcgttataccgtgatggcgaacagaagctggcgctggatctgggattgacgcgccgccaaacgaccaatttgctggcaggagagaaattatccatcagcagcccgacgttaagctctatcaaccttggcattaactacagttcagtactggcaggtggctatatcacgtttaacccggcaatcagccacggtttaccggtgttcagtgcgacaaaagaggatccccatttcccggatgctccacggagtcaattccgtaaatttagcctgagtgccagctattttatgccagtcacggattccatttattacctctcatccctttacggccagaccacacccgacaacctttacgccagcgaacgcctctcgctgggaggacaatattccgtcaggggatttaaagagcaatctctcaccggcaaccgcggtggatattggcgcaatgagctgaactggcgaatggcagagcttcctgtactgggtgaactcaccttaaccggggcgttggatacgggatggttacgaggaaaagcaggacaaattgatggcggtaatgtcactggcaccgcacttggcttctcactaacgaaccgccgattcaatcaggcgataactgttggcaaaccactcacttaccctgaccacctgaaaccggctcactgggtggtttactggtctgcatcactgattttttaacggtcaatcggcagcgttgattattaaggtcgccgaagagtgtgtcattgcgcagcggaatgctgcgattgccgtcaccgcagtggcggcaggtgaacggtaaaagtattaggtaacaccaaagaaggagggcggaagggttgagtcatacctcaaaaccgctgttaaaaaatgctaaacctgatacctatgttaatccatttttaaaataagggatattcttaagtcatcgaaaatttttaataacgtgttgttggttaattagcttttctttaatgcttaataacgctttattctatcaacaaaggttaaaagtttttaggattaataagtcagaaatgtgataacggttaaacaggtgtttaaccgttaacggcgagtgaaaacaactcgtaaaaataatgatattaaattgattttagcgttaaatcatactgacggtataaaaagcagaatggtttaaattaaacagtaaaagagagatgttattagatgggctaaaacagtgtaaagctggtttaagctatcatggttttatataataaatgtaaaataataacgctgaaagtaatttaatccatatgccgttaaatcatttattttatgggggtgttattcatatttttcatgattgatgatttaattggtttatgaaaaagtttattctttggtttaaggtgttattaaaggcgattccttttgaaaaaaattatctgattaacttattcatgtttttatttatccgttttccctgggagatataagcatcaataaaatcaatttttgttttcaatttttcactgatggcattataataggcaggctttaggctgttattaaaaatcattttcttaactcttgggttaatcggtataaagttttaacgatagttttaacgatagttttaacgatagttttaacgatagttttaacgatagttttaacgatagttttaacgatagttttaacgatagttttaacgatagttttaacgatagttttaacctgtaaaacctgtaaaacctgtaaaacctgtaaaacctgtaaaacctgtaaaacctgtaaaacctgtaaaacctgtaaaacctgtaaaacctgtaaaacctgtaaaacctgtaaaacctgtaaaacctgtaaaacctgtaaaacctgtaaaacctgtaaaacctgtaaaacctgtaaaacctgtaaaacctgtaaaacctgtaaaacctgtaaaacctgtaaaacctgtaaaacctgtaaaacctgtaaaacctgtaaaacctgtaaaacctgtaaaacctgtaaaacctgtaaaacctgtaaaacctgtaaaacctgtaaaacctgtaaaacctgtaaaacctgtaaaacctgtaaaacctgtaaaacctgtaaaacctgtaaaacctgtaaaacctgtaaaacctgtaaaacctgtaaaacccttttttcgcctgttttttattaagtttaatcatcatggcatattgtgttttatgtttatacccaagaaacttcaagatgcagtttttagcacctgaaaatggtcgttaattctagacatcagcgagtccgctatatccggtagcgttgtggtgaaaaatttgaagacgttgtctcgaaattcatgtttatccgcaaaataacggttatttcgaacctgttcattcatgaccttccataatcgctctattgggtttaaatttgggctatagggaggaaggtaatgtaactcaatattgctaacataagcccactccttaacaagatgagctttgttgtaacccgccccatccacaataagatgaattttttgatgatagtcaggataagactttcttatttcattgaaaaaacagcaaatattgtagtcattgatggtttgatattcctggaacaccgtacgaccaatggcattcaggttgagcgcgcccaatatattcaggcgagtccggcttcctgttgttttgactgtttttttctcgccttttcgcatccagccataaccgagtttggtgccttgagtcgggtgaacagcatcaagaaaaaggatgggttcgtctttcgctgtgactttaagattctcataatattcaataaattgtcgctgtttttctgcgtcgaatttatgagggacgccacaaggttttttataagaaaaaccctgacggtgtagccatttattcatgccgggaatgctaaaggtaatattccagagctgagcaacataggccacgatttcatgggtgtgatggaaaagatgttgagataagtgattgattaaaaaatcagtttgttcttgagaaagcaaactatcagaccccccattatcagatttaagtttaccttgattaaggtaatcgctgatatgacggttaacggtcatttcatgaagacgcagggcctgagcgatcatcactgaactccagccttcagaggccagcaggaccgctttgatgcgatcacactccctcttatcacggcaggtgtgatggagatgttcaagttcggctttttgttcatcggtaatgaatattttcatagcgaggataatgatctccatttcggataaaatcaagcatcttcaatgattacgggtatatacccgtcatctttcaagttgcctctttgttggctgcactcactcaccccggtcacatagttttctatgctcccggggattcgctcctttgccgtcgcgatgcatcttgaaatctataaggtataaaaaacattaatcacactcgctttttatctttataaatcagccggtaaatagcatgatgatgtaaagagactctttcgaataatcacgcttttttcagggtttaaattctgccaagttaaccggtttaacccatttttttatgacattattttaatggtctgctgcgtaaaatgatggaaataaagattttgaatattaaactgtatgagtaatattcttttacttgcttatttctttttaactttctgttaatgattgaagggtttcgattaaatgtaattaactgttctattaaaaaattttacttatttaattaaatctaccttttatataaaaaatttagtttctctttattatcacttttaaataatcatggtagattaattaaatgtgaagcaagcgaagaataatatcaccgatagatatattaaatatgacaataaataagctttttaaaatcacgctgtaccttttaaaaatgggcattaataatatgttgatttttttaacccttagttgaatcattaccgataaaaaggtgtttacgatcgctaaaaagggcaaatgaaagtaaaaagagaaagtgaataatgttaaaaacatgatgtgcttgctcttttttcctgattttaaaaccacactgacagctaaaaacggattttcttaatacctgttttatcaccttgggataaagatgtggttaatcattattttaatgagtgaaaactgcataactatttgctttcaaatggaatgaaaaatggcaatccatataacttaacctgaacaaattggatcgttggagtcaatagaaaacgcgacaccgaaagattaaagacattaaaaacagggttaaatccctctggtggtagcaaaatgccattcccatgtaaaccgtcagtacaaattttctcgttttattactgaggaaaactcagcagtgatagtcgagacgttaaaagtcaataatctgaaagatgaatgttcaccatgtgcacgttggttgtaaataatcaccaatgtaataataaattacaatacaataacttatgtttcacatttatctatattggtgaaagttgatggcaaatataaatttaaaaaaacacctttcttgagaatttttgtttttttattgaaaaataaaaggtatttagaatattgttccccgtaacaatttaaatataaattgtttttattttatactgaaaatatttatatgatttttttatttataatataagactaaatttatttgacagttttgtatttgatgattattgttcttccctgattcgcaaatgttatttcaaacataataatatctttggttattatatgcatttaatataaatgatattttatgacattgttcaatttgttgtttttattgtgaattttaattttcataaattaatttacatgggttattatatttaattgatgataacttgaaactatttccaatgtgataatttgtcattgcatatttgtttttaaatttagtgtaaatctgagtgtgattcgtcattttaattactgatgaatacagggttattttttacaattgatgtaaagcagtaaaaatatcctcactataagagggcggtaattatttgtccgtcgttattgacaacatatttaaaataaattggccacaggccatataggagtaaataagtgaaatacgactttattgtcgttggttccggggcaattgcaggttcaatcgcctatgagctggcaagcagaaatctttcggtttgtagggttggagagactgatcgaactaatgctgcttcgaaagcggcgggtgcaatgaatgggtgttttggcgaaattaccagtggtttattagcgagtgaacacggtaagttgaaattgaatatggattgtatttccaaagagctttggccggcttgggcgcaacggttagctgactcttccggtgatacccgatcactgttcacggctaaaggcactcacgtgatactcaacactgccgggatggaagagattgacagtatcaattatgacgctatcgaacaaaccctaaacgattatgcggcaccttatgaaaccattgatccgcgtgaaattgagtggttaaagcccaacgatttagtgcgcccgctgcgtgctttgtacatccctgatgagcatgcgctgaactcgcatttattgctggaaaagctggatgcggcattggtggctgaaggtggaagtcttaaagaagagaatgttaagtgtgtgttgattgaagagggtttagctaccggtgtcgaattgctgagtggcgaacgtttaatggcagataaggtcgtcgtggctgccggtgcgcactcgttggatctgttatcaaatataccttctattgttcgccaaattccgccaatctttgccggctatggggtatccattctggtcaagatgccgaaaggcagagaattaccgacttcggtcatccgtacccctaaccgggcatttgcctgtgggctgcattgtgtgccacgtggtgatggtgtgctgtatcttggcgcgaccaatattctgtctgaaaaaccacgcagtcaggcactgatttctgatgtgcagttcttgttggattgtgcgttagatcagttagatattaacttacatgatgctgagatcctctcaattcaggttggtaaccggccaatcccggctgatgggttcccgttgatcggcgaatgcggcgtgaatggtctttggttggcgaccgggacttaccgtgatggcttacatcaatcaccgttattagcggattatgtggctaatgctttgacgggagtagaaaatacactgattaatcttgatgatttcaatccagttcgtcctccgttggtcggcttctcccgtgacgtgatggcgaaagagactgctcaacaaatgtttgctaccggttacgaatatcgttgggatattaaaccttactggctgccactgctgaatgaagggatgatgcgcaattatcagaatttaattgagtctcttcaccctcaattcacgccaccgccagagttggttgccttctcccatatttatcaatccatgcgtgaacggttacgcagttattatgaggcttggtcatgagtttttcgctgaaagatcaagttgtcattgataacgccaggaaattactgtcagaggccgacgtttgggatgtggaaactgatctcacgtgcctgattgaccgttatctggaaagacgttgtaaggaccgcgcccgtgatgaatttatgcttgcggttcatgaacgctgtaaccgaataccacttgggcatattgtcggtactgtggattttgatggattgcctctgacggtggggaccggggtatttattccgcgccctcatagtcaagttattcataaatggctggagaatgaatatcaagcgcctcatggggctgtggtgctggacttatgctccggtagtggtgccatcggtttagctattgctaaacgtcgcccagatttaaaggtcacttgtgtcgaatatgatgatgtggcttttcaatacctgacgcgcaatatctatcggttggcgaattgggcgattaaagccgatgcattaaaagcagatttacgggattggcaagcattttctcaatttaacggatcggtagcgttgattgtagctaatccaccttatgtgccagaacagcaggaaatattaccggaatgggaggaacatcatccttatgcatcggtgtattcgggggatgatgggcttgacttagcacggttgattatcaaacaagctaaacagctactgcaatcagaaggttggttagttattgaacatggtgaaagtcagggagagagtgtcagagcattattttcagatgttggcttctcctcggtacgaactattatcgatgaagatatttctgacacaacgggcagttcggtaatcactgttggttgtaagcgcatttgaacttagacagttggagtctagataatggatgtaaaacataagcaggactggatgacaattcgtcggtcacggacaaccggtgccttagcgcaagctatcgacgaaggtttgaccagtttcactgtggttgaacgtcaaggtaagcaaattactacggaggaaggcaaagtctttactgaatttgtttcctgctcttatttgggattagaacatcatcctgcgttaattgaagcggcaaatcaggcaatggctaaaacagggatacatttgtcatcatcccgtggagcgatgcgcccgcaatatttggggcaattggagaaactgctggaagagatttatcaaggtggtgccgttgcggtgtttacttccaccagtaatgttcatcttggtgtattgccgttattggggagtggctctctacctaactatcctctttctcggcctgtacattggttgatggataaaactgctcatgcctctatgcaggttttacgcggtattctggagcagttcggaccggtatcacgggttgatagtgctgatgcgcagtcagtacagcaagctttgcagaactgtaaggagaatcagcggacacctatcctgctgattgatggtattggttcaatgaatggtttaattccggttgcagaattaacgcgacagttggctgctgctggaggctatgtctatgtagatgatgctcatggtatttccattatggggcgtcatggtgcgggttatgcttttgctgcacttgaccatattttgccatccaacctcatacttgcaggttcattatccaaagcatttggtggtgccgggggttttgtggtggttgcaggtgccgatgatgtcgaagtgatcagtaccttagcgaatcctctggtttttggtcattcgatcatggtgccgatgttggccgctaacgttgcctcagcaagacttcatctcagccttgagatagacatccggcaagagcagttatggaacaacatcaatctgtttgattctctgatggagaacagtttgatgaatgcgggtgtgcaatctcccgttcgcggcgctttattcgaaaatgaagcggaagggcttgaagctgctcgtttgctgcgtgataacggcatcttattattcccggtattttatccactggtcccggatggcaatgcaatgttacgctttgctttctctagtgagcatcaggcaggtgaaatcaagcagctagcaaataccttatttgaaataagggaaaaagggctgaattgggttgagccacaggctgtggttccacaggtgtaaatgacacccgcttaccaataaagaagataattgaaatgaatcagtgacgaagatcaaacatatgactcaagcaataataaataaacaggaaatattacaaccttacagggaatctttggatgttattaatatgcagattttggcactgctttctgaacgtatgaaagtttgtatgaaaatcgctgaggtaaaagcggggcaggatattccgatgatgcagccacaacgtattacctcgttattgaatatgttgcgggataaatcaaccgattttgggttacggcctgaatatactgaatcaatatttcaactggttattgaagagacttgccgtcgagaagaagagctgattgaccagttgttacacgagaaagtaaagaataatgaaaatactgctcattgataattatgattcctttacgcaaaacattgctcaatatctgtatgaagtgacgggcagtgtgccgtccgtagtcaccaattctttgacttatgaagagttaacgatagacgaatatgatgcggtagtcctttctccggggccaggacatccggctgaaagcagtgattttggggtctgtgctgaagttattgcacatgccaaagtgccactgttgggtatttgtctcggtcatcaggggattaacctggcatttggcggcgttgtagaacatgcccccaatccggtacatggctatcgcagtcgcatcaggaacactggagaaggattgttcctcggtttgcctgaacagtttgaagtggtcagatatcactcgttggtatgtacccggttgcccgacaatctgaaatgtactgcctggactgatgatggcttaatcatggcaattgagcacaccgaaaggccgatctggggggttcaatttcatcctgaatcgattgattctgaatatgggcgtgagctactcagtaatttcgtgcggatagcggagacgtataaagagaataatgaacaggaagttaccgctcagaatatatgtactgatatcaatgaggcttatcttgcagtaggtggaagacaagatctcaacctgaattatcgtgaatgtaaggagatagtcgatcctgaatccttgtttattcaacgttatggcaatgatacgcatgctttctggcttgatagtgaaaattctgatagacccaatgcccgcttctcaatgatgggcagcggtaatgaacaaggtgctgtcagacttgaatacagtgtacagactgagaatttgcgtttgatcggtcctgatggcgagaggattgttcagggagattttttctcgctgatgtctcagttgcttgatgtggtggcaatttcgacaccaaaatcgatgccattggtatttaaaggcgggtttgttggttatttaggatatgaattaaaggcgctgacaattggcagcaacaaatatcgttcagaacatcctgatgccagcttaatatttactccgcatttttttgtcttcgatcatcagcagagtaaactttatgaatgttttatcacaccaatagggcagccacatcattggtcaccggaacttttcgttaccaatacaaaaaataccggtgaagtgatacctgactttattcctggcgctgttgatcaaaataagatttgtctggaatatggcgctgagaaatatatggatggaatccataaatcactccaatacatcacagatggtgagtcctatgaaatctgtctgacgaatagggccaagatgacttattcaggacatccattggacgcttatcggcgtatgcgtcatgccagtcctgtaccttatggcgcttatctggcctgtggggatttttctgtactcagtgcatcaccagaaacgtttttacgtattgatgacgccagaaatattgagtccagaccgattaaggggacccggccacgcggaaaaacggcagccgatgatcagcatttgcagatggaattgagtcagtctactaaggatagggcagaaaatctgatgatagtggacttagtgcgccatgatcttaatcaggtatgtcgtccaggtagtgtgcatgtacctgaattatttaaagttgagagcttctcttctgtacatcaattggtttcgaccatacgcggtcaattatgtgaagaaacgtcatccatagaggctatccgggcatgttttccaggaggatcaatgaccggcgcaccgaagaagcgcacgatggagattattgatgctttagagtcatcggctcgtggtgtttactccggtgcgcttggatggttatctttcagtggtgaagtggaattgagcattgtgatacgcaccgcggtattacatcaagagtgtgctgaattcggcattgggggggcaattgttgctcattctgatccttatggcgaatttgaagagacattggtcaaagcgagtgtgccatatttcagttttagtcatatggcggaggaagtgtgtgagtaaccataaagtggtcatccttggtgggcaaggcgctattggttctttattagagcgcctttttactcaatatggtcatattgtatacagtgttgacaaacgaacgcagggagtgcgttctcattactatcattctcattactgtcagattgatatcttaaacccggctgctgatgttggagcggttttgagtggggcaaaggcggtcgtctttgccttaccggaagccgtcgccatacaagcgttgccttgggtgttatctgctattggtgatgatgtacagatcgtgtcaacctgttcagttcaggcccctttttattctgcattaagagctgccgcccccgggcagcctttcattggtgttaacccgatgttctcgccatctttgccggagcaaaaaaggccagttgcagtcattctcgataactgtcatgttagtgaacattggattgagcgggtattgatgcaggctgatatgcgtatcagtaggatgacgccggaggaacacgatcaggttatggcgctttgtcaggctttgccccatgccgcgatactgatttttggcttggtgttggcgaaaagtccgttagatattcgtaccttggcagctattgcgccaccgcccatgcgtaccatgctggcgttattatcaaggatcttacgcaatccaatagaagtgtactgggacgttcaatatgaaaatccgatggctgccgaaccgcgtcaggagttgctgcatgccatacaacagttagattcgatagtacaggctggcgatcaaactgaatttggcaataacctcagagatattgcgcaacaactgggggaacagcttgatatcagtgctgctgattgccagcatattttttcaacgcttgaatgagataggataggagttgaggggatgtcgttaaatagagttgctgaggctaacgggcgggcaggactcagaaattggctaggattactgatattgatgttaccagtattgctagtgactgtggacaatacgatcttaagttttgctttaccaaaaatagctgaagctctgggacccagtgcaagccagcaattatggataattgatgcttattcattggcattggctggtttgctggtatcaatgggaagtattggcgatcgtgtgggtcatcgttcattactgttatttggatctttggggttcacggttatttcggtgttcacagcactgtcaacttcacctgaacaattgattttagggcgagccgtacttggattttttggtgcgatgctgatgccttcaactttggctttgatcagcgttctttttgaggatcgtgaacagcgtcgattggctgttgctatctgggcgacaacattaactatcggttcggccgtaggtcctgtagtgggtggtgttctattacaattcttcgattggagttcaatttttctattggcagtaccggtattagtgccattgttgatcttcggaccgatgttattgccagagtccgataaaaaacagacgggcattatcgatgtgtatagtgttctgttatcgatcgttgctatggttggtattgtttacgcgattaaacaccttgctagtgatgggtttgaaataagtgtaatactcgaactgtcggttggtcttattgctggtgtgctatttgttcgccgacaacagcgtctgcctgtgccgttgatggatctttctctgttccgcaatggtatgttcacgggttcgattattgttaacttactgagtttggcattgctggttggttttgtcttttttgccacacaggtcttgcaaattgtgctcggtatgaagccgattttggctagcctggcattggttcctggacaaataatggcaattgttatgggtatggcgatagtgcctattgctcaacgggttccggctcattatctggtgccaattttgctgagtattgcaggtattgcatttcttctggtcgcgagtatcggcagtgatttagtcactctgattgttgctttcgcattattagatattagtgtgggggcaattgcttcggtgtctaacgatttggtgctttcgtcagtaccctcctctaaagcaggggcggcatcatcaataagcgaaactgcttatgaagtgggtgttgtacttggtacgactattctggggggattggttactgctttctatcgtatgacattgcaattaccaaatgagatctctcaggaacagacgggattagctttagagactttagcgggggcttacgttgtcgcgaattcattagctgaatcagaggggcagaagctgatgacagcagcggcggaatcattcaccagcgctattcatatgatgagctggatgacagtggtattgaccgcaggagtggtattgctcgcttggcgtttgctgaaagctccgcagaaagaacaagtgcttgagtattgatagtttgacgtgcagccattgtaaatggctgcactgcattatgataattattgattttgttctataccttatggatttcaagatggatcgcgacggcaagggagcgaatccccgggagcatagagaactatgtgaccggggtgagtgagtgcagccaacaaagaggcaacttgaaagatgacgggtatagaattgaaatttttaattggctactattgaaagatagtgatgtatcacagaaatattccccataattaatggaaaaaatgggaatttatattaatattttaaattgtgtaatttcaatattgcgtctaattgctctctgtaaagtgaataaatacttacctaattaactctcatcgtaattatttttctggcctacctgttgttgaagtggctgtatattttgctagaaaaatcggtgctttcgttatggctaatttggtgattagccagaggcaaaactttgactatcagcaagttagtgacataaccggtagtgataatagtagaaactttggaacttggttagatagataattaatatatgaagttattctaaatgtataaatttaaactcaggagaattcacatggataaaataagaacggttgctgagactttggcaatattatatcagtatcattatccgtttggtctggaacgacagccgaagcaactaaagacctcggattttgacggtaaggtaatattctccaacgatccagaaacagcgactgtgccaccggcattttttacggtacaaaccatacaagagttgaaagcgcttggcggtgtacctgacagtgagtatggccctggaaaaatggaaccccatcatccgttaccggagccgttttctgctgaacgactggcaaatgtcactggtaatcatattgatctgtgcaaagcttttagggcctatatctatagtgattctgctttagtcaaagattatgaagaaatacttaatgctaagcgcttcccgatgaaggttgcgttatacagtggcgagaaaatgactatctcctccgataatccattggttgttgaagataaagatgattatggtgaaccggttgtcttggtgtatgagcagataatcattgaaccgggaggtcaaattatttaccgcactaatggtcgaatcgaagctaacactattgtagggaatgaaaatactggaaaggagaatgttgtcaatagaggcagtaatggcgtcgatggtcttgatggtgcgccaggaaatcaaggggctaatggcagtgatggtaaagatggtaaagatagtaaaaatggctgcttaattagcgccacatcaggtactgatggagccagcggttctgtcggaggattagggggggatggtgcagcagctggaaatgcgaatgacctgactgttactactagtcaatcttttactggaacagtaaatgcggcaacgataggtggtaacggtggtaacggtggaagaggcggtcttggggggcgtgggggtaatggggggaatgggggtaattggggcaatggaacaatcaagtggtgtcctgctggggcggcagggaatgggggcactggaggaaatggaggcaatggaggcagggggggtaaaggtggggacagtggtaacatatatattaattactctgacggtagtccagtacttcaggttgtgtcaattaatggtcttggtggggaaggtgggaaggccggttggggaggaatagggggtgaacctggaaatagtaccagagtactcggtgtacatggtttgcagggggactatggtaaagatggtcttaaaggagaatttggagatgacggtaacaccggcaagatatatgtcaacggtcatgaacgggaatctgatcggaaacttaatcgctagtggtgccgcaatcagacgggtctgaacgacgataaataaggggaaatgggggcagatcttggttttgcttatgttcaagtggtttacattatgaattactgaatacttattggggctggccttgctggttggcttcgttttttgccactcaggttttacaagtgtgctgagtatgaatccgattttgcattggttcctgggtaaattaatggcgattgttatcggcatggcaatagtgcctgttgctcaatgtgatttttgaagaatataatcatgattatattcttttatttgtattttctaataatacctaatgagacaaatataaaattgaagcatttagtcagtacttattaaaaggttgtgatgtatcacggaaatattctccttaattaatgaaaaaagtgggaaattacattaatattttaaattgtgtcatttaaatatcgcattcaatcgctttctgtaacgtggataaatacttgcctaattgattcttatagaaattatttttctggcatacccgttgttgaaatgcgtatataccctatggatttcaaaatgcatcgcgacggcaaaggagtgaatccccgggagcatagataacgatgtgaccggggtgagagagtgcagccaactgaaagatgacgggtataaatttaaattctggagaatatctatggataaaataagaacggttgctgaaactttggcaatattacatcagaatcatcatctgattggtgtagaacggcagccaaagcaacttaagacctcggattttgacggtaaggtaatattctctaacgatccgaagacagcgactgtgccacctgcattttttacggtacaaaccatacaagagttgaaggcactcggcggtatacctgacagtgagtatggccctggcaaaatggaacctcatcatccgttacctgaaccattttctgctgaacgactggcaaatgtcacgggttatcatattgatttgtgtaaagcttttagggcctatatgtatagtaattctgctttagtcaaagattatgaggaaatgcttaatgctaagcgtttcccaataaagattgcgttatacattggcgaaagaatcactgttaccgcagatgcaccattgcttgttgaagataaagatgattatggcgaacccgttgtcttggtatatgaccagataatcattgaaccgggaggtcaaattatttaccgcactaatggtaagatcgaagctaatactattgtagggaacagcaataatgataaaaagcagagcattatcagtaaaggctctgatggaggcgatggttttgagggtgaacagggaagtaatggggttaatggcagcaatggtaatattggttcagagaataaacatggttgctctgttaaatccacaccaggtactgatgcaactggcggttcttcgggagcaccagggatggatggcaaaagaggtggcagtgcaaatgacgtaattattaatgttgacatttttactggagtagtcaatgcggcatcgataggtggtaagggtggaaagggtggatatggcggtaatggcgggaatggagggaatggtggaaatggaggagctgcaacaaacaaatgtagtgctggatatggaggaaggggaggggatggcggtaatggaggagatggcggtaatgggggtaacggtggggacagtggtaacatatatattaatttcactcagggtcagccagtaattaatgctctgtcatatagaggagatggcggtaatggagggggcggtggtaagggaggaataggcggagtaggtggtgttggtagtagaggattaaatgctaatagttatcttggagtgtctggtgaagcgggtaatgatggagaatccggcaatgcagggacttctggcaagatatatgttaacggtaatgcacggcagcatagtgataatcagactttagactggcttgaagactataaataagctgaagtatagcaactgaccgcctctcctgaaaaattcacttattagttgaatccagcttgcataattggtggtcttatttttctgtgccagcaatatttaattgtatacccgttatccttcaagttgcctctttgttggctgcgctcgctcaccccggtcacatcgttatctatgctcccggggattcactcccttgccgtcgcgatgcatcttgaaatccatagggtatatacccgtactcattgaagatgcttgattttacccgaaatggagatcattattctcgccatgaaaatatttattatatcagaacaaaaaatcaaatttgaacgtcttcacgacataactcgtgatggtcaagaatgtagcgtatttaaaggttgagtttattcgtggaaaaatcctcttctggtaaagagagttattttctacttttaatttaaattatattcataatttcattattcaataatatctatgggtttatatcttatggttatttttgaaaatacaattatacttgttgtttttatttgtattttataataatacttcatgagataagtataaaattgaaatttaattagtatctattaaaaggtagtgacgtatcacagaaatattttccataattaatggaaaaaatgagaaatgacgggtatagatggagggataggaaaccctggagagcgaacaggaaatgtagggcagatagatgttaacggcgaattgcaagagtgtgattaaagaaagtctatttccatttcctaaacacaaactatttggaaacgagtagattaagaatagtgagattatcggggtgaaatctaaggtttttcatcaaaacgactgtcgttctgtcgttaattcagtgcaccatagggttaatgtgtgcactgaatttgtagtgtaaaattttcgagaaaaattatttcagccaacctttcttctgtgcagtttccaattgtggcagcagatattgccacaattcaggataggtattggcaataaatttattgcggttaatcacctgctcaaaacgaatattattttctacccaactctgtcctttattatgcagattcatcagaatcggcattagtctatccagtgtaatggcgaaacgggcgtcttggctttctcctgcttcatactcttgccaaagtgacataaaatgatttttctgtggttcggggagtaaaccaaaaagacggttggcggctttaacttcttgttcatgaatagcttcacgagccgtcaaatcgtaaaccatcacatcaccagcatcaatttctacgatatcgtgaattaatgccatctggataactcgttggatatctacttcttgtgcatatggcgcaaaactcattgcggcgatagctaaatgccagctatgttcggctgaattttcctgacgatggttatccagtaacttaattcgccgctgaactttctttaacttatccaactccattaaaaaaccgacgatattggtaaaggggccaaaatcaacgacagatactgctaacgacatacaaacctcatctatttttcttcgttgagagaataaggcagaggctgaatagtgagggaatgcccttcatcgtcacggacgcggaatacactatgactttccatatcattattcatgacgacttgtatccagacattatcattattcaacttaacggcagccaaaacggtacccgttctccgccacttatctcctaattgccattctaaatcatctccggccatcggaattttagaggcactgccagccagccagtacatgccacgtttatttgctccgcggtatttagcacgggctaccatttcctgaccggtataacacccttttttaaagcatacccctcccgccaatgcctgaaggttagttgcttggggaataaattgtgtactatttgcggcatcaatgattgggaagccagcttcaatatccagagctaaccactgttcactgttattaagctgagcttgaagtttttctgttaactgttcagcggttgcggtgtttgttaccagaaggaaacgttcagacggcaaggaaaaatggagtagtgtggtggcttcatgtgcaacgacagcgttatccgcatccggcaaggttgggaagaagctgcttaatgcttgccggcagtttttacctgcaacaccgagcagtagcgcgttctcatcctgagcaagagcaattttggagaatacggcatatttttttaattctgtaagctgattttccagcacactgcgacgttcaatataagcaaagctttcaccacgatggaagaggcgcagattactccacattttgccttttgcgtcacaatgcgcactaagcacatgctgattcgttgcaagtgcggaaatatctgctgtaacctgaccttgtagatatttttctgtatccggtccagttgcggttaccaggccccagtcatctagtgatattaatgtcaggggaagggtcgatgaagacaatggaaattgtgaagagaacggagttttataagccatgacacatcctgccagtcagatatttgagccaatgatgcataatggtaaaagagctgaagcacaatgcaagtagttattattgctattagctggcatgatgcatgagtttgccgggcgacttaaatggctaatagcgttaaaactaacaatgagaattaaaaaggggattttttgaacatggatattgataataaagcgcgtattcattgggcatgtcggcgtggaatgcgtgagctggatatttcaattatgccgttttttaagtatgaatatgactcactcagtgatgatgataaacgactttttattcgcttacttgcatgtgctgatcctgatctattcaactggctaatgaatcatgggcgtccagaagatgaagagttatttcgcatgattaaacttattcagaatagaaataaagatcgtggtcctgtggaagtgtgatctcagggtatcttggcatacccagctaatttctacctgtgttcatggtgcaatagcgcttatcgtactatttgctccgtggcctgcggatgacgctattttctggattttctggcttcctttggtactgttgattattgccagttgggggcgtagccagaaaaatatccgtaaatctcaagggcttttagttcttctcagtgataataagttgcaatggaagaagcatgagtggcaaattatccggcggccgtggttgtgtcgttatggcgtattaattacggctcaatctttttataaccagaaaaaaatccgtttatgggtcgcatccgatggtatgccacaggatgaatggaggaatattaatcaactgttgttgcaatatcctgatatctgattgagctggaattttcctgagttaaagtagaggctccatttcttgcaggatttgcatacaccattgcgataaacgatcatcagtttgttcatactggtttacgtcatctaaagccagcccgacaaattgtgagccattatccgttaatggtttcgggctggtaaactcatagctttcagttggccagaagccaataaaatgcacgcctgaagggcgtaaatggtgatatagcataccgagagcgtcgaggaaccaatcgctgtaatcaatttgatcccccataccatacatggcgacaattttcccttgtaaattgagggaagggatttgatcccaaataaccagccaatcttcctgcaattcgccaaaatcccatgttgggatgccgagaatcaggacagaatacgtttccattaatttaggtgctgtctctttgatattgtgaagatcaattaaatcttcgccaaggatatcgcggattttctctgctaccatctcggtgtagcaggtgcttgagccgtaaaaaagaccaatcttcatcattaatcattatggtttttgaatatctggattggcattgtaacagaataattgctttttcaggcataatagccggcagagatgtacagatttaaggaaagtaattcatgtcaaaacaaccaactcagttgactaatccactgatagaacaatttcttgatgctatctggttagaacatgatcttgcggaaaatacgcttgcttcttatcggttggatttgcaggcattggataactggttgatacatcatggtcataatttattatctgtccagacgatagatttgcactcttttctggcagaacgcgtggatggaggatataaagccagtagttcggcgcgtttactcagtgccatgcgccaattgtttctctatttttatcgggaaaaaatgcgggaagatgatccgacagcacttttgtctgcaccgaaattaccaaagcgattgcccaaagatttaagtgaaaagcaggtagaagatctactcaatgcgccctgtacagatcagccagtggaattaagggataaagccatgcttgaagtgctttatgcctgtggtttgcgggtatctgagttagtgggattgacactttccgatgtcagtttgcgtcaaggcgtggtgagagtgattggtaaagggaataaagaacggctagtgcctttaggggaagaagcaatttattggctagagaattatctggaatatgggagagttgggctgttaaatggtgcaacgttggatgtcctttttcctagcaaccgagggcgacaaatgacccgacagacattttggtatcgtattaaacattatgcgctgttggctggaatcgatactggacggttatctcctcatgttttacgtcatgcatttgccacgcatttgctaaatcatggcgctgatttgcgagttgtgcagatgttattggggcatagtgatctatctacaacacaaatatatactcatgtagcaacagaacggctcaaattgctacatcaacaacatcatccgcgagggtgagcacggatttaaaggaactgaaaatgaaaaaaagcgtgttatgtttccctcttttgctggcctggtttagtggaaatgcgcttgctgatgatggtgctgtccatagaataatgcaaaaactagggataaaagcagaaagcatccagccatcacctatcgttggtttaaatacggtagtgactgagcaaggtatcatttatctatctgatgacgggaaatatttattacaagggccaatttatgatgttagtggtagcgctcctgtgaatgtcagtaatcaattattgatgaaaaagctggaagcaatgagagatcaaatgatcatctacaaggcgccagaagagaagcatgtcgttaccgttttcacggatattacctgtggttactgccataaattgcatgaaaacatgaaagagtacaataaactgggtattactgtgcgctatttggcattccctcgtcagggtatgcagcaccaatctgctaaagatatgcaatctatctggtgtagtgcaacaccgcagaaatcattagatgctgcgtttaaaaatgaagatgtttcgccaattaagagctgtaaggtggatattgctaaccagtacaaattaggtctccagtttggtgtgcagggaacgccggcaattgtccttaaggatggcagcctgttaggtggatatatgccaccagaggctttggcagcggcactggcgcaacgtggtaaatcagtttagtgaatattgaaacacaacttcgccgccgcttggcggtgaatgacagtcaccttccacaacagattcatccactactgcgtcgcttatatgccattcgtggtatccagcaagctaatgaattggagcgtggtgttcaaggattattgaattatcagcatctaagtggtgtggaacaggcggtggcactcttgttgactgcacttcatgaacactggcgtatcgttattgtcggtgattttgatgctgatggggccaccagcacggcattggcgatccgatcattacgctcgatgggatatcgccatctggattatctggtaccaaatcgttttgacaatggttatggtttaagctcacaggtggtagaagaggtcgttaaaaaaggcgctgacctgattattaccgtggataatggtatctcttcccatgaaggggttgcggctgcccatcagcaccgtatgaaagtgattgtcacggatcatcacttgccgggtgacgttttgccggcggctgatgccattattaatcctaatcttgccgattgttcgttcccgtcgaaatcattggccggggtgggtgtcacattttatctgatgtctgccttaagggcggcactgagaaaagatcaatggtttgaaaagcaaggaatagcgctgccgaatctggccgaaatgttggatttggttgcgttaggaactgttgccgatgttgtacctttagataccaataaccggattctggtttatcagggcttgaaccgaattcgtgcaggacgctgttgtgcggggatacgtgcattattggaagtttccagccgtgatgcttataagctgacagccagcgatttggggttttttctgggaccaagactgaatgccgctggtcgccttgatgatatgtccattggcgtcacgttattgctcactgacgacatagcaaaggcgcgtcagatagcttgtgaattggacagtcttaaccagactcggcgtgaaatagagcagggaatgcagcaggaagcactgcaaatctgtgacaaacttgaacgtaccagcactgaactgccttatgggctagcgctctatcatccagaatggcatcaaggggtagtcggaattttggcttcccggattaaagagcgttttcatcggcctgttatcgcatttgcaccggccggtgacggtattttgaaaggttctggtcgttcagtgcagggattgcatatgcgggatgcgcttgagcggcttgatactttgcatccgggtttgatacttaaatttggtggtcatgcaatggcggccggtttgtcacttgaacaggataaattcgaacaatttcagtatcacttttctacgctaatggcggattggttagatatttcgcaacttgaaggtgttatctggagtgatggtgaattagcaattaatgaactgtcattggacattgcagaaatgttgcgtgatggcggtccttggggtcaggcattcccggaaccaatttttgacggtaaattcaaactactgcaacagcgcattgttggagagcgccatttaaaagtgatagtagagccattaaacggtgggccgatgctggatggtattgcgttcaatatcgatcctacccgctggcccgataacagtgtccgcgaagtagaacttgcctataaactggatgttaatgaatttcgtggcaaccgtaatgtacagcttttgatccaacatctctggccctattaaccgtttgatcggcaggtagtcagtcattgtcacgtactctcgtatgaatacgtgacaaatctgttgaagtgctataaaccctgtgccgaatccgttacaatacgcggttcgaaaattatccatttatctacgactacataacgtaagacacgaaaatatgtttgaaattaatccggtaaaaaaccacattcaggacctgtctgagcggacaacggttctgagggggtatctttgactacgatgtcaaaaaagagcgcttagaagaagttaatgctgaattagaacagcctgatgtttggaatgaaccggagcgggcacaggctttgggtaaagaacgctcctcattagaagagattgtcgaaacaattgatcagcttgagcagggactggaagatgtacaaggtttactggaactggcagtagaagctgacgatgaagagacttttaatgaagctgtggtagagctggagcagcttgaagaaaaattgggtcagttagaatttcgccgtatgttttctggtgagtacgacagtgctgactgttatcttgatttgcaggcaggctctggtggcaccgaggctcaagattgggcaagtatgctgatgcgtatgtatctgcgttgggctgaatccaaaggctttaaaacggaaatcattgaagaatcagatggtgaagttgctggcttgaaatcagcgaccattaagatcatgggcgattatgcttatggttggttgcgtactgaaaccggtgttcaccgcttggtacgtaaaagcccatttgattctggtggtcgtcgccatacttcattcagttctgctttcatctatcccgaagtggatgatgatattgatattgaaattaatccggcagacttacgtattgatgtttatcgcgcgtctggtgcgggtggtcagcacgttaacaaaacagaatctgcggtgcgtattacccatattccaaccaacattgtgactcagtgtcagaatgatcgttctcagcataaaaacaaagaccaggcgatgaaacagctaaaagcgaagctgtatgaactggaaatgcagaaaaagaacgccaataaacaggaaatggaagagaataaatccgatattggttggggtagtcaaattcgctcttatgttctggatgactcacgcatcaaagacttgcgcaccggcgttgaaactcgcaatacacaatcggtgctggatggtgatctcgataaattcattgaagcaagcctgaaagctggcttatgaggaactaaaatgtcacaacaacaacagggtgcggaacaggcccccgatttaaataatgagctgcaaactcgccgcgaaaaacttgccgctttacgggagaatggaattgcattcccgaatgatttccgtcgtgaaaatatttcagaagatttgcacgcgaaatacgacgacaaaactcaggaagagctggaagcactgaatattgacgtgacggttggcggtcgtatgatgacgcgtcgcattatgggtaaggcttctttcgtaacgctacaggatatgggcggtcgtattcagttatatgttgcccgtgacgatctgccggaaggtatttataacgaacagtttaaaaaatgggatctgggagacattctgggggctcgtggcaaactgtttaaaaccaaaaccggtgaactttccattcactgtactgaactgcgcctgctgacaaaagcgctgcgtccattgccggataaattccacggcttggctgatcaggaaactcgctatcgccagcgttatctggatctgatcgccaacgaagaatcgcgcaaaactttccaaattcgctctcaagtcttattggccctgcgtagctttatggtcagtaaaggctttatggaagtggaaacacccatgatgcaggtaatccctggtggtgcggcggctcgtccatttattactcaccataatgcgctggatattgatatgtatctgcgtattgcgccggaactttacctgaaacgtctggttgttggtggttttgaacgtgtctttgaaattaaccgcaacttccgtaacgaaggcgtatctccgcgccataaccctgagttcaccatgatggaactctacatggcctatgcggattacaaagatctgattgtcctgatagaagagctattccgtacactgacgcagaatattttggggaatactctggttaaatatggtgagcaggaattcgatttcggtaaaccatttgcccaaatgaccatgaaagaggccatttgcaaatatcgtcctgaaaccaacatagctgatttggatgatatggataaggtggtggctatcgctgaatctcttggtattgaagtggaaaaaggttggggccttggtcgtgttcagtgtgaaatttttgaagaaacggcggaaagccacctgattcaaccgacatttatcactgaatatccggcagaagtttctccgctagcgcgtcgtaatgatgcaaatccgtttatcactgaccgttttgaattctttattggtggacgtgagattggtaatggcttctcggaattgaatgatgccgaagatcaggcggaacgttttgctgagcaggttcgtcagaaagacgaaggtgatgacgaagccatgttctacgatgaagattatgtaacggctttggaacacggtatgccgccaaccgccggtttgggcattggtattgaccgtatgataatgttgttgacagatagccataccatccgtgatgttattctgttcccggcaatgcgcccgcagaaataaccgtttgaattaaatttcaaattcaaactcctctatagcatagctgtcaggggagtttttattttcaactgcctgaaatatagacaacttaagcagataatggcttgctgatgctaacgaagtcgctataataatttatgttatccttaagcgagcgtagttcaatggcagaacgagagcttcccaagctctatacgagggttcgattcccttcgctcgctccagttttgtattctttctagaaaatgctgtcgcattgaaaatataccttttgatatgatgtaaattaaatcaaaagaatttacgtataataatcgatataaattaataactaactcattgtctaatatgaaaagaatcccgttattaaatcaaccccgaatcagctaggcgtgatgtatttttgaatgcggatacatcaccatagaaagcattctatggtaaatgaataattaatagagacagactatttaccatgaaagaaaaacattggtcaaaaattcaattcctacatgaagctgtaactaatcagagtattgtcatcaaaggaacccatagctattatagcgattgctggagtggcggttttgaagaatctgtcgttcgctatttatacggtgataaaatcagtcttcaatgggagtctaagtggccaattgataaattgtatattggcgattatgtttgcataggtgctgaaactatcattcttatgggtggaaataatacgcacagagcggattggttctgtttatatccattcatggaatacatcgaagaggcatacgtaggcaaaggtgacacgcatattcatgatggcgtatggcttggcatgcgttcaatgattatgcctggcgttactattggtgaaggcgctatcgttgctgctaatagcgttgtcactaaagatgttgagccatatagtattgttgctggaacgcctgctaaattagttaaatatcgctttgcgccgcacattatcaatgagctacttgcgttaaaaatatatgattggtcagaagagaaatttaatgctttaaaaccctatctctgtgcttcggatattagggcattaaaatctgctgtaagatcatattaagagaaacagttaattaattccgtaaaataattaattaggcttgattcgattaattaagtgtattttttaaaaatgttctattgctgaattatttaaccgaagttcattaattgttagcttaaataccgtttcggcattcaagccgcaaacggtatttatttaatattccttcaatataaaagaaaatatgctactatcctcttatgaaaagaaaaaatacaccgacgccacatgatgctatttttaaaaagtttttaagtcatattgatactgccagggattttctagagatacacttacctgccacattacgggcagtttgtgatcttgatacactgcgactggaatcggggtcatttattgaggacaatctgcgggtacattattccgacatcttgtattcactaaaaactacgcagggtgagagttatgtgtattgtgtgattgaacatcagagttccccggataagatgatggcattccggctgatgcgttacagtatttcagccatgcaatggcatttggagcagggacataaaaaattgccgctggtcattccagtgttgttttatcacggaaaaatacggccatatccgtggagtaccaactggttcgattgcttcgatgcttcggctctggcagaagagatctattccagcgcgtttccgttggtagatgtgacggtaatcccggatgatgaaatcctgacgcacaaacgagttgcactactggaaatagtacaaaaacatatccggcaacgtgatatggcggagttacagcaagagctgaccatgttgtttgcgtatgattattatacatatgagctgctaaaaagcatgctaaactacatattactggtgggagataccgccgatccagaaggttttatccggcaactggcagaacagttcccgaagtatgaggaggtactgatgacaatagcgcagaagttgcaacataaaggacatcaagaagggcttaaggaagggcttcaaaaatgtcaagacgcacgcgaagaagggcttcaagaaggattacagaaaggtgaaaaaaaaggtgaaaagaaaggtgaaaagaaaggtgaagagaaaggtgaaaaacgggcgagtctgaaaatcgcgcgtgcattgatggataatggtatcgatcgtgaaacgataatgaaaagtacagggttgagccagaacgaacttgaacaaatacatcactgattcgtgctgagagccgtaatcggtatttaaagattcgtgttagaagaggggcttgtccagcgagtaacgggaccgccccctagaaatatgaggaggtaattggtgacaatagcgcaaaaactggagcagaaagcgttccaagaaggatatcaagaagcatgccgaaaagcatgccgaaaagcatatcgagaagcatatcgagaaggatacagaaaaggattacagataggtagaaaactggcgcttgtgaaaatcgtgtatgcaatgatagacaatggtatagaccatgaaacgataattaaaatcattgtgatgagccggaataagattgaacaaatagccgattaacttatgctgacactttattggcatgaaaattcgtgtaaataagtgggcaaaactttacatagaagcggtatattatttggataagtttgaaatcatactttttctgtcgggtattaagctttttaattgaaatagtatttgaataattaaagaatattcctcaaatagaatattcgaaacatcgtaatccgataaattttctcttggaagcggcaaccggattggttgcctataccgtttaatctaaaaaaacaaatctggatttatgcacctatgaattagtcgttcttggaacagaaagtattgccgttattggtaaacgatcgatcgctgaaataaatctgtttaagttgttggcaaagctaaaacagattaattaagccatcatacgaaaatagattcagtagatatctgatattcttttggcgcttttaattaagatttctttgtaatcaggcgtctgtttttccacattggaaaatatagcttgaagagtggcatgagttatttctttgtcggcgaattctggcatgccgctattgaacgggggttctgggctatattgcatcgctagttggactgcttgggcatattcttcacctttgatttcagcaagcaatgttaaaccgaaatcaatacctgcggtgactccacctcctgtgacccggtttctatcgataacgactcttttattaaccggtattgcatcgaatttgttgagatcgtctatcatcgaccaatgagtcgccgcttgatacccttttagcaagcctgcggcccctaacaggatagatcctgtacacacgctggtgacccaagatgctttacttcccactttatgtatccaatcaagcatgtctaattcggcaagcaaagcataaggatttcctgtaccgggaacacacaaaatatccactttatttaattgctcaaatgtagtgctcggtgaaaatgatatatgtgccagctcagtacgcaccggaagtaaatcgcgccagacatattcaatatttaaccatcctcccactccaagaactgtcgcgggaccaatcatatcaagtggtgtcatgcctgggaaaatgacaaaagcgagagtgggtttttctccagatgatgcatttattaacgaagataatgccgcaggatgttccttagatgtgtttttcatggagaagttttccttattgagattgagattgagaagtgaactgaaattcatatgctgctatttttagcgatcgctgaacatctgtattcccggtagtaaattgatatacccgtcatctttcaagttgcctctttgttggctgcactcgctcaccccgatcacatagtttgctatgctcccggggattcactcctttgccgtcgcgatgcatcttgaaatccatagggtatggaataactgtaaccgttaactaattggcgtatatgccaatattgcgacgatttacgccaagtgccataattgccttatgaacattaaaactctctattttctgatcttccccaatgtcaatttgctggacctttcagggccattgcaggtctttaccacagctaatgagctagcagagaagtttggtcacagacggccctacgctataaaagttgtggcttgtgatcccggacaggtaatgacgcaggctggaataactgtgcaggcagaacctctacctaagttggattctcccgccgatactctgattgttgcagggggcattggcgttgagtcagcggcgaaccatccgccattgcgtaattggttaaagggacatgcgtcgctggctaggcgtattgtgtctgtatgcagtggggcattcattctggctgcttgcgggttgcttgatggccgtagagtcgttacacactggagtagctgtgccgaactggcccggcgttacagtaaattgcgggtagaatgtgatcctatctttattcaggatggtccggtgtggacttctgctggtgtcaccgccggaatcgacttggctctagcattgctggaggaagatttcggtcataaactggcgctggatgttgcgcgggatctcgttatgtttctcaaacgtcccggtggacaggaacagtttagtgctccactggcattgcaaagcagtacgagtaaatttgcagatctgcacgcttggatgactaacaatttggcgggagatctttcagtggcaactttggccactcgtgccaatatgagtgagcgtagctttgtacgtcactacagccaacatgcagggattacgccagccaaagcggtggagcgattccgcttagaagcggcgcgtcatcttttggttgaatctactctgtcgctcaagtgcatagcctcccgttgcggtttcggctgtgaagatactttacgccgtagtttcttccgggcgttcagtagcactccacaggactaccgtaagcacttcaagacgacattttagctatttattctctttattctctttctcttgctatctccttcttcaatcgtcgccataacgtagtacggctaatccccagatattccgcggttgcatggtgattgccagaaaaccgtttcaaggtttcatgaactgaaagtggtacaacaagtgaagattgttgaattgaagaaggggaagacttcatactttgttccgcctgcttgagtatagattggcgttccggtgaaagcgccaatatcaattctggtgttaagatatgctctggatgagcactgaggtataacgtgagccgttccataagattacgtagttcccggacattgccgggccaatgataggcttgcaatgcctcctgacaggtagcaagctcttgcactcttgattgtgataccggcaaatttaatgcagcaaatgctcgtcgcagatattccagcgctaatataccaatatcgtgacctctttctctgagggctggaatgttgatccgcaatacactcagacgatagaacaagtctgttcgaaaacgcccgtcttgaacccaggtatccaaatcgcaatgtgtggcgcaaattatccgaacatcaacagcaatggggcggtgtcctcctactctgacaacggatttttcttccaatacccgcaatagccgtgtttgaaggggcagtggcatctcaccaatttcatccaaaaatagcgtgcctcgatgtgcaacttcaaaaagacccgcacgccctccacgtcgtgaaccggtgaaagccccttcctcataaccaaacaattcagcttccaatagggattcagcaatggcaccgcagttaacggcgacaaacggacgttgatgtttacccgcaacctgaccataccgcagggcatattcatggtgaatggcttgtgctactagctccttccctgtgccactttccccctgtatcagcactgtggcaggcgaacgggcatatagcataatagtgttgcgcacatgttccatcactgctgaatctccccggatatcattgagagtatggcgggtacgtaaattgttctcggttggataggcagaaattgaagcttggctgagcgtggtcattctggcgatatccagtgcatcatggaatgcctggcgaatagaatcagcagagtagacaaaaacacctaccaattcagcctcataggcgaggtcggtaattaacccggcaccgacaatcactttaatgccaatggcttttagtgcattgacttgggcccgtgcatcttcttccgttacgtaactgcgttgttcaatacgcaggttgaaccgttgttgaaattcttctagcgcaggtaatgtattttgataggtgataacaccaatacgggagctgatttgtcgtgcacgggccaatgcttgcataaaatcaaatccactggctttggcaataataacgggcactgacaaacgacttttaagataagctccgttggaaccggcacagagcacggcatcacaacattcagttgttaaccgttgacgaatatgctgaaccgcattttcaaacccaagttggataggtgtgatattggcctgatgatcgaactctggtgtgatatcacggaagagatcaaaaagacgggaaacagagactgtccaaatgaccggtttatcacggttatcacgttctgctgatggtgtttctgccatgctattccctatctgtacgctttgtacgctgttttcgtttttcttagctgaactttattcgcttttcccaccacaataattcaatgtttcgcaattgtttcattcatgtttcatgaaacgtaattgattcattatggaacagatgagtttttctatcaatggtactttcctacaagctaataaatatttttagtgctattttttaatttaaaaacaatcatatatatttttatggtgtttgttttttaaagtcattagctattttttactttattggtacgtatgttgctaggtaacaaatgtgtttcattataataacaatgaggtcttatatgactctttcctctgccggtttggcatttcgtcgggctatagacgctgagtccccgttacaggttgtcggtaccattaatgcgaatcatgcgttgctggcaaaacgggcgggctataaagctatctatctttctggtggcggtgtatcggcgggttcattgggtatgcctgatctgggaatttcaacgctggatgatgtgttaacagatattcatcgtattacggacgtatgcgatttgccattgttggtggatgcggatatcggttttggttcttctgcctttaatgtggctcgcactgtgcgttccatgattaaagcgggagcggcggggctgcatattgaagatcaggttggtgcgaagcgctgcggtcatcgtccgaataaagagattgtatccaaagaggaaatggttgatcgcatcaaggccgctgtcgatgcccgtactgataagcattttatcattatggctcgtactgatgctttggctgttgaaggatttgcagcggcccttgatcgggcaaaagcctatatcgaagctggggcagacatgctgtttcctgaggcgatcaccgaattacatatgtataaagcatttgcgtcaacaaccggggttcctgtattagccaatataactgaatttggggcgactccacttttcacaactgaagagttgaaaagtgcggatgtctctattgcgctttacccactttctgctttccgtgcgatgaataaggccgccgagcaggtttacatcacacttcgccgcgaagggacacagaagagtgtgatcagcatgatgcagactcgcaacgagttatacgaaagcatcaactactacgattttgaacaaaaactggatctgcttttctcccagaaaaaatctcaatgacggacatccccacctaatttcgtcgttttatatggcataaaaaccgtagaggtgatacccatgagcgaacagaacacgatgactgagttaaccactttcaagcctaaaaaatctgtagccctttctggcgtcagtgcgggtaacacggcactttgtaccgttggaaaaaccggtaatgatctccactaccgtggttacgatattcttgatcttgcaacccagtgtgaattcgaagaagttgcatacctattggtccacgaaaaattgccttctcgtgctgaattggctgcctataaagcgaaattaaccgcactgcgaggtctgccgggtagcgtaaaggcagcactggaaacattacccgccgccgcccatcctatggatgttatgcgtactggagtctccgttctgggttgtacattgcctgagaaagacgatcacaacctcgcgggagcgcgtgatattgctgacagattactagcctctctcagctccatattgctctattggtatcactatagccacaatgggcggcgcattgaggtggaaactgatgatgtgtcgataggcgggcattttctgcacctcctgcatggtaaaaaaacctgtgaatcgtgggaaaaggccatgcatacctccctaatcctttatgcggaacacgaatttaatgcctcgacatttaccagtcgggttattgcaggaacgggtacggatatctactccgccatcatcggggcgattggtgcactgagagggccaaaacacggtggagcaaacgaagtctcttttgaaattcaacagcgctatgaaaatcctgatgaagcagagcgtgatattctggcgcgtttggcgagaaaagaggtcattattggctttggtcatccggtttacactatttctgatccccgtcacaaagtgattaaagatgtggccctgcaactttctaaagaggcaggaaccaccaaaatgtttaatattgcggatcgactagaagcggtgatgtgggccaacaaaaaaatgttcccgaatcttgattggttctcagcggtttcctatcacatgatgggcgtgccaacggcgatgtttacaccgttgtttgtgattgcccgcacagcggggtgggctgctcacatcattgaacagcgtattgataacaaaattattcgcccttcagccgactataccgggccagaaaatcgagtatttacgccaataggtaaacgtgggtaacgctatttttgatgcagagattcctgcatgagtgttttttaacaaggaattattatgtctacctctgttgcaagcaatcatcctgaatatgatcaggttattgcggatattgtggattatgttatggaatacgccatcacatcatccgtcgcctatgaaacggcttattactgttttctggatacgttgggttgtgggttagaggcactggaatacccggcctgcaagaaattactagggccgattgtgccggggacagtggtccctaatggcgtgcgggtgccgggaacccagtttcaactcgatccggtacaggcggcatttaacattggtacgatgatccgctggctagattttaatgacacatggcttgccgctgaatgggggcatccatccgataacctcggtggcatcttagcagtggctgactggctatcaagaaatgccgttgctggtgggaaaaagccgcttacgatcaaagatgttttgacggggatggttaaagcgcatgaaattcagggatgtcttgcactggagaatgcattcaataaagtcggtttagatcatgtcgtgctggtaaaagtggcttcgaccgctgttgttgctgaaatgttgggattgaatcgggaagagatcttgagcgcggtatcgctagcttgggttgatggtcaatcattgcgaacttaccgtcatgctcccaatactggctcacgtaaatcttgggctgccggtgatgcaacatcccgcgcggttcgcttggctttgatggcgcaaaagggtgaaatgggatatccctcggtattaactgcaaaaacgtggggattctatgatgtcctgttcaatggtcagccttttaaattccagcgtgcctatggcgcttatgtgatggaaaacgtgctgttcaagatcgctttcccggcagaatttcatgcgcaaactgcggtggaagcggcgatcagtctgcatcaacaattgaaagacgccggtaagactatcaatgacattacaaaaatcactattcgtacccatgaagcttgtatacggattatcgataaacaaagcccgttaaataatcctgcggaccgagaccactgtattcagtacatggtggcgattcctttaatctttggtcgtcttactgcggcggattatgaagatagcgttgcggcagatcctcgcattgatgcactgcgggaaaagatagtatgtattgaagatctggattttacccgtgattatcacgatccggaaaaacgttctattgctaacgcattaactgttacgtttacagatggcagccagctcgatgaagtcaaagttgaattccccatcggccatgctcgtcgccgtaaggaaggcattccattattgctgaaaaaatttagaaccaacctggcacgtcagttccctgaaacgcaacagaggagaatcctgtctgtttcccttgactgctcgttgttagaaagcatgccggtaaacgaatacctcgacttatacgttatctgaatttccaatattatcggcggctgctctcccaaagtgccgctctatcatctacggcagaacataggagagattatgtcattcaacgctttttatcagcagtccattgatgatcccaacgctttctgggctgagcaggcgcaacgtattttctggcaacatccttttgagcaagtgctggattatagcaatcctccttttgctcgttggttttgcgggggaaaaaccaacctatgctacaacgcgttggatcgctggctggaaagccagcctgatgctaaggcgctcatcactatctcaacagaaaccaatagtgagaaagtatttactttcaaagaattacatcaggaagtgaatcgagcggctgccatgatgctctctctgggcgttaaaaaaggcgacagagttttggtttatatgccgatgattgccgaagcattgtttgttttgctcgcttgtgcccgtattggtgccgttcactctgttgtctttggtggttttgcttctcagagccttgccacacggttggataatgctgaaccggtgttggtggtatctgctgatgggggagcgcgtggtggaaaaattattccttacaagccattgttagatgaagccatcgaactggcgaaccacaaaccccgccatgtattgatggttaatcgtggattggcagaaatggtttgggtaccggggagagatatcgatttcgcgacattgcggcagaagtactttgatgctgacattcccgtaacctggcttgaatcaaatgaaacctcctgtgtgctctatacttccggtacgacgggcacgccaaagggcgtgcagcgtgatgttggcggttatgctgtcgcattggcaacatctatggatatcatttttggtggtaaagcgggtgaggtattttttagcacctcagatattggctggatcgtcgggcattcttatattgcctatgctcctttaattgcaggaatggcgacgattatgtatgaggggctaccgatacggccagatgcgggtatttggtggaaaatagtggagaaatatcaagtaacgcggatgttttcagcgcctacagctattcgtgtactgaaaaaatatccaattgaatgtattggtaaatacgatatttcatcacttaagacattgtatttggcgggagaaccgcttgatgaacataccgcccgctggattgctgaggctatcaacgtccctgtcattgataattattggcagactgagaccggttggccaattatggctatcgcccgtacgctggatgaccggccgagtcgatttggcagtaccggcttcccgatgtatggctttcatgtcaagctcatcaatgaactgactggagaggcgtgtggtgataacgaaaaaggtatgctcgtgattgaaggacctttgccaccgggttgtattcaaactatctatggtgatgatacccgttttatcaatacctattggcgacactttgagcatgctgtttattccacattcgattggggtatccgtgatagtgacggctattattttattttggggcgttcggatgatgtgattaatgtggccgggcatcgtctgggaacgcgggagatagaagagtgtattgccagccatgaagatgttgccgaagtggctgtgattggtattaaggatgccatcaaggggcaagtcgcggttgcttttgctgtcctcaaggatgggaaggagatccagaatgccgagcattttgctgctttggaaaaggttttgatggggttggtcaataaacagattggtagtgtgggccgcccggcacggatttattttgtctctcagcttcccaagacgcgttcaggaaaaatgctacgtcgaaccatgcaggcaatatgtgaagggcgtgaacctggcgatctttccttgattgaaaatcctgcctcattagacgtcattcgagaagctgttttttgctaactgattaatatttattatgtttaatgagggggtgataagaaaatccgaactcttactgtcgctaaatgcataatagactctgttgtggttggcgtgtatatacccgtcccatagggtatataacgtctgctaattaactcccaaggataaataagagcaatgcttgtatgagttcgctgtttatttctggagggcaaataacggtagccaacttgttctatatatggtttaagttctgtaccagcagaaatagttttatcaattgatgttgacaggtaaaagcgattgttgtttagaggttcctgagatcgaaagcaggtaaggtttctttataatatattaaatttttctatttatttgattggtgtttgacttttatctgtgttaatgttcagtttatgttaacgttcattttattatctaaacataaaaaattgttataagctatgttttgctttcacatgggttggctagttattatttttcagcagtatattgaagcagagaattaaatattacgacgttaattgcctgtaatttaatcaagtgtataactgtagtagatttagctatattactattgaaaaaaatagatattaggaatatacagaactctgtgattagaaaaacattatacccaatagatttcaagatgcatcgcgacggcaagggagcgaatccccgggagcataggtaactatgtgactggggtgagggagtgcagccaacaaagaggcaacttgaaagatgacggatatatattaatgcaaatctttgcgacctgttatgaaataaaaaataccggtaacaatttcgaattataggtaataattactagtaacaattgtaggtaattattacggataacaattataggtagtggaaatagatttttttagaaaaatagatgagtgaataaaatagtgatgtgatgaagtgtgcttcaaacctgtatgtatcgggagaggctttagggttgtatggtatataccctatggatttcaagatgcatcgcggcggcaagggagagaatccccgggagcatagataactatgtgaccggggtgagcgagtgcagccaacaaagaagcaacttgaaagatgacgggtataaatcaatctggcttttatctggattactgtggagttattatggaaatagatgaaatatttaataattatgagtctaaagctcgctcatattgccgtagatttcccgtaatatttagaaatggtataggttctaccttaatcgatatagatggtaaaagttacattgattttttatgtggcgctggtgcgttgaactatggacataataatacaatcataaaacaacagattttcaagtatattcaagatgatggtattattatggggcttgatttgtactcggaagcaaagatggagtttatatcgacatttgttgataagattttgaaaccgagacagcttgaatatcgtttacaatttaccagtcctacgggcacgagtgtcattgaatctgcggtaaaattagcaagaaagtatacaaaaagagaaaatattgtttgttttaccaacgcctttcacggtatgaccggagtgtcgctgagtttaaccggtagtcaacatcaccgccaacctgggttatattctcaaattacgcgcttaccatttgatggctatatcgacggagaatttgattatatagggtattttagaaagctacttactgattccagttcaggggttgatcttcccgctgcggtaattcttgagactgtacaaggagaaggcggattaaatgttgcttctgttgaatggttgagagcgttgagaaaacttacccaagaattcaacattctattaatcgttgatgatattcaatctggctgtggtcgtaccgggacattctttagttttgagcgtgcaagtattaaacctgacttagtttgtctttctaaatctattggcggtattgggctacctatgtctttattgcttatttctcccgatatcgatgtgtggaaaccggcggaagacaacggcacatttcgaggtaataacttagcatttgttgcttcaaaagcgatgttaaatgaatattggggcgatagctcttttcagaagataattgagcataaggctgaattaattcgagcgtacttggactctttggctaaagagtaccatgaatttgtactgcgagttaaggggattggattcatgcaaggtatagaaatggttgattcctcattaacacaatatttggtgaagcattgctttgaaaatggtttgattgtggagttgtgtggccccaatgatgaagtgttgaaattgatgcctgccttgactattgatgaagacacacttgtaaaaggattgaggattatagaacaggctctcgccagtttaaaatcgagaaatagtaataactgcgaaagtgaatttcaaagggtatcggctagcagcaattattagctaggagtgtagaattatgagccgtgtagtagaacttactaagtttaatcagcttgaatttcatcacacacttgctcggggatacgcaattgtttaccgaggtttattgcaagactggccagcgataaggcaatggaattctgaatactttcaagataagtttcctcaaattgatgttgtgatcaaattttttgatgcaaatggtgtgcgttttgagcaagccaagatgtatcgttatttagaaattctgcatgcatataaaaaaggagagatgggtaataatattccctattgtcatgacatccctatctttttacaagctcagcagttacttaatgacgttagtgattttccgctaactattttgccaaagctttatcgaaatgaatggtggaaatttgttcaattttttatgtctccagccggcgctataacgccactgcattttgatactttaagaacaaacaatctattttttcagataaaaggaagtaaaagattctcttttattccttgggaagaaagagcggcctgttctcgtcgagggtggcgctggtttgagtataatccagagattcaggatgttggtgagatagctaacataaacaaatccacgattgaggtgcatcaaggcgatatattaatcatgccggcgggtatgcttcatcatgtaagaacgttgactgatagcatttcttttaatatcgattttcatactcgatcttcagcccttgtaagttttaagagcattaaagaaaaaatgccgcgtgaaaatttgtattacaattggctaagtttatgtgggcttttgggattaatgaagcgcgaaagttttttcgagaagtaccgcccgtatcttaattatatttcttaaaaagtaagtaggttaattatgaaagtatcgttgattgatgtcgataaagacaactatgaggatgtgatgtctcttgaagtcgaacctggacaagaaggtttcgtcgcgccaaattcagagtcaattgtcgaatcacattttaatgaatattgtaggccaagagtgatctgttttggcgaggaaatagttggttttgcaatgtatgagcgttgcgttaatgaaggaaaacccaacgaatataatctgtatcgaatgatgattgataaatcttaccaaaacagaggtattggaagttcggcgatgcagttattactggatgaaatgaaacagcagcctgattgttacaggattactgtctgttatgacgaaactagtgaacgccataaatcattttatcaacgttttggttttgtagaagtcggttattatgaagagtatgaggaaatgctggctgaaattattgtcaggggatgattttaatgagcttgtaaataataaaaactaaaaatgacatctttcaaagggattgtagtatgcttctagataaagttgaaccgcttgttattccactaaatcaacagcaaaaggaaatttatcttgatcatataaatagagaggataccgcagcgttcaatataggtggttatgttgagattaagcaatctattaatataaagaatctcgaatgcgccataaaacacactatccaagaacatgctgtgcttcgatgttcaatagtagataagtactcaatgccgcatcatattgattcggatgcgttaaaagatacagttgagtttgctcatattgttcaagaccatcactttgaactgtctcatttagatctttcgggtgaagaagaggcggaatctaaagccttggctattgttcaacggatattctctgagccatttagattagcacaggatgtgctttatcgagtcggcttaattcaattggcgacaaatcgtttctggttatactttatttctcaccacatcatcattgatggtgtcggttatgctaactggtttcgacgtattttcgacgcctaccagcaattgagtttgggaaatgcgcctaaagaaaacacgggagtgcggtttcttgatcttgctgcgcaaccgttaccggagaattatagtcagcaattcgcaaaggcagctaaatactggaaagagttgctccatcatttgcctgatgtgcctttccaatgtcggaaagaaggccctggaactgccgactcaaggaaaaatagcaggcttgtacactttatcaaacctgatagatataaatcatttttaaccaaggcgagtcaatgcaatttacccatatcgccactttttattacagctattgcttctttagtcaaccgtatcaaccaaagtgatggggttcttatcgggacgcctttacataatcgtactacatcagctcaacgcaatatggttggttcgtttatatcgatgctaccggtaatgtgcgtacaaaatgagcagatgtcggtggctgaatcagtggcaatgacagcacgtactataaaaagtggctatcgttatcgctcttatccttcgagtgccttatataaagatttgtctttacgtgctcaaggtcgtgaacgtctttttgatattgtttttaactatcaacagattgattttgatttcagtgctagtggcttggatacggagactcattaccttagtcatgggcgtgaagatattccgctcaccgttatattatgtgattacggtgataagcaaagcactcagctccaactcgattatcgtcatgattatttctcgtcacatcaggctgaacatttattgcaaagcattatgactttggttgaacaaatggttgcacagcctgaagcgttattaacttcacttgatctggtgggtaaagacgttgaacaggcgttatggaatctaagtcaatctgttgtgacaggagaaaaacctgtctgtccgaccatcacattagtgcatgagcaaattgagcaatatgcaaaacggcatcctgatgccattgctatcgtggatggcgaacgacacatgtcttacgccacattgagcaataaagccaatcagttagctaactatttaattgagcagggggttcggcctgatagccgtgttgcgatttgcttgccgcgttcgagcgagatgatcgtggcgatgttggcgacgctgaaagccggagctgcttatgtaccgatggaccctgattatcccgatggtcgtttgcagtttatgctgaccgatgccaaacctgttgtttgcatcacagtgtcttccattgcacatcgattcgcagcatgcgagattacaacactattgcttgatgatgctcagcttaatgaacatttggctctgcgttctgtggcaaacatatctgccagcaatattggcttacagttggaacatctggcttatgtgatttatacctccggcacaacggggcagcccaaaggtgtgatggttgaacataagcagttgagtcattttgttgcccatatttcaaaggcttatagactgaccgaacatgataagtttttgcaattttcttcggtcagcttcgatatttctgtggaagaatgtttcggttccttatgtaacggcggcactctggtgttacgagctgatgatattcattacgattttgatgcattttgggcattttgccgacaccatgaaatttcggtgactagtttacctaccgctttttggcatcaactggtgaattacagtcgtcaacctattgagtcttcactacgtttagtgatcttaggtggcgaaatggttaaatccgttagtgctcgtgaatggttcgaacgtggcccggctatcgaactgatcaacacatatggtccgaccgaaacaacagtaaccgcgtctgcttactgcatgacatctttggctgatgtaacgacgatgattcccatcggtaaagccaattatggtacccaactttatatattagatacgaatttaaaaagtgttcccgcagggtttcaaggggagctatatattggtggaacaggtgtaacgcgtggttatcttaatcgtgagcaagatagcgcgaagtattttgtggctaatccttttggcccgggacgactttatcgcactggagatattgtacgtcagttatccaatggtaatttagagtttattgggcgtaatgataaccaagtaaaaataaacggttttcgtgttgagccagaagaaatcagcaatcaattaatggattatcccggcattcatgaagcagttgtctatccccgacaacttggctctgatgatcgactacaattaattgcttatattgttgctgaaggaaccatcaatattaatgctattcatctggcgatgaagagcaaactggctgattacatgttgcctgttgccgttgtgcagttagagaaattaccactgacacaaaacggcaagttagatttcaagcaattaccactaccacaaaaacaagattatagtcagcaggaatttgttgcccctgaaggcgaagccgaacgggtattagcgcaactatggcagtcgctattagccttgaataaagttagccgccacgacaatttttttgctctgggtggtcactctttattaattatgtcattgcgcgcagagctggctcagcgtggttatgagctgcctatgcgcgcgatttaccgaactaatacgctggcagaactggcattacatttatcttgtgtccgtaaggatgaggatacgttaacttaccgagaggtcgctgttaacaagcttgcagagcatgttgaacacatcacgcctgatatgttggatatggtgactttgagtgaaaaagagatcgcagttatttgccagcaagttgagggtggtgccggtaacatacaagatatttatccattatcacctttgcaggaaggcattttctttcaccatcgaatgaatggagagcacgatccttatattattccgattctgataaagttttctgatgagcaaaagttgacagcttttctccatgcgcttgataagatcgtagagcgtcatgatgttttccgtacttctattcattggcaggatttaaccacatcggttcaagtggtccatcgaacagcttctattccccttcattggcaagcggttattccaggtctttcggcgttggaaactgtgcaacaggcggcctttgaacgccattatatgaagctggatcgcgctcctatgatgcaggcgattgtggcgaaagggacagagagtggtgaatgttttctactattaaagcaacatcacttactaagtgatcatatttctgtcttattgcaaattgaagaaatgcaagcgttgcttgaagatccaaatgtggtattgccaacaccggttcaataccgtgagtttgttgctcattcattaaggattaaccaatctgacaaaggtgttgattactttaaagctaaattgtctgatgttgtggaaactacggccccttttggcttgttgaatgtttaccatgacgggttggaagtaaactctgccggagaattagttggcccgcatttagcgcaacagattattggtctggcaactcagcaacgtattagtactgcgaatatttttcatttggcttgggcattggttgttgctaaatgcagtggtaaagacgatgttgtttttggttccatgatgtcagggcgaatgcaggctattcatggaagtgatcgtattttgggtatgttgattaatttgctgcctatacgcataaatctgacaaatctgtcggtaagcgaagcattaacccagattagtgatgaactcattgaattggccgactacgaacattttccgctttccgaggcattacgttatagctccttaccaggcggtacacctttgtttaccagcctgttgaatttacgccataaaaataaattggcgattgccaaccaaagtcatcattttgaaatcatagaggctagagaatataccaactatccgttagagatgggagttgatcagcttgataatgatttcatgatgcaagttcatgttgagccgcaagtcggagcggctaatgttctgacatatatgagaacagcattggtggctattattaatgcgtttaaccaggctccgcaaacacccttgctgacattatccataacgcctattagcgaacagcagcggattattaacgaatttaacagccctgtcgctgcttatgataaaaccgtgacgattcatcaacgttttgaacatcaggtagtaaaaacacctgcggccattgctgctgtatgtaatacaaattacatcacttatgctgaacttaatcagcgcgctaatcagctcgctcactacttgatagaacaaggtgtggcacgaaatcatattgttgccatctatgccgaacgttccattgaatttgtcgttgccatacttggcattatgaaagccggtgctgcttatgttcctttggaccccaccaatccacttgaacgtttgtcatatatgttggctgactctggggttaatgtggttttaactcaacaccatttaaatggattaaccttcaatggtcagaagtattttctgttggatacggactggtcctcattaggggattatccaaacactaacccagaggttgagtgttatcctaatgaccttgcctatatgatttatacttccggctctactggcaaacctaaaggtgctttggtgcaccatgccggggcgttgaatcatattgatgctgaatttgatgttcttggttttatggatagtgataatcagctattaccacgtaactttttacaaagtgcagcctcttcttccgatgtctctgtatggcaatttctagcacctttgatgagtggtgggaaaacagtcattctgcctaatgctatggatttgccagaatatgtgcgtgtattgcaaaacgaacagattcatctgattcaaaccgcaccttcggtattgaaaatattattggaacactttcttaataaaggcggaatatcaataccattaccagatctgaaatggttaatgattatagctgaaccttgcccggtgcctttggttaaccgctggttgcaaaattatcctcaaattccggtgatgaatggctacgggcccagtgaggcatctgatgatattacctattttattattgatgagccgttaacagagcaggttaaaaatattcctgtaggtaagccattgccgaatttaaccatgtatgttttggatcaacgtatgcagattctgcctaccaatgttgttggtgaattgtgcgtatctggtatcggtgtaggaaaaggttattggaataatcctgaaaaaacggcagaaagttttaaagataatccttttcacacaatgggagggcatggaaccagactttatcgtactggggatttaggctactggcgggcggatgggaatctggaactcgtcgggcgtattgataatcaagtaaaaattcggggtttccgtgttgagctgggagaagtcgaatcggctttggtgaaattacctcaggttatggaagcggcggttctcgtccataaagacagagtgggggaaaattgtctggtagcttatttggtattagctgccaatgtcgttcagatacagcaatccattaacgatatcaaacaggggttaagttatcatttacccgattatatgatccccggctactatgaaattttaaccaggatgccattgaatgctgcggataaaattaatcgccatgaattgcctaagccttgtttcgttaatcatcattctaagtggattgggccggctaacgcgcttgaacaatcgttagctgaaatctggcaatcagtgctcaatgttgaccaaatcgatcgtaacgacaactttttccatctcggaggccactctttgttggttatccgggttatttctaaaatacgcgcagaacttgggcatgatattgctgttaaagcgattttcgatcatccaacattgatcgaacttgcagcaatgcttaaacaacagacgactaaaactgttgttgattcaattcagaaacagcccaggaccgatgagttactgcctttgtcatttgctcaagaacgtttgtggatccttagccaaattgatcaaagtagtgcggaatacaatatgcccattgcatttgctgttaagggcaaatttgacgttagtgcagccgaacgggcattgaatcagatcatcgaacgccatgaaatattacgtacggtttacattaagaaagagggcaacccattccagaaagttttatcaggcaggaaactgacactcaattatatcgacttaatctatatgtccaaagagcaacaggatcggcatgttgctgaattaatgatagaagatgtcaaccggatctttgacttaagtagcgatttaatgatccgcgctacttttattcagtgtcaagtcaataacggagtattactgtttaatgctcatcatattgcgtctgacggctggtctgaggatattcttatccgtgagtttgttgcccgttatgaggctatacgcaacgggaaccatttcgaaatagaagaacttgatattcaatatgctgattttgcaatttggcagcgtaacagattgcaaggtgaatatttagagtcccaaatctgctattggaaacagcaattgagtgaactcccgccggtacatggtgtaccgctggacaagccaagacctaaggtcaggcagtatcaaggggccgtggtaacaagcatattgccggaagagactacgcgtgcgcttgttagtttggctagacggcaccaaatgacgccgttcatgctatttcacgccgcattggcattagtgctgtctcgtcatagtagtagccatgatattgtgataggtacaccggtagcgaaccgtttgcaggcagagctggagacgcttattggcttctttgtcaataccttgatactacgggtagataccagacatagtgcattgagtgattatcttacccacgtcaagcaagtgcatctggatgctcaggataatcaggatgtgccatttgagcagttggttgagcggttgttggtaaccagaagcacggcgtatacgccattgttccaaatcatgttgacgatgaatacggactatggtctgaatcatgacattagtacaacagcttttaacctgccagaagtagaactgagtgcaatagcaccaaaccatatcctggctcagtttgatctcgatcttgagctgagtatcagtgatcaagggttgcttatgcactggacttatgacaccagtttatttagccatgaacatattgaacagctaaatgaccatttgtcgcgtttactgagtggactggttaatgtggcggagaatgtggcggagacggatgattttacctctatctcacttgctaatctgcccatattgtcagacacagaaaccgaatacttgctgcataccctcaatgatactcatgcaaattatcctaagaacaagtgtatccacgaattgtttgaacagcaggccgaggaaaaccccaataacattgcgttagaatttggcgacagccagttgacctaccagcagctcaatgaaaaagccaatcagttggcgtattacttgctggagcaccatgctatccagcctgatacacccgtggggctatgtgtggaacgttctttggagatggttataggtatgctggcgattcttaaggctggtggtgcttatgtgccgttgtctccagaatgtcttgaagaacgtctggtctgcattttggaggatacacagcttaatgtggttctactccagtcatgtttgcagcaagtactgccagatttcagcggtcaacgggtcatattggataatctcagcaatatagacggtcaaaccagcacggtatacagccactatcctattgccaatccgaatagacattcactgggattgactgccaaccatttggcttatgtgatttacaccgcgggatcgaagggtagacctaaaggggtaatgattgagcatggtaatacagttgccatgctcagttgggctcaatcacaatacacaaaagaagacatagcctgtgttctcgcgtcgacctcccttaactttgatttatcagtatttgaactatttttacctttagtttcgggtacacgtgtatgtattgttgagaacataatcgctttatatgaaggaattgaccatgaagtcactttaataaatacagtaccttcaacaatgagctatctggttgatcaaaatgcgataccgagtagcacccgggtaattaatttggtgggtgaagctttatctgcaaatctggtcaatgaaatatatgaaaaaaataaagatgtagtggtctataacttatatggactaccagaggatacgacttattctacttgggcgaagttggattcctccataaatgctacaccgactattggtcgaataattaataatagccaggcttatattctggacaaagagcatcaactggtaccttatggttcaattggggagctttatgtcggcggtgctagtctagctcgcggttatttcaatcgcatagaattgacaaaggaacgctttgttacaaacccatttcatgatcccaacacccccaacagtagtgagcggttattcagaaccggcgatttagtgcgttatctgccagacggcaatctggagtttattggccgtattgatgttcaggtgaaaattcgtggtttcaggatagaactgggtgaaattgagtatcaactcaaccgacaaacaggggtgagttcgtctctggtattggctgaggcaacatcaacgggtgataagcaattagttgcctatgtcaaaccggtgttgggaaaattaaaattgatgtctgaaatgaatgatgcggaaaagcagcgggctcaaacccaatttattcaggacatcaaatccacactggctaaatctttgccggactacatgatgccgtcagtcattgttatggctgaagaatggtctctgccctccaatggtaagatcgatcgcaaggtattgtctgaacttaatattgaacatggtaagaatgatgattttgttgaaccgattggtgaaacagaaaccttattagctgaaatttggcaggaagtactgaacattagccaggtatcgcgtaacgataactttttcgcaataggcggtcattcattattggcaatcaaattaatctctgaaatcaatagcgtattcgtcattgaactcagtgttatgcaggtttttcatacacccagcctgtgtgagcttgcagaattaatctgcaaccagcaattacaagaaaaaatcaaaagagagttagtcacagcaggagaagaggggtggttatgatggatatgctgaaattagtccaagatgcttacgagcagggagtattgctgtttagtaaagatggtaagttagggttcaaacttaagggcactcacttcccagatgaactgaaagccaagattcaggcacataaagcggcactgattacgtttctcgatgaaggtaaggtggatgcttctggcaataaaatcgcgattaaaccagcgcctagaacccaaccattacctttaagttcctctcagcagcgtatttggtttatcgaccagtttggtggtgacagcactgcctacaacatggtgtcagcttatacggtaagcggcaaatttgaactggcggcagcgaatctggctctgcaaaccattatcgatcgacacgaagtgctgcgtacagtttacctcagcgatgaaaatggaacccggcaggttatcaaaccggagtggtcgttcgagatagtccaatcagatatcagtgatatagagcaagcccagcaggaagcgtggattgagcaggccattcaggatgaaatggcctgccagtttgatttgtcaaaagatatgatggtgcgttgccgttacatcagcatctcggcggagcagggggtgctgttatttaacatgcatcatatcgcctcggatggttggtcgataggggtattggttaaggaatttgtaagcttgtatcaggcttatcgtcaggggcaggctaacccattatcggctttggagattcagtatgccgattatgcggtctggcagagtagcccagagagacaggctcagctagcggcagggttagcctattggcagcaacagttgtcggatttacccccggtacacggcttgcctctggattacgggcgaccagctaaccaaaccagtcatggccgcagttatgaatttagtctgaacaatgaggttagtaagaggttgcagcaactggcactgacgcagggctgtactctttttatggtgttacatgcggcgtttacggtgttactcagtcgtcatagcgggcaacgagatattgtggtgggaaccccggtagctaaccgtttgcagatatcattaacgccgttgataggctgtttcatgaatacgctggtgttgcgcagcgagtgtgggctggagcaatcgtttattgattacttgagctcggttcgggagataaatctggctgcccagcggcatcaaaatgtcccgtttgagttgttggtggagcggttgcagccggaacgcagcacccgttattcaccgttattccaaatcatgttttctatgaatacgaatgacagcgtggagttgcaactggaagggataagtttgcggccacggccggaacagacccgcaatgcgatgtatgaattgacgttagaggcccagcagacagaggaaggtctgatttttagtttcgagtacaacacggatttgtttgcagaggagacaataaagcggctggcggcgcgttttacaaccttgctgatgggcatagtggcctctccgtctgaaaagcttggcgatttggccctgttgccgccggaagagcaggattacctgttgcaccatttgaaccagacagcggtagagtatgaccgtagccgatgtattcatgagtggatagaggcgtttgctgaacaaacgccggatgctattgcgttggtctttggtgaccaaaagctgacttatgcgcaacttaatgccagagccaatcagttagcacatcaattaagagctcagggagtttcaacgagtgggcgagttgctgtgttgttgcaaagaagcatcgacatgatcaccgcactattggccgtgatgaaagcaggagctgcgtatgtaccggttgatcccagctttcctgtcgacagagtgcagtacatgctgaacgatgcagagccacaatgtattataagcaaccgcgaatatgcatcacgatcagttggttttgcggaattaacctgcttactggatcacattgaccttagccaatcacccaccacaaatattcctaaacagtcgatcggtttagctgcatctgctctggcctacgtgatttacacttcgggttctacgggcaagcccaaaggtgttatggtcagccactcggcggttaataacttcttgatctcaatgcaagataacttgcagtgtgtggcacaggacaatattttagccatcacgacgatttcctttgatattgcagtgttagagctctatctgccttggctgtctggtgctacctgcgtcgtagcggcgcagcaggacgtgactgatcctgccaggctagttgcactactcgaacaacatagtatttcgttgttacaagccacgccaacgacctggaatatgttgcttgaatccggctggcaggggcgctcgtcgttaaaaatgatcagtggtggcgaggcgttgccattagcgacagcaacggcattattgagcaaaggcagcgcgctctggaatatgtacggaccgacggaaaccacggtttggtcaaccattgcgaaactggacgtacaactgcttgagcagcaacttgttactattgggttaccgttaaacaacaccacaatttatttacttgatgaacaattaaaaccggtgccttttggggcagtgggagagttatacatcggcggtgatgggcttgctgaaggctattttaaacgagaagatctgactactgagcgattgattaacctgacattttctgacggtttaaccgctaaggtttataaaacgggcgatcttgcccgttacactaccgagggttcactggtctatttgggcagaaatgattaccaagtgaaattacgaggccaccgaattgaacttggtgaaattgaacaggttattaacctgtttccacaaataacccgttctgtggtggttgcgctaaacgatcagcaaacacaacagtatctagcgggttatgtggtcgccgagcagcaaattgatattgatgcgctacgtcaacaccttgaacagaagttaccagcctatatgttgcctcgggcaattattcagctcgaaacattgccacttacactaaataacaagattgatcgcaaagcgcttccaacaccgcaagacagcgatattgctgttaaagccagtacgccacctatcggtgagacagaagcagcactggcagctatttggtgcgaaatgctagatattgagcgaataggccgggatgacaacttttttatggttggtggccactcattaattgcgactaaggtaatcacaaagattaatgagcagtttgaatgccgtttacaggtaagagatatctttgaagctgcaacagtagctttacttgcagagagagtgccttatgcggcatgggataagcgttatcagacaattcctattattgaacgcaagaccaatttattaccgcaatcttatgctcaacaacggatctggtttatcgagcagtttggcggtgatagcaccgcctacaacatggtgtcagcctatacggtaagcggtaaatttgaactggcggcagcgaatctggccctgcaaaccatcatagatagacatgaagtgctgcgtactgtttaccacagtgatgaaaatggaacctggcaggttatcaagccggagtggtcatttgagatagctcagtctgatatcagtgacataggcaaagccgggcaagaagcgtggattgaacaggctattcagcatgaaatgacctaccgatttgatttggcacaggatgtgatggtgcgttgtcactacatcagcacttcgatggagcaaggtgtgctgttatttaacatgcatcatatcgcctctgatggttggtcaatgggggtactggttaaagaatttgtgagtttgtaccaggcttatcgtcaaggtcggactaacccgttaccggcgctggagattcagtatgccgattatgcagtttggcaacacagcgcagcagaagaatctcagttagcagcaggggtagcctattggcagcaacagttatcggatttacccccggtacacgggttgcctctggattacgcgcgaccagccaaccaaaccagtcatggccgcagttatgaatttagtctggacaatgaggttagcaaagggttgcagcaactggcgctgacacaagggtgcactctttttatggtgttgcatgcggcatttacgatactgctcagtcgtcacagcgggcaacgagatattgtggtgggaaccccgatagctaaccgtttgcagacatcattaacgccgttgataggctgttttatcaatacgctggtattgcgcagcgagtgtgagctggagcaatcgtttatcgattatctgagatcggtccgggaggtaaaccttgctgcccagcggcatcaaaatgtcccgtttgagttattagtggagcggttgcaaccggaacgtagcacccgttattcaccgttgttccaaatcatgttttctatgaatacgaatgacagtgtggagctgcaattagaaggggtaagtttgtggccgaggccagaacagacccgcaatgcgatgtatgaattgacactggatgccagccaaacagaggacggcctgacttttaatttcgagtacaacacggatttgtttgcagaggagacgataaagcggctggtggtacgttttaccaccttgttgatgagcatagtggctgctccgtccgaaaagcttggcaatttggatctattgccgccggaagagcgggattacctgctgcacagcttgaaccagacagcggtagaatatgaccgtagccaatgtatccatgagcggatagaagcgtttgctgaacaaacgccggatgccattgcattggtctttggtgaccagcagttgacttatgcgcaacttaatgccaaagccaatcagttggcacattatttagttgctcagggcgccaaaccggattcaatgattgcgatatgtattgaacgcagtattgacatggttgtgtcggtacttgccattttgaaatcaggtagtgcttatttgcctcttgatcctgcctatccgcaagaaaggcttgcttatattattgatgatgcacagcctttgatggtgataaccaatagccataaccagaagttattgcctgaaaatagtctatttagcattgatgtgacgacaacctcgtttgccgagctctcaaccgataatattcccgccgttgaattgggtttatgttctacccacttggcctatgttctctatacctcgggttctacaggcatgccgaaaggtgtgatgattgaacatcaggcattggtgaatctggtagtggggcttgcagatgcctatctttattcaaaacaggatcgggtattgcaatttgccgccctcagttttgatatgtctatcgaagagatatttggtgctcttggtaatggcagtactttagtcttacgtggcgaagattggttgatggatattgccactttctggcaaaggtgccgggaataccagatcagtgcggtaaatttgccaaccacgttctggcacgaagtggtcagtgaagagacggttttagtacctgagcatattcgccaaatcagtgtcggaggcgagcagattaagccagataaagtggttgcatggtaccagcgaccagggcatttaccccgtttagtcaatgcctatgggccaaccgaatacacggtcaatacttgtattgcctacgatcttcggggagacaccctcagtatcgggcacccaatccaaaatacggccatcttcttgttggacaaaaaccagcagcttgtgccttttggtgctgtcggggaaatttgtgtcgcgggtgacggcgttgcgcggggctatatcaacaaagagcaattaacccgtgagcgatttattgataatccttttgtaagccgctatccaaagctctaccgaaccggcgatttggggcgttactcactggccggggatattcaatattacgggcgtgatgaccatcaggttaagatccgtggattccgcattgagttaggggagatagaaacaaggttgcgtagcttgcctacaattcgtgatgcggttgtcattgctcgggaagatgaaccggctcacaagtatctggcggcctatatcacccttgatggtcagcagaaagttgctgagattcgacacctattaagtcagcaattaccgagctatatggtccccgccgcttttgtggtgctagaggagataccgcttaccgccaaccgtaaagtggatcgtaaagcgctccctaaaccagattttgttattcagggggaaattgaatatatcgcgccggccactgaacaggagacattgctagctgaaatttggcgaacactgtttggattggcgcaagtcagtgctgttgccaacttctttgagttgggtggacactcattgttgagcatgaagatgctatcccatcttaaaaaacagggttatcgcttggatattcgggccttgtttgagtacccgaaattacgggatatggcgaaacaactacaggcaatcgaacaggaatcactgaaactaacagcccatgaagccttggaaagtagggtttccctgtcggaaactgagcgggccttgatcgtatctcagtcgccgggaggtgagcaaaatattgctggcatttatcctttggcaccattacaggaagggatcttattccatcacatgatgtgtgggcgatctgatctttatgtgacgccgatgctgtattcatttccgtcaaataccgagatggaaagttttattggcgcattggataaaatagtacagaggcatgatgcgctgcgaaccggaattttttggcaaggtattgatgaaccagtgcagattgcctacaaagaggtaccattaccggtagttgatatcgatttgagggatgatgttgatatccagcagcagctagcacagtttatggatccatcacaacaatggatggatgttactcaggcaccgttgatcagagtaacccggtttatcgaccgtcagcaaaagcagttctatgcaatggtgcaggagcatcacctgataagtgatcatgtgtcattggagattattcaagaagagttgctggttatcttggcaggtgatgaaaagtcactgccggaggcgttgagttatcgggattttgtcttaaacgccatcagcaaaaccgataccaaagcggcgcagcagttttttaccgagcaattggccgggattgatgaaatcacggcaccctttggtattaccagtggaatggttgacaataacttattcactgaaatccaaattggcttgcctgcggatttatccgcacagattcgtcggtcctcttctgcatggaggataagcccagcgcttatttttcacatggcatgggcattggttttggcaaaaaccagcggcactaaagatgtcatattcggcactgtattatctggtcgcttgcagggtattgataatgttgagcgagtcgttggtttattcatcaataccttgccactgcgtattgatttgagccagttgagtgttgctcagttaatgcaggaaatgcaacagaaactggttagcttgctgcaattcgagcaagtcccgacggcgattgctgaacagtgtagcaaattggccggttctagccgtttattcgacagtatcttgaattaccgtcattccgaagtgagtggcgagacaagtgagcttaaccaacgttggcaaaaaaccggcattgagttagttgatgtaaaagagcgtaccaattacccgattaccctatccattgacgattttggtgatgattttgctgttgcagcccaaatcgacagccgatttgatgctgaacgcttggtggcgtatctcatcaatgctagcaggcaacttgttgctgctttacaaagtcaggaacaggttgccgcactgtcactcgacatccttgatgctgaggagcgggcgttcctgctgcattcgttaaatcaaacggaatttccgtatgacaactcacaaactctgattgatagattcgaagcccaggttaaggcgactcctgatgagattgcgttgaattttgctggcgagacgatgacgtatcgtgagttaaatcagcgaaccaatcaactcgcgcagtatctcgtgaaccagggagcgaaagtgaatactcccgtcgtgatgttcattgaacgctcctttgagatggtcatcactattatcgctatcttaaaaaccggtgctggttatgtgccactggatacctcattaccgacagaacgcttaaacatcattctgagtgatctgtctgatgaaatcttagtaacgacctgcgccttgaatgacaggattgcggtaaaacgccagaaaatggtgttattggatgacccttgcacagcagagatcttgggcaaacagctaatcagtaatttggctatcgaatcctctctggataacctcggttacgtgctctatacctcaggttcaacgggtaagcctaaggcgattgaaatgccgcagcgggcgctgagcaatttattacaaggtataagccagcttgagccagcgcttacggggccgaaccgttggttacaattctcatcaattggttttgatctcagttttgaagacatattcatgccgctgttatctgggggttcagtacagcttattgataaatcgactcagttggatattcggctgttagcgaagcaaatccagcaggcgcaacttcaagtgctgaacttaccttatgctgtattgcagaatctggctgaatatagcggtgtcaatgggctacagttccccgaattaagggtgattgtgtcgagcgcggaaaggctcaaaatcacggcggccatcagacagtttttcacgacacatcgtcactgtaagttagtgaaccactatggcccggcagaaactcatgtcgtaacgtctaaaacattacagggagaacctgcttcatggccggatttgccgacaattggccgatcattgcccaacgtggccggttatattttggatgagtatttacagcctgttccgatgggtgccatcggcgaactgtatttagcgggggactgtttatcaagaggctattatcagcagccccagcttaccgcagagcgttatcttgattgtgattgggttcttgggaaacgagtgtatcgaaccggggacttagccagctttcatcaaaacggtgaaatcaactactttggccgcaacgaccatctggtcaagatccgtggattcagaattgaactcggtgatatcgaagcccaattgagtaagttcgatggaataaccggaaccgtagtcattgctattgatacagaagccggtgataagcagcttatcgcttattttatcgcggctaacccgttggatttatccgaaattaaaacctatttatcggctagcttacctgattacatgttgccatccgcgtatgtacggatggcggcttttccgctgaataccaatggcaaagtggatcgcagccgacttccacaacctgaagcagataactttgtaaaagccaaatacatcgcgccagtgactgaactggaacgaagtgttgcgaaaatttggcaggggttgttgcaacaagacagggtaagcatggccgacagcttttttgatttaggtggtcattccttattagctatgaagctaatttctcgaattgaacaggcattttccgttggcgtaccgattgcgatcgtgtttgagcgatcaagattagaacagttatgtgattggcttgaaaaagaaatggttattcaacgtaacaagtcaattggggctgtagtggcagaatatgaggtaaccgagtggtgattatgaacctaaaaggctttattgatagattgtccgagcaggaagttcgtctttttgttgaaaatggggcgctaaaatctcagtctgctccgggtgccatcacacctgaacagggaaaatttattaaacaaaacaaacaagcaattattgattttctctctcatacagaggtggcggggcaacagaagttttcgttattacaacgtcggcaccttaccaaggcaccattatcctttgcccagcgccgtttttggctggtcgaacaggtttctacagttgaacgtcagtataagatttcaactgcattcaatttatatggtcaattttccttggaagccgcgagtcaggcgatagatgccattcttaagcgacatgaaattttacgaacggtttatcaggaatcacagggcacgcccgcacaagtcgtgttgaacgactatgttttccagattgacaaagacacccttgccgatggtgttgaccaacagcaacacatagaggattggctggagaggcagagacagaggaaatttgatttaagtagggatttaccgctaagagtggcctatttggcctctgatctaaaaccagatacctcagataagccgttgaccggcgtattgttttttgatttgcaccatattgctgctgatggctggtcgctggcgatattagttgatgaatttacccttctttatcaacaaattgtgcagggtaaacccgccttactgactgagcttgaattgcaatactcggattatgcttactggcagaatcaagctgaaactcagcaaatgtttgacgagcagttgcaatattggcaacaacagttggctaacctgccattggttcatgaattgccgttagattatgctcgcccgcaaaaattggatatgcgtagcgcaatgcacacgcaaaagataccaatggagacggtgagtaaacttaagcgattagctgtagatgcaaatgccactttattcatgttgttgcataccgcttttgcggtgatgctggctcgctacagtgataacccggatgtggttattgggacacctattacaagtcggccggtacagaaactggagtcgctcattggctgtttcctcaatacgctcgtattgcgtttggattgtacaccgacgctgacattcaatgcgttgttgaacaatgcaaggcaggtgcaccttgatgcacagagcaatcaggccattccattcgaattattggtcgagaaattgctcgctgaacaaagcaccgcgtttactcccttattccaagtgcttttctcaatgcaaaattatgaatctcaaccgttggaacttgctgatgttgaatttaaagagcttatggaacaagggggacaaacgcagtttgatttgaccttaaccgcagcagaagatcaggatgggctgtcgctgatttttgagtttaatcaagggctttttaattcggacaccatcgcccgttttgccgaaaatatgcagttgttgttggcacatattgcggtcaacggtgataggccaattaatcaattggcgattgtcagtgagcaggaacaagctgtgttggacaaatctcatcaatcagcttggcaactgcctgaggtgcaaccttttgtgcatcagcttattcaacagcgggtggctgagtatcctgaacgagtggcaattcgctatcaggagcaaagcctcagttttgctgaacttgatgcaagggctaatcagatcgctcaattattgttgactaaaggtgctgacaacaacccgttggttgctattttgatggagcctggcattgactttgttgtcagcatgctagcgatattgaaagcaggatgtgcttatttgccattagatcccacttattctgtggcacggttaagttttatcttggctgacagccatgttggtttggttatcgtcgataacaagagtatcgataaggtcaatttaccagcggatagcgtttgcactatcttgcttgatgagactgaaattgccgcccagccccgtactgaaccgatgttgacctcaagtgtgacagcggattcccttgcctatgtcatttatacctcgggttcaacgggtaatcctaaaggggtgatgatccagcatggggcgttgagcgcatccactgctgggcggtttaattcatactcgatagtaccggagaaatttttactggtttcctcctttgctttcgattcatcgattccggcgatatattgggggcttggcagcggtgcaacgttgcatttaatggcccctcaagatgcgaaagatgcatcgtatgtggcgaagcttatagacagtcaacaaattagccacgttctttttattcccagtttctacgatgctgttcttgattaccttgtcgggccttcactacgtaaagtgatttgcgccggcgaaaatttgtcggacaacgtaaagacaaaacatttccagtgtcagcctcaggcaacgcttgtcaacgaatatgggccaacggaaaccacggtatggtcttcgttgaaaatctttgaaaaggcgacggagccagtcacgattggtcggcccgctccccatgtgtcacttcatgtgttggcaaaagatcgctcccaatgcccggtcggtgtagtaggagaactgtatgtcggtggtgtcggattagcaaaagggtacttgaaccgcccggaactgacggctgaacgttttattgatcatttggatgctaaaggtaaccgcgaacggctatatcgcaccggtgatttagtgaaagtgttgccatcaggcgaaattgcctacattggccgaaatgatttccaagtgaaattgcgcggttttcggctcgaattgggagaaattgagcactgtatccgcacgcattttgatgtcgcggatgttgtggtttgtgtgagacaggatgacaagcagcggcaatccttggtggcttatttggtggctccgtcgatgctcgacatacgagaacagcgcgataaagtcgagcgtatcttaccggagtttatgtggcccggcttctatgtgttattgccggaaatgccgctgactgagaatggcaaagttaatcgtaaagctctgcctgcgccaagcagggaaaatatcgctaaggagccttttacgtcaccagaaacggcaactgaaaagcagttagctggattgttccatagagagcttgggttgacgccaatcaatattgaggcccggtttgtacagctcggtattcactcactgcaatttgtcaaactcggtagtgccatcagcgaagaattaaagatcgaactgtccgtgaaggatttttacgtctatgacacgctgtttgctttagcgcagtatgttgagcagcagtttgccgaacgacagaaacagattgggggagaaagggaggttgttgaactgtgaatatcgccgcatttttagctgacttaaaacagcaagacattatggtataccttgaatctgactcgcttaagttaaacgcgcctaaaggcgcggtatcgcagaatatgctgactgagttgagaacgcataaggtagaaattattgcgtatctgcaagggcaacaatcaaatccattaccgatcaagaccgccgacagggaattgactcgattacctctctcttttgcacaacaacgcctgtggttcatcgaccagctctttggcagcagcgagcattacaatatggcgacggtgttggaagtaaatggcgagttcgatttaacgattgctgaaaaagtcatgcaacgaattgtcgaacgtcatgaaatattgcgctcggtttaccgagaagagcaaggagaagtatggcaggagattcagtcagcggttaaggcaaaaatcaatgttcggcatttgacatgtgaacctgccgagctgaaagcgatattttatcagtatgtttctgctccgtttgatttacagaaagatctgatgatccggatcgacttttttaccactaatactcagcggcaatttcttatcatcaacttgcaccatattgctggagacggattgtctttttctctcttgatggaagaatttgtcatccactaccaagagattaagcagaatctgccagaatctttgcctgtattacctgtgcaatatgcagattatgcttacactcagcagtcatggattgccgatggggtgtttgatgagcaacttgattattggcaacaaaaactagcggatataccgcaagttcaccaatttccattggatcttcagcggccggtgaaacagaccaactacggtgttaaggtgcgattccgattggatcggcaatcttcgtcgatgttgcgtaaacatgcgggcgatgccggtgcgactctgtttatgttattgcacgctgcattttcagtatttatcgctcgttacagccagcaaacggatattgtcattggtacaccggccactaaccgtaaacaaaaagagttacagtcactgatcgggttgtttgtcaatacgctggcgttgagaaccgaatatcagggcaaggttgatttcatgcagtttgtgcagcatgtaaagcaagtcaacattgaagcacaaatgaatcaggatttgccgtttgatgttcttgtggagaaattggcggtgagtcggaatatcgcttattcaccgatattccagttcatgttcacaatggatacgactgaggccggtgaatcgagactggatgacgtggtgtttacgccggtatcttcgggggaagcattctctaaatttgatttggaactcgatgcgattgatgacggtgacacgattctgtttgaagtggtgtacaacagtagcctattccatgaacacacgattgcaaggttactcaaatcgtttgaagtcttgttgattgatatcgccgaaaatccttataaaacattagactctttagcgttgttggatgaagacgaaaagcgtcgtttagggcaacaactggcgataccatcttctatcgcaacaacgacagaatctgtgcaatgccggtttgaacgtcaggcagcacaaagatccgatgcgacggctttggtatggcaggttgcaggcgaaacgcaaaccctgacatatcgcgaattaaaccagcgggccaaccgattggcgcatcacctaatcgaaaagggggttaggccgggcaatattgttgcgttatgtttgcctcgttcccctgagatgattgtcagtatattggctgtactgaaagccggtgccgcttacactcctattgacattgacaaccctcaatcccgaattaatcacattattacggattgtcagccggtagttgtgttgacgaacaacacatatgcagacaagtttgctgaactgaatgtcattgttgagctgttaacctcggaaatggaactgttttcagggactgcatcggatgatccgaatatcagccatagcttggatgagcttgcctatgtcatgtatacctccggatcaacgggcaaacctaaaggggtcatggtagagcatacgcagttgagccattttgtggcggcagcactggcaatgtatgccgttaaacctgacgacaacatattacagttctcctcatttgcatttgatatttccattgaagagtgttttgtcaccctatgtgcaggggccactttagtattgagggacgatgattggctcaacagcgctgacctattttggcaacagtgtggtcagcacaacatcactgtaatgagcttgcctaccgcattttggcatcaggtgagtagtggcgacgctttggtgcctgacacattacggttggttatcgttggcggtgaagccattaatgctgaaattgtcaggcattggttcgcatcagcaaaccgtcctccggtgatgaatacctacgggccgaccgaaacaaccgttttagcgagttactacttgattgaatccgcgttgcagattgagcagtcggttcccattggcagggtaggtggtcatgttaaagcctatgttgttgatgagcatttgaatttggtgccacaaggtgtcattggtgaattggttgttggtggtaaaggtgtctcccgaggttacttaaacagacctgaggagcagcagagaagttttatccaggttgcttttttcgacggtgaggttgagcggctttaccggaccggtgatctggtgaggtttaatgttcatggtgagattgaatatatcgggcgcaaggatagccagataaaaattcggggtttccgtattgagccaggtgagattgagaaccaacttattgcgattgatggggtgagacaggcggttgtcactgctgatgagattaacggtaacaaacaactgattgcatactacgttgctgatgtgccactggagccggccgcgctaaaggaacaaataagtcaaaccttacccgaatatatggtccctaatgcctttatttcgctagacagcattccaatgacggtaaacggtaaagttgactacaaagcgctattgagtgtagagacgcaagagccgttacccgagaactattgcctcccgcagggggaactggaggaacaactggctgatatgtggcagcaattgttaggccatcctaaagtgggtcgtaccgataactttttcaaactagggggacattccctgttggcgattaagttggtatcggaaatccagaaaaccttagctgtacagatctctgttcgggccgtctttgaaagccaaactttggctgaacttgcacaattgatcgttgaacaacggataacaactggcggtaatgcagcgatagcgccaattacacctgtcgctgaaatggcgcggcttccattgtcatttgcccagcaacggctttggtttattgaccagttagatgggcaaacgcctcaatataatatgccgttggcattaaccgtcaaaggggagttcaatctcgctatcgctgaacgtgcgataaacatcattgttcaacgccaccaagtgctgcgaacggtctatcggcatgataccgccggtgcatggcaggaggtgctggacaaggtaacggtgaagatcgaccgtattgactatcgaagccttggggaaaaaagcggccaacagcaggtgcaagaatttattcagcagcacgctgagcaaccatttgatttagcgaacgatgtcatgctgcgagcggcctatctaaagatagccgaagatcagtgcgttatggtcttcaacatgcaccatatcgcatcagatggttggtcaatcaaagtgcttgctgatgagtttgtcgacatataccgccaactgcttgaaggcattcagcaaccggctttgccatcgctagccattcaatataaagattatgcggtctggcaacggcaacaactacaaggtgaaacgttacaaacggatcttaattactggttaactcagcttaatgagttgcctcctgtacacgacttaccgttggatcattcacgtccattgcaacttggcagccgtggtgggctatttgaatttagtgctgacaagtctcttttgactgggctcaaatcgcttgccggtcaacataatacgagcctgtttgtggtattgcatgcggcatttaccctgttacttgcccgtcatggacaaagcccggatattgtcatcgggacgccggttgcgaatcgtttgcaggcggaagttgagccgcttatcggctttttcgtcaatatgctcgtgctgcgcacccaataccaagccgatctcacttttgctgaatatctatcgtatattcgtcaggtcaatattgatgctcaagcgcatcagttactgccgtttgaattgttggttgaaaaaatgcagccggagcggagtacaagttattcgccgctattccaaatcgtattctcgatggataccaatgaatctcaggtattgcaattgagcgacgttgaatttgagtcccttgatagcgaacatgtcacggcccagttcgatttgaccttagatgccggtgaaagtgagaacggtcttgattttagttttgaatacaactgtgaactgttcgaacggtcgacaataacccgattcagccaacggttcctgactttactgtctgcattagtgagtgagcaatatcaaacggctcctttgacgaaactgccggtgttaactgagcaggaaagacaatatctgttggtcgatattaatgacaactggcagtcttatccggttgataagtgcattcatcaattgttcgaagaacaggcggaacggagcccggaacaaacagcggttattgacggcgagcttcatctcacttatcggcaagtgaacgctcaagcgaatcaggtcgctcactttttgttggacaaagcttataccccggattcctttattgcggtttgtatggagcgaactgcggcttcggtgattaccgtacttggcatcttgaaggcgggtttagcctatgtgccatttgatgctgatcagccgttgcagcggattgaatacattcttcaagatagcggtgcgccattagttgtggttgatgatattcagtgtttgcctactgaggtggcttcggcgtacaacgtctggagattggatgaaatattaagccggtcacggcttaatacccatattgcggtgacgcagcgtcattcaaccgcgactaatttggcttacatgacttacacctcaggaacaacgggccatcccaagggcgtgatggttgagcacacggcgatgattgcgcgtttgtatggttgggatgcggtatttggtttatttcagcggccgccaaccgtattgcaaatggcgggtttggctgtggatatttttctgggtgatatcgttaagagcttgaccaccggtggccgcttggtgatttgtcgcaagtcggatttaattaccacagaggatttgtatcagcttatcgaacaacaacacgtgacatttggtgattttgtgccggtcattctgagaaatttacttgattatgctgaacaaaacagagttcgattgaattcactgcgccatatattagtgggttccgaagcttggtatggtcgtgatttgaaccgtttacaaaagctgatgcataccgatgcccgttgtttcaatatttatggacaaacagaatcggtgattgatgctagttacggtgatgtcacgcatctctgtttgcctgatgatgcctatgttcccatcggtacgccgtttgccaatacccacatttatatccttgatgcttatggcgagcctgtacctatgggggtagtgggtgaaattgcggtaggtggccccggtttggcaagaggttacaaccgcaatcgcgaattaacgcaacaaaaatttgttaaagacaacctttctggtcgttgtggttatatttatcacacgggtgatcaagcgagattaaaatttgatggaacgctggagtttttagggcgtaatgatgatcaaataaaactgcgaggattccgtattgaactggctgaaattgatgccaagcttcgtgcattgcctgatgtgcagaatgctattgctgtggtgcgggaaattgagccgggcaataaacaaattattgcttatcttcaaacgccacgaccgttattagttgaacggatcagagaacagctacggcatcaattacctcattacatgatccccagtgcatttgtctgtctgaatgctttctcggtgagtattaccggaaaagtggataaagaaaaactccctgtaccggaagccagtgcttttaccagtactgaatatgttgcgccacaaaatgacattgaaagaacattagcctctatttttgccgttgttttgaaacaggagaaagtgagtcgttacgataatttctttgctttggggggcgactcaatattaattgtgcgtgttgttgcgatggctaaacaggcgggtttggcactcagtgtaaaagatattttggcctatcaaagtattgatgaaataacgcagcagttacctgatttgaaccgcaacattgtctcttctaaagaggcttatcacgctttttcattactcacggatgacgaacgggcggcattgattgagcagtcaacattggatgatgcatattcattgtcaagtttgcaaatggggtctatttatcatcagctaaaagatgaaagttaccatattgtagagcattatttgattaatgccgtgtggagtgaacaagcatttcgtcaagcgtttaatgccatagtacaacgccatgagttattgcgtgcgacatacaacttcgaattagggagagcgttgcaatatattcataaaacgattgctttgccggttacactcaatgattggcgtcacctttctgtgcaggaatttgagcatcaattagaccattgtctggaacaggaaaatagccactttttcgttgaaaatgaattgatgtggcgagttaatgtatgtattgatgctaataatacatttgcactggttctatctcatcaacatgccattcttgacggttggagtgttgccaacctgcaagttgagtttatggaaaactatttatcggtgttgtctggcggttctattccaccaagagctgacttaccgcattacggtgaatacattgctgaggagctggcggctattgatgatcctgagcaaaaagcttattggcagcacattgccaatgctgcggtgttgcctgactggaccggaaaagcgtcaacacaacattattctgctcgccttgagttatcttatttacatgatgatttacaacaacttgctacgtgcttaaaagtaccgctgcgcaccttgttattggcaatccatgtttatgtcttggcgaaaatcaatggtactgactcgataaccagttcggtggtaagccatggaagacttgaagtgaagggagctgaatcttgtcttggattattcttaaatacgccgccggttaatgccgatatccatcaacaaacctgggcgtcgttgattcagcaattaaccgaatatagcactgcaagctggccttatcgatattatccggttgctgttatgcaagaggaattcaagtgtgattactctggcgctctgtttaactatgtcgattttcatgtgtctgatgagttacagacaacgcaagatgctgagcctgagcaggcttatgatcatgaatatgaacgagttgattatggttatgattttgtttgccatcatagttcagctaatcgttttctggttctgcaattagcgttgacccaatcggtatttggggcacatcaggcggggcaaatattagcctgttatgaaacggcgataaaatcgatgttagcttcacaacatcatcgcttggggcatgcggattatctggcatccggtcaaatccaacacttgtatcaattagcccataatgcctcatctattgctaatgattgcccatctgtgacgcaattatttgcccgaattgcgcgtcggatacctgatgaagtggccttgtcagggccttggggcagcatgaattatgctcagttggcgttagcggctgacaaactggcgacactccttattgcgcggggtatcggggtaaatgatacggtgggtatttatttatcccgtactcctgaggtagtgattagcgtcttggctattttgaaggcgaacgcgacatttgtaccattggcaaccgattatccaacagaacgtattgcccatattattaatgatgcggatattcagcttattgtttcacaacgttctgaaagccacactttgcctgttgatgaacaacgtattgttatggttgatgagattgactcggttgatactgcggttgtggcacgagaagtggcattatcagcgcaagagcgtgttgcttacatcatgtatacctcgggttcaacgggtacgccgaagggcattaagatcagccatcacaatttactgagctattatcaggcggttcaacgctgttatccggcaaattctgcccacgcggtattgcaaattgccaacattggttttgatatttttatcgaagaattaatgttgtcggtattttccggtggtcgtttggttctggataatcataaaacagcgtatagcgttaaacagttatgtcagatcattgatgcacaaaaagtcacactgatttcagtacccacagccttatggcatgagtggacgtatcagttaactgctgacgatgttgaacaactggttgagcatttgaaggtatgtatcgtcggtggtgaagccatgcgaatggagttattggcgctatggcaacaaaaaacacaaggaaagatccgtttattcaacacgtatggaccgacagaaacaaccattgtggcaaccgctattgatgtcacacaattcgataccttaacaaattcagtggtgccgataggacgtcctttggcccattgtcagacctatgttttggattctcagggtggattggtaccgccagatgttattggtgaactctacattgcgggtgatgctttaagtttaggctatgtgaataacccggaacaaaatgcggcacagtttgttgaaatggctatcttgccggaacaaacagtaggtttatataaaaccggtgatcgtgtttattggaataacgagggtgaactggtttatgtcggtcgtcttgataatcaggtcaagatcagaggttttcgtatcgaaacccgcgaaatagagtcagcattgtcagctattgatggtgtggcgacaagtattgtgcgggttactgtcgatgcaaccagcgaaaaacaactatgtgcctggctggtgatgccagaggggaccgaaacggatgctgtcatccccccgataagagagcaactgaaaacccgattaccagagtatatggtgccaaccctatatgctgtgatagccactataccaactacggctaatggtaaagtgaattttgctgccctacctgagccaaaaccttgcattacgcgaggattggatcgtgttgcggaaactgaaattgaaaaacagttggtacaactgtgtgccgacgcactgaaattaccgtcaagcatggtgagtttagccgcgtcttttatcgaattgggagggaactcattaaccttgttgaggtttttacatcagatacaacagacttttgctgtagtgataagcattgccgatgtcatgacggccactaatctggcagtactggcactgatgattgagcgtaaacagttgcaacaaactgaacaaagccatcagggatgtaacacggtggcggaagaaggctggttatgatgataaaaataggcgctgataaataaggtggaataatgcgagttattgatattattcggcaagcttcggctgcgggcgtgcagttatttgttgagcgcggcaaattgggttttaaagttatatcgggttatgtttttacccctgaactaaaagccttggtagtggcgaataaagctgaaattattgcttttttagcgccagatgaagccattaaattggtgtcattgggtactgatcaaacgccattatttttggttcctggtgctgattctttagcatcatcttttgttgatttggctgagaaaataaaaaccgatttttgccttaaggtatttgatgcaacctccctattattggggggtgaaacactttctgtcaaaacattggctgaacgttatgccgcattacttttgcaagcttatccacaagagcattatcgactggcgggttattgtgtgggagcatgtacagcctttgaggttgctttggtgctggaaagtgaagggaaaaccgttgacttgatggttattgagagttttcttaccgcctatgaccgacaaccttatacccatgaggagatcgatgatgtgagcaccaggttgattcaaggtattgaaggtgaagctctggatcgctttattgaggcttataaaatctactctattatggcttgcaattatgtaccatcggccaaattaaacggcaggatgacatttatttattgtgaaagctccatacaactacgggcagaaaaaaagaaaattattgcatcgttacaagattatgtcacacaaacgattacttatggcatggtaagcggtgatcattactcagtattaaaaccgggtgccgttgagactctggctgatgccatattattacagcattaccgaccagaaccctcatttaaaaaattgaacttaacctatcaggcgttgcttgacatggtgcaatatcgggccgatatttatcggcctataggtgatatcaatagctatcaccgggtagtgatatcgcaggtcggatgttggtttattgaaataacagatgagcgtgtacatattgatttcaatgctaataatacaatgtgtgcgcaatatgatttttatagtgagattgaaatcagtgtggacacattaatagcgtgcgcaaccagtgaggagccgtccgctgctattgctaaggcgatattggataataaaattcaggtacaacgaggagaaaatctttatcacttattatggattgtttttggcgtcacggaacctgatgagatttttgactggattgaacagcaagacagccaagatgagcatttaggtgttcaaacgaatggaaggacttttaacgataaatggcatattgattctcatatttgtactcgctatatgcctgctcattacagtgtgattcataaggcattaatgtctctaccgatcgaatacagtgactttcaatttatcgatttggggtgtgggagagggcgagctattatatgtgcatccagttacaactttagcaagattaccggagtagaaattgttgaatcattggcattaattgcacagcaaaatgttaacgcgataaagcaaaaaagtcatattgagataatacaagctgatgtaaacgactatcgatttaatgaaaaccatgtagttatttataactttgatagttttgttaatgatcaacttaagcaacttctacagtggttgaaaatcgatgtttatgataaaggttataaagtgttgattttacaaattaatggtgatgatgctatttatcaacactgtttttggttaacgccgaaaataattagccgaggttttatggggggatggaatatcactctgtggcaaagtgaaggttgttaaaatctggcgataataaaattttacttgggagttaatatcgatgatctctgatttggttaaagccaatcggttaaaaattatttttaatagtattgttggtgcttttagtgctttctttagtatttggttaatttccttgattaccgatgatgcattagaacagattagcgctgacttagtatcatggacagttaaattcttcatcgggcttgcctgcttgtttgttgtgagttcttttgctaattacttaatgacaaagttaagcgtcaaaattatttttgaagttcgtagtaccttagtgaaacgtatcttgaataccccttatgctattttggaacggattggcgggcataaagtccaggccagtttaacatctgatgtgagtgatatttccagagctatttctaccatgccgcagtttatttatcatgtgattacagtgattgcatgtttaggttttctggcattcaaatcgattgagctgtttatggtcacgttggtcactctcccgttagggcttttggtttcgcgttattttattagtaaagccgaagcttatgatgaggtatatcgtgatgattatgatagccttcatgaacagtttaaaagtctggtagatggagttaaagagcttaataataatgaaaagcgcaaacattcattttttaatcgaggtgttttaccatcattagaaaagattaatgactctgatcttaaatcagaaattttctggaaattgaatgaaaactgggggcaaatattattatttctggtgcttggatctattttattttctcacgttatgtgggagataggagaaagcaatgatattcttacctttatctttattatgacctttttgctgggccctgttgattttattttgtcctcacaggaaaccatagtaaaggcactcatatctctacgtaagattgatcgcttaaggttttctgaaaacttatcaatggagccaacattaaccaacacaggagagtttaaagaatggtctcgaatttccctgcgttccataagctttaaatatgccggtgaagggaattgtttttctgttgggccgattaatctggatattcagcgtggcgaaattatcattattaaaggcggtaatggcagtggtaaatcaacttttgctaaattgttgattggtctattgaataaatctgaaggtgatattttcatagatgataaggtggttaatgaagataatcgagagaattatctgaatatgtacagtgttattcattcagatttttatctatttgatacagtaattaatcgaaaaggtgaacttgccgatgatgaattaactcgtcaatatctgaaaaaattggatttagcagaaaaagtcacggttaaagatggtagattatccacaactaagctttctcatggtcaacgtaaacgcttagctctggttatctcttatatggaagatgcgcctatttatttgtttgatgaatgggcagccgatcaagatcctaattatagaagatttttctatcatgaattactttctgaaatgaagcgcaatggaaaaaccgtcatcgttattagccatgacgataaatattttcatatcgccgacagagttatcactatggataatggtttggtggataatattgaaataaacgtacaccccgataaagtagaaaatgctgctttagagtccgctatttctactatgtatacccaatagatttcaagttgcagtgcggcggcaagagaacgcatccccaggagcatagataactatgtgactggggtaagtgaacgcagccaacaaagcagcagcttgaaagatgaagggtatagttataatcgctcgtagatatcaggaggttataatgttagaactatttgaagatcaattggctggaattagagaaaaatatgggagtgattgtttaaaaagagtagaggatatgttttatcctttactacaacaaagagcgccattacaagcagatgccaagtatatcatgcccgggctttctaccacgccgtggttggatacgaattcttttccgcagttgcagccgttagtcacctcattgatgaataatgcggataaaataaaacaggaaattaacgcggttatcagcggtgagtcccaatatatcaccgattatgagcactatttgggaactcaaaaagattggaaggcattatatttatttaaaaatggtcagcctaataacgcggttgccaatattttgcccgctacgtggcatatttttaataatgaattaagggattggcattgtcctctgttggaagttcacttttcggtgttgcaaccaggtacggtgattaaaccgcattgtgatttatggaatttcactcttaatttacattttgcggtcgatattcctgctagccattgtgagatcattgttgccaatgaagccagatgttggaaagaaggtgaatgtttactgtttgattattcttatcagcatgaagcttataaccgctcagataaacataggatttgtttattaatggatatctggcatcccaatttatcatttgcagaacgggaagcattggttttgatcattaccggtattcgtaaacttttcggttagcttataccctacggatttcaagatgcatcgcgacggcaagggaacgaatccccgagcatagataacgatgtgaccggggtgagtgagtgcagccaacaaagaggcaacttgaaagataacgggtatatttttctagatatgggtgtgttgttggctattagcaacacagtttaaaaggatagcctttatgaatagaaagaggcaatacatggtgtctgatattcaggagtctaatgacttcgtttttgagcttgactcaacagagcagacatatttaaagcagcaatttttagagtctactctaaaatatgacattgataatttcgaggaattttattggaaatgtttttatcaatcgtttaatttgcctgtgcgtttacagaaaaagttatttgactttcgtgcattagaaaatgaaaattatttgctgataaaggggttgcctatccctgatgatctttgcttaacgcctttatcttatgaacaaacaaatagttctgaggtggcgggggttcgtactttgatatcaacgattttatctcgaattggatatatttattcgtttgttaataaaaagaactttaattttatcgatgatgtttttccaatggaaaaatataaggatatgcagttagggacaaacaaagagtttttagaatggcatgttgaagatggtttccatgatgcaaaagcggattgggttgctttatattgtctgcgtggcgataaaaatgctgaaacctacttgtttcaaacaaagaatattcatttggatgctgaaaccattgctgaattgcaaaaatcaaactttgagattgatgtcgatccaacctttgtatcgaatgtcagtggccgccgttgtgttgccgtattaagtcaacataaagaaccagaaatgatatttgatcccgcttatatgcgttgtttaacaccaaaggcagaagccgcgttggaaaagttgaatcagtgtattaatgaaaatagagaggcttttatattatctcctggagacatgttgctatttgataaccgtaaagttgctcatgcacgcagcgagtatgaacctcgatacgatggttatgatcgttggttactcagagcattaatattggaatcaaaattcaaagccagagattacttttatacaggtactttaagggcaaaataaaaatgacatcatttaaaacaatattatttaaaacaatatcatttaaatcaatcacattactgttgattaccttattaacaataagttgtagcggatttaaaagttattcagaaaagacgaagacagcatttgaagcgaaaattgttcgtactcattatggtgtccctcatatttatgcacacgacttgggaagcttgagttttggcaatgcctatgctcaggcacaagataatatatgcattatggcggatgattatgtgcgcattagaggggagcgtgcgcgtttctttggtgctgatagagataagcagggggactcactgaatttaattcaggacttcggttataaaacgttagctttggtggaacaggcgcgtgaaaaatggccgcaattaagtgctgattcacaggtaattattgatggatttgttgcaggttataatacctacctgtcccatgttaaggaagggcgttataccttaccaaaagcttgtcgagatcaagaatgggtagcacctattcaacgtgaggatgtattggcatatgtattttctattgcggtatttcctggttctgctcaatttcttgctgattattatgcggctgatcccaataaagaagatcaaaaacaattgtctttaaatatatctaggaataatggttattccattggttccaatggttgggcattaggccgtgacaaagttgaagaagtcaatggtatgttattggctaatccccattttccttatgaaggcaacatgcgtttttggcaggtgcatcatgtcatgaatggaaagattgatgttatgggagcgtctttaattggttttccgggtattattaatattggatttaatcacaacattgcctggactcacacttattcatcggctgaacatgtcattgtttataaaatgcaaactgctgctaacaatccgctcaattatgtgattgatggtgttattaaaccggtaatgtcgaagccaattcatattgaagtcaaaactgatagcggtattaaaacggtcacgaaagatcatttttatactgatattgggcccattattgaaaatgaagactttgcttggtccgagtctgaattttatgtcgtgaaagatgtcaatctttacaatcttgatatgattgatcattggttggcgttgaatcgagcggatagtcttgctgatgcaaaacaatcttataaagattttaatggtttggcttttaataacacgttgttaactggtaaagaaggcgttggtatttttattggtgataaagctgtaccggcattgtctcttgaagctattcaattattgaatgataacgaaactttggcggcagcacgtgagaagtatggcgtgactattttaccgggtaactcatcatccatgatttttaccgaagccttgggttatgatcagatcccacagctcgtggaaacatcctatgtacaaaattccaatgattctcactgggcaacgaacttggaacatttactcgaaggtttttccccacttctgggtaatgaacgaaaacccctgtcgttcagaactcgtatgggattgcaactaatacaggatgcggcgggtgataataagcgattttctctcatggagttagaacaggcgttattctctgagcgttcatatttagccgaactgatattaaaagatgtggttgccctatgtgataaaacacagaaccgattaattagattggtgaatggcatgaaggtcgatattactcaggcatgtcaattgctatcacaatggaacggtgaatttaatgcggatagtcggggcgctattatattccgtgaattagcttttttaattgatcagcaaaaacactttgccgtaccgtttgacatagcccacccggcaacaacgccacgccaattaaaacaaagtgaagagtttgtcaccttgttagcacgagcggttgccaatgtgaataatgtggggctggctttagatactccggtgagtaagtttcaatttattgaaagtaccgcacctgacggtaaaccggccgataatcgcatgagttggccggggttgtttggagaagaaggcggctttaataagatcgctgcatgggattgggatgaaaccctgtttcctaaacatcattatactgtgggtaatgatgtggtgactggtgaggcattggaatcggagctaactgatcaaggatatcatattcgttatggttctagttggataatgctggtggcatttgatcaacaagggcctaatgcgcgtgggttactcacttattcgcaatcttctgatattgattcgcctcattttgcagatcagagcagattttattctcattataaacagctattgccgttgccttatcggccaaaagagattaaacgatcaactatttcagaattggttatcaaacattaaattaagattgcttggtgccggttcacaagaaattttttgatgtttttaacataagcattataactggctggttgcttcagccagttatagaaaataccctatggattcaagatgcagccaacaaagaggcaacttgaaagatgatgggtaaatactatttattctttggaacgatataaatatgatggatttttctaattctggttatcagaaatgcgtagagttcaccatgccatccatagaggatgtgtttgcttgtatgataaatagagttccttttattattcgaggaggcgctgaacagtgggtagcaagaacaaagtggacatgggactattttcagcaaaaatttggtcatcatctgataaaagtatttcgatcatcaaataataaagataataaatatatgtctcttggtgactatattgattatataaaagatatggaagaacctgatccttattatgcctctgcgtggccgttttcgctctattttaaagaattggtgagtgattatgaggtccctgactatttttcttgcttaattcgtcagcgtgtttcagacaatattttgcataatgaagcggcattactattacttcgctggatttatatggggcctaaaaacagcggctctcgtatgcacttggacattgcttctactcatgcttggaatgcggtgatgagtggtcgaaaagagtgggtattttatgggccggaagaagcaatgaaaataggttatggcaacgttgatgcttttaaccctgatttggctttatatcccgatttcattcaggctcaaggtattcattgtatacagaatcctggtgatattgttttcacgccttgtacacactatcatcaagttaaaaatttggaggcaggaatttcaatcactgaaaattttattaatgacacgaacttggagctggttaagcattccataaacaacgacgatgatatatcaccggaacaagcaaattttattcggatgttaattcctgagttaagttaattcgaattctgcttaagccgtcactcccgaatagaaaaattcagtggcggtttctttttatttaaataataagtccacccaacacggttaataaatccctcttgccagaatatggtcgtgaacgttctaatattacgtctacgaccatgatatagtgtggaaaacccggcattattaataaattgatgtatttctgaaaggtttaatacttaaggttcagtgcgagaaaggaacaaccatatgggaagttgtctccgtgttcaaagagatgtatgactctgatgtctttcctgcacttactattaaaagtgacgaatgcggtaaaaggatagggcattgagtggtgaaatcgtttactggaatcattgtattctgttgtttccagatatcttgagctgcttacagcctgcaaagattgtatgattcggcacaatgcaattacaagaagttgttttctcttgcccgccagcatcttcaatgtcagaatcacagattaccggcaggtgattgatagtagcgtgctgattttcattaaaatcatgggacattagaaagttcgggagtattcaatagatcatgaatcgctcaacctactttaatttatgtgaagaaaagctttcatttctatgtactcgagtggagctacgtggaaagttgaacctactcgatttgcatcttcattgtgaagacttttacgttcatttttttaatctactctttgggtatgttttgaagaatgttaatcagtatactcacaatgctgaaggtatcgacttgattgactctgttcagaaagttgtgttacaggtttcttcgactgcgactaaacaaaaaattgagtctgctctgtcaaagaaccttacaacatatagggggtacagcttcaaattcatttctatctcagatgctagcgcattaagaagactttcctataagaaccctcattcattggtgtttgagcctatatttgacatacatgatgtcagatctctactagatcacattctccatttagatattgtcaaacagcaagcagtctatgaatttcttagcaaggagttgtcatcggtaggtgtgaagaatccacttactgaaacgaacattgctgctgtgataaatatattagcgaaagaaaatctttccgatatgccgagtgtggacaaaccgactccattcaatgttgatgaaaaattggtttttaacgatcttaatactgcggctatggttgttgaggattacaaaattcaccacggcagactaagccgtatttatgcagagtttgatgtggctggtcaaaataagagtaaatctgtccttgattcgttacgtaatagttacattaagttgtgtactacatattcagctgatgaactattctttaatatagttgatcgggctgtcacagtagtcaagcaaagtgctaattatgtatcaatgcccctggaagagctagaactttgcgtgaatgtcattgttgttgatgcattcattagatgccgtatttttaagaatcctaagggcatagaaaatgttgttgcctaaagacattcatcctactaatagcctttactttaatggagcttatgtgcttcaggctgtaagacagtataaagaggtcagtatgatggatctctttgtggagtctcgtaaattacgtgatattccgatgccgattttcgttttaacgttagattggttatttcttgcagatttggtttcatataacgatagcggaaatattgtaccatgttcctaaaatcactccgaatttccaactctgaaggtgtaatccgtcacattccttttcacgcgggcttaaatctcatcgtagatgagactctctcagggccagagcagactactgggaacaatgttggtaagacaacagtattaatgttgattgatttttgtttgggagcaaatggtaaaggaatttatactgacccagagaatcgcaaaagcgaatatgtgcttgttaagaattttctcattgacacagctgttttagttactcttactcttactgctgacttagataacccattcgctgaggagcttgttattgagaggaattttcttccacgtaagcaaattattcgccggatcaatggtcatcaaaaaactgctgacgaatttgaggcggcactcactgagcaactttttcctgggcatttcggtaaaaagccaactttcccacaaattatttctcataacatcagatatagagagttgagtgttataaatacgcttcgtaccttgagtgaatttactcgagatgatgaatatgaaactctttatttattcctcttgggatgtaattttgatcaaggcgataccaagcagaatctcctggcaagcattcgtatggagatgtcctttaagggtagacttgagtcgaagcaaacccgatctgcatatgaagcttctatggctttgctttctacagagattgctaaactaaatgaaaagaagtcggagttttatatcaaccctaattttgaaagtgatcttgagacacttgatgagattaaatataaaattaatgtatcgagttcagttattagtaggttaaaacttcgtcgaagtttgattgatgaagcaatcagagagataaattccagccatactgaaattgatactaatcaattaaaggcactctacggtgaggtaactgaacgtttgtcaggtgtacaaaagtcgtttgaggatttgttagaatttcataatcggatggtggatgagaaggcacgttatatagctaaagagattccagcacttgagcaggaattagttgttagggaaaataagctagcaagtttattaaatgaggagcagactttagccgcaaaaattagtaaaagcggctctttagaagaattggaatccttaattatagagttgaatgaaaagcaccgtcgaatgggggagtttgagacaattattgagcaaattctaactgttgatacaacccttagaaatttgaataaatctcttaatgaaattgatgaagaattattttcggcagattttgaatctgcaattcaaatgcagcttaataagttaaataagtacttttcctctatttctcaggaactttatggtgagcaatatgcattaaaggttgaccgaactactactcgaactgggcaaagaatatataaattcagttcattcaatacaaattttagttcgggtaagaagcagggagagattacctgtttcgatatagcctataccctttttgcggacaaagaggggattccatgctatcactttcttctaaacgataagaaggagctcatgcatgacaatcaactaacgaaaattgctatgttagttgagcgagaacataaacatgttcaatatgtggcttcaatcttgaaagacaagttaccgccagaacttaatcaagaaaagtacttcgttctcagactatctcaagatgataagttatttaggatagaatcaagcaattaaaatacttaagaaaaattggttagtttgagtttcgtctaagaagaacagtaagttactgaggcactattagttacttgcaaatagttctttgcaaataatgagtttgttaatgttaacaagcctgattagtttagaagagttttactgtaattataagaaatgaaagcacttagtaactgtaatgaacgtcagcatgttaggtagctgacagtaccttttagattgatggtaggtatactaaccatcaatctggggttctcattctttttgaacaatgaatgtgttgtagcgattcccctttttccaaaacaacctgttaatcattttggattgtttctaggtcatagtgttcttggttcaataaaacgaagagtattttataaaaacaacaaattttgtcgccaaagcgacattcctgcataaagtgttttaacatttggtcgttaaatacgtacaatcccgtccctgaatgtgttctctacagaataggcttagtttgtcgctgatccaattttacacatcgcggagtcgtctgccagcttggctcggtatattcgcgatactgatgttgttcattgcgccagtgatttcccggtcactggaacatgcgcgcagcattagtgaggctcattcatcgaaagtggtcgattgccatagggtgatgtcatctgacgatgatatacctcggaatatgtctcattctgacgtttcttccgcatcacatgttactaagttatatagtactaatagtactaaccatcatgatggcatgcagatgggtatgcatagtgttggtatgtcgatgttggaggatattgcctgtggatactgcgtttttctgatccatatacctatgctggatttggcgaatacaccgctattttggtcaacttcgctgacttcacggccaccaccgattcaaaccgtagcctcctttttgccgcatttcatcttttctgattcgttgcctcgtgctccgcctgaaccgatctcatctcattgatttaaacataatgaaatgtcctgctcattgttgagttaggaacagtttgttcataccaaaaatgatttggttggattctataacctattccgttgttgatagaaatatcactttggaaggtgggtttacatttaaggcaagatgatgatgttcgaaaaaaattctcctcataaaaaaaataggctatcccattgtatccgttcggccatgccactttttttgctagcgacttttaatggctatgcggctgaaaccgcagcggatgtacacgaccatgtaaagggtgcaaaaactaatgatggggatgtgattaccgtaacagcacctttgtattctcctttggcaattgttacctcgccaaaaacgcctcgtcagccggttccggcaagtgacggctctgattatttaaaaaccatccccggattttctcaaatccgtaatggtggcaccaatggcgacccagtatttcggggaatgtttggttcgaggattaagcttttgactgatggtgcagaaatgctaggagcttgtcccggcagaatggatgcgccttcatcctatatttcgccagaaagttatgatttgctgaccgtcattaaagggccccaaacggtattgtggggggctggcgcttcagcagggacggtaagatttgaacgtgaacatccgcgatttgatgagccgggagtcaaattcaatgccagtggattgacgggttcaaatgagcgttgggatggcaatgtggatgccagtattggcaatgaattgggatatttacgtttaatggcaaataaatcccgttcaaatgactacaaagatggtggtggatatcgcgttccttcacgttgggataaatggaatagtgatctggcgttagggtggacgccggataaagacacattgtttgagttcaccgcaggaaaaggggacggagaagcgcgttatgctggacgtagcatggacggttcgcaattcaaacgtgaaagtctcggtgtgcgttttgagaaatctaacctcggtgaggtgcttgataaggttgaagcccaagtttattacaactataccaaccatattatggacaatatcactttgcgttctccgaatagcgccatgtcaatggggatgtcttctgcgggttgtaaacatggatgtggtatgcacatgaatatgaaccacggtatgtcgatgcaactggatcgtcgtgttatcggggggcgagtcatgggcacctggctatggcaagacttcaaattggaaagtggcgcagatacgcaaaccaatacccatcgtaataaagcaggtaatgtatggcaaaaggatgctcaattctacaactatggcctatttagtgagctaacttggtatgccacagaacagagcgaattgataaccggtgcccgtcttgatcgcagccgagtaaagaaatttgcgggtaatagtgaaaaagagcgtaatgatactttaccgagtggttttatgcgcttagagcatactctggcggctatgccaatgatgttttatgccggtattggttacaccgaacgtttccctgactattgggaactgttctcgcctacctatggtccgacggggagtaccagtgcttttgatggggtaaaaagtgagaaaaccactcagcttgatattggtgcccaatataccggggaacgttttaatggttgggtatccgcctatgtagggtgtgtaagtgatttcattttatttagatatagcccgacaaacgcccgtattagccaggctgataatgttaatgccaatatcatgggcggagaaatgggctttggttatcaattgacagatcattggaaaacggatgccagcctagcctatgcttggggagaaaaccggacggataacaagccgatgcctcagatcccacctctggaagcccgcttcggcttgacctatgaacgtggtgattggagcagtacaggtttgtggcgattggtgagcagccagcatcggattgccgtggggcaggggaatgttgtcggcaaagattttcaagatagttccggtttcggcgtgctctctgccaatgttgcctataaggttaacaaagatataaaagtgagcgctggcattgacaatatcttggataaagaatatagcgaacaccttaaccttgccggtaatagcacctttggttattcagcgaatacctcagtgaatgaacccggccggacagtgtgggcgaaagtagatataaagttttaatgagaaagtggcacccaattattgggtgcccttttcctgatcgagaattatttcttattaccgatatacggataaacttttatataatcaatatcgaatgttgcggttgtttcatttatcgggccataaccctgtgctggataactgcgcggcacttcggagctcaaaataatatattggttggcgattgaaattggaacttgatctagtccagacagattttggggaatatcatcaacataaaatgtataaccatttggtgtccacgccacagcaaatttatggaattgaccatcagcaagtttatttgtagacaatctctttgaccattctttatgagcgctgccataaccattccagtgaattgcgtgatcatattgatcctgtgtcgcttcagctaaatgttcaaatacatcaatttcgacacctgatttttttggatttgttaaatcgaggcccattgtcggtgactggacccagaatgcaacttgattaccttccgcacgattaaatctgatagcggcttcccaatagccatatgattgtagaaaacttttttgtgttgaaatcatgccgcaataattctgtagcttgccagaagagctatcggaataggtttttatggttaaatgtccatttcgcacaataaccgctgattgagtattaatacaattttttctgacacccaggccacggtaatcccacttttgggtattaagtattgtgccatcgaaattatcttcaaataacggtgtagggctgaattcattggggatttgtgctagagcatatccactgaacagtgtgcttaatagcaatgtataagttagctgaattttcatctattttccttgtatatttaacatgaatatttatccgagatctattaccgatttctattcgaatccttgaaccttatggatatcaatttaaaaaatgaatgttattaatttctcctttttgtcgtggagagatgcgttactttatcgaatattcacgacagggttacctatttaatttattacccctatacccgttatctttcaagttgcctctttgttggctgcactctctcaccccggtcacatagttatctatgctcccggggattcgctcctttgccgccgcgatccatctcgaaatccatagggtatatgcttttcgttttagttattcaatatggtgttaatattggttgataaaaatgcaagataattaaagtcggcaacatgggttaggaaaaaataattgagatatacccgttatccttcaagttgcctctttgttggctgcactcactcaccccggtcacatcgttatctatgctcccggggattcgctcccttgccgccgcgatgcatcttgaaatccatagggtataggtagaataaaaaacagtgaatatcgatgaataaaaccccgttcactggaacggggtgtatgacaactttaaattatttcgatgcatccagagcttgggcaagatcggcaataatatcgtcgatatgttcaatgccgattgataagcgaatcatatcctgtgatatgccagctttaattaactcttcatcatttaattggctatgtgttgttgacgctggatgacaggcgagtgatttagcatcgccgatgttaaccagtcgcacaattaattttagtgcgtcaataaatcgcgcgccggattgttgcccgcctttaataccaaaagagaggagcgctgagggctttccattcatatactgttgagccagttgatgttctggatggtttggcaatccggcatatttcacccaactaacttgaggatgctcttgcagataatgagcgactttcagtgcattttcagtatgacgctccattcttaatgccagtgtttccaatccttgtagaataaggaaagcattaaaaggcgacagtgcagcgcccatattacgtagcggtaccacacggcaatgcccgataaatgcagccttgccaaattgctcggtataaacgacgttatgataggaggggtccggggtagtcaatatagcaaaccgctgcttatattttttccaggggaaattgccggaatccacaatgatgccgccaatagagttaccatgtcctcccatatatttggttaaagagtgaataacaatatcagcgccatactcgaaggggcggcaaagcacaggcgtggcgacagtgttatcaacaattaagggaacaccatgacgatgggcgacgtcggcaaattttttcagatcaacaatattaccggctggattaccaatagattcacaaaataccgccttggtacgatcatcaatcagtgactccaatgctgcaatatcatcgtgttcagcaaatcgtgtttcaataccgaatcgcggcaatgtgtgagctagcaggttatgagtgccgccatataacttagcaacagatataatgttatctccagcgctagcaatggattgaattgcgcaagtgacggccgccatgccagatgcaacggtcaaagcggctattcctccttcgagtaaagcaacccgtttttccaatacatcattggttgggttcataatgcgggaatagatgttaccctcaacctttaaatcaaacagatcggcaccatgttgagtatcgtcaaacgcataggatgttgtttgatagataggaacggcaacggctttagttgttggatctggggaatatccgccgtggatagcaagagtttctggtttcattttcgatctcttcttttacggtaagatgacatatatctttgatgaataggtgtaagcagcttttgttaaaaccatatacccgttatctttcaaattgcctctttgttggctgcactcactcaccccggtcacatagttcgctatgctcccggggattcgctcccttgccgtcgcgatccatcttgaaatccattgggtatagccttacttactattgctcataaataatttaattgatatctttttttgattgatgaactattagaatcggtatcatgtatagacatgatatttccgctaattctttattaattaaagaaataatttgaaaaagttactaattatttgctttcgctatgctggcatctttattttttaagaatgtggatattatcacaaaagacttcaacgatttcagccaagtaacattaactattaaaataaaaaatgagaacaaaatatgcaaataaatatccaatcttttagaaagatcacaaaaatttccgtgaaatagttagttttcgttagattggtttaatttatttcttcactgttgcctgaacgaaaatagaaggtatactcatcgttctaattttttcgaacttttctaaatgattttggtcgtaatttattgttagtatgatcaatattggcactaaccaataaattagtgggattattatggctaagttttcaaactggcgggagttaaaacaacttttatttttctctttccctatcatcgttagtcagatagcacgcacagccatgagttttgtggatattgtgatgtctggtcactatgctacggctgatttagccgccgtaacattaggaagtagtatttggtttcctatatttgtattaggatatgggacgattatcatgctggcagcagatgtcgctaagcagaaagcgcaacatgatgatgaagggattaaagacagtcttaaaaattacttgtttctggcggtgatactttcgataccaataattattttattaatgttagttagctggctactttcgtttataggcatcgatgagcatattttagaaattacccagggctatgttattgctctggcttgtggtgttcctagcgttatgatatttaatgtttttcgttcatttctacaaggattggaagacacaaaaatcgcaatgtatttgtctgctggtgctttattattgaatataccattaaactacatacttatttatggaaaactgggtttgccagaaatgggaggtattggcgcgggtattacaactgcaattattaataatctaattgctgtatgcctgattatctattttttgctaaagaaggaatatcggcgatataggccagatttcagtttaccaaaatataattctttaattagaactttttatattggtatgccaagtggattggctctttttgttgaaatggtttttctggatgtgattgcgataaccgctgctcctttgggggcgcaagtcattgctgcacataatattatgcttaatattacctctatcatctataccataacagggggaattgcagccgcggtaactgtgagagtcggctcctatattggcaagagagataaaatatcattaacaggtactataaaaatctcaattgctttgattttatctatttccgcagttattggtgttttaatctattatttcgcaggttcatttatttcactctatactaacgacaatggcgtcataataattgcgcttaacataatctttctgttatgcctgttccaattctttgactcttgtcaggcggctttatccggtattttacgaggctttcatgatacccgatcggtattttacgcgccgttattcggttattggttggtgggtttgccattagggtttattttggctttgacagattgggtaaccgagcgtatgggaattatcgggttttggtatgggttggttttgggtctttttgtgaacgctattttgctgtttatcatattaaaggttagacagagaggaatgatttctcggttaatttcatattaatcgaagagctatcgtatctacataaattccctgtcgaaaggtaggggatttttctgaatttatttaaataactgaattcaactctttaatcttggagctaaaagagtatcaatgttaccatttgactatttattttgtaaaaaattacagttgatgaaaatttactcgataaaactgtggttattttattttccatcaatgggagatgatatttagttataatttaagtcatgttagtaatatttttgttttagtgagtttactaattgatatattagtgattattctcagaataaatatatacccgttatccttcaagttgcctctttgttggctgcactcgctcaccccggtcacatcgttatctatgctcccggggattcactcccttgccgtcgcgatgcatcttgaaatccatagggtatatttatatctgtggaaataatttttctatttaaatcatttagatggaatatatattttttgtttttatttctcattgtcaaatatttcttaattaatgtgaaatagctaatttgatatcacatagtaaccatttaaataataaccattaaattagtttattattgaaataatttcttattcatctatctatatgtattgatttttttacgctcattattggtgattcacctaatattatatccatccttatattaaggttatggcaaatatttatttaataattaaatagttatctatattaattgccattctatacaaatagatacaattgttttatgataatgattatcatttcattttttattaaaagtacgttagtatgcgcgccagtcttcggacggtactaaaactatgtaataagcaatactctaacatttaattagttaacataaggaatatgctatgaacaaagttaaagtgttaattgcagtattaggtacatgtgggttagtaacacaagctatagcggccccaggttttgggcaaactcaaaagtttgatgagaataaacctagcgttaacgtaggggtgactgaaccacgtggtggtggtcacccaaccttaggtggagagccggggattggggtgcaatctatttctaatggtaggattattagcttttcaagccttgctgcttatgtcaaggcggatacaaatggaattcataaaatttctatgcctggatcgggtagtcatggaggcatgggggtattcaactttagtaaagtggctgatgctgatgtctattttggtgaatggtcacaaaccggtaaggtgaatgatactactcatactgcctattattccggtaaagatgtcacgactaatttgcctaccggtggtattgcaacttatacggttaaaggaattaaccaatatagtggtagcaatgctctacatggaacatttactgctgatttcggtcagaaaagacttactggttcaatagcaaatagcgcactcactgtcggtattaattctgttattaaatctgatggctcatttgttggtagtgcgactgctggaggtgctgttggtagaaatagcggacatttctttggtgataatgccgctagtttagcagggactgctacgtttgctgcggaccatagtaaagataccgcctttggtggaactaagaacccgtaatatgcgttcttagtaactggataaggcaaagccatgtgggctttgtcttatttttgtttatttttgactcgacgattaagcagtgatattaccgatgctaaatacctcaattgttcgttttactttactcattagttgtttgtttatagagccatctctagtgttggcagatgaagataccggtagaagattgtggtataacgtacagcgaaatttgcaggatcaagaaaaagcgttggtcacagatgaaaccgtggataaaaaaacggatcatttattgatagtccttaatggtcaaacgtttagtgttgaaaacaatgtgaatgatattggtcaggcgctttatttagccattaatcatcaacaagtgcaggatgttgagcgttttttatcgatgtaccagaaattacctggacatgatacccaattggtccattttgctcaggcaaatctggcgcgtttacaaggtgacttagtagcagcagaacagcattatcaggccatcttgcagcaacaacctgattttacccgggctaaattagagttagccagagtctattatgagaatcaaaagaatagagaagccagcttactatttaatgagatttcagcagttagtcgcgataatgaaaataaattaccaccagcagtcattaagaatataactaattatcaggaggcgattaatttgcgtaattcctggcgtggatctttctccgtaggatatatctttaacgataacacgaatatgtcgtcagataagcctcctgtttgcactctctatcgtgaaaatggtgagtgtgcggttgaacgtaagctgcctatggcaaagaaagcgaatggtattagttatgatgctacgttacgtaagatatatccgctaagtggtcaccacggtgtctttttacgttcgatgacttatggggaaagttatcgtcatcatagtgaggagaatgaaaatacgacttctgcttattttggttatagttataaagcgcaaaaaaatgatttcctaatggggccagttgttgagtttaattctgttggtaaccattcccgttatcgtactacgggaataaaatctgaatggatgaatattttatctgaaaatttggtattgaatttggaaggtgaatataagcagtttcgttatcataaactttataatcataatgacggtaatatggcctctgtttatgccaccttatcttattatttaactgatcagacaattacctttgcgggtggtgattgggttaataaaactagtgttgagaaagctgacgattatcaacaaaaaggtgtgagagcaggcatttcaactcaattgtatccgggaattaatgcagtggtatttactgtattacgccagcggcaatttggtgattacagtgtgcctctaaatgcacgtcgtaaagataatgaacaattctatgcggcaattgtgagtatgcctaaatttgaagttttcggtttaaccccagtaattacttatcggtttagaaaaaataatagtaatgttgattggctctattcctataataagaatgaagtgttagtcaagtttgaaaagtatttttgatactgattgaagtaacaagttatacccaatggatttcaagatgcatcgcggcggcaagggagcgaatccccgggagcatagagaacgatgtgaccggggtgagtgcagccaacaaagaggtaacttgaaagataacgggtatataccctatggatttcaagatggatcgcggcggcaagggagtgaatccccgggagcatagcaaactatgtgaccggggtgagcgagtgcagccaacaaagaggcaacttgaaagatgacgggtatatttcaatccccactatggcagataatgattatgtataaattaaataataaatatagcaaaataacattcatgctggcattggcttacagtatgatgccctaccgtgttgatgccgaaacatcaatagcttctgctcagccatctaaacaatccactgaaaataaagctgaccttggtaaaattaacgtttcagcgaccagtgaaaaagatgaggcaggttatgatgcggtttatgataaagatattaccaatatttatttgggtaaggatttggtagaacgctataaaggcgcttcaccagcggatgttttaaaaagtgcagttggcgtatttagtggtgattcgagaaacagtggtgcattagatcctaatattcgaggtattcaggggcagggacgggtgcctgttaccattgatggtactgagcaggcaattaccacctggcgtggttataatggtgcgaataatcgtaattatattgatcctaacttgatcagcagtattgaaatagaaaaaggtccgtcactgacgcgtggggtaaaaggctcaatcggtggggccattatgataaaaactttgggtatcgatgatgtggtaccaatagatgaacgatttggtattaatttgaaattggaaaccagtagtaatgcggttaaagaacgtgtaccgagtttgacatggggacaagattatcgagatattcctggttttactaaggggtttaattatgttgatcctgcgctagaaattacgccgaaaacctcaaaagataataaattattgggtctgaaagataatgcaatacgtttggcaatcggtactcgccaagagctctttgatttaatggcagcttatagttaccgcagtaaaggaaactattttgctggcaagggtggtgctcatcgctatgatgatcccatcagtaaaaaggatatagagatccttgatggtggtacccggtcgtatgatccttatttgccttttgtcgcacgtatatatcgccctggcaatgaggtacctaatacctccagtgaaatggaatcttggttagttaaaaatacttggtacttggctaaccaacagacgattgggcttggtatccgcgacactaaaacgatttacggggagattatgccttcgcggattggttgggttcgtgctaaagataatgttgtatcgcagtggccgttggcgaatgtacatcagcaggcatttaatctggattataagtggaaacctgatggaaataagtgggttgattttgatatgaaattttggattacccgtactatcagcgatactaatactgccgggggatatccacgtgaaccgcgagaacgagatgaagtatgggatgtgaataataagcaaagagatccgaatattgatggtcgtctggtagatactgcttctaccaatgctcataataaccgttggggtgttgatctttctaatgcttttgcgttgaccccggatctggatttaacattgtcagctaatctacaacgggaacgtttaggttctcatgatgattatgaagcaaaaagtttttctagttttcgttcgctaccaagaaaagggcgccgtcaggagaataatattgcttttaattttgactggcgtcctacttcatggttggcattaagtgccggagctaaacgagtcagttattggtctaaagatgattttttaaatgaacgtttagctgctcatgatcttcgctatagtcaggataagaaagtggttggtaagggactgcaatatatgagaacacttactgatcaggaagctgtattgtataaaaaatatagcaattgcgctgatgattgtttcgatgatttagatgaatttctcgaatatgaagaaaagaagatcacagaatcagaagaacgggattcaattcttcgccctatggcaccggtagatgtgctttggaaatatcatgacgatggtaagttatataaacaagataacccttatttcaatggggaacttgatatgaatgagcgcgttattgatcctgtgacgaataaagaagtgtataaatatgaatacagtactgctcaacagaatagccgttatgttgatgattctggagagatattgagtaacagtgatggtggtgtttatagagaaaaaagcgaacaagagcgttggtctaaacaacctaaacgtaaggatcatgcttgggctccggtattttccgcaacagcttatatttctgataatgcacgtatctatacccgttatgccgaagcggtacgtatgccgagtatttttgaagatactgtcggtttctcctctggtctcattgataaacctacacgtgcctctaaacctgaacgtagtaaaaccgttgaggtgggttatgtgcatgatttaagtcagttattaggtgcagagcgtaatgcagacattaaattcgcttattataatacagttatagaaaatatctttgaccgtgacagtaactttgtatttactcagctagataaacagaaattatccggtttagaactacaggggcgttatgataacggtagtttctttacccattttggcctatcttataatcttaagaataaagtttgcgataaaaccgcatcgctgatgttagatccaagaaaccagtttggtgtccctgaatgtattgatggtggtttccccggtggttttttaaggacagctattccaccgcgttattctcttaatctgaatattggcggccggttattaaatgaaaatttagaaatcggcagtagagtattataccacagtagtgttgagaataaggatgaaaaatggttaatgaagaaaataccaggcgcttataaaggaataaataataacccgatgcgttggaattcggtcatgactgtagatgcttatattaattatcaggttacgccagatgtaatcattgaattatccggcactaacttaaccgatcgctattatttggacccgttaacacgttccatgatgccagcgcccggacggacgtttaagcttagtgtcaccagtcggttctgactctttaagggagattagtcggttgcctgttaagagcgctggcaatctccagagataacgaacggaaagatggcttgaagttatgatgaaaaatcgtatttatattggcttatttgcttccttactgttacacgcgggcattctcgtgtttatggcgtggcatttactgcgtgatgacagtgcgaataatcaatcagtgaattcgccaataatcagtatgtcagtagaaatggttgcttcggcagcaccggccggacaggagcaacctgtggacccggaacctattccgttaccgccagagatagcggtagcggaatcacctcatgaggcaaaaatagctctcaataagccagtggataggccacggaaacaagaactgcccaaaaaacaggcagatgctaaaccgaagaacaagtctcagccacagaaagagctggtggaagatcctcagccaaaattggcagagcaaacggaaggcagctctcaattagcagggagagatgctgtggattcacaagctggtgcccgtcaagcgacgaccagccaaccgatgattggcatgggggctgatgagttacaaaactatcagtccgccttgcgtcgtgaaattgaaaaacataaacgctatccgcgtcgggctaagaagatgaagcaacagggtatcgtacaggtcaggtttagcttgctggatagtggcgatttgacaaatcaccaattagtgcagagttcaggcgctgatgaattagaccgcgctgcccttgcggctatccaacaggctcggtcggtaggactgaaaccggccggtttgccaagggatctcactttagcaatagaatttaatttgaaataaaggtttgggcagcgaagagactgtcgctgccctgataataatggtgccatgtgagtttggtacaagttaggtagcttcggtgttcggccgttcaattcgcatatgtaataacggaaatggattaccttgaccgtcaatttctgagcggttaaaaacttcaaatcccaagtgctgatagaaacccaccccttgaacattttgttcattaacatcaagttcattgatacctaatttgctaatagcaaaattcagcaatgtcttgccgatgcctttgccacgggaatctagagagataaacaacatttcaactcgatgctgatcaacgctaataaaaccttcaatttcgtgtttatcatttatcgctttataaaccgtcagcatcggtaaataggtatgcagaatcaatgggcgtaattgattaatatgttcgtcagataaaaagtcatgtgttgcccgtaccgaggcttcccagatttcgatcagtttattgaaatcggcctttatcgcttgctgaattctcatattcatttttcttaatcttttatttctctaaaccgatgatgaattaacgctatcacatttgttgtgatggatcgcttcagatattactcagacttagccgttattcctatccattattcttatcagaatcttatgctgtctgttttgtgatctatttcatgaaacaaaggagagaattcaatctatttggtctaatattactttttatagatagttgaattttaaccaatttggttaattgaacaatcaagcaacactaaactttaaaacctaaaaaaacaatgcgagattctccctgttgctaactataatgaggtattggttaatcagaaagggattgagtcatatctcattaacgtagtttctatttggattgatcatttcagttgagcggctagttcaatgataaatataaaataacttcttgaggatcatattaatgaaaagggcatttatatttgcaccaggcatgttagcactttcgataagtgcaatttcgaacgcacacacttatgaccatctatatgtttttggtgatagcttgagtgatggaggaaataaaggtcgatatatgatcaatggtacaaccagtcagttgtataacgattttattgctcaatatttagggactaaactgacccattcccaaaatggggggactaattatgcagtgggtggagcgactgctgttcctgatttaaacaaagataacaatactcaaaatcaagtagataattatctggcaagccacggtggtcgtgctgatcctaatggcatgtatgttcactggattggtggtaatgatcttaaagctgtcatgttaggaggcgatccgaaaattgttagaaatagtgcgatgaacgcctcggcacaggtgcataaacttcttgatgcgggagctgggatcgtcattgtacctactgttcccgatctcggaaaaacacccatgattatgaaagccgtcgtctctcagggactcactaagctcccgatttctctcactcctgaccaggttgaggaattaaaggatatgatccgtgcgggcactaatgaatatccaaccataaatgaagatattcgctctcaagttatccaagggatctttgaaaagcttgcgactagggcttcaaagggagatgctaaaacagcggaagaatataagcgacaattacttgataagtataacgaaacaagcagaaaagcctcaggattggttgataagtacaatgaattagaagataccgcacttagcaagaagggcggcaatattgttagggttgatgttaatgcacttttacatgaagtcattgataatcctttacgttacggtttttccaataccttaggctatgcttgtgttcgggataaggaggctaattcttgtcgttctgatgataccggttttgatgccagtaaatcctttttgttctctgatgattttcatccgactccagccgcacagcgtatgattggtgagcagactatttcaatccttaatgctccacatcaggttatgtcactgacgaataccaataatgtgccggtgaagggggcgcttgcctctcttgacggccgtttgcaacagctacgcagcgtgggtaatgagcagagtaaaataggcgtattcggtggttatagtggaaatcacaacagtacattgacactgggtagtgactatcaactcacggataatattttgttaggcgggatgatctcgcgttatcaggataaacgctcagttaatcatttccgcgctgatggccgtggttatctattcaccacttatggcttatggcgttactacgataaaggttggattagcggcgatcttcactatttggacatgaaatatgaggatattacgcgcggtatcgtgctcaatgagtggctgcgcaaggagcatgcttcgactaccggtcatcagtggggaggacgcattaccgcgggttgggatattccgctgacatctacggtgatgaccagcccgattatccagtacgcttgggataagagttatgttaaaggttatcgtgaatcaggtaatagcagtacggctatgcatttcggtgatcaacgttacgactcacaggttggaacattaggctggcgttttgacaccaattttagtcgttttaacccctatgctgaagttcggtttaaccatcagttcggcgataagcgttatcagattagtagtgccattaactcaactgagacatctttcgtgagtaaaagccaaaagcaggacaccaactggcgtgaatacgttatcggtatgaatgctgctattacaaaagattggggcgcttttgcgtcaatatcacgcaatgatggtgatgttcagaatcacacttatgcgttcagcttaggtgttaatgccagtttctaatttctggttaaaagatacaagttgataaaacagtagcgccctgtttgtcgcacttgtcgcaatagtgtggttattgtcgtagtaatgcccgacaaagtgatcgggcatttttcgtgatgattgcctcatatcttgggttgtttataaatatccggccgaacaatttgccaaacaaagttttcttcgttcactggggaataacccattttttcatacagccacggtgccatcgaagtgacaagcataatatgacgaagttgtgctatttggggatgttccaggcaacatgtcattagccagcgccctaatcccaatcctcgatagccatctaaaataaaaacatcactaagataaccaaaggttgtgaagtcagtcacgatacgagcaaatcctatttgctgagtatttttatatagaccaaagttcaagctattttcgatcgacagcttaactgtctccttgtcgattccttctgcccaaatggatttcgttaaaaactgctgtatgatcataatatctaatttattcttatctgtagtgacaacatatccatccttttcccaacgatgcaatttttccatgccaggcttcctcttaagataaaatgataataatgggttatgatatctctgtgcttgaatgttttgccgagacttttgtcatggaaagaatatagcgatttgaatgaataacgccatagggccgtatgttgcttcttcaagttttcgactatatagacaggcccttttgtacagaacagacatccatttattcagaattgtttgacattagatagacttaattttgtcttccgatatataccatcggagagaattcttaatgggagacggagttaccataactaatcctttgttagccagtttcaataacagataacgtgctttgtagatggtgaaatcgcattgttccgctacatcacgcgtactaggccatgattctggtgggggagccgcttgcattttccgaatagtacataattcggatatgacattgagtatttgatccgtctgggaaggttgagtcgaatctttccgattttccatattaactccaggctttattgaacccagttggatatcttgaacaattatacctgtcatctttcaagttgcttctttgttggctgcactcactcaccccggtcacatcgttatctatgctcccggggattcgctcccttgccgtcgcgatgcatcttgaaatccattgggtataggataatccaacggttaatttcaacacatgagggcaatctgaatgctctagtcataaagaattgccgggtatatcctgttttgtcaaggttggtttttatactatgcagaacgattatatcgaaaaattgaaattttagatcttttaatttgaaaaacaaattgcataaagtattttattcttatatagatataatttgcgacactatagatcgcaaatgatcggattgaaatgttatctaagtattttgttgtgaaattatttgaatttgtattttttgtttttattaattgaattattctgtaatacttgaaaggtcgataaggtcattgttcatatataaatattttttatgatttattactggcattaaattttttctcatcttcataagattaaaataggattgataatgaaattatttatttaaaatatattgttgttctatgctggtattgattgttattagataatcgtaataattcgaaatgaaactgaataaaattataatagcggccatgttgatattgggtgttgtttctattgcatctatagcaaataaagctgatcgaagttatattacagtgacctttaatggtgctattattgctataccttattctaccgggcagggtctttttggtaaaagtgtaaattctggggaaatttccaacgtaatattgaaaagagcaagagcttcaattcataagagtcttgagaatcaattggtaaattgcagatcacaaccagtagttcatcagttattatcccgggcaacattgaaagtattactggctttaccgtgggtagctaataagacggataaatctccgaagttgtgccagcgaaagaagcttcatatattcagattaatgataaattttactttttaatagcgatttattgattatgaaaaagtaaggtctgattattttcaataaaactttggtgtttaagttatccccattatatgattttttattcataatatctctcaatattaaattattttcacatcagtcttatcctcttttttatattaatataaaaaagaggataagtggaatagataaaaaagatttgaattttaattcattttttccaatgatatagtttaaataagtaaattagaatgatttattcagtctataattaatcttataagtttgtaattgaatcatttattcataaaagtaattgatttattggatattagttgtatattgcctgagtaataatattgatatttttaataaattaattctattgtataaataagcaatatgtctgttagataaatatcagtaaatattaattgagaaatattcttgtaatagatcatctgtaaaaaaaattaaacattaataacgtgattttattgttgatttatgttaacaattataaagataagatatcgactttaatgttaatttttccttgctaattgctagtgagtgtagccaacaaaaacaaagaggtaacttgaaagatgacgggtataggcttttaaccgtttaataacgttgtaaatacctgctttcctttagcattgattgttatctgttctgttaaaatagtgattttggttttgtattttctaacgaaaaaagcatgaaaaataacaaaaacgtgaacaaacatggcaaaacatcgtttttcggacaacatttttttgagctgtatatggatcatgtggagcattgctctgggattctatctggctggtaatttttttggctgtgcagtgacagcgattctctcttttttggctctaatatttttctttattcacatgaggtcgagattaaaaactatgtttggaaaaaaagcagaggcagcggctgtcgagccggtatctcaatttgttgatgataaaaagaacgccggtgcagaagctcgtcgttgcacgattgttgccaagagctcggtatttaagggcgatattgatgtagaaggtgatatacaaatctggggcaaagtgattggcaatatccgggtgaaagagggggcgatccgcattatgcatgctggacgggtcgaaggtgaacttagcgcgccagaaatcattattgatggtgacgttgtggggacgtgctgtgcagcaacgttggatattcttgaacatggcgagctgcgtggaatcagtcgttgcagcagtatgtctatcaagcgcggaggcctgttttttgggcaatcggaacaggttgaaaacaaaacagcatccgaacgtgttgtaccaataaaagataccaataatgataaatctaaagataaggccgcggtaaaaacaagtgcctgataaaccaggcccgtgtgacatctgattcagagacttttggcacgggccacttcctttttagtttaaattacgttgttccatttcctctttagtttgctcattctggcaatttataccctataattgttttaattactctgattgaagtatgtggtttgtcgcatagtaggtatcctgtttgctaactaatattgagggagaatagggttatggtgttggaaacagacaggttaattatgcgttcatggagagaagaggacagattaccattttatcatttgaatagtaactcagaagttatggaatattttcctgccactttgacgatggaacagagtaatactatggtggataggattatccaaagatttgagcagcagggtggttggggattatgggctgtagagctgaaagagaccggggattttattggttttgtcggtttgaatattcctgtggcggaattaccgttttcaccttgtatcgaaattggatggcgtcttgataagccattttggggtaaaggttacgctagtgaagccgcacgtaaagcattggattttgctttcacccaattaaaacttgaggaaatagttgcatttacgacaatttccaatttgcgatctcaaaaagttatgaagcggcttggcatggtgaaagatgaaaatactttcttgcatccttcattaccgaatgggcatccgcttcatgaacatgtgctttaccggattcgtcaataatagcgctattctcttttctggttttcgttactttgatgctttatactattgttgcatagattgtatcttggaaatttaaatgaaatatgaattagctgttatggcggccttgactaaactagatcatcctaatacccgttcaattgtagaagcgacagggatatctgaacgtaaggtgcaacaggttttgcaaatattgcaacaagacttagaggtaaagattaaccgtattagaaatgggaagatcagttattttgaagttatttcttggggaatatttgaaagtggtcaggcgattaactgtaaattgatcgatttggatctggctaaatttaaatattcccgtcagcaagaaaaagatattagaaaccaaaagaacagaaaaacaataatgacaacttatagtgaaaaaaaacattattttgaccgtgtaaaattaaaaaactatagagatagtatgcgtcttgaagggatgaatattgttatgaatagtttgcctgaaacatcgaaagagcaaaaaaatcttaaagataaactaattagaaaatatagtttacaatgaggtagttatggtagataaatatggaacagggcaagatccctatacatatccgggcatcgatacacttattaataaattagctattcgtgatcccgttattcttgagcaggcagaaagggaacttactgaacttgctatattgaatatttcattccagaaaccaccttacgatttagtcttttggcgtaaactccataaacagatattttctgatttatatgattgggctggtcagctaaggataattgatatatctaaaggggatacccgtttctgtcatgctaaatgtattgagatagaaggaaataggatatttgatatactagagaatgaaaattatcttgtaggattaaactatcaggaacttattaaaaaacttgctgaatattatgcggaattaaatgtaattcatccttttagagaaggaaatgggcgaacacagcgactattatttgaatatattgttataaactgtggatataaaatctcttttgagtctataaatgctaagcagtggattgaagctaatatttctgcttatcaatgtcactatcagccattaataaggatttttgaaaattgtgtctcttaaattatataattttgagatgatataatgaattatttactggtattttttatctaagatttctggtgatttcaacttatgagcttgccgattaagcattctacttaattttgattgaatttatttaaagtgattgacggtttaaaaaatataaaataaataaaaccgcacaatgaaagcgacaagaacaaaaatatccttgtcactttgttattaaatatattattatcaattgatttaaaggcaaattgtccaaaagaaaaggctaataatcattactggcgtacatgtcttagcgcatttactcagagatttctgattgtaataacataaatttgccgacgcgaagttaggcgagaaagcagtaatgctcaatactaaaaaacaaattgatagctttttcatggttggtacctcatcaggggattatgtagagtaaaataatttatcctagctactaattattgttcaataataggtaataagttctcttttcgtataattttttgttgtattgttgaaaatctgttgaagtagcgctggtggatttgtgacaaaagatgggtaataattgcttttaattaataataatgaatcattcaatattgattttttgatgttttatctttaagtatattgtttttattattatttttttgaatggtgatacattaatttgatattaatattgtgaaaattataataaaattttttatttatacggttgcattcctatttatacgacaggtgcagcgggacatcacataagagaaatagtaggaagtgggaaggtaggtttctgatattattaataaataaccttttatatttttcatcttaaaaattatttattaatattaattactcagtgatgattaatcactattagtgataaaaataattcatcatacttcatttaataactactatagttaaagtgtattatcaatgcatgatttatgtaattaaatgatttagtcggtagatctctgttgaagaaaatattaattattaaccttaaggagagtccatgattaatatcactgaaaatactgccttaaaagccgtaaacggttggtggaaatgtggcgataccggaataatttatcaatggggatataatccgaaaggaggtcctggacaaattacaataacgtatccaatcccgtttcctacagcgtgcttatctttgcaagttagcgtttattccaatgcgattcctgcggataactattcaacagtttatgaatttaattctaccagcgctgtaatcgggcgtgataacttaggttcgtattggtttgcaataggatattaagtaatatgttattacggaaagaattaatatattctagctttggaattgaagagaaattatattgaaagctacttggtaaattgctcccataatattggatatcaatcaatacatagggagcagtttttatagagtgttcgccggaaattaaattaactactgtccgttattatccggtttagcttattttagcggctgttgattaatataattcagcatggttttttaagagagtggttttttgcatatttcatcagtatataaacgatgagtatccctcggaaatataagtatgtctgtgattatcgagaaaggaagatctatcaggcttgaaaataggtagccttccttaatgccttgcatatcaaattgaattgaggggtaggctttgcattcataaccgtgagttacatgagagccaaaagttccacacgacaagatttttattttacagtattaatctccttacgatcccgttaatcctttttgaggtcgttaacggaataaggtggttgataattgattctattattatttccactgaaatgtcctttatacacataaaaaatgtaaaaacgtcaggtatcgctatgatattaccaggttcataatttttgctgtgaaataaagccctagtccataagaagtgtgagtcaataggttcattgctcgtgatttcatggggagcggagtttttgacgcagccagaccgaatccgaatgctggctgcataatcagaaatgggacaaataaacttatcaagccagcagacaatcctattggctatagtctggtggaaaaatcgttgttttcgcatccataaaaaccatctgccaactagagcataatcaagagatggaataccgagcagacgcctttgtattaatgtccagatgtccatacatattatcgcgccgataccagttatcaagatccgaaaaataacgtctgtgtacatgttctatgctccgtctgatcagagatgttaagctggtaagcattgtgcaacttaaagttaggtttaagtcaattatgaaagatcttgatattggtttggtctctcaacttgctggaatatctccttcagcattgcgattctatgagaaaaaggggctgatacgtccgatcggacgtgttggcctcagaagacaatacagtcctgatgttctgaataaactacaactgattgcgcttggtcgatctgcgggattcacgcttgacgatattgcagccatgtttgatgcaaacggggaaggaaaagtgaacatagacagggaacggttactgattaaggcgaggataaaaccattcgcaagctcagcttagtcgtaatgggttgaaacatatcgcaaactgtactgcacctgagtatatgcagtgccctgaatttcagaaagtcttagctaaagcccaatttctgtcgcgttttgaagtgtaacttctctaaaaaccatccagaggtaactaatgaagcatcttccagtggggatttagcttattcttcgaaaaaatcttttttcgatttactgttcgtttggtggtttttatctttatctttataaagatacacggtaagtaaatgatgaagggtgaactggctgcgcaggagtccgagtaagaatcctctgaggggatctccccaatcccttacagtgtattagtcgcaatctgatctgacacttcgatttgaaaagaagagagttacccgctttgattaaagctgttgccctatcactgtccctactaatttggtggagctggcggcgggaaagcccgtggtgttggatgagtttgtttttgcttatgtgccggatttagatcccactcttgccatcaatcgcgatgagacattacccgcagaaagtcatattgtgcatcgtcaggctgtgaacaaaacagggttagcgagtgaaaacgcagtagcctatagtgtcacattgggaacggaagtcggtcattttgattttaactggattggcctgataaataaggcttctggcattattggcatgattacccatgccccagctcagaaaaaaattaagaccgcgaacggattacagggaaatgtactcacccgctctttcttgctggagtttgaaggggcagccaaagagaccgctattatgaccacggcggaaacctggcagattgattttaccgcccgtttatctggcatcgatgaaatgcagcgtctgatgaataccgacagttacggtgaggcggcgtttttcggtgatgggttttccgtggtttgtcgtggtgaccggtacacggtcaaaaaggggctggcttatattggcgggttgcggggtgagttggcgtttgaccaaacacttaaccgcctgcgcgatacccgcgtttatgcggattttagctatcaaggcaatgtggtcagccagtggaaaaccgtcgttcatatcatcgccgccaatgatcttaaaaactacatcgatgcggcagggtatccgcattatgtctttgcggttgcgggtattgatggtcacggtgatgtgatggatttgcgcattaaggggtcattaaatgaccgtgatatttccgccattcatcaagagattgatagcgtgaaacgggaatatgtgactcagcaggcattggaaagcggcctgcatgggaaacagccgaaagggggctatgccactaatgcagcattaaccgttgttagtgaaaacgccgatagtcgcctggctaaaaaccagaacggcgcagatattcccaataaaaatgaatttgtcaaaaacatcggcttagtggaaaccgtcgaacgggtaatgaatgctgtaccgaatgacaggagaattaacgggaaatcgctatcggctgatatcagtttgatggcgggtgatgttggtgcctatcaccagactacctatatgactgagctacccggcaggcattattcagggccattttcttgtggtcgggaaaatggatgggccaaaggggtgagtatcggtgtagggggtgacacggggcaaatttggattgatgccgatgcacagttgcacaccagatttctcaatgctaacggtgccgtagagcaaaagattacgataggtatcccgattggcgccactatcgaatggcatacggctgcgccgatacccgccggatatgaacccaatgaggggcgctcattccgggcggcagattaccctgaactcgccaaaatttttcccgacctgaaattacccgatgacagggggctgtttaagcgtggtctggatagagggcgggggctggactcgggtcgttcgctagggagtgttcagggggacgcgatcagaaatatcacgagatcattaggtaatcccactattgagagcgggagcaacgcatctggtgcattcagctaccagtataaggcaggcggtcgcgcagccggtgccggtggtggggtgatttcatggacatttgacgcgtccagagtggttccgaccgcaaatgaaaaccggcctgtcaacaaatcagtgatttatattacgagggtaaagtaatgactaaatacagtgcagatattcaaatggcccggtttgatgaggatgggttagctattgttagcggatgggttgcggtttatcgttgtcatcctgaaacacgggaatatattggggccgatatggatagcgtgtcccgcggtttttctgttgcggctaatgcgtatctggatgcgcccgaattacctgacacgcatgatgttgcgatttgtcgtcgtgtagatgaaaaatcctggcgacatgtgcctgactatcggggtaaaacggcgtatgcaaccgatacaggccagccgatcaatattaccgccatcggcgcattgcctgataatctcaccctgcaatcaccccaaaccccctttgataagagggagaataagcaatgggtcacagataaatcagccctaaaatctcatcaaactgaacaggctgaacagcaaaaaatcgcgcgacagcagcaggcagatgcggcaattaaacccttacaggatgccattgatctggatatcgccacggatgccgaaaaatcagcgctcgtggaatggaaaaaatatcgtgtgcgggtgaacagagtggacctttctacggccccgatatcaactggcctgagcaacccgcgtgatgaattggcaacggaaaataatgcgcatctctccgaatatgacggggatgcattgcgcgatgttgtccgtccatccgttcgtatacggtatcgggcagaaagcggacagcggtcactacctgagtccggcaaacgccatcaattatctggcaaataaaatccggggaacgggaaacatgagcgctgtggtactcatgatctgcgcgaagacgcataatgaatttatccagcatttaaccccattttcggcggtgttgccgttgtcggtattttctcaggtcactcgtatggcaaagacagcggaacgtctggcgatcaccaaaatgcaattgcctgggaaaccggacagcggtttgcctccatttcaaccgttttcaacatcaaccagccgcatggccgtgaatgcgcgattgattgcacaggctaaaacacaggttagcgccggcagcagcattgcgggattgaaatcacaattaacaaacttcacgacggtaagacagaacaccttacaacaagtgactgccgctctgaatggcgtcaggaacaaatcggcccgtgtctgggctttttcagggaaagggaatggcgcattactggccgaaaaactgcgtcaggatatccctgaacaggatgccgtttacacgctggcgacattatttgccggggacgatattcgcgcattagaaaggatgctacacaatgagccaaattatcacactggcccttgatggcgaggccatcccattaaaaagtctgaccgtaaccccatcggtggtatttcaggacacagaccaaagcggccagtcatccagtaccgccgtagcggagcaaggtattaagcccaaggagttacgtgttacggggatcattccgtttactgagcaaaaaacgctgtcacgcctgtttgcactggcggaggccaaagataagggaagtctgaaacgttatcgtgtcgctaacctgaccgcaggtgctatcaactttcgcatcgggacattcacccataccattgatgccagtaagatcgacggtaaacaggcatggcaggtcacatttactttacgtgaacatttatctgttgctgagaaacgtgatgcccgtgctgccgataatattcaggccagaaagcaaacaggtcagggggccgccgccgcaaaagaagcgccggaaaaattaagctggtttgaaagcaaagtattgaaaccgattaatgacacaataggaccggctaaataatgacaccgattaaccggctctatctttccggtgatgaaattcacctggttgacgccaatattatgctggagctggcatcctgtggtcgtggctttatcacggcggagacgacaacggactacaccggaaaactggtacggctggacgtgggttacacggatttggtattacgctggtttacgggttatgtggcacgctcacagccagcccaaaacggttatcagcgtctttttgtgcgtgaactggttggtgtgtttgaccgattatggtcgtgttcatttcagcatccaacactgagccagattgtggactggttgcaggagcacagcggactgaccttcatattgccggatgccccttatacggagacacccatcccgcattttactcatcatgggaccggctatcagttgctggctaatcttgggcaggttttttcgattgaggattatctctggcatcagttgccggagggttcggtttatgtgggcagcggggcgcattcgatgtttgcggggaaaccggtagagatccccaatgcatttagccagtgccagtccgcaggcaatgcgatgaccattcccatgatcccatcgttgcgtccaggtgtagtgatcaatcagtaccggttgaacaaggtcaatctgaacaatgaaaacatggtcattacatgggaagccgtcaacaaactgaccggtcagtcgcagaccaaaacgccaatgcagcgtcagattgatgccgcctaccccgaattatcggcagggctgcatttacccaaatttgcccgcattgaggcacaccctgaaaatacggtcagcggcgatatctccgactcattccggccacgctatgcggttgatgtgcaattattggctgatgatggtcaggatgccgcggttcctgtttatcatgctgtcccgctgcctttgccgatggcgggcagtgaatccggtatgtttcaatatccgccagtcggaacggtggttgaaatcgcctttgaggcaggcagaccggataagccctttatccggcagacattaagccagggcaataccttgcccgatatcaagccaggcgaacaattgcagcaacagcgggcggaagtttctcagagggtaactcaggaaggaaactggattcgtcagactgaccagaccattaatgaatcgtctatgcaccgtgaagtcagggcagacacggaaacacgtaacgtagtcgcacgggaaaccacgatacaggccacggataaaaccacggttttgggcacgtctacgctattggcgggcgctgtccggcaaattgcagacggtgactatagtatggcgacctcatcaaatttcgttgccagcgtagggaaagaggccagtatcgaaatcggacaaaagctgatagagaagattggtctgcttaagcagagcatcgccggtgccaggcaagaaatcatcgcgcccgtggtttgggtgggcagccagcaaatcaatgtcatgaccttgatttagagacgttggatgtggttaaagcactggcggaacagactgccgcccatacgcaccacaacacaggtgcgccggagaacgccagcgtgataaggaacacgggctataaatccgatggattgaaacagaagtattcgcctgtgattggctagattgattggcctctcttcggtaaggtttatttttaccttttctacgtggtaaacaaaagtgttgacatggtaagcataaatgtttactgtgtttgtgtgttcaacagaatggaggagtggtgaagcaaagcgagtttagacggtggctggaagctcaaggcgtcgaagtttcaaatgggacaaaccatctgaaactgagataccaggggaaacgaagcattatgccgagacaccctagccaagagatcaaagagccgctgaggaaagcaatcattaagcaattaggattgtgataaaaacccgcctcgcaaggggcgggttctcgcacaggttcatcattaaaaatatgcgatatccagtcacactagagccagtagaagagggcggttatttcgtctcattcccggatatccccgaagctttaacccagggggatacacgggaagaggcgctagagatggcactcgatgcgctaataaccgcttttgaattttacttcgaagataatgaaaaaatcccgcttcctggccccgtagggcaggattatgttgatgtgcccttaagcgtggcctctaaggtgcttatgctcaatgcgtttcttgattccaagttaacgcaaattgaattagccaaccgtatgggggtgaaaaagcaggaagtgacccgtatctttgatttacggcactcaactaaaattgatacggtgggtaaggtcgcatcggctatcggacatcagttaactttgtccattgaatgaaaatcaccattaattaacaggctgcgttaatacgtggccttttttatatcctgataaactgcgaccagatgcatacagcactgttatcaatcaaaccaatacgtaccaggtcaataatgtggtatcaatcagcgctacgggtttgtgttttgattgtctgaaacacattattgattaattctctcgcccgcaaaatatgcgggctgttttacatcttcatagggctatgaatacaattttgatattaaagaatgggcagtgagtgtaataaaaaactgataattcagcgtgttatattagcttagtggtttaaaggttgttgttactttttcggatatagaaataacttatgtgatatcagaattgtttggtaaatcatttcggacagttcgtttgataggctgcttattttcgtcaaaataccgactgggccatatttcagcaggggtgacaccaatttcctgagcaatcagtaattcccctttaggccaggggcgcgttaaagcatttgctaatgttgaagagcttaaaccgtgctctctggataatgatgccagcattttattcttcttacgtatcgcagcgataatatcggcggtatgccagtcttttttcatattcctgcttccctctttggtggtggcgattcaaacagggtttgcagaccggcgttcatttccggcgaggtgttaacctcccctgcctgaaccgccatagaggggcgatagcaggcacattggtaaaaacttcttaccagcgtccatgaacgcaaggctgcaaaaccttggtcactggattttgccaatgacaacactactttaaccgattgtattatttgactcaagaatcaaataaataccttagtgatggtttgtctcgttgcacttatgacgaaataaatgaacttatgatgaaaacggcactacaccgcacccgcctgcacgttttggatcaaaaaattttttcaattttaaaatcctacaaggcaaactgccaaaccgcgccaatactggcggagtgggagaaatcacaaactgaaatgattgaaaagattttcaggaaatttcagtttttggatcaaaagaggatcacggaaaaatcccaatgcattgatattaaatgaaaattgtattttacgtgaaaaataagctcacaaagaaaagccgtgctttatcatagaaatcagatagagcgcggctttacaggatatacagaactgaaattgttttctccttttgcattatgacaaggaagaaagtgaaagtattagttagcgtacttttaattcattaataagcgtaaggctacgttcaagcatcttaagtagtttcagtgatgaaccagacggaatgcggcggtgcaggtagtgtccattgatgcccataaaaataaaatgagtggacgcaaagtggacattgggcaaacaaaaagggctacaccttagtgtaaccccttgatttatttggtggagctggcgggagttgaacccgcgttaattgttttgcatcttattgttataaataatatttttatgaaatatcttcgctgcgtatcctttgcagctcctttcatgtcccaccactgacctgcttgggtttgtatgtgctgccgtcatagtctttcagatatgatccataatgtctgaaaagcatctctgggcctttatgtcccatttgagcggcaagccagaaaagattaactccctggctaatgtgttttgttgcaaatgtgtgccttgtctgatatgggttgcgataccgaattccagcctttctcagtgtaggtacccaggcttttttacgaattgcatctgcacctgcccaagcctcgcctgttttaggatcttcaaatatcacgttgcctttcatgaaagtgaatgccttctgatttaatagggccgacatagcgtcagtgttcagttcgacttttctggtaccggcttttgtcttcgttccttttattattcccacaacttttgccgactggacatgtgcggttttgccaataaagtcgatatcttgccaccgaagcgcgcataactcggagcttctaagtcctgtatgtatcgcaaaaaggaataaattttcccattgtttttgtttattgcctgctgctgacagtaatgcagtaacctcgttaggagatagggggtcaacaatatattcgctatcattttctattcgttcagtttgataccgtgatgctgtgactaaattcacaggattcatactaatcaggcaatcagtaactgcttcatctatggcgcttcgtaaaaatgatagattgttcctgatcgttttcagagcagttgatcgtttttgaatccaagtttttaatattgctggtgttaactctacaacgggaattttatgtaattcagatagagcagttttacattttttatatccattaattgtggatggtgataaatttctggtttcacagatttttaaatattcatctaaataatcttttattgttctacctttattgacatttccgaatatttttagacgtgatgaattagggaaaaattcagcataaataaaaatatcccgttcaattttattgtatatttcgccgagtttacgctcggcatatttaatatttttgggcgtcacttccagatttgagaggggttctcggcatttaaccccttatatgtaaaagagatatttatagtttcaccagaacgatgtttccttactgtaattcctctgggcaatttactacgctgtttttcctggcccacttagctacctcatttaaatcaatccagcgttccttaacaccttcaactttcagtacatgtacgccatcaagccaaacaccgcgctgaatgcgtttattaattgagtcaactgtttcccctgttgcatagcaataagcggatatgggaacacattcaatatttaccatttatttacctcacatggttttgcctcatcattgatataatgatcagatcaacggcagcacaaacacgggtaatatcaccttgattgcaagatgtatttttgacactggctgctaatcttcccaatttgatatcgaagttggttaataactgttgtcctggttgccagggttgcatgatggttctccggtcaatggatttaccatcatgctattcattgtgttacctgatttctgattaagcttaatcagttttgagtgtgaattatggcctcaatgggtaaacactcaaaaattccagggccttgcatccccatatcggctatgcaatttttttcatcctggtaaatatggccgtaaggaatgtattggcagtttatcgaagaacatacaagtagaaacagaccgtatatcattttcggtccctcattttctcgatagcttgagaattggatactggaactattttaacgtcaaacgggaaatcgtagagtacattacaacttctattgataataatgattccattgcgaccatcaggtagcgttaatttaacaatttcatttttactgtgtgaatgtcttaacattggtcggtctcttttaatttaccttcaatttcgtattctgctgcatgtttttcatctaatagacacatgccgagaaatacaaacgtaaattccacatgcttgccggatttattttttgatattattcccttgtgttaatttaaggtaatgttaaatatctaatggaggtaatgttgattatttccagttaattcattttccattgaggccagtaatttattttttaattgagcaatgattttcttttcttcatctgtaatatcttgactttctcctgttatccattctacttggtatttatttaggttttcatcaaatgagataatgatttctaatcgtgcagccataaatcactccatattatttattgccccagtatttgtgggatgtaatgaatattaacgtacttgcaggcttctctggccgatttcaatatgagctcccggtacattgataccgttttcaatagcttctttgatggcttttttgtccggggcggtaattgtctgcacatcaactaactcatcaggtaattttgactcatcatcaatgatgacattcataataccttttctggctgtgaacgtgtttctggtagttcgtagtgaatccatgccggctttcagtaaacagtccagcgcatacttttttaggttttttacttgcctttcgaatgattttttacggtcagtgagtcgcttagactcatccgcaagaatcttggcttggccttctatattgcgaacatggatcatgatagcgtcaagtttatcaccgatagtacattcgatactttcaagtgtatcggcgatatcttctggcgagaactcgccggtttctaccaactgttgtaatttttcataatctgctgctaatgcaattgcggttgtggtcattggtttgcctcttctaattgggttaaacattctttctctatttcattcaagcgacgcagacgaccagataagtacttttcataatccttgtctcctttggccttggaattgcctaaatgaatgcttaattcacggataagggtagatgctatgccgcgaatttcatttttgctgacagcggtgcgcatagtttctgtattacgggtgaacttatcgtctagttccttgcgtaatctgactagatcctcggccttatcactggcggccttgatttcaaattcaatattattgtcagccagatattcagggttgtcatgcatacccataaatacatcagcagaaaatccaagcatcgataacgctttctttatagcatcggtgagtgatttcttgatggcctctccatctgttttaattccatatttggttctgtacatgtatggtgtcgcaccataactttcaatttcagcacaaatgtcacattcaaccagataccaaaagagaattttgatagagtgattttgttcacatattaatgtgccgtcagaatcacgtaagaatcggctcccaatttgtttatttttgtcgtcatagataggttctgacatgggtgcaccattgatcagtttttcttctgtgacattacagccccatccataaccgaatggtccgaatagttctgttgcccgcataaacatatagttactgtttatgcttgtaccattgaaccccattccctccaatggttttgtaaagtggggatcggtacgttggacagccttccagatacggagattagtttgctgttcattgccttgtgccttgatagtttcttccagcaaattggcccgatgttggaagttatcatcattggtgctcagggtggcgacaggaggcaatgaggtgacttcatcatccgccgtagtgttgtcttgtgcagtctcttctactgctttgtcctctttggtttgcttggtttttctggtcttgagagacttggcttcgctttttttctccttaacctgtagcgctgcctgttgggtttcaacttcatctggagtgacatctgttattgaggcttctgatgttgacaccgaataattggaaaccttgggtttctcttctggtaattcaacgggtatgtcggtatcacttaaagtacagtttaagaattccttaatagcgacggcatcggtcagaaattcagggtggtgtttaccttcacgtacgactctgaaaagcgtttcccgtggaatggacagagcgtcggttctgatacgaaatgcggtagaccactgccgccatgcttcattgttatttgttatcagttgcttagcttctttcatactgtgtgacataatcgcccagcaatgaaagtcaccgtctagtaatgccagtgcaatttccagatctaacgtggcgtaagtgtgattaaaatcacgtgtagtaatagatgggtttttctttggttcgagcgttctagcctgccatgtggtgccgttgaactcgtattcagtagcaaatttttcatcaaatttaccaattggtgggcgagggaagccttgtatatctttacaaataatcggttttgatgtgttgaagttgctcatatcgtccgcgtactcttccccaaggtaaacaatggccatagctttagccattttttcggaattggcttcgagtgcaattgcaagtggtacggctccatttttttgagctttttttgtcggctcaaagacacagatatatgtgaacattggtcttgcctctttaataaattgctttttttgccaatcttattgctgccttaatcccggcttttggcattttgacttttggatataattccttgacagcatttgaataaaccattcctgtcgttgggtaatattcaactcgccttttgccaccgataatagatatacccaagaaacttcaagatgcagtttttagcacctgaaaatggtcgttaattctagacatcagcgagtccgctatatccggtagcgttgtggtgaaaaatttgaagacgttgtctcgaaattcatgtttatccgcaaaataacggttatttcgaacctgttcattcatgaccttccataatcgctctattgggtttaaatttgggctatagggaggaaggtaatgtaactcaatattgctaacataagcccactccttaacaagatgagctttgttgtaacccgccccatccacaataagatgaattttttgatgatagtcaggataagactttcttatttcattgaaaaaacagcaaatgttgtagtcattgatggtttgatattcctggaacaccgtacgaccaatggcattcaggttgagcgcgcccaatatattcaggcgagtccggcttcctgttgttttgactgtttttttctcgccttttcgcatccagccataaccgagtttggtgccttgagtcgggtgaacagcatcaagaaaaaggatgggttcgtctttcgctgtgactttaagattctcataatattcaataaattgtcgctgtttttctgcgtcgaatttatgagggacgccacaaggttttttataagaaaaaccctgacggtgtagccatttattcatgccgggaatgctaaaggtaatattccagagctgagcaacataggccacgatttcatgggtgtgatggaaaagatgttgagataagtgattgattaaaaaatcagtttgttcttgagaaagcaaactatcagaccccccattatcagatttaagtttaccttgattaaggtaatcgctgatatgacggttaacggtcatttcatgaagacgcagggcctgagcgatcatcactgaactccagccttcagaggccagcaggaccgctttgatgcgatcacactccctcttatcacggcaggtgtgatggagatgttcaagttcggctttttgttcatcggtaatgaatattttcatagcgaggataatgatctccatttcggataaaatcaagcatcttcaatgattacgggtatatatgtatagttgcgtttgttgtatctctattattttcatgctcaatagcaattaaaccattatctaggattaaattaattacatcatttatgtttttcataaatacacctgagccttaatcaggtattttttcatcagatttagacattggtttttcttcaatgcataacaatgattgaatatggccctcaagttcagaggctttagcatgagcttccgcaagaactttattttgttctttctttagagtatcaatttgtgagtttataaagtctggacgactaatatttggatatgggatttctatatcatgaatagcgacaactgtaccaaagatcgatgcatttccgtgtttacttgcgtcatgtggtaagactgtgatgttcatttttcgtgaaatattattttcgatagcgtgaacatagagctttacttgtattgtttcttgttgtgctttcatagcaactcctgatatattgttagcgatcaatgatggaaatcattggtcttgcctcttctaacgagttggtcctcgttagtagaaactcccggttagctttggtcggcgatccggggtaaaagaacccgccacttcggtgggtttttttacatctgttgattcttagtttttccccatattggtattagttggtacggattgatcaacgataaataccattcagaggttatggttttaataaatgtttcaaacagaccgatgaattggcctaatttgatattctgcatatcattacacataagaactgttgttcgattggttaatgtgcgggtctttccccgccgtccgttgattcacgcagtttctaagaaacccggcaagaagaaccgtaacgcatcaactgccagtgtttttgtaccattcccaccgctggctggggaatcctggtgttggttgatctttcctgttccactttctggtaaatacagttgttatatgtggtaatcatggcaggtcacattgaaccctgctcttctcctccctcatgacaattgaaactgtaaattcggttttgaacacttaacctaaacggctgctgtgccgtgctactgattagcaaatcatctacctcttcgtatgtcggtagcgactactgcgtgggcgtcctgcctgtttgctgttgaaattgagtttagtaattgataaacgaaaagtaaagtaaaaattaaataataagaggggcttatcaaagtgttaagtttaaccatttgatttattttaatttttatatttatttcaaggtgtgaactgaatgaattttcccttggtgatagcactgtgaaataggatggccaagatagttttagagattcgctatgcatatagcatgatagtttttgggtgttggctgaaggttaattaatttttggattgggtgattgaggttaacggtttattccgtagggttcagggtaagataaaaatcttgttgataaataagaaaaaagtcggatggcgacttttttctatgctttcttttgcctctttttatgtaataattcttctagtaaattatcataatgccgttttttatcttcaagattttttattagatcatcggcatcactatctggcagttcgtcgaatagctctagaagaactttttgcttaggagtcaatgttacttgtagtggatttcctaattggtgggtgtttgtatcggcgtctaaataaccatctggcattcgatagtcttgttctaaacgtctcgcggctttttcgccgaaagatgctttaccattcataagctgtgacaaataactcttctctttttcaggaagagttttatcggaaaaccaatctcttaggcgttgttgcctgatgttcttcatgctcattttatttataagaacctatatatctagggatttcactatttttctaccagttaaattgtgattagtattcactaaataagcaaatgcttgacaaatgtttagtatttattaaactttctgtatttctaaaaggggtagttatgaaactaaatgattacatttctaatttaaagcgaggtgaagccaaacttcttgctgagaagcttggggtatccagttcctatttatcgcaaatggcacatggttatgctccagttcctcccgccagatgttttgatatagaaaatgcaaccaatggaaaagtgacaagacaagatcttcgtccccatgactggcagaaaatatggcctgaaataaatgctaactgagcagtcagtataaaaactgattctcaataatcaatattgcgacaggagacgtaaacagtggaacaaaacatcaacgccctgaaagccgaagttgaggcgtgggcggcagagaaggggcaggagtatgtagcaatcgaaataagccgaatgtacttcttgctttgtgaaagaacggtatcagccaagttgcatcccattgaaataaatgggaatgctaattggaaagctatcaataacaacaggcagcaaattttcaggtggttgcgcagtgattcaagggctgcacgaagaaaagtatcagagttgttacccgctatccaatcagcccttccacttgaacgcaaagccagaattaacggtgaaacaactaattatttgatatctgttgcgattcgtgaatttacggcggtgataattgcaatcctattgggaggtttaggaggtagtgacgtatcacaacaaataaccgttgcgatatcagcactgaatgctttgacaaacgtttaaaagaggcaagaccaatgcttaaaaccatagaaaagatcacctattgtaataagtttcgtctgaatggtgagcttgtaactatagaacaaatctcagaaatttatgaaggatgtagagaagctgagttaaatatctgggaacagtatgaacggcaaaaggccaaattgctggaggagtctcttacctttgaacggtgtaagtcagtttgccgtcagattgctaaaatacttggagcttgattatgagtatgtcattgatggtaaaagctatgagtatcaaagttggtaatcctcttcgtaaattggtactgattaagttggctgataacgctaatgaccagggagagtgctggccgtcagttgcttacattgctgaacaatgcgaaatatcagaacgttctgttcaaaatcacattaagcaattggtaaaagatggcattgtctgtgttgcagaacggaagacacaaaatggactgaatcaatcaaatgtctatttcctgaatctggataaatccagtcatggctatagtgaaaatgttgcaccatatggtgcatctcttgcacccagtggtgcaaattctgcgggggttagtggtgcaggagatgcacccagaaccagtcacccttttgaaccagtcacggaacctaaaaccccccttaccccccgtaaggggaaacgggagaaattaaaattcgatcccatcacggcaaagcctaaaaacgttagcgatgaagtatgggctgattgggtcacttttcggctagaaattaaaaagccgctgacagaaaccatgtgtaagcagcaagagaaaaaactagcagattgcacgaatcctgattcagtgatttgcacgtcaattgcgaatgggtggcaagggttgtttcctgaaaagtctcaaaacatcaaacctaaatttactcaaaatacgcatacaagctatgagggtataacctacgaaccacaggattcttattggtcagaaaatattgattagggggagaaatgaactctaatagcttacttgacagtatcaacattgccccacgttttgaacatgccagctttgaaaattatcagcctataaacaaagctgctcaacataatctgaagatctgccaaagttatgttcagacttggaaagaacgcaaagttgcgggtgaggggatcatcatgtgtggccgtcttggtaccgggaaaactcatctggctgttgcgacatgccgtgaaatagtcactcagaacggtatcagtgcgtttattacaaccgcatcacgtattatcagggcatttcgtcgttcatggagtaatgatgctgacaccaacgagttcgagacactgaggttttacagtgagttggatttgctgatcatcgatgagattggcgttcaatacggcactgaatcagagcgaaatatcttgtttgaggtgattaataaccgatatgaagatttattaccaacgatcctgatcagtaatttgccaatgaatgacctgccggtgtttttaggggaccgagtattagatcgtgtgttacagggtggggtagtgttggcttttgactgggatagttaccggagggggcagtagtatgaatgagctcaatctagagtctgcggttataagcggattgttgtcaggtggtgcaacgcaggatgcttatgatgtttttgcaacgttgtcagaagaggcgtttagttcaagttttttgcgtcgtgtctacgttgaaatcaaaaaacaagcgttcagtagttccctgattgatccgatattcatcgctgaggctatgagtgaagatggtaatacattagctaatatcctggagttgagtaagagtcctgtttggaatgcaaacctgaaaggctatgccaataaagttagtgaatattggtatgttcggcgggttacagcagtgatcaacgctggccaacaggcgttactggaaactaaaaatcatactcaagcacagcatgtcataacgggctttatgtccactatgggggagctaatacgagatactggcaacctggctcccgtgcacatcaagacattgattgaagggtacattgacatactggggaggcgtaacttaggtgaggatagtcgcgggatgattatgacaggtattgagccatttgactcgttgacagggggatttaacccaactgatttaattctcatcggtggtcgtcccggcatgggcaaaacagaactggcactttgcatgattgagggtatgactaggaatggaggggcggtattgctgttttcaatggaaatggcagcacaacaaattacagaacgtatagttgctggttctgcccagttgtcagtttcgaaattgagacgtggtgaattttatgatgaagattgggctcgtatatctaacgcaataagcgagttaatagatcgcgatattcatattcttgatgctagtgaattaagcgctgaacagatatgtgctatcagtgaaacgcataagcgcaggtacccgaatctgaaaggtatttttgttgattatcttgggttgatagaaaggcccaaagccgagcgtaatgaccttgctatcgctcaaatatccagggccctcaagggactagctaagcgattgcatacacctgttacagcattgagtcagttatcaagagacgttgataaacggcctatacatcagcgtcgccctgttgcagcggatttacgagactcaggtagcctagagcaagatgcagatcgaattatttttacttatcgtgatgttgtttataacccactaagtccagccagaaattatgccgagattattttggataagaatcgtcacggtgaaaccggaacgatattccaggaatttaaaaacgggcattacttaccaactgatcaaattgttgctgctgaaatatgtcgtacacagcaacaggctaaacaaaaagagcgccgatacgcagacaaagcattttaactaaagaccaaaagaggcagatcaaaatgaccataaacagtaaactgattttattagataatttgggtagttatgaattatcccgttttgggtgcagtgctgaaagcatcgttatcttacaaatttagacttaaaagctagtcgattcaacgtaaacgccagcaggatgctggctttaccaaaattgctggtggataactaggagctggagatgctgaagcgcaattgtactcttcgaaggcgggagaaagcctttctgtagctgaatattgtttttctagtgaagtggcctgatggaacacactgggatggtataagagttgaagttgtatttgtaacgtacaaattacatatcaagtatattgcttgcgttcaaaacgaaaaaaaaataccataaaatctgcttaacgcaatcagggtatctaaatgagcattaacgacacacaaagtgatattaccgatttgataataaacgctttcaggcgtgatttttggcttaacgtacaagatgcattatatgctaagtatgctgcagcacaggaagtaactgtagcaatatattaaaacttggtgaatcggagcaacgtagatttaggcctcaggctaggcactatggccttaattcagcattgagggaggccgcaagtcgctctggttatctttgttacgatgctgatacatccccgaaaggggagcattacattattatcgattcagaaggtgttaaaattagccgtattgggttaaatcacgatgagcgccatataagaggtgctaaacatcgttcattgatagcccaattgaatgaaaaatttgaaggctatactccagatctttttagagaagaagatagtaaacatcataatgacattgatacgttaggtgtgttgttaataaatattaatccaccatatcatgaatctcaggccagcatgatggatttaaggattgtggttccttttaccaatatgaaaggttttcactataataaatctgtaacggagcttttagccctctatactggagagaagaagatagtcattcctgatatggttttacctaagctcaagaagcgcctgaaggatcaggaaaaatagaataggtgagacattatgagagtgggaatttctggtttccaatctgaaaggttgacacagataagagaagcgaggggattatcgaaaattaaccttggtaggttagtagatcgttcgccatcaactattaccaaatgggaaaacggtaatcattcccccgatgcagaagtattgcatagcttaagtcagattcttaattgcccggtaagttggttcacaaagcctattgttaagtacgaaaaaaaaccagtattcttccgaacactttcaaccacggcaaaagacttatgtatcgcctcagagcgatacatggggtggtttcaagagttatcatgtaagatgcaagaatatcttgattatccagaggttaacattcctcatcttaacgtaaaggattacagagcgatagatgatcaattgattgaaagaatggcttttgagtgtaggaaagcttggggattaggtattgcaccgatagatgatctattactggtaatggagaatgcggggatagtctgttccagatttgaacaaggtagttctgtaatggatggctattctcaatggaatgatttagagaatagaccgtatgtggttttagctagtgataaagataactattatcgtagtcgatttgatgctgctcatgaattaggtcatatagtcttacatcgatatataaataaatttgataatatcaattttaatccaatagaagagcaagcacataagtttgcgtcgagtttcatgctgccggaagagtcattttctgtagagcttcctccatatcctacattgcagaatttcatatctctaaaaaatcgctgggggatgtcggcacaatttatgatccttagagcgagaaatttagaattaatatcttctctggaatatcagaggttatataaaaatatttctgctagaggttggcgaaaaggagagccgcttgatgatcttagaaaaccagagtcggttcgtttgttacctaggtgcttaaatctattattggattctagaacttttagtaaaaaaacacttcttgaggaatttggtttcccaaaaggagatttagaggatttatgttcagttcctaagggattcttgtcagaatcacaggtacttgatttccaatccagaatacaattgaagaatagtattaatatatctactacacaacaagatacaaacgtcgtcaatttatttaatagaaagtaaaattgggaattaatactaacacctgttattctgttcgtatcggcctgaacatctgataacctaaacaaaagctgctgtgtcataactttgaggataagtaatgacgcagcatagttttatcaaaatttcgaatgacaccctgagacctgcgactcccgcagccagggaatacctgcactccaaagtgaagtggggcgatgtgctctatgcggattttaagaaagcacgtaacccacgtttccatcgtaaatattttgcccttctgaatctcggctatgaatactgggaacctgctgggggtaccatttccccggaagagaaagcgcttgtgcgtggctacgtacaatttcttgcacacttcgcgggcagtgaagatgtcttacaatccgctgcggatgaatatcttgctggcatatctaaaaaccgagcccagaatattactgccaccaaatcctttgatgcctttcggcgctgggcaacagtggaatcagggcactatgacatttacgaaatgcccaacggcagtctgtaccgtgaacctcgttcagtcagtttcgccaaaatggaagagatggaatttcaggagctttataaagatacattaaacgtgctttggaactttattttgtatcgcaatttcccgacccgaaacgccgctgaacatgcagcttctcagttgtccgattttatgtaatgagaggcagagccaatggctaaaagtgaaaaacagtggctttctaatgtgacattactgggatgtatctgttgtcggaatatggggttgggagtaatacttgcggaaattcatcatgtgggagcggtacaagatatggcccaaagggctgctcatttctccattctgctgcatcctcgctatcatcgagcgtttgcatcccacgggctttcatgcggcaccgaagacatggcaagcaatccacagtatggcaacggaactattgccccaagttaaaagggaagttgaagaggtacggttatgtcgggtgtgatattttcaacggatgggctgcaattgactcaggcacaagaaatttggttgcaggactggttatccaagttcggtgcatgggtgtattctggcaggcttgataaacgtcagagcagtatgattgctgagcttatggcgacggtatagctgagaggttatccagaacgtccgatatgcaatgatgatgacggaatgttaatcgctagggtagtagaccatatttaccacattgatcgggttgcatttgggatgttgcttagtcgatatgtttattgtgtatctgatagagcaattgccaaacattatcatgcaacggttcagccaagaattatgatccgcagaaatggtatgttgcgtaagcgaaagccatcaatgtcaacttgtcggcgtgaggttgaggaaatattaagagcaacggaatatttgatttatcaaccattgcaagatgcctttataagacgggaacaggaaagaaaatcaagacttttgtcacgaacgtgttgacatctttgaacttatgagccactatttcagtatatgttgtgatagtagtattcgtgactgatagcctcgcccagtgcggggttttttattgcctgaaattcagataagacttgctgttgtcattggtcagagttacatgtgtgtctatgcacaataactgaccaaaggtttaaattatcatgctaaaacatgaagatatgacaacaacagcctcatgtgttttagaaacagtaccaatgtatgactgggtttctattcccgatgtttcaactctgacggggctatcaacaccgcgttgccaattacttttaactcaattttgtctggctggcttgatggaaagccgggacaacgacacctttttcaagcgttgcctttgatggggtgacttcttaagcggtgaaatggatggctggtggagttgacgacaccagccattcgcctgttctgtgctaaccagagagtaagctagtatcgattatggaaaatattgtgaatttaagtggtatcacattaattaatgacgactctctacgatttatcaaaacgttaccagacaactgcatagacttaatcgccaccgatcccccctattttcgggtaaaagagtgtggttgggacagacaatgggaggatgtaacggcttatcttgcgtggctggatgaagtactgactgaattctggcgtgtgctgaaacccaacggcagtttgtatatattttgtggttcgcgtttggcgtctgatacggaaatccttgttcgtgaacggttcaatgtgcttaaccacattatctgggcaaaaccttctggtccgtggcgcaggcagaataaagaaagtttaagggcttatttcccttctactgaacggatcatatttgctgaacattatcaggggccttatcaacctaaaggtgatgggtatttccacaaatgccgcgaacttaagcaatattgatcataagtaagatatttgacagggaactgaaagataattatgggaaaaacttggactaaatgggaagttatggagattcaattgtaaatccttttcagtatttgaaaggcagaccgaacgagaatcatgtttagtctgccatctgattttactaagctcaattagtttgacctgcctattcagactcgttatcgaataacttaccttgcaggcgatccagttcctcctttcgaatacgtttcactacgctgtaaatccattgaatagaaacaccaaacttacgagccaggtcatgatgatttttaccgttaaattcgttgaaaatctcacgatcacggaggctgactttccaaaccatgcccataggaaaatagacattctgaccgccccaaacctgcatcatatggttcgcaacagcttcaccaatttgttcggctaacgcaggctcaacatggattatttcactgaccgtgcaagctgtatgctgtgccagttcgactagcaactcaggacctttgctacgaaagttattcacaccattcatactttttcctcgtgacacggttctgccacttcttcagtttttcaataatgctgctggcttggtctgaatctaaccactgtaaaccatcaatattcgtttcacgcttaatccagtgagctaaggcttgttcagaaccattacgaacaatacctatagatgccatttccagccacaatgcacgtatcttctttgattggggatgactatctaatggacgtgattttttggatttcctaaaggattgaattttaaaaccgcgctttttcatagcttccaaaacgcgagttaactgcgggatatccatttcccgcgtagaggcttttccggtttctgaaagtaacatctggcgatacgtatcctcgtctagttttagatcactacgtgcaatatgaaagtaagctgaataagtttctgttttgccatcttattcatcctctgctatgtactcttgaattaagtaaaccaaaatagccagcattaacttgatactactgagcttggcttttcggtataaggccgttttatccatgagtggtctccagtggctgtaaatcccatgttgccacagatacaccgtattgctgactacaatgtggacaaactaagattaaatcgacaacccactcaccaaattcaggagtttggataacattggcttgttttagattcattttttcaacaggttgtttgcagtgattacatgttattttcataaatgtgctccttacttaattttctattcaaatggataattgaaaaattttctttacctgaattaattgatatttaattaatatcttttataacagctttatttaaataattacggggtgtaagaagccgcagtcgctttaaacataacttttctttctaccatatttaattacctgttacttaatgaatgcttttattaataccaatatattttcttcttttcctcaacaaagaaatttttgcaagtagatcgacaatgaaattccgaacttaatatttacaagacttccatttctttggttatggtatgttccgcccttgttgtaaccaacttgaaattaataaaatcagaaattagtcgaatccgccttgaatatttaatttgtgataaggaagttttaatatgaatattttcaatattaattgctgaatagaattttttatcataatgatatctttagctaacactgcgaataatattggcatcaaccataggtatctcattaattgcagccatgttcatagctgcaataatcaagtttccgatagctaatggatataataaactaacagtttctttaccactatgccgactaagacataaacggtcacggatagcaccaataacgctattatctaaaatcttgttagtcttcatgcctacgcgactaaatttaaaatccagaaatgtttccagataatcattaagaggaaacaaattaacaacttcacaacgttgcactacttcacgaacctcttgattacgttcagatagcttcaattccagttcagactgaccaatcaaaatgatcgataacagttttttaaatccatcttccagttcaaagaatcgtttaaggtgttttaatgtcggtaaaggcaacgagtgtgcttcttctattattaacacatgttgatagccagcgcgtgaactgtctttcaatatcttgtgcaactggcggaagcgtgcttcaggcgatcgtttcaagttttccaatggcgctaaggtattcacaatagcttcaacaatgtttgatgctttcaaggttttaccttttacatcattgtcttccattgctaatacgtagggttcaataacaataacgggggtattttccctgttaatacggtcaataagatcacgacgcagtgtcgttttacctgaacccgattcccctgatactgccagaaaaccaccatagcgggctgtttgatacatggcttcccgtacataacggctatctggagtcacaaaaacatcttcagcactttgaattgcactatcttcaaatggatcacgaaataaaccaaagtgctttttcgtagctggaaataacacttgtttttttagtaacatgttttcctcctcagaaatgagggttgtatttttattatcggtatagatatctgatttattggttgtttgtaccacctcaaaactttttgcggtatcgatacctctttttgccaagaaatcagtaatacgctgacgaattgcatctgcgttctgtcgtggccatatattgtgattaacaatttgagccaacgccgccgctgaaattcctgccgcacttgctgctgcactttgtgttaactgatgtacctgtaactgctgtttaaacaccagcataataatcccccgttaagcggctatttttatttctgcatattccattgataataagagatagcaacatcattccctggaaaaacatcctttatatttcttacgttatgatgagtttcacgaaaacaaactggatcacttttataaataaacctcagttgtattttgagttgtcagtgaaagcagtggatcatgaattttaattgctatttttcttttccttaatatacaccatgaaaaattaattaccgttaacaatattgcatacaacagttgttgatttccctatgaattcatcaaccaactcatcaatttgatctgttggaacaccattaggaaagcgtttaactatttgctgataaaattcaccacgccatgtcttaccatgtgattggaaccgttcacgtaaaattttgacaacatcaacggggttcataagctgttcaattcgtggactatgtaccgtagaggcttgtccacgttttggcatatacgttggtgcatcattacgttcaatatccaaatatggatcaaaccgaccattgaggggaagtgttttcaatttacgtgctatttcagtttcagccgtgttgtttgtccccatgattttctgttcaacttcggctaaattacgttgtgcaattgtttgaggaatggcttggaattcactaccaattacaggtgcgccgatggcaaagccgtactcatctttagtaacttcattaacaagatgaaaagcctcaaagccatcttcaccagtaatgactacctgtgcctcttcgtcacgccacggattgcgggtgatcatgattgaatcaccaacactcaccccaggaacagtactgacgtcatactcacgtcccctgaaagatactcgcaaggttgcctgtactttacggctttctggggtgctaattgccaattcacgacaaacgttaatggcaggtgcttttactaactgttctgctgtgatttttagccagcaatctgtacgggtttgtccatgtcggctatgtattgcactgcggttaaacttcatacgccatagccgtgccagacggttaagttcatcaatattatcaacctgtcgaaagcgtaaaccggattcgaaattgcgttcgatgatgtcacgtgctttttcaacagagcccgtagcacgggcgttacgggccttgtgttgtatcatttgaatgcctaggaccttacacaagttacgtagtgtaggtgctgtcaaagcagaaccggggtcagtaaataaaatttggggtacaccgtgtaatacatctgcgtcaccacgatcttgcattgcgttaatcaacacagaagtaaaattctgactggtttcaccgccaaataagtattcaacatatatccagccacttgtgtgatctgttaattcaaacgaccagacgcgatcattaatgatacgagccagatttttcggcttatttttattaaattcagccacaggcatcatgcgtaatccactgtcaaccccattgtttttattagggttttttaggtaatacaacacacaaattgaggcgtctaattcccagacatgattgggatgcaggctagccaattgtaggctgggcgcaggcattttcaactgttcaggatgaagtttgtactggcgcaatgcacgactaatcgcgtcaatggataacggagaaaattcgcctgttttggtatcaatatggcctgcattaatcaggccatttgaacgcagatcattaacggcctgttcgaggctatataaccgtttccctgtattacgagtggcctccatcaatacccctgagatcaaagttgcttcttcacgtgtcagcgcgctattacctgcatcagaacgtttcttgcgtggctttttgccagaaacttcaccaagttttttaatcaatgttgaacgtgacatacacagctcttcacaagccgcccgatatattgcttctttactgccatgtccggctttatgtgctgcctgtgcaatagaaactaatcgttcggtcattgtggtattcatgttattgcccttatttcttcagtttcttttcaagcatttttttcaactcagatttattcatgtgcctcttccttatccatccattctggtcgttcgaatttttcctcttctgcttccgcactttctttagcccaatcaggaacaatgctgtgttctctgtactcaggcagattaaagtgattacgtaggttacgaattttgacttcaaggtcatcgagtacgcctgccataaacccaacatgactaatatcggtgcgtgtggtatggtcattaagtgtttcaaatccattgaaaagattggtgatagcggcatcaatagcaaaagacaatgaattaacctcttgtgtcaaagctgcaccttcctcttcaggtttttcatgattaattcggcgctgaagtttgtgctggattgcagatttctcctcaatcaaattactaacaagttcctttttttcctgcaccgtctggcgtgagatttccagatcagcgcgtgtatcacgcagggtcttacgtagttcgcggacagacatgcgatcaatatcatctaatgtcagaccagctacagtgccaccttcagccaattctgacagttcatcatcatcttcaagcatcaactcatacagtttggaacgtcccaaaagcgaaaacgttttcgcttttgtttctaatccaggtgaaagaaatttgagtgcagcttgtgccattttttgggcaatacggggttccagaccgagttgatccttaacgatgttaacaaactcgccatgaggttcattctctttaagaataatgagacgcttcccagcttctaacatcgcttcagcactctgagccatgtagaaacgggtttcatggacgatgcgatcacgttcatacggcaaaccatcaccaaactgttccatgatttgcaggcggtgtgttgtcatagcgttgagattgacctgtagatcgtcggcaagttgaacatcttcggccagttttactgatgttgtattttttgagcgtgccattgtatgaatctcttgttaattaatttctgctaccagccaaaacgcgctgattcatttctgtaattttggcttgggtgttagccatttcattagagaacgattgtgctatttgcagtaattgcataccgggtgcatatctgccgctacccagtttttgcgccagcccttcttctattaatgtatttagtgcacgattaatatttgtaggagattcctccagtaattccgctaattcaccattactcatcccagacaaggaatgaccacgtagagccttaagaactcgtaatatgcgcgtaccagaactggaaacgttaattttgcgcatgtcacattctcccttttcaatatgtgataatctgttacatagagtgataaaatagttagcctatatttggagtttttaggccaagttttacggctatctcatgggcttttccgtaattagctttggattgcccattaagaacgcggtatacagcctcgcgcgaataaccgttctcgtttgcccattgagtaactgtgataccgtcttgctgaaagcgctgtttgattttctccggtgtcattgttttatctccagtcgtgcaatgatagtgttttgatatatgccaaattatgtgaacttttattctctttgtcaatggtggatttgtgaactttgattctctttgtgcggctcgtctaaaaaaagaaagaaaacgcctgtctttaaaacaagatgaggcggctcaaatgtgtggtgtatcacgtgagatgtggagcaaatacgaacgtggtgtagccgttcctggtggtgatgtatgggttgcatttgcattggctggagcgaatgttcagtttattcttacaggtacatcctcctccaatgttgtattatctccagatgaatctgagttggttcaatactatagacaagcaccattagctcttaaggttgctgcagtagcggccttacagtcaggactctcgaacgttagttcaacaaagcaaaaaataacaggtaatggaaaccgaattgcaggtagggactataacgagcataaaaagtagttgtggtaaaaatgtagttgcaatggaggtctcatttgaaaattaacggggataacaatcgggtcgcggctaatgattatcatgagtataattataatggcccagagccatgcccatattgtgaacagcgatatttgacaccaggtcgacaatattgccgacattgtgaagctgagtttgaagatgcggaacaacaacgtagaaatcaggaaatagatctacgatttgcgttgatattgattgttgctgttttttgtataggagctatatttcttttactttttaagtttggtccagaagaatggcaggcaggagctgcactggggatgggggggtgttttttcgttatagtatctatattacggaaacatcaattgtagatttattatttatcatttcactttggggataacatctatgttgacgttacacggttcagttacgataattttcgtatttctgatatttggttgtggtgaaatgaatacacaggaaataacagatacatctactatttctacattgaaatttatagtcaaaacagataatccgttagtccaaaaattattgccaactattagggaaatgtgcccaggattggataaatactctgatcaatttactgacatcacagtttacgaaaacagttatccttcacgcacaactatcaaatttcatattgatgaaaatgccaaactgtctaatgattatatggctcatggaaataattgttttcttgatatagaggataacgaaacagttttatccatatctaaatcagcttgccaatctgtttgtttagatcaacagaatgtacctggtggaacattgaaattgaaactttagaaacaaataggatatttatgtctactacaaacatagaaaagtttaatgaaattgtaggtattatatttgggaaactatatgagtcatttcctttaaagatagatcttttatctatagaggtaatcggtgaaccccttcaatattctgatggaacatactctgacgaactttgtactacagtagaagatcatagattttttctggatacagtggattggctcataacgaatggttatttggcagggactatgagctctgaaggttgtcatagagccgtattaacggctgaaggtttagaagttcttaaagtaatccctgacagcttagaaaccccattaggtgatcgtattaaggaaacactgaagactgaaagtaaagaagcattaaggtctttaattagccaaactctcggaataggtttacagtttgtatcccgttctattggcttaggttaaaggtaaaaaatggcaaagcaaatatattgccttgccattctcggttattagaaattacaaataatcagctctttactctgtttagctttccccgtaactttcaagttgtaaccgatattgactacttgcattttcaatcctttgaatgccttacgcatttctggaatatcgttcaccgaaattaccatttcccctcggatggtatgtgctagttctgctaatagatcatagttctcaagtccgaaatctatgccatatccttcggtaccccaatacggcggatcacagtaaaacagcgtatgtggcctgtcgtaccgttggacgcattgtgtccagttcatattttcaatgatcgttcttgctagtcgtaggtgagccattgatagctcttcttctattctgagtaaattaaatcgcggtgggctggtggtggaagtaccgaaagtatgttcagcaaccttaccgctaaacgcctgcttttggagatagtagaaacgtgctgctctctgaatatcggttagcgtttcttcgggggtaatctgcaaccatttatatatttggcggctgaccaatgcccatttaaattgccggacaaactcttccaagtgatgttttattacgcgataaagattcaccaactcaccattaagatcattaatcacttcacatttgctcggtacttttaggaaatacagcgcggcagcaccacagaacggttcgacataacaggtatgctcaggaaataacggtaaaatatgttttgctaatcggcgtttaccaccgatccacggaacgataggtaaagattgttctttcattatccgtaagccttttccattagctgaaaatgagttaggctttcccggtcatcaataatcaatagcggaaagagcctcggttgactcacagtacatacctgtgagttgatagcctacccagtattcgagtgttaggcaggtcgctcttatcctgtcttttacttttctgatgcgctcttaacgccctttaaaatccttttcccgataaatttgcaaaactgtttccatcaacgactacggagacagttcagtgaaaactttcaaatcgtttgtatcacttatcaaaaaattacgcctcggtggctggttgttaacagctgttctattgctgatcactatcggtttagtttcccctcaacaagtccctgttgtgatttacaaattgtcgcttattgctctggctgttgtcttggggtactggcttgaccgcagtttattcccgaaagcaaggcccggtcagtatctgaaatatgatgaaatactcatgaaagaaggaaaatatcccgttcagactggctaccatatggtatttgctgccgttctgatacgccgtgcactgattgttgccgctacctgtctgagcgtagctacagggttgtgattatgaattggcggcagattatcggaattgttttgttgtggtgtagtggtatggtcagcctagcattggctgacgaactgccacaccgttcgcggcaataccgcaatgacttaatacgtgcttctcgtgtgatctggggattgaatgcgcctgtagctgattttgccgctcagttgcatcaggagagtgactggaaatcacgagctatttctcctgttggtgctcagggtatggcccagtttatgcccgcaacagcggattggattagtcaacgcattcctgaattatccaataaagatcccttcaacccaatctggtctatacgggcaatggttcactatgactattggctatggcaacgcattaaagctgccgataagtgccaaagaatggcgatggcgctgtcttcctataatgggggcttaggatggttactacgggataagaagaaaaccgaggcagttggtctcaatccgtgggtctggttcggtcatgttgaatctcagaatgctgggcgtagagcgtcagcatggaaagaaaatcgacattattccaaacgcatattactggaactcgcgcctcgttatttggcttggggaggtaccagctgtgccaattaaattatgggctaaacctgttgtattgattttgtcgctaattggcatgttcgctttggcccactggagaggccataccataggctttcagaaagcaacggagacaggaaacactgcattagcacagcagaaagccgaatttcttcagctggaaaagcaacggacagagcgggaactggcggcactcaatgccttgcagcaacgttaccaaatgcaggtcaactcagcgcatcaggcagaagccaattatctcaacgatattgaacaactccgcactcagaaccaacaactgaagaggaaaattgaccatgttacccagagttggatggatgaaaaacaacagtttcatcctgttaattgtgtgtttactcgtggcttcatgcagcaatacaacgccgccctcggcctgtccagtgaacaaactcgctctgtctccgttacctccggcgctgatgaaacgttccgtggaaatgaaagctctgatgcccaactacggccatccggtatcacacaacgagatatccttgccaatatcatcgataacggagaacagtgtcttgcattgaaagcgcaggtcaatggcctgctggattacatcgaaggattacaacaatgacactacagattgaattttgggctgccgtaggttttctgctctctttccttggtttcgtttttggtatcgcaaagtggttattcagcaaagccgaagagcgacaggaggaaagacacgcctcgttagagcaagcgcttaaaaattccgtagacaattggtctcagctcgaacgtgagtttatgcagtttaaggctgacttgccgctgaattacgtgcgccgtgaagattatattcgtggtcaaacagtaattgaagccaagctggatgcgctttacagcaaattagagatggtgcagcagcaccgaattgccggaggtaaaaatgattgatgttgctcgtgttcgtcgtgaatcattgcgctggagtctgttggtcgcactgaataaaacccgcccatataccgccagtgaaactttgttattggatatatctcgcgcgatttatcctgacgtcactgcattggaattacggaaggaattggattatctggcagaccgtaaattaattgacctcaataaacagccatcgggtagttggtttgctgacttaactcgtattggtgttgatgttgttgaatatacggtcgaatgcagccttggtattgctcgtcctgaaaagtactggagtgaataatggcgcgtcgaagcactattgataaactccctgaagacgttcggcgttggttggaacgggctttgactgaatcaggatttagtggataccaggaactcgaaaccttgctgcgtgatcaaggttatgtaatcagtaagtctgctattcaccgttatggacaaaaaatagaaaagcgatacggtgcaatacgggcagcaacagaagcagctcggatgctcacagaaggtgccgtggatgatcaagatgcacgttctgaggctgtgattgctttaattcagactgaactttttgaaagtattattcaacttcaggaagctgaaaacggagagattgcgccaaaagagcgcgtcacactgctttcaacggtggcaaaaaacgtagctacactttctcgtgctagcgtgaatctgaaaaaattccaatctgaagtccgggcacgaactgaagctgctgcaagtaatgcagagaaaattgcacgcaaaggtggattatctgccgaagcagttgctgcattacgtcgggaaatattgggaattgcgacatgagtcagcttgcacctgttctaccagatacttcctcaatagcagcacctgtcgtcttattgccataccagcaacgatgggtggccgactcgtcttcttttaaagtcaatgagaagagtcgtcgaacgggaattacttgggctgaagcgtcagataatgtactcatcgccgcatcttctgccgctgcgggtggcatgaatgtgtattacatcgcctataaccaagatatgaccattgaatatattcaagcctgtgcaatgtgggctcgtgctttcaactatgcagccagtgaaattgaagaagggttctgggaagaagacgaagatgataagcacatcaaaactttcactatcaaatttccagattctggattccgtgtagtggcgctttctagccgtccgtctaacttgcgtggccgtcaggggatcattgtcattgatgaagctgctttccacgaacagctcgatgaattactgaaagcggcgctagccatgcttatctggggcggtaaagtgcgagtgatctccacccataacggggatagcaacttgtttaatgagttgctgaacgatatccgggcaggacgcagggacggcgttatccaccgtattacctttaaggaagctgtggctgaaggactatttcaccgtgtctgcttacgtaccggacgtgaatggtcacaagaggttgaacaacagtggatgatgtcggtgtacaagttctacggagctggagcatcagaagaattggactgtattcctgctaatggtggtggagcatggttgtcccgcgctctgattgaatctcggatgtctcccgatacgccactgctgcgactgacttgcccgaaaggatatgagcttaaatccgatgaaatacgccgcacagataccgaagagtggctaaaagccaatctgaaaccgttgttagatgcattgccttctgatgctcgttcgtttctgggacgcgattttggccgcagtggtgatttgtccgtggattatccattgctgcaacaaaaaaatctggtacgcagagtgccgtttgtgctggagctgcgcaacgtgccatttaaacaacaggagcaaatcacttggtatctaatggatggacttcctaatctgctgggtgcagcctttgatgcccgtggtaacggtgcttatctggccgaatatgccgtgcaaaaatatggcgtcagccgtgtgcagcaagtcatgctcaccgaaggttggtaccgtgacaatatgcccccggtgaaggctgcgctggaagacggcaatctggaggctctaccaaaggatgaagacactttggatgacctgagagcagtacaggtcattaacggtgttccccgtgtacctgatcagcgctcaaaagcaaaagcggacggtggcaagcgccacggtgatgcagcgatagcccttgccctagcgtacttcgccagccgtgaaattaacaaaggtccggtgaaggcaaattcccgccgacgccgtcagtctgcacgtatgctggagggatactaatggctcgtggtatctgggtttcaccaacagaatttattaacttttccgaatcaaagcagtcattcactgaacaaattgcatcgcgtagccgttccattgacttctacagtctgggcacatatctacctaaccctgatactattctcaaagcccaagggcgggatattcgtgtctatcgtgaattacgtactgatcctttagttggtggatgtattcgccgccgcaaggccggagtgaaagcactggagcgtggtgtagaacgtagtaatgcccctgtgcgagtctttaactttatccgtgacatgctcgcggacttggatatgtcacgtatcattggcgaaatgcatgacgctgttctatacggctatcagccttgtgaattgatgtggaaccagaatcaatcatggtcagtgacggatattgttagcaaaccgcctgactggttccactatgaccgtgataaccaactgcgttttcgtgcccgtgatgcaggcgtagaaggagaacgggttcctctctataaatttgtaacaccacgtcaagatgctacttatgacaacccttatggatttccagatttatccatgtgcttctggcccgtcacctttaagaaaggcggcatgaagttttgggtacgctttgctgagaagtatggttcaccgtgggtgattggaaaacatccacgaggtacgccacaaagtgaaattgatctgttattggattcgatggaagcgatgattgatgatgcagttgccgccattcctgatgattcctccgttgagattaaagaggcagcaggtaaatcagacagcagtgatatttaccagaacttaattaccgttgctcgcagtgagatctctattgcgttactgggacaaaaccaaacaaccgaagcaaacagcaataaagcctctgcacaagcgggattggaggtaacggatgatattcgtgatgctgatgctgacgttatcaccagcgccattaatcagactatacgctgggttgtagaactgaacttcggtaacgttgaatgtccggtctatcgtctttgggaacagcaatcggtagatgaaacacaggctaatcgtgatgttaagttgagtcaggctggtgtcagatttactccgcaatactggaaacgcgaatatcaattgcaggatggggatattgatgaaacaaccttgtcaaccacgcctattccaccactcccactggcgttctctgaagctgttcacgcagatttagcagcacaagacaccttagatgaagcactggatattttgatgaatgaaggatcattgaatgaatcattggaatctctgctgcttcctttgttctatcgtgttcaaaacggtgttaatcccagcgatctaacaggagagttagccgagctttatccacacatggacgcagagggtttgcaagagcagttagcacgggttttgtttgtgtctaacatctgggggcgcttgcatgagcataaccacgcctgaactggcgtattgcatgacattacctcccaagcgagccattggttatctgcaatctaagggctacaagataacgtgggattgggaagaactttggcaagagactcatgcccgtgcattcacggtggcgaaagtcacgcgtctggatattctggaagatattcgccaggcgctacagcaggcactggatgaaggcaagactgatcgttggtttcgtcaggagctggagccaacattaagacgtaaggggtggtggggaacgaaagaaaccgatgaccccgttacaggggaacgtgtcactgttcagcaaggtagcccgtggcaccttgagactatctttcgtaccaacatgtcggtgctgtacagtgcaggccgttgggccgaacaaatggaaaatattgatgaccgaccgtactggatgtatacagggatcaacgataaccatacacgcaagagccatctcgcattgcatggtttggtatttcgctctgacgaccctttttggcaagccttctatcctcccaatggttggcgttgccgttgcagtgtgattgccctcagtcatgatgatgttcgtgccagaggggtgaaagttatgcattcaggtaaagcaatgggctgggagttgaaattggtttcacaaaaaacaggtgagatgcagcctgttgctacattcaataccggcataacaaaagtagcgactgatgtaggttggtcatattcgccgggggcagcatatcgtcccgatttggccagatatcatggggagctatctggactggcccgtcgcgaactgggaagacagaatgagtaatatcactatcaccattaatgatggagacctaagacgtggactgcgggcattagaattggctactaatgatctgacacttgccatgcgtaaaattgctggaacattgtcagcagaaaccgcttttaactttgaagccgaaggacgcccggcatggataccctcagtggcggcaaaagaacgtggtggtcagacactgcaaaaaactgctcgtttgatgcgttcagtcagtacccgatatgatgctcacacggcaattgtcggtacaaacttagtctacgggcgtattcatcaattgggaggtaaaactggccgcgatcaatctgtattgttaccagcccggccttatctgcccgtaacagaacaaggcgaattatcaccagaagcagtaagagccgtattaagtaccattcaacgacatcttgaatcagcggcgcatcgttaaactgtgcttccctatgcgggtgatttatcattgtcatccgcaaaaaactttataaagcgtttacagactcaaattttcggtatctaattgcatgcagttctccacttttctatttccttccccaatccttttctaaagcagattaaaagtcgttttttctgattgtagtgaaactgtctctattaacgtaatagaggcagtaaaatgaagtcacttcacattttcaaatccggtacacataccgatatgaatggcaaacaattgccgttcagccccgcagatttgcaagcttgtgcaaaggcttatgactcatcgttgcatgaagcaccgattgtgattgggcatccaaaagacaatttgcccgcctatggttgggttaaatcgctgacatcttccggtgatgacttgattgcggagcctcaacaggttgatgttcagttcgctgaattggtcgatgcaggccgctataaaaaaatttctgcttctttctatttacctgattccccaaacaaccctaaacccggcgtgctctatttgcgtcatgtcggctttttgggggcgaagccacccgccattaaaggattgagacaggttgaattcagtgaacaagaatatggtgtcgtcgagttctctgattggagtgatatcaccaacgcttcactttgggggcgtttgcgagaatttttgattagtaaattcggtatggacgaagcagacaaagcgcttccttcttggcaggtagattcattacgtgaagaagcttatagcacgactcagcctgctcctgcctttcatgaacccaataacacacatcaacatgaggaaaacatcgtgacaaatgaagaaaaaaaggcgctcaaagatgaaaacactcgcctgaaagaacagcttactgcccgtgatgctgccgacgcaaagcgcaaacaaactgagcaacatgccggaaacgtggcatttgccgaaaagctgatcacagacggcaaattggcgccagctgctcaatctatcgtgatcgccttgctggacgctgtaacccaaggagattcccctgtcgagtttgctgaaggtgatgtgaaaaaaccattggctactgcgtttaaagatctgctgagttctgtccagcctgttattgattttggtgaacatgcaacaaaagaccgggtagaccaaaacacatcatcagatattgctgagttttctgatgcagatcctgaacgtctggcgttgcatcaaaaagccgtcgctctggtgaagaaagaaggcatcagttacgacgtagccgttacccgctgcctgtaacactagggacgtaattattgaggagaaataaatgtctgattatttgaaaggcaaacgtattgttgatcctgtgctaaccagtgttgctcgtggttataaaaatgcggcattcatcggcgaacatcttttccccgtcgtcgaaatggagaaagaaggtgctagtgtgccgacatttggcaaaagtgcttttgtggaatatgacaccacgcgtgccgttggtgccaacagtaacgttttgatccgtgagaaaggctcttcgttagatattgtgctcaacgaacatgatctagctgcacctgttgattatcgtgagaaatcagaatccttatttaatgaagaagcaaaggcaatccgtcgttccaccaatggtgtgaacctcaagcgcgaactgtatgcagctcgattggcacaagaccctgaagtttatcttagtgactcggtgaagagtctgacagctaatgaacgttgggctggtggcaaaggtaatccaatcaaagtcattgaagctggagttgatgctgttcgtactaccattggtgtacgtccaaacctcatgacaatgggggctagcgtgatgtcactgttaaaatttcatcctgaaattcaggcagctattggagccaacgaacgtaaacgtatcacaatagaaatactcaaagaccttttccaaatccaaaacgttgtcgttggtgaacctgtttctactccaagcattaaagaaaatcccgttgatatctgggctgataatttgatgttgcattacgtatcacctccgcaggcaggagcagaaagtgctgatgagcatgaaccctcctttggctatacgttccgccgcaaaggaatgcctgtagcggataaatatgaaggtgtgggcggtaaggtcaattactgtcgttataccgatatttataaagttgcggttgttggcggtgatgccggctatctgattaccaatattgtgaagtaagggagacatcatcatggcagtaacacaacaatccgtattgacgacaacaattatcgccagtgcgaacatcatccagcatcgtttagttagtactgataatgcaccgtgtcaggctggagccgttgcacttggtatagcagaggtggatgcgaaggctggagatgtcgttcctgttaatgtattgggcattattgctgttgaagctggtgggccaataacccgtgggcaagtcgtacagtcggataaggatgcctgtgtggtaccactgagttcggctgaaaatgctgccggaacatctgtcgggtttgcgctggatgatgccacagcggcaggtaatatcattcgcatcttacgtggcatatgacatgtattgctcactgaaagatttgcaagagcagataccaacgcaatcattgatatggctgtctaacgaagaacctaatgctcagacgatcaatgagcctgtggttaacagtgccatccgctatgccgatgaactcatcgatgcccatttacgtgggcgttatatcctgcctctggcggaagttcccacggtattacgtgatgccgccattacgttaacacgctatcggctgtatgcccgccgtccagagggttctattcctgaagccgtgatagatgattacaaaattgttttgcgccaactggctgacatccgagatgccaaactaacactgggcctgctttccacaggaaaagatgcccctgaaccgggggagtttcgtgttcgggcgcgtcgtcccacctttggagggagtaaaggaatgttggagaaatactgatggatgtttcgccgatcattgatgccattatcatgaggctaagagaaaaactacctggcttacaggtggagtatttccctgaaaggccaactgaattcaggctgaaccatccggtgggagccattttaatcagctatcccggttctcgcttcgacaagcctgaagatgttggggcggtattgcagacacaaactgtcatgctcaatgccaccatagtttttcgtcagcttaatggacgtcacggtgccgttgccacattagatgatgtacgccgggttctcggcggattccaaccaccgaactgccaacgaaaatgttggctggtacgggatacatttctcggtgagatagctggtttgtggcaatacacgctggattttgcgactgaaagtgtatttatcgaagactgtgagttaccgaatggttcgccgttagcccaaatcaattatgagggaactgaacaatgaaatacctctatacaggcccagcaagcggcgtcactttagctgatggcactgaagttttgctctggtcagaaaaaactgttgatttaccagagcagcatgattatgtgaaaacattgatcgcgctgagatatcttcatccactgtcagaacagcaaaaaaatcccctgaagaaaaaagaaaagcctgaggaggccactgatggccgctaattatttgcatggcgtcgaaactatcgaaatcgaaaaaggctcgcgtcctgtcaagacagtgaaatccgccgtgatcggcttaattggtactgcaccgatagggccagtaaatgcagtgacactttgtctgtcagaaaaagatgccgctcaatttggtactcaaatgaatggttttaccatcccacaagcactggatgctatttatgatcatggggcgggaactgtgctggttattaacgttcttgatcctgaggtgcataaagctaatgttgccagtgaaagcattagctttgataaaaccacaggaacagcgaaactggctaatcccgtggtcagtaatgtcttactaaaatccacctctggtagtgccccttatgtagaagggcaagattattctttggatgctcaaacaggcagcctcaagaatatcggtaaaaacattgctgcgggcgcaaccgtgattgccagctatgactttgccgatcctacattagtgacgcctgctgacattattggcagcatcagtgcagcgggtaaccgtacaggtatgaagttactgaatgatacttataacctgtatgggttctttgccaagattttgctggctcctgtctactgtacccagttaagtgtgacaacagaactgattgcccttgcaactaaattgggtgccatgacctatattgatgccccgataggcaccacttttgttcaggctatcagtggccgcggcccgtctggcacaatcaattttaataccagttctgatcgtgtccggctgtgttacccacacgtcaaagtctatgatgcggaaagcaatagcgagcgcctggaacccttgtcatctcgtgcagcagggctgcgtgccaagattgatgcagacaaaggtttttggtggtcatcctccaatcaagaaattatggggatcacaggtattgagcgccagctatccgccataattgacgatccacaaagtgaagtgaaccagctcaatgaacaagggattactacagtgttcaataattatggctctggtttgcgcttatggggcaaccgtaccgccgcgtggccaactgtgacacacatgcgtaacttcgagaacgtgcgcagaacgggcgacgtgattaatgaatccctgcgttacttcagtcagcaatatatcgatatgccgatcacgccagcgctgatagatgccctgacagaatctgtgaatgcctatggtcgtaaattgattgctgatggcgctttgttgggattcaaatgctggtttgatccgacccataacgaagaaacggagctggcatcaggtcatctgttactcagttataagtacacaccgccaccaccactggaacggctgacatttgagaccgaaattacctctgaatatttgctgaatttaaagggaaataattaatggccggaaaaatagagattaaccgcatcaccaacgccaatatttatattgacggcaataacctgttgggacgggctgaagaagtgaaactgccagacgtttccatgaccatgcaggagcataaggcgctggggatggtcggcaaagtggagctaccggcaggcttcgataaactggaaggcgagatcaagtggaacagtttctaccgtgacgccatgttatctgctgccaatccctataagtctctggcattgcagtgccgttccagcgtccagaaattcagttcacaggggcgcattgatgaagtgccattggtgacatatctgaccattttatttaagaagaatccgctgggcacatttaagcaacatgaaaatgctgatttttccagtagctttaccagtacctatattaagcaggtactggatggtgaggagctgttagaactggattatctggccaatatcttccgtgttggcggcattgatcaactgaccgattatcgcatcaatattggaggttaaactaaatcatgactgcactcgctccaaagccagaaagcttgccgacttgattgataagtggactcctccggaaggttggttttccgatatcggtgcagcgaaagggaaagaatatctgatagactttttccgtaactgtagaggctttcgcactcactaatgacaggggcatcagcccctttcttctttaatcccctttaatatttccgtttccatacatggatgatactgaatgaaacttacagaggagtatcatcatgtcaaccacgacttaccatcttcaatttccctataccacggctgctggcgttcgcattgaagagcttcagttatcacgtttgaaagttaaagatatcaaggctgcccggcgagccagcgaaaatcctactgactgggatgatattttgatagcacgttcgacaggattgttaccagaagatatcgaacagatggatgttgctgattatctggcattacagaaacgatttcagcaagttatcggattggatcagggaaataaaaacagtgtggcaagcatcggcgatgttggcacgatggttccggttccagccgagcgagattgataatctggcgctggatgaatttgaatgttggttgaatgaggccaacacccaaatcaaacgcgagaatggaggcggttaattcgtgtcaacagaattttccattggtgtcattattggtggggccattagtagtgcgttcagttctgccatgtctggtacacgccgtactctaggaacactgggagaaacgactcgccaactggagaaccgacagcaggcactgaaccgtgctgttgaacgttacggtcaacttggttcccgtagtgcccagcgtttgaatgcggatctacaacgcatcagtcgaacgctggaacagttgaaccgccagcaacagcgcttacagtctgcggctagcatgagtgatgcagccaaagcgaatcgtatggcgctatatgcacagggagccgaaacctatgcattaactcacacgatatcctctcccgttgttcagtccgtaacaaagtatgcctcttttgaatcaggattaagggacatagctgtcactggcaatctgtctccgaaagaagagcaaaaaatcggaatcatcttgcgccagaacgccaagcaaacaaaccaattacaagaaaccctgttggaaggtgttagcacattggttgccgccggaaaatctcccatgaaatcgaccgatatgagtggattattgggccgcgtcgccacggcgtccaaagctaatattaatgacttagccaaaatggctctatcctttgagtccctgaaaattggaggtgatcaagcgctcaaggaagcctttaaccgagccgttttcggtgctaaatcgggtcgttttgaattaaaagatctcgcccaatactttccagaaatggcgcagcaatttgctggtaagggaatatatggtcaggaggcagtttcacagattattgccagcttggaagttggccgtgaaggcgcaggaacggaaggtgaagcagctaccaatatgaggaactggctagcttcaatgggacgtggtgatattgccaaaagatacgctgaagctgacgtcgattatcaaacctcaatgagcagatatgtttcttcggggtactcacaatatgaagcctcaatcatgatcgcagaccgctttatcaagagtaaaggcgctgatctcatgaaagagtggaaaaaagcgggagccagaggtgatgaagatgcacagcgtatgctcatggaatccttcgggctatcctctattttcaccgacgtacagacagtcaaccatctcttggccatgcagcaacgttggggagattatcagcgtatcaaaacaggcatgggaactgattcggcacaaaaatctgttgataccgattttgataaacagaatgataccttagaagcacagtggcggcgtactcaaattgaatttaatgattcggctattagcattggtcagtcgctgcgcccagcattaatacagttagccgaaacctttattccattgatggacaagaccggaaaatggctggccgctaatcctgaactcatcagcaatgttgtcacgctggtcggtgggttcttggcattcaaagcagcttcaatcggtgtcagattaggtcttaatcttttgctttcccctataactgatatctggaaaggtgcaatgttaatgcgcacacggtggttactgcttcgaatggctatcggcagtggcggcagatttggtgtcgttgcaaacatcttgggaaaaatagccggagcagctctctggttgggtagaatcctcggtagtgctctctataagggcttgatggtagctggcagagctattttgtggattggacgcgtactattaatgaatcctatcggattgatcatcactggtattgcagtggccgcttatcttatctatcgctattggaagcccatcagtaatttctttaaaccgctttggatcttagtgaaattcgctttccaaatgggatggcagggaatcaaaaatatttggtctaacgtcaaaggttggtttacagctcgatggaatgacattactaatgcgtttgatggcggaatatttgaggtcagtaaattaattttaaattggtcgccattgggattgttctataaaacattcgctgacgttatgaaatggtttggcattgatatgcccgataattttactgactttggtaaaaatatcgttaatgggttggttaatggtatttctaatatgctgaccacggctaaggacaccattaaaaactttggtggcaaagtttctagctggtttaaagaagcgttgggtattcaatcccccagtcgagtatttatgggatttggcgataatattgtgcaaggtgcggttgttggtattgatcgcactatgccgttggctgctcgtgccactcagcgtctagctgagggaatgaccccagatgtcccacaaatctcacctcctgagataatgtcgggcaatccaattaaacgaacaggttataaagatgccagcaacagcaataatggtttttctatctctttcgccccgcaaatatacattggtgataaacaacaaacggctatacccgatattagtcaagctttaaacctgagtatgcgtgaattagaaaaactgctggagcgtattgttattcagagagaacgccggaggtacggataatgtttgctgtattaggtgatattgaatttgagctaatcacatattgggatggttttgatgtaacgtttggtgttgattatgccgaacatgcccgaattcaaggtaagcccggcttgcagtttgtaggtgagaaaccggatgaaattcaaattagcttggtctttcatcaacattattgtacgccggatattgaattgaatcggctgcgtgaagcaatgcggaaacatcaagcacttgcgctaatattcggaaatggtgattaccgtggctggtttgttattactgatgtgacagcctccagtgaacaaacggattcagtaggtaatatatttgccctcaatgcctcggtgacattacgtgaatatatcggtgatcctaaaaaaccactgaaaccgcctgccattaaatctcatgtcccgaatacaaaggcgttgtctaatgcaataccgaaaccatcaggtatggctaaaaaagtcagggatggagtgaattatgccaaacaagcacaatcagcactgcaaacgacgatcagtgcggtacgtattgcacagaagatgaaagacaacccggccgtagcgttaacccgcgtaccaagtcttcttaccgggctcaacaatattgctggtccattagggaaaagctatccggcttttcaatcactcggtgactcattgccagatgcaattcaattgaccagagcaacggggcaagcagtaacatttgttaacaatgctcaatcgtcattaagccgtgcagatagctgtaatatcgcggctgcattggattctgtatcaactcaacttgaatcagccagttcaacatttacatcaatatcacccgcgcttagtaagatggccgcgcaaattaccacaagggcgctttgatcatgtttcttgaatacattacaagagatggcgataggtgggatttattggctcaccattattatggtgaccctttaggttacgctcgcataattgctgctaatccgcacgttgcagttacacctgtattgccatctgggatcgtattgttgatccccatcattgacgctgacgatgtagtaattgcagaggatacaccaccgtggctaagataattgataccaagcaaacaccatctataacgggtgtctcagaggttttaagtccgacattcacgttacgatatttgcaaaaagatatcacaaatgacatcactccttatgtcactcgtgtcagctataccgacaacatcaaaagcgaatccgatgaaatagaggtagagttggatgatactgatggtctctggctagataaatggtatccgggaaaaggtgatacgttgacattgaagttgggctatttcggagaacgattactgaattgtggctcattctatattgatgaaattgaagtcagtatccctccttctattgtatctgttcgaggtgtagcaacgtctatcaatacagcattgcgtaccaaatctaaccgtggatttgagaatacaactctggccgctattgctaaccgcatcgctaagaaacatcagttaaagctgatcggcagtatcgaaatcatcaagattgacagggtgacgcaatattctgaaaccgatgtggcgttcctgaaacgactggccagtgaatatggttatgccgttaaagttgtcagtgaacagctaattttctcccacttagccactttgcgcagccaagaacccataaaaaaattacaccctcgtgatgttgcccaattttcactacgggacacgattaataaagtctataaaaaagccaaagtgaagcaccaaaaggctgatgataaaaagttgattgtctatgaagctgatggcacgaccagtacaagtagtcagtccaatccaaaagataagaatagcggtaaagaaaccagcgcagacaccttaaaagtaaacagccgggctgctaacaaggatagcgctgaaataaaggctaagtcagcactggatttacataatgagtaccagcagaacggctcactttcattgatgggagcccctcagttaaccgccggaaataaaattgagttgattgaatttggcaagttatctggacaatggttaattacttcagctcaccactcttttgatcgtaatagcggatatataaccgaacttgaagttgctcgtggccctgttacatcaagcaaatccaagaaagataaaaaagataagactcagaaattggttgtatataagcccgatggttcttccgacacgatcatcgaggaggaatccaaatgagcagtgtaactcgtcaagttggtacgattagcgccgtagatcctgctactgttcgtgcccgcgtgcgattgcctgaatgcgataatatgcgtactaactggctgaatgtgttgcagcgcaatacccagaataacaaagactattggttgcccgatgttggggaacaggttgaagtgctattggatgcgaatggtgaagatggtgttattttaggtgctatctattccagtgttgatcaaccgcctgctaataataaaaatatccgtggtgtaacttatgcagatgatgcagctttttactatgatcgtacctcacacaccctgactattaatggtggcattcagcacattaagatcgcagcgggagccaatgttgttatttatgcacagcaggcaactattgatgcgccggaaacaatcgtaaccggaaatatgttagtgaaaggtcagttaatctatcaaaatgggctgtcgggttctggtggtaatagtggtgctgcaaccattcagggcaatgttagcgttaatggcaacatccatgcaacgggcagcatcatggatgaaggtggtaactcgaatcatcattttcatgaatttctttaaacacctttaatattagatatacctacaggggataatactgtcccccatgaatacgaactcacattctgttttttggcaacccgctctccagaactcaggcaaaattgcctgtgggctggatgatatcgcccaagcaatactcattattctacgtacaccacgtggcagtgatccacatagacctgagtttggcagtaatttacacctttatattgatcaccccatagaccgcgcaattcctcacgttgttagggagtctattgacgctattacacgttgggaacctcgttgccagttgctctccgtgaaaccaactgtcaatggagagcatctaactctgcgtgtgaattggacagcagttgatggcattacacaatctacggagttgctatggcgctgacagaacctgattttatcgagcgtgatgtagaaaaaatcacaaccgaaatgatcgcaaaatatgaagctgatgtaggtaagactttgtacccagcacaggcagaacgcctgctgatcaatttatttgcatatcgtgaagcactaaccagaatgcaagttcaggaagccgccaagcagaatttggtcgagtttgcccgtgcgcccattttggactacttaggggaattggtcggagtatatcggctatccgcccaaccggcgcagacaatattgcaatttagtgttgatgaagcattagagcaagatgtactcattccagttggaactcgtgttaatgcatcggacagtattatttttgctactaatacagatgctgttctgaaagccggcacacggttcgttaatgtcacagctacttgtacagatactggattatcagggaatagctggcaaccagcacaaattagtacattgttggatgaaatcgacgacattgacccgcaagtgaccaacacaatagtgagcagtggtggttcggcagaggaaagtgacgagaggctacgtgtacgaatcaaaatggcccctgaatcgtttactaatgcgggcagtcgtcaggcttatcgttttcatgccatgcgtgcccatcccaatattgttgatgtcgcagtcatgtctcccattccgggcgttgttgaactgtttccactattagctacgggattgcctgatgaaagcattttaacgctggtaaaaagcttttgctctgatgaaaaaatccgcccgttgactgacattgtacatgcaaaacctcccgtgaaggttgattataccatcaaggcgaaactgaccttgtacagtggcgttaatgcacctggtattcaatcggcagcagaacaagccatacaaacatgggtagctgaacgagcaacaacgttaggaaaggatattgttcccagtcaaatcatctcaacattgtctgtttctggcgtctatcaagtcgttctggagtctcccacgtttcagattgtagatgaaaatgaatgggcgaactgtatcggtatcactgttgtggtcactggagtcgctgatggttaagttacatctaccacctccactagaagctgatatcagtatgcgtgcattaggtcagttggcctctcgttttgatgatatcgatttaacccaattaatggtttatctcattgatactgccgatagaagcacgctgcattggctggcaaatcaattctccctatttggcgatggctgggagcttgtcgaatcagacaatgctcgccgcacgttaatcaaatcagctatagaattgcatcgatataaaggcacaccgtggtcaattcgtgaaattatccgtcgttttgggtttggtgaagttgatttaattgaaggcactggtcaaatcaattatgacggacatgccagccataacggtaattatgttcatggagattcaacatcctgggcagtttatcgcgtcatacttcagcaacctatcactaatgatcaagcctcgctactgcgtaccacactggcagcgtttgcgcctgcacgctgccaccttgccagtttggaatatcagtctgtatcaattcgttacaacaatactgtcagttatgacggtagttacaattatgggagcagttaaaatggctaatttgccggaaaccccacagtggtcagagggcgtgtatcaaatagaaacctcagaccccgtgttaggtgggcctgatggtatttccaatcggcaggctaaacagttggtcaaccgcacaaactatcttaaacagaaactagaacaaaatgggaatgagttgagggaacattctgaggtgcaagatccgcatactcagtatgcaccgaaagacagtcccattttcacaggaacaccaaccgcccccacaccggctaaaaacgctaataatactcagattgcaacaacagcatttgtgcaatcactgacggatacggcgaatcaaagtgctgtagctgcaaataacaacgctaatagccgagtaccatccattcgtaaagtaaatggaaaagcgttgtcatctgatatttcattgaatgccggggatgtgggaagttatgctaaatctgagagcgataatactttcttgcgtatttctagcgataaaactgcaaccgttggtagtttattgattgatagtaaaactccttttcctaaattgcgtttcaaatcgaaagatggatatatattgggaattaacggttctgaagggaaattattgcatatctattctgacgatcctaagaatcagcggcgttacaatatattaacgcctgagagaagtggtactcttgcattacaaaatgaagccataaaatccgaaaatggctggtggcaatgtggagatacggggattattattcaatgggttaaagttccatcaggtcagcaatcatggataaaggtaaattatccaatttcttttaaaaataagttttttggctatattgcaagcatgtcgagtatcaatacatcaacgggtcacacattagtacgtaatgcaacgttatcgacgtttgaatatcaagctggcactcccaacaacaatgagaatccaggcaaagttgttcatatattattttggggggtataaatggtttatttctccagaaaagaaggcgctttttatagtgacgctcatgaagaatgtgttgaaataaccgcagaaaaacacaatgaattacttgacggtcaatcacgcggctttgctatcgttagtgataaagagggttatccaattcttacaaaacaagcaccgactgtttatcacaaatgggataatgaaaagtggataatatcagagagtgataaaataaagcttagacgggaacagcagcagcaagcagaacagaagaaacagcaacttatgttcactgtaagtaaacagatagctccattacaagatgctgtagatttggggatggcgagtgatgaggaaaattctcggttgaccgctttgaaaaaatatagagtattgctgaaccgtgttgatgctagcttagcgacagatatttattggcctgaaaaacccagagtaatagaataagggctgcaataaactggccccaatagttaggcagtctaagcagctaatatggcctaggttcgatattataccgaacttagaccatttagttgagaattagtcacctagaggaattacttcggataactcgttcaataggttgtccattctcgtcaaaatatcggcttggccaaatttctgagggatgtactccgagattgttcgcaataatccactctcctttaggccaaggtcgtgatagagcattagctaatgtagatgagctaagtccctccttacgtgataccgctgctaaggtagtgccgagcttacgtaaggcagcgataatgtcggcggtatgccaatcttttttattcatttcctttatatctccatataacaaacgcaataaattatcctattttgggatatttaagtaaatggttgatattcgattttgggatattaatcaaggttaaagaaatggcatcgatttattcatatgaatatcaattggttataaacactcttcgtaaagctaggatagaaaaaggtattactcaaaaaagcttggctcaagccttagatcgacctcaatcatttattgctaaaattgaaaatggtgaaagaaggttggatgtggttgaatttgtgcatatagcacacttgctatctgtcgattatgtgctaattttagaaaaaattttgttcaaaaaacaacctaaaaagttaaaatgatcggagcttataaaataaaaaatcccattttggtataaatcaacaatcgattgatatttaatcctaaatgcttagtaggattaaatatatggtttcaatttactctgatgaatatcaaatagttatcaaagcactccgtgaggctcgtatagcaaagggggtcacgcaagagaatttagctcaagcgctagatcgccctcaatcgtttattgcgaaagttgagaatggtgaaagaagattggatgttgtggaatttgttcatatagcacatttgttatcattagaaccaagtgttctcataaaaagaatcccaagaaaatattcctcgatatgctgataactttctatctacgctagtttcatcagatagcgtagctaaagagggattcacatagttaactatattaactatgtggtagaacaattagggtttaatatccctaaagttgttttttatactccgtgttatgcagtatctatacacattttactcggctaacacttaattggagctatctgcgctctttttgcgcagatagatgtaactaaaccggttccgctctaggctggagggggctggtttatgagatcatgaggtcggccttttcagctatagcgatttccccaattttcggagcttcggctcctttaatttgaccaacgatttttacgcattgcgtattgctaacttatatgctgaattccgaaaatgacttcacgtttttcctgtctatacgctcattcttctcgttcggttaggtaaatttgtcaggcgcttcttaataacttcttagtctcaagatagaggtttataaggctaagatagctttacattagaggtaggttcaagttcagctaagatcatagctgaatgcattccaatcattttcatttggtttctgtactgtgcattatgataggggtgttaaccccattttaatgagtgcagaatataccgcctaactgttcggaattggttaccgtgctacagatttaaaggaaaaatgggtaaattgaataaattacagtcatatttacgacgctagttgtgtaaaaaattttcaatagatgaaacgcaattgtcgctttatttatcgagcggataagtgaaatttatcgcgcgcggcatcacaatatgtctttaaaccgcttgtggactactttcgcaatgcacgaaaggtgttgggtgtcacagcaaaagaaattaacgctgccacaggaaaacagatggccagtcactggttcagtgatagccagtggcaattacccaatgaagtggattaccaaaaactgcggatattgttcgctcgaatagccagagaaaaacaccagaacggagaattaaacaggccatatcatgagttagtagaatctcatcttactttgtcacgccaatatgaggaattgagtctggaatatgggctgctgcgccgtccgttctcggtgacggtagatgtgccttatactgatgtctggtcttttccacctgttcagtattacccaggtaaacatccttgcgaaaagccggcagacttgatggcgcatattatccgatccagtagtcgggaaggggatttggtggcggacttctttatgggatcgggctcaacactaaaagcggcactgaagctgaatcgtagggtcttgggtgtagaactggaagaagagtactttaaccaaactaagcgggaaattggggtgatgatatgaataactacctcgctgcggtgaggggttatttgagtttctctcattagttattatggcgaaatagtgaattgctggatagtatttgacggatttcattgtcagaaagtggttgtgatctcggtgaacagagattaactttttgacttgaagtaatgctcttagcgagatctatataagctctaaattcaacttggctgtgtccaccttcattcatttccatcggctgaataatcacatgatggtttgacaaaaaaaagttataccaagtattttttctcactttctttattaattttttaagcaaaaacattgcaggtatcatttgccctagtaataaacgagatgtggtaaagggagtgtcgggggtaccagagacttctttaccagtgctgacgttgcgaacaacaattttattaatatatagtcgtatgtaaattaagctcataaaaatgtgtatgtcaggtaattcaaatttgttgcaagtatacgttcttctcttaatgcagtgaagtctgatgcttattgagtcttttaaatcaatacagggcaaatcagcccaagtaattaaattaactaaatgatcactccatcagtgggatggaattatgcgtatggacaaatacaccagccccactgcatacacttggggcacatttacagcaatgcttggtgctctgtcgctgaacgactgggccatcattattggcattatctgcactgttggcacctttggggtcaactggtactacaagcatcgggagcttagccgcaatgacaaagaccagtaagttaagtgctgcggttatcggtctggttctttctggtgcaggtgccacggcgatattgtctcagttcttggacgagaaagagggtaaccggctatcagcgtatcaagatgcggggggagtctggacaatctgccgaggtgttactcggattgatggaactcccgctcgtcaggggatgaggttaatgccgaatcagtgccgtgacctcaatgcacaagaagcaaagcaggctattgcatgggtaaaacgcaatgtgcgggtgccattaactgaacctcagatagcaggtattgccagcttttgcccatataacattggcccatcgaaatgcttctcttccacattctatagaaagctgaatgccggagataagaaaggcgcttgtgctgagataaaacgttgggtatttgataatggtcgagactgtcgacagaccaaagggcaggcaaacggctgttatggtcaagttgagcgacgtgcccaggaatcggaattaacttgctgggggctggatgaatagacattcgttggccaggatattgtttctgtttggcttctttcttgctttgataggtagagatggatggagctggtttctggggtgttgttgctatgaaatttagctttcattactacactatactagcgttgatccttatttcattgacagcgtattactatcactttgagttacagaaagagcagcatattacaaaacagcggcaatcagaaatccaacagcttacggatgcgcttgattatcaaaactcacatatcactatgctgcgcgagcttgatgtgaaacacactcaggaacttgctaatgccaaatctgaaattgatgctcttcgcagtgatgttgccgctggtcgtcgcaagttgcgcatcgcggcaacctgtagtcaaagtgaagcaggttccccctccggcatggttaatgcagccagctccagattggaagaccccgctatcagggattatttcactctcaccgaaagggtaacaatgatgcaggcacaattagagggcttgcaagactatgttagaacccagtgccgataatcatctgaataactgatgtttttttcttgaatatattggcattatttatcaatataaatttattattcggttttgagttaaattgatgtatactgtttttttatacagttatggtgaagggaggtggaaaatgtttttaagcaaacttgctcgctttgcattaactgcaacttctgtggctcctgtatgcatcacattggcttatttggctttcattcaaaaaaactacattatgcttggtgtgtatataactataggagtgattagtgtctttctctgtattattatattgaaatattctattcatcattcaggtcgaacaaaaaagaatataaaaacagctactccagctaataaagaagtaactaattactttttaacatatttatttccattgcttagtgcgtccgggacattttttgactggaaaattgctgcattcttttacattagtttgcttgcttatgtttctttctctgaaggttatagctttaatccgttattatcattcttcggttataaattttatgaagcagagggcgagacaggtattagttttgtattgattaccaaaagggatttatttttagtgaataacgacaggttagatgttataaagctaacagctcacacatacattgttgtttaattcaaaaaggaaattacttatggaattatttgctataaccgacactagtaaaattgtgagaattgtcacagactcagagacgcaaaaatctgtaaacgccttgtttaaaaaacaaaaagaatattttgaaaataattatacgacatctgtagaatttagtggtggttatattaccagtcctgtggagtatttttgtattgataattttgatgatgttataggtgttcttgatgcaattcagacgcctacctccattcaagagtggagtccgcaggagatatctatttttaatataaaggctctgttttctggtgaaattacttcatctgaaacagaagataatataaaagcttatcttcaatgttttgataaaagacaaataatagataataaaaaaacattgtttcatagtatacttcaagacaaaaatacctttaagctatctgattctgatggtttgattatcgataataagctaaccgcaatacttgagggtaataaattaaaatttaaaagttttcatatgttgaggcgaatattcgatgttgatgggtattttaaagaggccactgatgatgatttaagagagttttctaatcatgatcatttccatatttcaaataattttgaccttacaagtcttgctgatacggtaataagaaagaaagtatcattaataaataaatcaagagtcttagagaattatactgtggatgctttattagcagcagctaatgaaaatggagtggtttttgatttagatatacacgaagataatggcaaaaggaaaattgcaatgccacaagagaaaaaacacattaagaggctattgtgttttctggatgaagattattttacctcgcagattactcaaacattatacaggacaaactctaagaaaaaggttaatcaatcttaatgaatggttattcctccggtacataatagccagtaaataactctaaaaactcaacaccccaatccatcacatctgtggtggttttttatagtggaatatttgcaactaactcttgtggcagaaaaacagattaaaccatttactactgtgtaacttgcaagcttagacataagtgcactgaagttgtcagcttgctgaggtagtttttttagtgaatcatctatcttttcgatggttgatttaaaactcattacagactccttgagagtgtttttgttcatggaaagataaaactacctatttttaacatgaaataagttgagacaagtcacttaatgaaattaaagctaagaatgataatttcatcttttaaacagttacgttaataccgataattcatgctactgcctgttcctatcgcatactaggttatgtccctcaattaaattatggccttaagaaataagcggatacaacctaatttcaccatagcgatataatttcttgctgtcttttcataacgggtggcgatgcgacgatgctctttgagtcgaccaaaacatctttctacaacatttcttcttcgatacgtttcatggtcgaatttaacccgtccatctgaccgcgctttttcatttgatttatagggaattatcacttttattccctgactttttaaccggttacgtaatgcgtggctggcataacctttatcagcaatcaccgcttttgaacgacgtttcataaaaccgtttttacgctgaatacccagaccatccagcaggcgcactgcatattgactttcatgacattgacctgcactgagtaccacattcagtggatagccttttccatcgaccgccagatggattttggagccataaccaccctgagagcgacccaggccatgattttcggtgacatcgggatgttttttttggcgcccgccgcacaatgtgccgcacgaatgttactgccatccagagatatagctgaccaatcaactaaaccttgttcatccagtattgacaataacttattgaaaatgaggttaatgagccccgattttgcccaccgattaaagcgattatagacggttttccaggaaccataacgttcgggtaaatcccgccagggggcaccggaacagagtatccaaaacatgccgttgataacccggcggtgttcaacataaggatgtcccgcccgttgagaatgttcagggggcaataaggggagcagtaactcccatgcttcatcaggaaggtcgtaacgagccataacatgttttttccgaaagtcagagccacatagattattctatctcagcctattgcgggacacaccctagtgataatgctgatgtataatccttccatgcaaggaggaagtgatgttaaaaatattcaattgcgtaaaatttatcggattgctgattgtttttattttaccttgtatcgggtactcggaaacccaatacgtagatcctatgacaacatgtctaaatgattatgtccttcctaaattatcagcagacatactgcctgaaaagttagtggatgatgcttttattacgtgcaaatctcaggttgatgagtggcttaagccttttgaggctattgataaacgtgaagaaaactataaatctatgcatgatttttatgttcgaatggtaaatatcagacggaaagccgaattaagcaataactgaatgatgattatttgttattgaataaatattgtatgttgaccaccttccacggtggtttttatattttaagggaaagaaatggcaaaaaatactgactgggagggaatagagcgtgattaccgttccggctttctctcaatcagggagattgccaaaaagtacggtattagtgatgccgcaatccgcaagagggcaaagactgaggaatgggttcgcactattgttgacagtacgcagtgcgaacctgatgcgaaccaagcggaaagtcaggtagcaagtaacaccagtaatatcttggagtctgaaaagttcgcagagagttcgcaaggaaccgcagggattctaaagccgcaatacgaacagtttgctcaaaacatagcggcgggtatgccgatgaaagaggcggcaatttgtgcgggttactctccagcccgtgctgattctcaatcatccatattgatacgcagaccggaaataaaagcccgcattcgagaactgagaaacgaagcggcgttgcttgtttcattcaatgctggacacctggctgaattgtcgtttcgtgctgggaaggaagcgttagcagataagaagttcggacaggttgcgccgaacattaagaacgctgcgcaacttaccggtatcgacatgagcagcaataaaactgaggtcaatgttgatctcgctggcctgagttatggcaaagtctgtattgtcactcccgccaattgtcctgctgatgtctgggcttctcacatggagaaattgcgcgagggaaaacaggtagcccagtcatcatagatggtgttctgtacgcctttagtagtgactgggcgacagaggttttatatgaccgagcattgggttctgttcgctggcgttggacatatggcgggcgtggtggcggtaaatcggtagagattgctcgtgcgctggtattgttgggtgctatagaaccaatgacgattctttgtgcccgtgaattccagaactcaatcaatgattctgttcttgccctgcttgaggcacaaatcattgatcttggactgtcccacttctataaggtcaaaaacaacgagattgaaggtcagaacggcactcgtttcacgtttaaaggtcttcgcaacaatattcaaagcatcaagtcgatgcatggcattaagatctgctgggttgaagaggctcagaccgtttcgcaagatagttgggatattcttgggccaactgtacgtgctaataaatccgaagtctgggtttctttcaaccctcgcgaggaagaggacccgacatacaaactgatgacccggcatcaggaagatccctctgacggcggcgttattattcgaaaagttaactattgtgataacgcctttttccctgacgtactccggcaggaaatggaatattgcaaacgcatcgattatgaagcgtatgagcatatttggcttggattaccaaaagcactcagtgaagcggttattttctctggaaaataccgggttgaagcattttctgatgagctatggctagaagccgaccggcttttctatggagctgactttggtttcgctaatgacccatccacactggttcgctgcttcattattggtaccaaactatatatcgaatatgaagcctatggggtaggcgttgaattagatgaaatgccccagttctatgattcggtgccgctttctcgtaaatggcccattcatggggacagtagccgaccggaaactatcagttacttatcacgccaggggttcgttatcgatggtgccacaaaatggcccggaagtgtcgaggacgggatcacttatcttaaaggctttgaagaaatcattattcatgaacgctgtaagcacatgattgatgaggcaagactctattcatacaagactgaccgactgaccggtgaaatcctgccggtggtgctcgacaaacataaccatttatgggatgcggtacgttattcgctggatggttatatcacaggcaaaaacaacccacttcgtatatctaaaaatctgttgggcgaatttaatgtttttcaaattcagacataaaaagaaagcggaggttttgccagttgaacaggatattgatcaagcatcacctcagccaatgaacatacatccggatactgtcggatcgataacagagagaaaagtagctcggcctgttgaaccatacaggccccctcccggtgttgttcctactgaacagttatccgcattaatggcaatggattctacaccttatgaatatatgacgggtacaggtggtatatcgggagatgtgggtttccccggttatccttatctggcccaactgtcacaattacccgaatatcggaaaatggtcggcactattgcaggggagatgactcgtaagtggataaagctaacgtcagtgggggataatgacaaatcagataaaatcaaagcgcttaatgaggctattgaaaaattccacgttcgtgaacggttaaaaaaagccattgaacatgatggtttttttgggcgaggtcagatttacattgatgttcgcacgtcaagaggcgtgcttgctgcaaccgatccggttgaacttgagtctagattatttctgtcacccaaaaaaatcacaaaggggagtcttattggctttaacgtcattgagccaatatggacatatccggggatttataacgctagcaacccgttgagcaatgatttctataagccgtcaagttggtatgtgatggcaaaaactgtacatgacagtcgtttgattacatttatcacccggccattaaccgatatgtttaaacctgcgtataatttcggcggcttatcactgactcagattgcagagtcttatgtacaaaactggtataggacacgtgatagcgtatctgatttgatccattcattctctgtgtctggatttaaaaccaatcttcaatcgacgttgcaaggacagacgaagaatcccgatcagttaatttatcgtgcagaattgtttaacaagatgcgtgataaccgaggggtaatgatgctggataacgaagaggagtttttccagttcaatacaccgctaagtggccttgattcactgcaagcccagtctcaggaacatatgagttcagtcagtagcataccgttagtgatttttacaggtatcacaccaagcgggctaaatgcgtcatctgatggggaaatccgtgttttctatgacttcattgctaccttgcaaatgttagtgaaagatggattggcacgaatgattgatattattcaattatccgaatttggcgaaattgatcctgatattagctttacattcgaaccgctgtatcaaatgaatgatgaacaaaaagccagcatacgtaagaccgatgcagatactgattcagtattaattgctgcaaatgtgattagcacagatgaagctcgcgaacgtctagccaacgatgaaaacagcccgtatcactctctggaaatcaatgatgaaatcgacaaagaagacgacatcgaagaagagggcaacacggaaaacatcatctgatccccttcaaacactccgacaaattaaacctaatgccggtgttcgggtgtggtacagcaagcagttatataagctggtggatgagatgaataactcggtgatttactgggtatccgccaactataagaacagcggtgcagcaatggcaatggatgttagcccggagatgttgatgcgttcagcaatgcgaaaattaacccggcgttggttaaagcagtttgatgctttagctgacaagctggcgaaaaaattcgcggctttatcaatggacaacatggatgcctcgttaaatcatgcgttagatgcggcacatatttcgataccgttcacgatgacgacagaaatgaataacgcgctacagacggtcattggtgagaatgttgggttgattaaaagtattccacggcaatatttatcccaagttgaaacgctagtgatgcaatcagtagcaagggggcgtgatcttggaacgttgacaaaagccttgcaagagcgttacgacattactaagcgccgagcagtcctgattgctcgtgaccagaacaacaaagcgacttttgttatgcaatctgcccggcagcgttcaatgggttttaaaacgggtatctggcggcacagtcatgcagcaaaaaaatttcgtcaatcacacttgaaagcggatggtaaagagttcgatttatcaaaagggctttatattgacggaaaatggatcatgcctggtgaagaaatcaattgcgggtgtggttggcaggtcgtcattcctaaactaaccaattaattaatccgagaaatattatgaatcacggtctggcgttagatcgggcttctgtacgctcatacgacagagatgggcgtttgcatgttactgaaagtcctatctctaaggcgacggtatcatcgtattacggaagagaaatcccgaactggcaagggttaaggcttgatcctaatcgtatctacaaactgttgcgtgcccctgatgaattagagaaaggggttgcaactttcaataacctgccgttattgaaaaaacacattcccgtcacggcggccaaaccttcaacagaattgattgtcggtacaacgggatcagattccatgttcgatggtacatacctgaaaaacagcctggcaatttgggatgctgaatccatagcgggtattgaatcggatgaacaaaaagaattgtcagcggcgtatcactacgtcgctgatatgacccccggcatgtatgacggcattcatcatgatggcgttatgcgcgatatcgtcgggaaccatgtcgctcttgttgaagaagggcgagtcggtgcagatgttgttgtctgcgattccctccctctggagttaaaacacatgaagttaaataaaaaaatggtggctgtcgctgtacgtgcggcgctgggggcatacttgcagccgaaattagcacaagatgctgcaccaaaagaaattgcctcattactgaaagcgggtggtagcgcgaaaagtatagcggaagcggcgaaaaacaaattcggtacccttctggctcaggatatggaaatcgactcagcggagcttgcctcaatcattgaagctgttgctgatgatgcggagacacaggagcctgcggagttacccgcgcaggacgatgatatctgtgcacaagtacttgaactgcttgcgggtaaattgccagaggaagacttggcaaaaatccgggcgttaatttcaggcactcccgcgcaagacgatgatcccgataataaaccagaaccaaaggaagaggatagcgtcagtaagcccgcaatggatgctgctattcgtgcagctactcgaaaggcagaaaaagacacagtgaatcgcattaatgctattcgcattgctgaggctgaggttaaacccctcatcggtgatgtagtagcaatggattctgctgacgaaatttacaaggttgcgcttgatgaggtgggtgttgatacaaccggcgttcatccgtccgcttatcgctctttagtgaaaatgcagatcggcatagcagagtcagcaaaacttaaagcccacctagcaatggattctgctgctatagattcttttgaaaaacgttttcccaccgcatctaaattagtgaggatttaactatgggttttccgaacaaaattaatcactatccagcccccggcattgagggagcatttgccagtactaaccctagcgccactttgttagcaagggacggcacgctgattgcgggtaacgatggagtaactgttgggcgttttgcctgggtgattgatggtgttgtttcgaacaagggggcgggtgcaccgtctggttttgtggggcgtgacggacaagcgtctatcactctttggttgggagaagcatccatgctgatccaacccggacgtgaagtcactttatttactgcgggtgattttacggtacgaacaagcactcccgcaaaagttggggataagatttacgcatccttaaaaacgggtgaggtgcaggccgccgcagcgggaaaaactatcactgattttatcgaaactaaattcgttgccggtactgctgctggtgagagtgaattagtcaaaatggggacctggagctaatgaaacgacacacagattttcaatatattgaaggggaatacggcattgtagtaccacaggccgtcgattacttaaatccccaatatgctcgtaactatacgttagctatggatgcacagccagctatggtgactgtgagtaatgccggtgttcctgcgtatctgactaactatctcgatcctgagctggttcgtgtgttggtcacgccgatgagagcggctgaaattatcggtgaaaataaaaaaggtgactggacaacgctgacaacccagttcccggttgaagaatcaacgggtgaagtgagctcatacggtgatcacagcaataacggcatgtcagatgctaacgtgaattgggtggaacgccagagctatcatttccaaacatttactgtctggggggagcgtgagctggatatgtacggtacggcccgtatcaatcgagcagcgcaacttaacaccgcaagcgcattaaccctaaacaagtttatgaacaagtcttatttctatggtattgcggggcttaaaaactatggactgttgaatgatccggggttaagcgcaccggtggtaccggctgcaaacggaaaatccaatggtacaacgtgggaaaccaaagacgggcaggcaatttatgacgatatttcccaacgcctatttaagcagcttacaaaacaaacagaagggttggtggaacgaacagagccattgaaactttgcatgtcgccaacagcggaagttaatctgacaaaaactaaccagtacaacgttaatgttaccgatcaattgaaaaagaattttccgaatctgacgattgaaacggcggttgaatacagtacggaagcgggggaactggttcaattgattgctgatacgcttgatggtgaaaaaacggcttatgcctcatttactgaaaaaatgcgggcacacgcggttgttgtgagctcatccagttttaaacaaaagaaatcagccggtacgtggggtgcgattattcgttatccacacgctattgcacaaatgttgggggtttaaatggtgacagtcattgtggggtgtaaattgcctcacgggttaacgattgaaattgatgggaatcgcgtgacgctaaacgggataaattcatcaacaattattggtggttatgggctgacatatgatgttgataaagcgttttttgacaaatatctggaactctatgcagatacggaattagtcaaaaatgggcttatttttgcccaagaaaaactcaaagaggctcggacggaagctgaggaaaaagccgggttaaagaacgggttagagcctatcgatccccaaaaaccgggtaaaaatatcgagcagcgaaaagaagaggattaagctaatgggctttgttgtcgtttttgatgtcgtgaaatttcgcactcgttacccggagttttcttctatcagtgatgtcctgctggatacctattttattgaagcaacactctatcttaacaatacggcccaaagcccagttagtgatcttgaacaacgaatactgttgttgaatatgcttgttgctcatattgccgaacttaatcgtttatctgttagcggaacagcggccaatccgctcgtggggcgggttagcagcgcaagtgagggatctgtttccgtttcggctgatatgggcgttgtgagtgaacgtgctgcttggttcttgcagacaaaatacggggctatgtactggcaggcaacagcgcaatatagaattatgcgttacgtccccggcagctctccctctcactatccgtcatattactatccacggactcaatggaggcgctaatgtcgaacagtatcaagggcggtgatgcagcaaaacgctacttaaagcaattagctaaaagagtgggtgaaggccaaaaattgcgggttggttttttcaaagacgcgacttatcccgatggcacctcagttgcaatggtggcaattagtaacgagattggcgatccgaggcgtaataggcgaccccgtccgttttttcgtaacactatcaacgaacatgctaatgaatggggtgatgtgcttgcacagggcctgagtgctaacgatatgaatggggatgcagcgttacggatgaccggggaagttatcaaggggcaaattcaacaatctattcgttctttcacttcaccggctaataaaaaatccactatagctaaaaagggatttgatgcgccgctacgtcacaccaaacacatgctgaacagtgttgattatgtgattgatgaggggaacgaatgaacctgcacaatattgtatctggtgctgttggggttgttaatcctcactcacctggagagatacgggtaagtgtgggatatgatattgcacccagtggtaagcaagtcccgcgctacattacaacacccgttaccgcacaaatccagccactgacttttactgatctacaacatacgaacggcttgaatattcagggcatgctcaaagcggcttatgtgaatggcaattttaatgccgtcaaccgccccagacagcaagggggtgatctgttgattattaatggtgaagagtggttgatagtgcagattttggaagagtggccgaattggtgcaaattcgctgttacattgcagcgtggggaacaatagtggtgacgataagtgtaacgcaagacgatataacaaccgcattacgcggttttttaatggccttaatacccaggcgtagcgttattttgtctcagataaatcgctcaccgatgtcagatggcgattttattgttatgacaccattgaacagcacgggtttatcaacaagtgtagtgatctataacgcaccaacagcggcaggtatgggaaaaagtctaatcactcggacgacacgctggacatgtcaaattgactgttacggtcagttcgctcatgaggatgctcacattattgcaacgacggtgcgcactgaatatgcgattgagctattcaagagatcaggtatcgatatggcaccactttatgccagcgacccgattcagacgacgatgattaatggtgaacagcaatatgagtcgcgttggacatttgaatttactgctcaaatcaaccctgttgtgacaacagaacaactattttttgacagtattacgctgaacactaaaacagtggagtctattcatggcaattccaatcagtaaagacgtgagaattaatccgggggtgctgtcggcagtgggtaatgctgttgatctcaatggattattactgacagataatatatatgcacctgttggtgtggtgttgtcgttctcgactaaagaggatgtggcggcatatttcggtggtgcatccgaagaatatagcatggcggctatttatttttcagggtacaacaattgtacaaagacgcccggtcaattgctgttttcccgatttaatcgagcggcagtatcggcctggttacgttcaggttcttttaatgaggtagctattaccgatctgcaaaaaatgtccggtacattgaaactcaatatcaatggtacagcaataaacgccgcaatcaatcttgatggggttaaatcctttgcggatgcagcaaagagcattgaaacagtgattggcaaggcggtaacggttgtgttcgataccacccgtaaagcttttatcatcaatgttgcctctggcagcattaaaccggaagatacaaatatcacctatggtactggtgatggggccgaggctcttaagttcactggcgcactaggggcaacggtttctcagggggctacagtgtcggcggttcctgatctattcgctgtgattaaaacgcagtctcagcaatgggcatgttttacgacggtatttgaatgtacagatgaacagcatcttgcattatccgcgtgggctagtagtcaggtatatcgctatttctatgttgcctggacaacaagcggcacggcaaaagtgaaaggcagtcaggaaactatcgcccataaaattattggcattcacagctacgggagtgtcgttcctgttttctgctctgataatatgaaaccggcagcagtattgggttatgcggcggtgctggattttgagcgaactgaggggcgtgttccgtttaaattcagagaattgagcggcctcagtcctgatgtgatcgattctgatgtttatgatgcgctgattgctaatgggtataacttctatggcaattatgccgccaataatatcaccgaaaattattgggctgatggcacaataaccggtgattttaagtggctagattccttctgtggtcaaatctggctgaatgcgaacttgcaaggcgcggttattgccttgttcaaatccaacaagactatcccttataacacggctggccgtgcgctggtggaagcctcaatgagtgatgttatccagcggtttaagttgtggggcggtatccgagcaggcgtaacattatcggctgcacaaaaactggaaattattaacgctgtgggatctgatgtttcaacgtcaataatcgcgaagggttattacttgtatattggggaaatgtctgcctctatgcgtgcaaatcgcaccagcccaagctgtacactgtggtattgcgacggtggcagtattcagaaattcgaaatggcatctacggaggttcaataatgtcagacacaatcacttctgctgatgcggtaattaccctgactgtgaccaatttatacccgtctggtgtgcaattacagggatttgctgccgacaacattttcgaaactgaggcgttggatttggctgaaacggtacgtggggcggacggtaaactgtcagcgggttttatctacggcaatatcaatcagacgattcatattatgcctgattcggaaagtcgcaccatttttgatacctgggcaacgacatcacgtactagcgtctcggtgttcagatgtaatgcgacggttattcttccagccatcgggcgtaaatacacattggtgaacggcgttctgaagcaatggaaaaccatgccggacgcaggaaaggttttacaagcggcgcaggccgtcattgagtgggaatcaataacaggtgaggcatatagctaatggcacgtaaagaaaccttcatcactatgaatgatgataatcgcgacaaaggaaagcttttttacattcaggaaatgcccgcttcgcaggctgaatggtgggctattcgtgcattgatggcaatggggagagaggggttgtctatccccgataattttcgggatttgggcatggctgcattagcggtggttggattgaaagcaatttctcgcattgctcctgatgaagccaggccactacttgatgaactgatgggttgtgtgcagatggttccgaatcaggtagataaaaaaatcaaacgcgagctgatcgacagtgacattgaagaaattgttacccggctgaaattacgtgcagaggtgcttaagttacacgtggattttttcaaaaccgccgaccaatcgtaatcccgccgcgctattccagcatctcaaagccattcggtatcatcagttatacaaatgtcccaggcacaatagcgaccgttatctcatcaggaaaggcaacgctccatgagctggatacagtttatggcgtggaggacctttggcagttaatagagattattcaggtcgataatcacaatgcttacgttttacagcagggtaaaaactgatggcaaacattatagatgaacttgttataacgctggggcttgatgcggctgaatttagcgcaggtgaaaccgcagtgattgccgggatcggtgggttggctcaggttatgcaaaaactgattgactcgtttaatgatggtgaaaagaaaaccagcaaatcattagacaaaaccggtaagaaaaccgaaaaagtggcaaaagaaatggaggcggcaggaaagaaagcttcctctttcttttccagcataaagagtcagatcttggctttggcgggtgtcacggtctcactcggtggactgaaaagttttgtgaccagttttgccggcaatctcaatcagttaagtactgccgctgatgcgttcggcatgtcggctaaagcgcttgatggctggacaaaagcaggtcaagcatttggtgtcagcgcaaatgagattgtgggggcattttcacgcattaatgatgctaaagcccgactaaaatcaggtgttgcgcttgatccggctcttgagacgctgttaaaaacggcatcacaagcgggtgtcgatattgatattgcctcagaaagcaccgaatctatcatgcgtaagctgagcggtgtttttcccagacttaataaagatcaacagcaagcttacggtggtgaacttggggtcgggtacgccgcgcaacagtggttctcatccggtcacgtactcaaagatgtggataaatttacagctaattcgggtgtggatgataaatctgttgccgccgcgcgtcgttttcgtgaacagtggacagagataagccagagttttgagaaaacaggctacattctgtttaatgcccttttaccatatatcaatgatttcaatatctggctaaaaaacctagctgattggatgaataagcacccagaagagattaaaaaagcggtcagtggttttctcgataagatgagttttattatttcagtcgctaatcaggccgcagatgcggtaggcggttggggtaatgtcatcattggtctgatcgggttgaagtttgcggggtggttatggggaatttatcgcgtggcttcgtccatgctgaaaatggggaaaggcggcgggttaccgggaaaagggattgccgggaaagccggaatatatggcgctatcacatatgcgttatatgatcctgtggagtcagttgcgacttcgattgttggggaagagacaaaaaatacacttgattcatatggattgtatctggcaagcgactggacacccttttttagtaaaaaagagtatgaagcctatcaggcaaaactggatggtaaaacctctaagccagatacgaccgtagtcaaagaggtcaaaaaggaagaaaagcgcagcgaaaatgaccgtatcattcgggccgaggatgaacgacaacagcggctagaatacagcaataattggttaaaagccgcgttagataagctgaccgattcaattaataaactgattgattcgctcgttcctcaagtcgcagccgctgaaatgtcaccgaacactaccggcatgaaattactgggttggctatcaccaaaattagcacaacttgagcagcagttcgggttaccggagggtttgttacgtagtgttgccatgacggaatcgggaggcaatcagtatgctgtgtctaaagcaggtgccaagggcttattccagtttatgccaggtacagccaaacattttgggttaatggatgatgatgtttttgatccggtaaaatcttcggaagccgcggcaaaatatttatctcagctaatgagaatgtttgacggagatttgagtaaagcactggcggcttataactggggacagggaaatgttatacggaaaggattgggcgctgcgccaaaagaaacccgcgattatatcccaaaggtattggcgaatatgccacaactgggggctcatgtggccgctcagcgttattcgaatacggtaaataacaaccgtacctcctctgtttctgagagttatcacatcggaactattcaaatcagctctaacgctaacaacgtaaaaggcgtggttaacgatgcccggcagaaaataggtggatcaacgctggcaacaagctattcaacgggggtaactggataatggcattctctctcaatcaaacaacggtacttagtgcgttccgtagtggcaacctgctatctggtgttaacagtatgatatctcctggatatggtatttattatgcatccgggcagagagttggtgataagccgtttacgcccacatcattcattgtagtagaagtcacacgagaggcatcaatcacgactgcgccgatagagaaaggcggctatacatcatacaacaaagtgcagcggcccggtgaagtccatgtgacattctcgtttgagggatggaccggtttttctggttccgtgcctaacttaacaaacctcaccctgacgtcccgttctgatgttcttgaagcgttagataagatggtatccagtgctgaaatttacgacattgaaacacctgatactacgtacacaagttatgatttgattaagtacgattttcgaataaggcaggataacggtgttaccttactgattgtgaccgcagttttccaggcggtacaagacattgccgaagtgaaaatgagcagcaatgttgctaacaagtcgaatacaacaaagaatgagacagcaaaaggcccaagtaaaaataccgaacaatcaacaggttcaacaaaacatgccacactatccgatgtcaaaaaggctctgaccggattgaaaaaatccgtttccagtgctgcaacgcaagttgctgataaagtttcatctggtttcaagcgtgcaacagagacgattactggtccattaaatgattctgtattgagtgccaccaaccatctcaatgatgcagtagaagaattatcgaggaaattaacgtgattgaaatagcgatcagggcggctaaggctcaggagttcactgtgaccttgaatgagcagtcatgcatgatacgcctcaatcaacgtggcacaggtttatatatggatttaaccgtcaatgataaacctgtgctacagggagttgtgtgcctcaactgcaataaaattgtccgttacagttatttacggttccagggtgaattgttttttgctgatctggatggtttatctgatccccattgggaggagctagggcaacgctacaaattatattacctttttccaggagaggtgactcagtgacgtacaaacaacacaatatcacagttgaatttcagctagttgacggcaagacatttgatgatagcggtaacaatatactgactatcgaaaacgcacgcgcttatgtcaacatggcggcgtggggcggcatatcagggacacaaataacattacaaatctggggtttaacaaccagccaaatggcaacgttgagttatcgcgggatctggattggtagtgcgaaattcaacttaatgcgtgtatgggcggatggtcatgctatatttgagggttttatcagtgatgcctatgcagattttaatcagttacccgatactcccctgacgataacggccagtatgatgcttggcctaagagcaaaggaagttgaaccgttcactgcatcgggagatgtggatattgtcgatattattactgcaatggctaaaaaagcggatctaacggttgaaaattatggcgccacaggtgttatctcaaatcctcattatacaggaaacgttgttaatcaaatccaacaggcggcaagtgcgctagatatagacactgactttgggattgataaagtgaccatttggcctcatggtcaaccgaaagttgaaaaaccgctacttacgtctccagaatatgggctaattggctatcccatatttactggcgtgggaataacagcaactacccttttcagtaatgaaattattttaggtcgtaaggtaaaaatagaaacctctttgccgaacgttagcggcacttatctgataacaggggcggaacactaccttacctcctggcttgatggtggtcagtggcatacatcttttagtggcactccagtgaaaacagaggataaaaacaatgacaaagctgacaacaaaaccaacggacataaacagtgaagcgaatgcttttgattttgtcatgaggcagtttcttagtcagcatgtttttatcactttgggccttgttattaaatcgagcgggaaaaccgtagatgtaaagccgatggtacataatatgacgggagcagggagaaaaatcgagaatggaataatctataatgttccagtatttcgtcttcagcgtggtaacagtgctgtcattatgaatcctgtggttggtgatattggtttaattgccatttgtgatcgtgatattagcagcatcagagcaacaaaagcaccggcattaccgggttcaaaaagaacgcacaattattcagacgcaatttatctggggggagttttaaacgcagaaccacaacaatatgttgaattcgtagataatcagataaatattgtttcaccgaataaaattaacgtagtcgctccgacaacggaaatgacttcatcaaattcaatcacaatgaactcaccatctattatattaaatggtgcggttattcaaggtggtggcggtaacggtggaaatgcaatattcgatggaaccgtaagatagttaaagctgtaaataaggatgataaatatgtagaaatgaagaaactaagaaatctttgtgaagcccaggtaaattttttatttttctcggtcattgttttaactggtaacagtattagttgaactgtgaaactggaaaaggttacgagtatgtgcgacttggaaaagagcttcttttgactgatatagagatagaagcaatggttctgtactataaagtcaatcacattgaagtcaacattatttattttagctgaagtttagagaataaaatatagagaacggtaagttataaaccttagtcacgctggtggatatagccatccttggtttggggttaattgttaactcacttgtcattgttaaatagtgcacgttttaatggcaagaaaagttaaatagcatatgaaataatcacaaaaagctgtaagatatatcaaccaattaaaaatgagagataaagaatgtttaatcttgagcagatcgggcatgtggtaagaaatagcatgcagattattgttgatgagcttaagcttaaccttgctataggggatatctctgatgatgattacagaatcctttctcgcggatacggcgaactaaactgggatgaatgtttgtctagggtaggaaacagagaagataaatttgaattttgcttaaagctggtagaatgtggaaatgtgcaaggacctccttctgggctagctttatgtacatattccattgatgaggaaagttttgaaattcatatgatagagaacttctatcgtgatgacgcaaaacaccctttaaatgggaaaatgtttcaacttactctgatggctgcttacatgttttgtaaatctgcacagggtaaatatatccgtatcattgagcctgttgaagaagtaatctcctattactcatcttatggatttaacatgatgaagtgtggttacattatggaggctgatattgatacgtttgaaacaatattcaagacaatcaaagattgataaaaaaaagactagacactagagtttatagtgatagcatacgaaaactaacgaatattagtttgttttttgtgcaagagaaaactttgttaatgtgaacaccccttatgggctcaggctcaaagctattggagagaaaatctcttaggagtcgttatgtcaaagcagaaagcagccattaaagatatcaaaaaatttgatacgcagcaggtgtatactgctgtgggtggagctattgacttgttgataaaagctgccccaaaaatgtttgagcataagccaaaagttgagcttcaaggaaagcgtaagaatcatcgtcaagctgcttaaaattttttgagtagtcgtcaataaacccgcctacagtgcgggttttttcatatctacaccgcttaattgcggtttttttatttccataggaatcgaaaatgcaaactcgttcatttcttcttgataccgagtcatgggatttaacgttagatgattctggaaatatcgccattactgataatccctattctgtagcgcaggatgtcgcttgtgcctgtagtacatatctgggtgagtgctggtatgacacagcattgggtattccttattaccagcgaattttgggatattggccgggaactcagctaatcaacagcaaaatgcaacaagaagcaatgaagtcaccttatgttcagtctgccacttgtaaagttataaatggaaaggagagaactattgcgggcatgatgacaataacggacatgaacaatcaatcaacggtggtaaatttctgatgactaactctgtagtactgacaacaagtgttccaggtgtaacctttacaaagacgggtctaactgtgcccgacgaggttgatattttaaatgggcggctaaatgatttggctacagcaatgggtggtgcaatgagtacgagcttaacaacaccgcaaggtcaaatagccatgagtgatgcggctatcattgctgacaagaacgatcagttacttgctatcgtcaatcaaattaatccggattatgcaaccggacgttttcaagatgctatcggacgaatttattttttagatcgaattccagcatcgggaacaacggtaacagcaacatgcactgggttagttaatacagttattccaattggtagtattgctcaagataaaaaagggtatctttatcattcactaacagaggttaagatcccgggcagcggctctgttgatgttgttttccaaaactcaacatcagggccgttagcatgccaaattgatgacttgaacacgatttatagctcggtgcccggttggtcaggtatcagtaatgcgagtgctggcgtacctggcatagatgaggaaacccgcgctaattttgagtatcgtcgtaaacaatctgttgctaaaaatgcgacaaactcattacatgccatttatgccgcagtattagaagtaaatggcgtggcagacgcatacgttatttcaaatgatacatcggtagtaaaaacggtcggggtatcaaaatacagaatggtgccaaactctatttatagtgctgtatatgggggaaagactgaggatgtcgctagagtaatctggaagaaaaagcctccaggtattcctacgaacggaaatacaactcacacaattgtggatgatgaaaactatgttcagccttatcccgaatatgaaattaactatgtgataccagcacccattcgtgtctatgttgacgtctcacttgctaatagcgattaccttcctgctgatattgaaacacaggttaagtcagctatagcgcaagcatttaacggagaagacggtggaacccgagcaagaatagcatctacattatttgctggtagatattattcaggcgtttataacatagatacatcgagtgttgatatttacaatattacgcttagccgtgacggtattacttattcaacatcaattagttttggtattgatgaaatcccaacgcttgacgttgataatatttctgtgaaattagtaggttcataaatggaaaatgtgggagcaactattcttgctcagtatgccgctagtccaaaactcaactcacttattcgaagtttcaatgccgctgtttcctctgttgaatttattaatacattttacgatctgatttggaatattgacacagaaaatacttacgggctggatgtgtggggaaaaatagtgaatgtcagcaggcggctgactgttaatgaaaatgtaaaatatataggttttggtgaagctttactgaatgttccgacaacgatagatccaaatccatttgaccaagcaccattttattccggggagtcaaaaacaaaaactattgagctatcagatctgatgtaccgaaagctaattatgatgaaagccatgtcaaatatatctgactgcactataccaaacatcaacagaatgcttgtttatatgtttagcgatagcggacgtgcatatatcactgatgatggaaatatgaagatgagttatgtatttgaatttcagctatcaacagcagaattagcaattgttcaaacatcgagagcactgccttacccggttggtgtcagtgtcgcaatcgttcaaaggataccaacaaatgaaatcaactgaaaaacctaatcttattgctgttccgtttgcgagcgccggagactataacgagattgcaacaaaatcaactgaaagcagcttggcaaaaggagtagctacgtatccgagcggtttccccccgttaacgatgacagcaatatctgctggtggaattcctccatctggcaaggatatgaacgggatattgaatgatattactaccgcaatacgttattcaatgtctggtggcttgtattcgtataatgctgactttagtgctgccattgatggttatcctaaaggggccattgttgccagttctgatggaagtaaaatttggtggaatgaggtagaagataacaatacagatccggatagtacatcagtttccggttggaaaaatctactagcagatcctaatgggttatttctacagaaagctaataacttatctgatattaataacaaagcgacagcacgtaataatttaggactgggagagattgcaactcaagatttgattcctgacgccacacttatagaaaaaggcatcacccaacttacagacaagacaggtaacagtaatacccttgcagcaactcagaaacttgtttctgatgtgaatgataatgccaataataagctcgctaaaaatcaaaatggagcagacatcttcaataaaactgaatttgtaaaaaatatcggtttatcggaaatggtggagttggctaaaggggcggtgccgaatagccggaaaattaacgggaagccgttggccggggatattagtttgaatgctggggatgtgggaagttatgctaaatctgagagcgataatactttcttacgcatttctagcaataaaaccgcaaccgttggcagtttactgattgacagtaaaactccttttcctaaattgcgtttcaaatcgaaagatggatatatattgggaattaacggttctgaagggaaattgttgcatatctattctgacgatcccaagaatcagcggcgttacaatatattagcgcctgagagaagtggtactcttgcattacaaaatacagctataaaatccgaaaatggttggtggcaatgtggagatacgggggtaattattcaatgggttaaagtcccatcagctcaacaatcatggataaaggtaaattatccaatttcttttaaaaataagctttttggctatattgcaagtatgtcgagtatcaatacatcaactggccacacattagtacgtaatgcaacactatcgacatttgaatatcaagcaggtactcccaacaatgatgagaatccaggcaaagttgtacatatattattttggggggtataaatggtctatttctccagaaaagaatgtgttttttataatgaagctcatgaagagtgtgttgaaataacagcagaaaaacacaatgaattacttgacggtcaatcacgcgggtttgctatcgtcagtgataaagagggttatccaattcttacagaacaagcacagtctgtttatcacaagtgggatagtgaaaagtggataatatcagaaagtgataaaataaagctcagacgggaacagcagcagcaagcagaacataagaaacagcaacttatgctcactgtaagtaaacagatcgctccgttacaagatgctgtagatttggagatgtcgagtgataaggaaaaatcgctgttagcagagttaaaaaaatatagagtattattgaaccgcgttgatgttaatttagcgtcagatattaactggcccgaaaaacccttagaataatggaatcagggccaattgaaccgacctccaatagttagataagtctaatcaaatatggcttttttgcactactctgactgaatcgtcctcaaaatgttggataatcatccaacatttaaggatatagtccatttatgctttagtctattaggtaatcatcaacccaccaggataatacttaatccagtcaatagcagcactggggttaaatggctcaatactcagtccttccaggcattgccagagttcctgagtgttctgggcggtaataacaatacagtccggcatcacccggatttttagtggcattccaaaggtaaatcccgcttcctgtaaccattttccttttaaagaaatgccgtttttagctaccttgccaaaacgttcagcttgggaaattcggcgaattgttttattatcgcgtttagccataattaactaccttatatagttagttgtggtaagcagggttatcgggtggcagcccggtagctctgcgtcagtgaaaatagtctctcaatgttgaattatgaacgataggttacctttctgcaataaaaatatgacctatagtttacctgggcttttcgttgtcaggcagtccattgagggcgtcattccagtgttgatcccgttctatattattcactattttgctgatccatgtttctgatttgccccaccgtatagccagctcgcggcgcgtccagccttttcgtttcatttcagacttaaacaattctggcggtatacgtttcaaaattactccacaaatataaactgtttatcgacacatcatagtatagccatttcgccgatagggtgacattggtaaataaaatgaccgcttaagtggcacaagccgaactccatgagcataggatatgccacaccagaaatacctatcactaaggtgattgttacatgaagttgggttacatgcatgcgtcaaaaactgacggtatcaagtgctggatttatgaataatgccctatgaggcagagatctggtgaggcattttattttgtactataaattataaaatagaggtagttgctatgtgttacagacataaaaaaaccaacctaattatggttggtttttccaaaagctccgcggctcctttgcgtatccttttgtgtcccttcattgtccggtcagtgtccaatcaactttgctaactcactgtttttaaagctgttgtcctatcactgtccctactaaattggtggagctggcgggagttgaacccgcgtccgaaattcctacatccttggtactacatgcttagtctaatctttacattcgcttgccagctgcggacagacacgccactcacaaactagcctgattagatttaacgcttcaaccccaggcaaggcatccacgcgatctcttttgggtttgacctctcttgatccccgtcctaagagcggaggctagggagagagggctctgcgcaggttattaagctgctagtgcgtatttttcgtcgtttgcgactatttttttgcggctttttacgaggccaaccgcccctcggcatgcaccttgggtttcgcgaatcccgtcgaatccagaatcagccccaagtgtcttaaacgcaagtatatcagaatactaaactataatgccagaatttatcgcccagcattcttcataatacgtgctttgtctaatttccattcacgttctttgatgtccgaacgtttgtcgtgtgcctttttgccttttgctacgccaattctgactttgcaccaagcgtttttccaatagagagataaggcaacaacggtataaccttcacgattgactcgaccatataatgagtcaagttcgcgctgattaagtaagagtttgcgtgaacgcattggatcacagacgacatgggaagaagctacatttaacggggtgatggtggcaccaaaaagataagcgtctccatctttgagcaaaacgtaactgtcgctgatgttggctttaccagcgcgcagtgatttgacttcccatccttgtaacgagagacccgcttcaaattcttcttcaatgaagtattcgtgacgagctcgtctattcatggcaatggttgccgaaccgggtttgtgtgcttttttctttgtcatagtgtatgcattatactgaatgctttggtgaaagaaatcttttcccgcgcatatttgctgattaatgcgtgtttattgcattatacgctgacagttttttctttgatcacgtataggtgatattatttgctacaattaagccttacaggaaattatatgccacagattagtcgctctgcgttagtaccttacagcgtggaacaaatgtacaaattggtcaatgatgtcggttcttatccggattttttaccggggtgtgttggtagtcgtgtgttgagtgttagcaataacgaaatgactgcgtcagtcgatgtttcgaaagcgggtataagcaagacctttgttacccggaatattctgaccgataaccaaagcattaatatgcaactggtcgatgggccttttcgtaagttaatgggaggctggcagttcataccattgagtgaagatgcctgtaaagttgagttgcaccttgattttgaattcactaataagctgattgaattggcttttggtaagatttttaaggagctggctggaagtatggtgcaggcttttactctacgtgcacgcgaggtttatcgtgtctgatatcaatgttgaagttgtttatgcattgcctgatcgtcaatatctgcgtacggtgaaattggctcaaggctcaacagttgagcaggcaatagttgcatcaggtttgctgactttgcgtaatgatattgatttgcaaaagaataaactcggagtttatagccgtcctgttaagttgacggatattttggaagagggtgatagggtggaaatttaccgcccattattggctgatccaaaagaaatgcgtcgtaagcgtgctgagcgggctaaaaataatgctcaataattactatagatagtcagtcatctatttttttgactgactgtctatatttcttcggttattgaagatcttcggtaagtgaattttcgtttttaatgtcagtcagtacaccattactgtcaaatgtcagggtcagagtttgctgagtcactttttcgtgcccaggttgctgacgaaatacataaaaccacgtttgagtcccaaacgggtcttgtaacattggtgttcctaatgtgtaagctacctgttgctgggtcattcctttgtggatttttgatacactcgtcggtgttaggtagttcccctgattaatgtcagggcgataaacagcccgttccaacgtagagcaacccgcagtcagcatgacaaatgatacagcagcggcagtcaacattttacagcgcatggtaattacattcctttaggagtcagggtgttgataataatagaccttgatgagattgaaaacctttatacccgttatctttcaagttgcttctttgttggctgcactcgctcactccggtcacatagttaactatgtgaccggggattcactcccttgccgttgcgatgcatcttgaaatccataaggtatacaagctttagttatgaccctaaatatacgtaaaagttgtatcaaattacgctgctagtagctctttagcgtttgccagggtattttttgtcacttcactgcccgcgagaagccgcgccagctcttgtaatctggcttttttatccagtagttgcatttgagtttcagtttcttcaccgtcagtctgtttactgacataaaaatgttggtgaccacaaccggctacttgaggcaggtgggtgacgcacataacctgtgtagattcgcctaattcacgtaacagacggccgacaattgcggctgttgggccgctgataccgacatccacttcatcgaaaatcaaagcggacgtttccattttcttagccgttataacctgaattgccagcgcaatacgggaaagttcaccacctgaagcaacttttgcgagagattggtgtggctgaccggggttagtggtgacgttaaattcaactttatctgaaccatcagcgttcagatgttcaggtgtaaaagagacatcaatggtaaagcgaccatgaggcatggcgagttgatgcatactgtgcgtaatgagttcactgagttctttagcatattgttggcgaaccagatgcaatctttctgcaacttccaatgcctgcttatggtgtttattaacctgctcgctaaggtgggtacagtcatcttcttgctgcgccagtaattgctgttcttccaataattgttgatgtagtgaaggaagttcttccggtggaacgtggtgtttgcgggccactctaatttgttgtgaaattttttgttccagctcaaaaagacgatttgggtccatatccagttgatcaccatagtggcggagttcatcgctgacttcattaatttgaatggatgcttcttccaacatagtgagtaattgactgaatttatcatccatagtgatgagttctgccagttcgtgtttggcgtaattcagcagactgataatattttgttcatcgttgtcactaagtaactggagtgcggtttggctaacagagagtagctgaccacggtttgctagccgtttatattcattatcttgttctggatattcacctggttgcggtgccagttcattgagctcttttaagtgatactccagtaactgttgacgagattgacgttcaagcgcctgttgttggaatcgagccagatcctgacaactttggtgccattgctgatatgcctgtttcatttcattttgcaaattgaattgattagcgtaagtatcaagcaggcgtttttggtggccgttatttaatagtaattgatgggcgtgctgaccgtgaatttgaataaggtgggtacccaattcgcgtaattgggaaatcggtacggcggtgccattgataaagcctctggaacggccatctgacgttattgtacggcgaagtaagcattcattactgtcatcaagttggtgggcttctagccattgacgagcagaaggcgtatcagaaagagaaaaccgggcacaaatatcagcacgagaagccccacgacgcaccatattggcctcaccacgattacccagacataaacctaatgcatcaattgcgatggatttacccgcgccggtttcacctgtgatggctgtcatgcctggctggaagtcaatttcaagctcacgaacaatggcaaaattgctaatggttaactgggtgagcatcacacttctcctgtgtataaaaacacctctgtatcttcatacagtataaactggttttttatacagtaaagtagtgaaacctaattttttagaacatttttttagaccagcttagttttgtacttaatgtgttgaagtaattatagtcttgaggatgaatgagattaagcttctgtttgctgcggctaataattacatcctctccatcctgtataggtagaactatctggctatcgcaactgacttcataatcgttgctattttgggaaaatttcagcctgatgctgctttcactactgataaccagtgggcgggaagacaatgtatgtgggaacattggtaccaagacaattgcatccagatttggtgttagaattggccctcctgcggaaagcgagtaagctgtggaaccggttggcgttgcgataattagcccgtcagaacgttgggaaaaggcaaaacgttcatcgatatagacttcgaattcaatcatatgtgccactttccccggatggagtacgacttcgttgatagcggtactgatacgaggtttctggccgtttcttctgacttgagcttctagtaggaaacggtgttcgttccgatattcgccatccaatacttcagaaagttgttgcaaagcattatcaggatctaagtcggtcagaaaacctagattgcctctgttaataccaatgactttaatgtcataacgggaaaggacccgggcagcgcccaacatattgccgtcgccaccaacaacgacagctaaatcagcttgtttaccaatttcggtcagaccgccagtttgtgcatcttttaaaccaatgtctttggctacttgacgatcaataatgacagagtaacctttggattttaaccaatgataaagcatttcatgagtagcaagtgcttctgggtggcggggatgaccaacaatacctatgcatttgaattttttattcatcgttataatttccttctagcaagaggttttatcctcacaatatggtgggttcccttgaatccccagtttagatccccataataggctaagtagcgagattaatgccaaatacgcggagatattcatgagtagtaaagaacaaaaaatgcctgacgagcaagtctcggaagatatggaagttgtatctgaacagcaaaacagtgcggataaagcagaagcatcagagactgaaagtgttgttgatccgcgtgtcgcagagctggaagaacagctcaagcaggcgcaacagcgtgaacgtgatgccattttgcgtgctaaggctgaagttgaaaatatccgtcgtcgtactgagcaagatgtggaaaaagcccataagtttgcgttagaaagatttgccaatgaactgttaccagtgattgataatcttgagcgagctttggaggtggcagatcgtactaataccgaaatagcacctatggttgaaggcatcgagctgacgttgaagtctttccttggggctgtgggtaaatttggtattgaagttgttggcgacacaaatgttccttttaatcctgaaattcatcaggccatgaccatgatggaatccgatcagcatgagccgaatcatgtcatgatggtcatgcagaaagggtataccttaaatggccgtttgttacgcccggcaatggtagccgtatcaaagtaattttagctcagtagtcattttagttcagtaataagtatcaatgccgctccaactggggcggcatttttttactgtggcaactcaggtgtccaattaattggcgcgatgccttgtttttctagcaatgtattggcctttgaaaagtgttgacagccaaagaaccctctgtgggcagatagtggcgatggatggggtgctttgagaacatggtgtttattagcgtcaataaagtagccctttttctgagcatgggatccccaaagcagaaaaacgacgcctgaacggtgctcattgatagcggcaatgactttatcagtgaaagtttcccaacccagattcgcgtgggagtgtgcattaccacgttctacggtgagtacggtattgagtagtaacaccccttgtttagcccaactgattaggcaaccgtgatttggatgctggaagtcaggtatatcggatgccagctctttgtacatattaaccagagacggtggtgcaggaatacccggttgcacagaaaaagagaggccatgtgcctgattagggccatggtatgggtcttgcccaagtatcaccactttaatatcagccaattcggtgtagcggaatgcattaaatacatcctgttgtggcggataaatggttttacctgcctgacgttcttttgcgacataggctagtgtgtcgagaaaatagggttgttctttctcgttaccgattacgtcgtgccatgtgagaggtgcggacatagtaaatcctttttatagattaccaaatggatgttagcttaccgattacaaaatcagaggaaaacctttgatgcacactaaaactaaattcttgataactatttcaatgttgtaaagtatttttgaaagtttacccaaagaattgctgtgtggttagttataaaaacgtatttaaaacataaggtagcagtatgttttatagtaactatatgaaattaactgttctgaatcaatgagtatcctcatttgtgtggatatacccgttatccttcaagttgcctctttgttggctgcactctctcaccccggtcacatagttctctatgctcccggggattcgctcccttgccgccgcaatgcatcttgaaatccatagggtatatataggaatgagacatattggcttgagcaaataaccaagataactcattgatagtttggttgattgtgcgaaatgattgctagcattcaatgcatgaaaaccagattgtggttaagaataagctggatcgttgtttgaatatcgtatgaaaccaaaacggtatgtgttgtaaacagtcagttcctttgactcttttctggctatttattggcaaataataggtaggaatttcgctgttatcagagagcagaatcacagttgattaattttgttaacaaaatttaaacattgatttaacccaatggcattccctgccgatagatgagttgtactgattaaatcgtcgattattttcagctatccttaggggaattttatgagtttatcaattgaaatgaatctatcagtcgattcaagttttcccgttttaaataatcttcaacttgttacaccgccttctgttccagaccaaaatattgaaaaagcgactacagaagttttttccctctcggaaacgactaaacaaaataatagagtctatcaatcattaattaatgaacagagtattaaccttaatttaaagtcaatcacaggaattaagtctgaacaaattagtggtaagcaatctcatgaaattgattatatgttgaccttaatttctgatgatgtctacataagcaccacgatgggaataggtgattatattcgtctttctgatggtgaattattaaaggcaggaatagaaccggcaaatttaagggataaaacaacaggttttcaggcaggtatttatcggaatgacgatctctatatagtggcttttgtgggcactaatgatttgaaggatatattaactaatttacgacaaggttttggatttgatgaggctcaatatcatcaagcaattgatttagctcgcactgccagaatagcatttggggaaaacttgttatttactgggcactctttgggaggtggattagccgcgacagccgcattatcagttggaaagcctgcggtaatatttaattcagccggtgtttctgacaatatgatgaaaaatttgggtttttcaccccaagagggtagggctatcgctgaaaatggattggtgcgccattatgttgtggagcatgatttacttgatgcattacaacagaaactgccagtatctcagccaataggacataaaatcttactgaaatataatgatgattcaggagagtcaggtcaggggtttcctcataatctgatacgtggattaaaagcacattctcttgaaaaggtgctggaattattaacgatatacaaaccttggtcatctttaaatgatgaacagcaagaagaatctctagtcatgcttaatgaaccggatctgagtgtttctgcataattaaagagaagtgtgatgaaaattaatgaagtaattgagcctgaatcggaactagattatcagcggggtaaagaaaatataactccgttacaatgggcgatattcaatcagcaaatggatgatattaataatttgctgaaggagggcgctgatcctactcaacctggtttgcaacaagaaagtgctttgcatacggctgcaaaaatcaacaatcctgattatctcaaatctttattatccgtcgcgccggatgtgaatattatgcatcctgcaaccttagcaacacctttacatgttgcggttcaggtagggagaaaaatgcaggttgaattactgttggtcgctggtgctaatcccaatcaggctaatcggattggggatacgccgttacatattgcagccaaaattaattcgccggaactggcactgatattgttgaagtcaggcgctgatcctaaattgcaaaacaaacaacaatcaacgttccagatgtatttcaatctcacaccgctaaaagcgcgaagttatgagatgcaagcggaatatgatgaagttaatcattggctgaaagctcagcaagtcagccgatattatttgaagtaagataaaaacgggcgatttggcctaatgccagtcagttaagctgactggcctctttttaccggatatttttgctgagaacagcgagtcatcatgatgaagttaccttgtcaggaacgacattgtttgtattttgctcaatttcgcgactaagggaagtatttagaggttctcacataaatttatttttcatcacgtttgcattttaaaaatcttaaactaatcttaataattaagtataaatgttaattattcgtgatctaccctacgctgatttctggattaatggaatgtttctttaaatttccattaattagttatttagaggaaaaacgaattctataactactgggtaactgtctaggattttggagcctgtaatccatgagcggtagcgtatgtcatgattttattcctatacctacagttgtgttcaggctcagaaaggactatcttcgattttataaaaacaggcggaaagtcagattattatattaattataccctatggatttcaagatgcatcgcggcggcaagggagcgaatccccgggagcatagagaactatgtgaccggggtgagtgagtgcagccaacaaagaagcaacttgaaagatgacgggtatataacaagaatgcagataatttatcttattaacttaatatattgagtcgaaatttataaagaggatattttactgagatgaatcttataaataaagaaaaaatccgctatgtttttagtcgaataaaaagaaaaggtgttctaaacacaattagtggtataaataggaagtatatcaaatcaaaattcatagagtcatttttatctaagctaataagtagtaaattagatgtgccagatttccctaagattatacaaatagaaacaagaagtggctgtaactattcctgctcattttgtcccacaaataaagtcaaaatgaaacaagggaaaatgcagcaagaactatttgataaaatagtggagcagttaaaagactttaatggttatatcagtttgttttttagaaatgagccattgatggataagagaattatagattgggctcaaaaaataaaaaacgaaacaaatgcaaaaataattattcagacaaatggttccttattaaatgaaacaattgctaaggagcttggtcaatatgctgagttaatagtgaatgactatactgatgataaaatagtattgaagaaaataaaaaaatgggaggagaatattactgataatttaatatttgtaacacgagataattctgaaagcttgacaaatcgtgctggaaatattggtgaaaaaaagaaggtatttctaaataattcatgtgtaaaaccatttactgaactcacaataacattcagtggtactgttgttttgtgctgtcaggattggatggaagaggccattataggagatcttaaccaccaaagcattcttgagatatggaattcaaataatttaaatgaaattagagaacaattaaagaatagaaatagaatcggaatatgtgaatattgtgattttgttggggtataagatgatgaatatatttaagataatgcagaagcaagtatccaaatgttatgtaaaagggaatgactggaattattcgaaacataaagatatatatttacattttagtgatgagcgttgttatgaagtagaattgaaggaatgtgcacaattatcttatataaagaatgcagatagtatcatattgttgccgacactatggggacgatgtgataaatctgagatcttagaagcaattcaaagaggaatagaacaatgcatcaaatttaattctgtattaatggttagtattcaatctaactatagtcatagagaagatattattgatagtgttcaaaagcttttgaatgaaaatgaggtttacgacaagttgatattgtttcttacagatatcaggagcaaagcatattcaataaatcaaactgttcttttagcaagaaggataaactgttcagcagttggatggatggatgatgatgttattctatctgatgatgcatttttacaattgtatgaagatcttcgtcgcagagggtttatagggagttctggtgcattgaaatgcccgacaccgaaaaaatatcctacttcaaaatttttgaattttgccaaaaataaaatgtctacaaagaaaacaaaatatccacatggctgttgtatgatggtaggtgtctcatcaataaaaaacttgattcctgccagatatatttgtgatgatggttttttcttttttgaattattagacatgaaattagaaaatcctcaaaataatatgaggatcgtggaagagtctatatgtcaacattatgttggagggaatgtcaaagatacatatttccgtatacgtagatccattattagcactgtagtttattgtgctgattatccattggataagtgcttgtattatttaaaagaagttcagttcaatgggttgttcccagccatgtttatcaatatacctattaaagataagattataaaaagtatacttaaatttatattcttaatatggcatgtaatcatattgattgagttgttttttagaagattttcaggaaatccgttaagagaaatagcatggtctgcatattcttgggaaaaaactgaaagtttgaaggaaaaaaaatctttatttgattaataaaattgttttgtcaaactaaataactttccaaaatagggctccacttcgtataacaccttgtgtagcaggagttgtatgcatagcagagcgatgagttagagcctatctcaataggcgtaattgttgcagcctatcaggcaccagacttgcactgcttgaatattaatcaaatagaccaactgtatcggtattatgaaaagctatttaggtcattaaattaataacgtcaaaatagggtttactatggatatttgtaaatatatgtcttcatgtagaaagtcaataatccctatcctcgatccatttaagtttaattatgaaataaatataaatagattattaacttttcaaaaatatgctcctttttgtataatagctagtacggattgtgaaaactttgagatgaaagtgtctccctttatagctgccgcatcaaagattaaaaccatcccgatcataacgcattttcctcctcagaaaccaaacggatttccttcatcacctcacgcagatgcattttttgccacatcagtgataaattccaatgtggaatactatagctctttatcattagagagagagtccatcaagcagagtattgaaaagtatggtgacaactgtttaatcagttctgctgctcttgttctaggtaatgataaaaagtctcaaaaatttgtttattcaaagactgtagatcactcaacagaaagtattgctagagcattggaaggtatagatttcaatttattgaaggttttttacctttactcaagaaacagcgttatttctaatgaaatatgcagttttgtaaagtttattgttggagataatacactgttgtttgttagtggaggaatatcaaacactgagcaggtaaataacctgttatattctggtgctgattttatttcaattggaactacatttgaagaagtcaattggaataacaatgctataaacatattaaataaagaaagaatatattaatgaggagtctctaatatggaaaatgtagttttagtcgatgagaatgataacagagttggatgcattaataagatagacgctcatttaaacggtgatcatcttcaccgtgccttttcctgctttattattaattcaaaaaatgaggtatacattcagcagagagcacagtctaaattactctggcctggatattggtctaactcatattgcagtcacccgagaccggatgaagaaatttctcatgctgtgatgagacgtgcggaagaagaactcggtattgtaataaatgaagaaccaaaatttttatataagttccaatataaagaaaaatataaagatgtaggatatgaacatgaattatgtcatgtctttgttgtttttactgatacaccaccaacggaaaacccaaaagaagtatcagcaggattttttattaatattaaagatgtccaagaatatattcataataatgaagagttttgtacgccttggttcaagaaagagtgggcagatatattacagaaccactttgataaattgtgctaattagcatgtatacccgtcatctttcaagttgcttctttgttggctgcactcgttcaccccggtcacatagttcgctatgctcccgggaattcgcttccttgccgtcgggtatataaggcatttaatcaagaatatactataagtctgcatgatacgaaatatcctctattttgataggtttttataaaagtataccttggtttctaactatggaataaaatcaggttctggaataatgaatactacttggcatgaaaaaaagacaatttataatgatcttaatcaattgcatggagtttatgtcatattgatggaagaatatttatcaacattttgtacaaactttggtggaatgtattcaataccaccgcttgctgttgtctgtgtgaaaaatacagattcaataatagatataattcactattgtaatataaatgagataccaataaatatacgtggtgttgggcattcttttggtacacaatcgctttcaaagggaattgtattagtagtatcagtcgaaaatccggtatttgaaaaaatagatgaatataagtttaaagtttcagcttttgaaacatggttgtctgttgagtgttttttgagaaaaaatggcttatcatttcctatcttgactaggcatcctgatacgactgttggaggaacactttctgttggtggatatggagaagattcatatctatatggcagtcaggcatcatgtattcaatcgtatacgctaataacacctgatggaaaaaggcatagatgttcagaagattcaaattccgaactttataattttggactcgcatcattaggaatacttggtattattgaagatgtgacttttgaagcaattccattaagagtagagaacatactttatgtgatagagtttgatggaattcttcatttactgagttttctgatattgatatctgaatattccaatctgaatattgaagctgtcacatgtcaattataccgaagaaaatactatgttaatatggttctcagcaataattctgatcagattaatattgttaataaggtattagaatgtcaagtgacagggtgtattggctacaaataccattcagtaagagattatagaggaagaacatttggtgcctataggcatgatctctggaatagagactatgttaatctttggggagattattgtgttgatcagaataatattatggcttttgctaatttcctattaaataaagtaattaacaatgacgtttttataagtaataaaggtaggcttcttataattttaaagaaaagtcctagtttaagtaagttctttccttttgagccgatatcgaaaaaaatgagtggaattgtattcggggttggggtgtactttacgtttcctagaaacgaaagcaaagaatatgaaaaattaaagttactgcatagtcaaatattagaagagtgtattttaaatgaaggtcggccttatcttgcgggatggcatgaaatgaaatatgaagataaaataaaaatatatggagatgattatatgaaaattttagaactcaagaaacacttggatcctaaaggaattgtaaataattatgatttttttatggagtattagtgatatggcatatcaatgccatgtagatattctgattttattagtatagaaatgaactaagttaatcagataaattatctacattcttgcaataatgggtaatacgataatctgactttccacttgtttttatgacatcgtagatagtcctttctgagcctgaacgaatcacgttgcaacaacttgccttgaatcaccagcaccgggacgtccgtacacgagggatgggcttgctcgtgcttgccagaggccctataaacgaacccgaatttgctaaaaaatcgccttgctcaataaagttacggccggagcacggttaggctactaccgtctggtctattttgatgaagccggttttgctgcgtctccttcggtgcaatatgggcggagtccatagaaaatatattaaaactcaatcatgtgaagattgtgaatttatatgagattttgagtttatattaacagtttgctgtggggatattacttaaatgaagaagatattgattatttgcatgagaacttgggggagaatgggaaattatgaagcagcaaaaaaaattgaatcagaactagctagtaaagcatttttttctacagaattaatctgttttgatgaattagtacctgtgttcagcaagtttggattaagaatgcaagagatttctgcaagttactatgatcctcacattaaattgaagctatatgatgagttgatagatgatattggtttgtggattagtaatttcaataatgagcaagtattaaatgaatcattatcgagtgtcattgaaaatgattttccatcgttaattatatcgacgaaaggtgttatcgcaaaaatagtccatgcattcaaagaaaaattctattttgatttcaaaacagtgaacttcataactaatcctggtttgttagatattaaaatacatcaacattttagtagtgatttgacgattagaacgacaaattattacccaaattctgatatggttgaaaaatttcatagactagagactgttccattatttaagccagtttcaaactatcaaatcgatcagcaggacattccttctattttaattctctgcaatggatgtgaagaaggttattttgatgtattaaaaacttctttcgaacatccgtcgaaacctaaaatattcatggttattatttcgaataagaaattgtatgatgaatgcatagatttaaataggaagtatgcagatagagcatgcatttataatacattagctaataaggattatctaaaactgatactagaggcttcaacaaacagcagatcatttctatactccaaatctggtccaaacacagtattggaatcaattagattcaatttaccagttctaatacatttctcagggttaccaatggaaagatggatagtggagttgacaaacaaaagaaaatttggtttttgttttgaaaatcaatctaatgggcctggtataataaaaaaatggttggataatcctgagattgtaactaactttaagcgtaacatagaattaagtgaaattgatgatatagatattacacttaaagatttacctgatataatttgtgatgtcatgtaatgattatgaaggaagtattgaatgttcaaaattgaaaaagcgcctataacaacagtatttatagtatgtgtgacaattgtttattccacatttgtttcatattcattaacagatagctttatcggtaaaataagcattatagaactagagaaatatggagggttaacaccaaatagattatatgaatttgagtattggcgacttctggtttcccagttcatacatgttaaacaactgcatatggtctacaatgtgctatcactttcaatattgggaattttattggaaaaacatcttggatctaaatttttattagttttatggtttatttctggtgctttgggaactctttatagcactaactttgttagttacccttggaatattggtacaggagcatcacaagctgttttgggcgtatcttcctttgcattactgttggtttttgtcaaagagcatacctctagtatattaaagtttgctgttgttttttccatgctgccggcaatcgctttagattttatttatgctcattatcctaagcctggtcatgttctttctatttgtattgggcttacaatgagtttgtttttctataggaaaaataaatcttattttgataatgttgctatttgaaaataataattatccacgaataaattaataatgtgagaattttctatgaaacccgctgtgataaaaattaaaggaatagattacagtataatttctatattaatgtggttctgtttaactatatatacctaatggatttcaatgtgtattgcggcggcaagggagcgaatccccgggagcatagataactctgtgaccggggtgagcgagtgcaactaacaaagaggcaacttgaaagatgacgggtataaaaagaaaaggatcttctgtgcgtgatatagttttttttcttgaagaatatccagtcctaacacaaacttttatacatcaacagattatcagtttgaagaaagaaggatttaatgtaagagttgtatctgtttctaaatctagtgatacaatctgtgctaatgattctacaatcccctatgtttgtctagaagatataaaaaacattcatcctatatatgcaatatttaagtttatttatttttctataacctctggttatttcttttctcgaatgagtttatttaaacgaaattgttaccgtaagcgcttgctttttaaatttctatccaatccgtcacaaataaaacctaatgatatcgttataagccattttggtatggctagtatcatggcggcacaattgaaaaaatatggatatattaagagtgcactatatagtgtattacatgcatatgaaatgactaaagaaaagagtcttaatgatctgggaaatcattacggaattttatttgagcaagcaaataaaattttttcagtttgtgaatatatgcgtaatagaatcatcaatctaggatgtcatcctaccaatgttgaggtgctacatctggggatcgatattgatgctctttcatgtttatatccaaatgaatctaataaagaaaaaatgaagataatttttgtcggccgtttgacagaaaaaaaaggattgcctgatttattgttatctctagcacgaataagcagtgaagtgtcatttactttagacattgttggcgatggggagctcaatgattattgttatgaattaatattaaaacttaatttgaatgaacatataaaaatgcatggttttcaaccccatcacatagtcttaaattttatgaaagacgcagatgttttaatacttccatccaaaacatctaactctggtgacatggaagggataccagtggtattaatggaggcaatggctatgaaaaagatagttttgtctacctaccatagcgggattaccgagttaattgaaaataatgttaatggatttcttgtcaatgaaggagatattgtagctttatcagaaaaaatatcatatatagacgagttgggtaaaaaagataaaaatattatgagggagaatgcacatcaaaaaataatgaatgaattcaatattaatattcaaagtaaacatttagctaacataatacttaatgaggaattttctgaaggatgaatacagatgaaatatgacattgtctttatatcttatgatgaaccatgtgctgaatctaattggaatcatttgaaaaatagatttcctgatgcaaaaagaattcatggtgttaatggtatcttaaacgctcataaagttgcttctgattctgtaacggctaaatggttctttgttgtagacggagacagtaaaattagagatgaatttaactttgagttaccagtggaacctttatgctcaactgcgacttatgtatggagaagtgttaactcagttaatcgtttatgctacgggaatggaggtgtgaaattatttaataaaaggttgtttcaggatgttaaaaatttttctggagatatgaccatatctcttagccctgattatcgcgtagtcaatattgttgcttcagatacagtcattaacacaagcagtttccattcctggagagctgcttttcgagaatgtataaaactcagtataccaaggaaaaatcctaaagaagatattatatgtaaagaaagattaacggcatggagtttaattgatactcagatagaatttggtgattggatatcaaaaggagctaatgatgctgctcatttttatgaggaaaacattgaaaatatggaattcttgttatcaaccattaatgattttaaatggttaagagatacgtttaatttaaaatacattcagaaagatagagcatgatgacttcattatcgttaaatttattaggaggtaatggatgttacggcaagtagcaattcttattcctacttataaacgtagttcatcattattacgtttattgaaatccattgaaaaattagagacatcaaataactatactgccattgtggcagataacgattcttctcagaaagagtcttttaacatgatcaatgaaatcaaagatgattttaatttccatattgatgtcattcttgttgaagataaaaatatctcattagttagaaatatgctgttaactttggcctttgaaacatataagtgcgatgcagttgctatgattgatgatgatgagattgttagttctcggtggttagatgcacttattgaatgccagatacagacaaattctgatgtgatacaaggtaacacttatcctatttttttggataaaaaaagaaaatggatggaaaaagtttcattttattaccgagacttattagtatcagattctaaagatataaatgttagcacttgtaatgtatttattgtacgccgagtgtatgaatcgatgaaggagcagctgtttgacttgaattttggtgttacaggaggagaggatacggattttttccatagagcaaagcaaattgggatcagctgtttctattgccgtgatgcactggcctatgaattctatgaccaaaatcgtgcaaatattttttgggtattaaaaagaagttttagagtaggaagaacaaattataggatatttaataataatgacctgagtaaggtatggattactgctctcattattccatttactattgtgaggcttgtttttttcttttggcatccaaacctgtacatacattatttaataaagatatttcgccaatttggagttgtagttgaaggtgttcattgtaatttgaataattgataattattttgaatgagtagctcacatgagtagagtttctgtactaatcccccattataatcagcctatacttattgttagtgctattgagtctataatgagaacttgtttgagtgatgtgcagattttagttgctgatgatcattcatcagaagacaactatatacagctccaacatgttttagaatatttagcaagtaaaactaatttaaatatcaggttgtttaggagtgatgttaatgtcgggacttatcgattgaaaaataatatcatcaatagaattgatactgaatttataacctttcatgatgcagatgactattctgtaccaatgagactaaataacttttcataattataatacactcactctttttattctctgctattcctgtagggacatgaatttaaaaacgttttcactttctcaagcaattgccacatatactgacagccatgatttcgtgtcaccgtttcatgtaaggattgccacagacgctcaattttattcagccagggtgaataaacaggtaaaaacaacagattaaatttaggatgacaagccagccaatctctgacccgtcggcttttatggatactgtaattatccaaaatcaaagtgagggtttcagcatgacaatactggcgttcaagttcttccaatacattgataaataactgagaattcttatttaacccgtcagcataagtcacttttcccgtttgaacattcaggcaacctgcaaaataatgtttttggttttttcctggtgtcactatacgtttctgttgcccttttaaataccagtcagccccgatttttggattcagctcgatgtcgacttcatcttcataaaaaacgggatgtttttctgaacacgttgacaatgcctcggtaattttcgccattttttcatggtactcgggatcgggtaatttaagcgtcggggctgcccttcgccacacgatacccattttatgtaagtaacgatagaaggtactgatggataattttatgtttaataattcattgattttaattataaaaaactcaagactccagcgagaacgcaggcagcccaattgctggggagaatattgcaataaaaaagacagtaaaggataaagcgggattaaattccagacagcgggtctgcccacaggcaggcttttgagtccttccagaccatataaagtcaaccagtttatccagcgatagacagaagaacgactggcgcaaagggttttggcgaccagagagacagactcgcctcgatgcagcatcaatatggccatgagcctgcgagcataatctttatctcgggtgttctggataatttttttcatctggcgtcgttcattgcggggtataggtgctatgataggcataactcagtccgtttagtggtttgggattatctacaattgatcagattgcaaaaattggactgagttccctccaagtgttctactattttgaaaagttatttagattgcctgtataatctgatgaacaaaaatagtcatattgatatattaggtacttcatatatagatttctaccaaaatttccatacggttaactcatttcgcattaagaagttttatagaatcccttatattgcacatcaacttggtaagaagtatctgagttttcaacctactcagttaattagatttagtatatttcgtacccttggtggttttgatggtacaactagaattgctgctgatgatgattttttacttagggctattcattgtgtaaaggtcaggaatattaaccgtcccctctatgtaaagatagaaagagaaagctcccttaccacatcgtctattactggattccaatcagaaacgagattaaattatattaagaagctagatcaattacgaaatacaataaagagtaacttaccattatcagagtatatgaacaaacccaacgatgttcgatttcacctgaatgaaatcgagttaaaatagttgaaatgttttgatgtgaaatatgctgtagtttccagtgaatgatttttatatttttcgtgacagatattctaagcgaggtagtatggacgacattaaagaatgcttaaaagaaattgtagaaaaaataaagagagaagaaaaagtcttagctattcttggatatggatcatattttacaggtaaatataaaaatggaagcagtgatattgacttgcttattatacatggaagtaaaattgatttatttagaaagaaggtagtctatcgtgaagtagaatttgaacttcggtatatggcagaaaaatctttagtaaaacttttatctcataagcatggaccaacaataaagcatatgttggattcagagattatttttgataataaaaatatagcaagagaattgaaactaaaaacctattctatagtcgagtcacctattgtagaaacattttctatagaaaatagaaggaaaagtgcattgctaattgaaagcctataccggaaggtacatcaagtgaaatatgaccttggatttttcgaatttgcatgttctaagtttttgctcaatattgcagattcttatatcagacttcatcgtcattgggggctgcaaggttttcgcaaaatgattagccagctcaaagatattgatgaaagttttgctgagcatttctcactggcaatgagtcctaatcatatagaaacaagaattaaggaaatagattttctttatagagaggttattatgcttcttggtggtgaaacaaattctgatgaaaattttgtgagtcagggcattatgaacatactgaatgtggttgataactaaataatattccaaaatagtgctatatgtattttaattaggttttctaattgggtaatgaactaacttgttgctgaatccacggttatttcattgttgtaaattatattaatattatccaggaatttagcatgaaaatggatgtggcattgaaggataactttgcgacaggttatataaaatctttattactatactctttactattaagtgtcattagttcttttgctgcattttttatgcagtatctgattgacgcggttataccatcaggtgacttgcgttttttatttatctttatgatatcctatctattatatgaatcattcaatatgatactaacttatttgactgctcgctttagagcatcactggaaaaatatttggactattattatttagataaatatttacttgctttgattactacaagattatctatattgaatgattataataaaggtggattgattcaaaggatttatgatgctcaaaatattaaaaagtattatttgactctgctaatagatattgttgttaagcttattacgattttaatattatcaatcatagtgctatatgttagtcctctagttgtcagctttttgatcttaggaatgattatgctggtgattgtctattttttgtctgtcaagaaaatgattattttagaagagcagcgttttaaaataaaatcaaattttctttcaattatggatgatattattggaggaagggaaacgatacgaggcaataactatcgaaacaggattctgaatagatgtgttgacaggatgaatgattttttgaatagggagaaaaatgttgcattacttgttgctggtgtgaaaagtaaaacgctaacagttaacacaatcattggtactgttattagatgtgtcatggttattagcattattagatatagtagtttttcactaggtataatgttgacattaattgcttttacagaaatgtctctaaaacatacaatgcaaattttagtttcttttatggagttgaaaagatcaagcattactcttgaaaggtataaagaattcatggggaataatgttgtagatgagagtttattgaatactgaattagatgataatattgttagtgtagacgaaattacagtgaggaatcttcatattggtactaatggaaatatcgtctgtaaaattccggattttacctttcaaagtaataagatatacccgtaatcattgaagatgcttgattttatccgaaatggagatcattatcctcgctatgaaaatattcattaccgatgaacaaaaagccgaacttgaacatctccatcacacctgccgtgataagagggagtgtgatcgcatcaaagcggtcctgctggcctctgaaggctggagttcagtgatgatcgctcaggccctgcgtcttcatgaaatgaccgttaaccgtcatatcagcgattaccttaatcaaggtaaacttaaatctgataatggggggtctgatagtttgctttctcaagaacaaactgattttttaatcaatcacttatctcaacatcttttccatcacacccatgaaatcgtggcctatgttgctcagctctggaatattacctttagcattcccggcatgaataaatggctacaccgtcagggtttttcttataaaaaaccttgtggcgtccctcataaattcgacgcagaaaaacagcgacaatttattgaatattatgagaatcttaaagtcacagcgaaagacgaacccatcctttttcttgatgctgttcacccgactcaaggcaccaaactcggttatggctggatgcgaaaaggcgagaaaaaaacagtaaaaacaacaggaagccggactcgcctgaatatattgggcgcgctcaacctgaatgccattggtcgtacggtgttccaggaatatcaaaccatcaatgactacaacatttgctgttttttcaatgaaataagaaagtcttatcctgactatcatcaaaaaattcatcttattgtggatggggcgggttacaacaaagctcatcttgttaaggagtgggcttatgttagcaatattgagttacattaccttcctccctatagcccaaatttaaacccaatagagcgattatggaaggtcatgaatgaacaggttcgaaataaccgttattttgcggataaacatgaatttcgagacaacgtcttcaaatttttcaccacaacgctaccggatatagcggactcgctgatgtctagaattaacgaccattttcaggtgctaaaaactgcatcttgaagtttcttgggtatatataaaataataggacagaatggtattggtaagacaactttatgtaagactttgattggtttgattccacctgtaaatggatctgtgaatttttatgtttctgataaaactattaagcctgaaattcatataaatcaatgctctgcatacttcccacaagatatactctttactacaagtattattgaaaatattacattaggaagagacgttgataggaataaagttgagagtatgcttaaaaaattaaatttatggcagacaatagatagcttgcctgaaaaactagataccgttattagtgataaggttaaccctttttctgaaggacaaagacaagtattactctttttacgaggttatctgtcagataaatcggtattgatatttgatgaaatatttagaggaattgataatgaaaatgctaaagtcgtaagtaaattaatttcagaaaaagaaggttgtattatattctatgtcgctcatgattttactatcgattgtgaaaatcatgaagtgttagagttgaaaagtgaaaaggactatgatttcttcaaactagaggcttttaatgaataaattaaactctaataatgaagttaagtcagaactgcataaagaatataaattaattataagtataacagtttttttgctgattatatgttttgctttatcttttgttgtgactataaagaggcgagttgttttagaaaatgcttttattaaaaccgcaccagagcctgtattattttatgcagaaaaggatatagacattaaaaattataatgttcgtgatggtgatgtggttaaaaaaggagattctatttataatgcgattaatccagatttagaggaggctgaatctattttattgcaaaatataaaacgagataatacgaaaattaatgcgatggaaaagtatatagataatgtctatgagcggatgaagattgaaaaaaattatgaggattttaagtttaataaaaatgaaagtgagttaaaaaatatagactctattttgaaagaccatagagatgactatgatttttttagtcaaagctacagagaacagatgaattttgtagataaattgttaaatcagaataataattatttatctaagaaagatattattaaatataaaatggaattgttctcatcacgtcgtggcctgattaatcttgaatctgatatattagacttagagaaaagaaagtacagtttagatgatgagcagagtagatacataattggagcaaccaaatataaagagttagatatggagcttaaccagttaagaggtgaactctccgttcttgtctcagaattgaatgtaaaaaacacagggatggagaatataaagaatggtaagttgagaatagaaggaattgcaaaagctgatggtaaggttgagtttaataatattaatggcatcaggcctaagcaggtaaaaaaaggcgagttagtttttactatatatcctgatggtaatcactttatagcaaaaggagttgttagtgaaaaatacattagaaagattaaaattggacagagcgtagaattaaaaatggatgcttatgattatctcaagtatggggcaataaaagggaaggttgaggctatatttggcgtaaaaaacggtacggctgaaattgtgattaatattgttgataaaagggattttgatttagagtttggtaattcaatcaaggcgtttatcatcttggatgaagttaatttgtatgaatatatatatgaaatagtatttccatatgttgcttaatagtcttattacttaatgtggtattgttgaaaaagttattttttacaggtgttttagtgttagtatgaatatactcaatagatttcaagatgcatcgcgacggcaagggagcgaatcctcgggagcatagagaactatgtgaccggggtgagagagtgcagccaacaaagaggcaacttgaaagatgacggatataaatcttggattcgactaataagctaccgtcttgatgggcaacaatacgataaagattacgtcagtgtcagaccgtattaatcactgatacagacaaatattaactcttaacaaaagggtgaatgcagaaaggttgctctggcagccagcgtgatgacaacgacaggtaagatcgggactcactaaacctgaatgttattctgagcttaaagctcgttggagaaataaggcgtgagtcagcggattatataggagctcgcagctttaaaaggctgcaaaaaagccggatttaaagctgtaacctatctgtcagagtcaaaatgatggaggctgcttgcaagcgggacgttcatataaataacatgtcactgaccaccattattaaagataccccaatatgggtttggattctttttgcttttctcatcaggcgcgggatcagtgccttgtacgatcgtgaaatgcgaattgatcgccttttcttactaccaatagtattcctggtctggggagtatatagcgtcatttatgaaaccacattctcagatttagccttgataacgatgacagcgggtttattcgtcgggattgtaataggatggggtctgtggcgttctcaaccaagattacgtgaaaaagcaggcagtgatttaatcatccgtcctggtacttggttaacgctgacgctgattgttatcacatttatcgttaagtttattattacggccatgttaagtattcaccctgcgttgttgcattcgttacacttcaatctgttttttggctttagcaatggtgtgcttgacggtattttctggggcggaacgttaaatctttttattccttggtgcagaaacaggaccaagagcatctacaaatagcgtttatgaaaccaaatagtgtgattgcaaaaactcgggatggcaaaatagctgatgaattatttaaagaaataaagaagcgtttgcttggagcctatttactcacagaagaatcttactatgtgaaactgcatattgtaattaacgggccaattggcccgtttaaagatttacgcatcgctactgactggcgtttctggttttggattaccagaaggtttacggcgtttaccgatatttttactatctcgatgacgtattttggcttttttcttcgattcttccgctttctttttctctttacgtttagccaatacttttttcgatggcttattgcgggctttgtcacttggtgctttagtggttgggcgaagttcatcaaccactcgcgacgttagtggttcattcagatagcgactgattttgcctaataaaggatgatcatgcgcttccactaaggtaattgcagtacctttgcgacctgcacgcgctgtccggccaatacggtgtagataaacatcggcggtgcgtggtaaatcgaaattgaaaacatggctgatatcatcaatatccaatccacgggcagcgacatctgttgcaaccagaacagtgacactgccatcgttcaggagcttaactgcttccgtccttttagcctgtaccatttccccttcaagaaaccgggctttaatgccagcttgatgcaatttatccgcaagttcgtgtacacgttcacgtttgcgaacaaaaataatggatttagtgacatcgggttgttttagtaaatggcaaagcagggctgttttgtgtgccgaattatcggcacggtagtaaaattgctggatttttttgcgctcacgacgtgacggttctgcatcaatctcaactggatcttccagtaaacgttcagcaaaatcacgaatggcttccccttccagagtcgcagagaacagcatggtctgtttgcgccaacgggtttcacccgcgatggtttcaatatcgttggcaaaacccatatccagcatacgatcggcttcatcaaggataagtgtttcaactgcccgacaatcaaagttttcttccttgatatattgcagcagacggcctgtagtggcgacgacaatatcttgattttcgctgaaaatttcagcgtgattcatataggctacgccgccagtaatggtagcgatatccaaatgggtatgtgcagcgaattcttttgcctgatctgccacttgcatggctagctcacgggtgggcgtcaggatcaaaatacgtggtggtccagatttcttgcgtggaaaatccaataaatgttgcatagcgggcagcaggtaagcggcagttttgccggtaccggtaggcgctgatcctagtacatcacgcccgtccattgctgccggaatagccgcagcctgaattgctgttgggcgggaataacctttatcattcagggcgtcaagcaggcgttcatcaagctcaagttcagaaaagtttgttgcagtcatcatatacctctttttaggccgccgattataaacaggttgggcgtattgttcatctaatattaaagcggtcaatttaaggtagatataccctatggatttcaagagggatcgcgacggcaagggagcgaatccccgggagcataggtaacgatgtgaccggggtgagcgagtgcagccaacaaagaggcaacttgaaagataacgggtatagcttttatcgaaacataataacccttatcctatggcgaaatttattgtgctaaatagatacaggttattaatttgaaacagaaacgacttttacgccgggatggatttactttcaagcaattttttgttggtcatgatcggtgtgcgatgaaagtcgggactgatggcgttttattgggagcatggactccagtgagtgacaaaaaagcgattttagatattggctgtggcagtgggcttattgcgttgatgctagcacagcgtacggatgaaaatactaaaattgatgcagtggaactggatacagaggccgcattgcaggcacaagataatgcagaacaatctccgtggcagagaaaaatagatgtttatcagcaggatattggtgatttcgctgaacagtattcgcaatgttatgacttaattgtcagtaatcccccctattttgaaccggctgttgcttgtcgaaatgaggcaagggaacaggctcgttatacggggtcgatgactcaccagcagttattacaatacgccgagacgttgattacagcggatggtctgttttgtgtggtattgccatatgccattggtgaggaatttgaaacaatggcatgtcatcagggttggttttcccatcatcgggttaatatccgcgataggcaaggcaagccattgcatcggatgttattggcattttcccgtaaggaaaaaactggcttaatcagtgaattgactattcgtcagccagacggtgcatatacgcaagaatttcagcaattggtgacggatttctatctctattattgaatcatttattgaattattgaaagaaccacgccggagcgtggttatatagaagttttgccagcaaaaatcagggtgtcaaaatcgttggttttgattctggtagtaaatcgggataatccagtgtgaagtgcagacctcggctctcttttctttctagcgcacaacgtacgattaattcagcgatttgcaccagatttcgtaattccagcagattgttagaaatcctgaaattagagtaataatcgtgaatttcctgttgcagcatattaatacggcgcagtgctcgctctaagcgtttggttgtacgcacaatgccgacgtaatcccacataaatagacgtaattcgtgccagttgtgctgaatgacaacttgttcatctgaattgtcaacccggctctcatcccagaaagggagttgcggtacttcttctattgtttcgatctgttgttggatatcctccgcagcagaccagccatacaccagacactccagcagagaattagatgccatacggtttgcaccgtgcagacccgtatagctgacttcaccgatagcatataagttgttgaggtcagtatgtccctgatgatcgacaacaataccaccgcaggtgtaatgcgcggcaggaacgattggaatcggctcttttgttagatcaaagcccagtgtcagcaatttttcataaatcattggaaaatgctggataatgaaatccgctggtttatggctgatatccagaaacatggagtcagcaccaaggcgtttcatttcatggtcaattgctcgtgctacgatatcgcgaggagctagttcagcgcgttcatcaaaatcgggcataaagcggctgccgtctggtcgtttcagatatgcgccttcacctcgcagggcttctgtcaacaggaaagtacgcgcctgtggatggaacaggcaggtcgggtgaaactggttaaattccagattggcgatacggcagcctgcgcgccatgccattgcaatgccatcaccggatgagatatcgggatttgtcgtatattgatagaccttagctgcaccgcctgttgccagtaccacaaccttagcgcgataagtttccacctgttcttgctgacggttccagatataagcgccgacgactcggttctcaccgtctaaccgggctttatttgacgtaattaaatccactgcgttgcagcgctctctcactgtgatattcggatgagacatcgctttatcaaccagtgtcgtttctacttctttgccggttgtatcagcatgatgcagaatacgacgatggctgtgaccaccttcacgggtcagatggtattgtttttctccatcttcgctggtttctgtatcaaacataacaccgtgatcaaccaaccattgcacgcaatgacgggcattactggtgataaactcaacagcacttttatcgcaaagccctgctccggcgataagggtatcttcaacatgagatgcgatactgtccgttttatcaaatacagcggcgatacccccttgtgcataataggatgcaccttcgctaagaatactcttacttaataccgtgattttatattgtgaggctagccgtaaagccagagatagaccggcgacaccgctgccaataataagtacatcgctgtaatgttgagaggataatgattgcataattgatgatgtatgaatgaagatgggtaaaaatcatgttagcctatcagatatgatcaaagctatgattgcaacaaaatgatgacaaaaattgaacttcgcagaattttattactcaaagctatgcttgctcaggaatagaacatcatggttggttcagtaaatatcaatgtggagcttttcttcgggagatttaacctcggatgagcgagcagttaacggatcaaatgctggtcgagcaagtgcagaaaggtgaccaaaaggcgtttaacctactggtagttagatatcagcataaagtggcgagtcttttatcccgctatgttccgcagggtgatgtgcctgacgttgctcaggaaacatttattaaggcctatcgggcattggcttcgtttcgtggtgatagtgctttttatacttggttgtatcgtattgcagtaaatactgcgaagaattatctgaccgctcaagggcgccgtccgccatccagtgatttggatgccagtgacgcagaaaattatgaaatttcgagtgcattaaaagaaatttcgaaccctgagaatttaatgttgtcagaagaattgaggcaggtggttttccgtaccattgaatctcttcccgaagatttgcgaatagcaataatgctgagggaattagatgggttaagctatgaagaaatagctaccattatgaattgcccggtaggtacggtgcgttcccgcatcttccgtgcaagggaagccattgatgataacattcaaccactgatttaaaattaaaaatagtggaacaatactgaagggtactttggcatgcaaagagaaaaactttccgcactgatggatggcgaaactcttgatagtgaagtcgttagtattttgtctaaagattctgttatgcagaaacactgggaaaattaccacttgatccgtgacacattgcgcggtgatgtgacggaagtattgcatagggatattgctagccgggttgcatttgcacttgaaaaagagcctgttcattctaaccttggggatattcctgaatctcagcctcaaccagaaacttggcaaaaaatgccattctggcaaaagcttcgcccttgggtgagtcaaatgactcaagtggcggttgctgcctgtgtttcgctggccgtattggtaggtgtacaacagtacaacagtcatagtgcagaggatcttgaatatcaatctgatacgccggcatttaacaccttgccaatgatgggttcggcttctccggtgagtttgggagtgccttccggtgatgatgtatttggcaatgatcaacgccttcaaatgcaggagcgtaataaacgtattaatattatgctgcaacaatatgaactcgatcgccgtgtgcattttaagcaaaatgatgaacggggaatttcaccacaggttgttattccggttcccggaacgcaatctttaggaacacaatagcagtaatgaaacgtatttggttctccgtctgtttgctggcgggcagcctgtttgctcctttacaagcctcggcgcagctcagcagtgctgaggttttgttgcaggagatgggtaatgccactcgctctctaacttacgagcttgcttttattaatctcaacccacaggctattgtctcggttcgttatcgccacgctattatcaatggtattccaattgctcagattatgcagatggatggctctcgtagggaagttgtccagcgcggtaatgagatcagttattttgaacctggattggatgctttcagtcttagcggtaatcatattattgattatttaccggccgtcatttttgctgacttcaatcagttgaaaaaatattacaatttcattgatgttggtcgtacccatatcggtgataggccctgtagggttgtacgcatcacctccaaagatgaagtgcgttataattatattttactgatcgacgaagagactcatttaccattacgtattgacttacttgatcgtgatagtgaggcacttgaacaatttagggttgtttcttctaccattgatggggatatcaatgatgcaatgagtgtgattactcgcttaaatatgccgccaatgctggtcattccaccatcagagaaggttgtatttaattggaaggtgggtaaattgccgattggtttcgttgaggtttcgcgtagccgtcgtaaattgccaaatagcggcacacttgaatctgttatgttcagtgatggtttatttagcttttccgtgaatgtgactaatgctgataaaaccggtaagttggaatatcctctccgtcgtggggcccgaacgatttatagtgcaatacgtggtgcaaatgaggtaacaattattggtgaattaccattggcaactgccaagcgtattgccgctggtgtcgcatttataggagctgactgatggttaaagagtgggcaacagtaattcactggcaacaggggcgggcattattacgttatggttcctcttctggttgtggcagttgtcaggcgcgagcaacgtgtggttcttatttactcaataaattagggtctgatggcatacatcagcttgaacttgagattttacaaccgctgcaaccggggcaaaaagtggaagtggggatccctgaagggagtttgctgcgttcggcgttgctggtttatctgactccgcttattgggctattccttggtggtgcacttttgcagttatggataaccaatcaattgtgggtgttttgtggcggtgttttaggaggcgcgttggggttcttctttgcccgcggagtcgccacttactgggataatcggcaggaatatcaacctgtcgttttgcaaatcggcttgcctcctgatgccattcacattcagcagcgggaataaacctactttaatcatccagacgtctaacaattcataccttaaagccacaggcatgactaggttttcgtagatttggcatgtagaatacagcctttcaggccggtggccgacctaataaaccgtcgctttatgtccctctgtgtgtccatataggcgaatgattcagaaatatcaaggcagaaaaatatttataatgaagcaaatacgaaatttctccattattgctcacattgaccacggtaagtcgacgttatctgaccgtattattcaaatttgcggtggcttaacagatcgtgagatggcagagcaagtgctggattctatggatcttgagcgtgagcgtggtatcaccattaaggctcaaagtgttaccttggattacaaggcgaatgatgggcaactctatcaattaaactttatcgatacgccggggcatgttgatttctcatatgaagtttcccgctcactagcggcctgcgaaggggcattgctggtggttgatgcgggacagggagtggaagcccagacgctggctaactgttataccgcgttagatatgaatctagaagttgttcctgtgctgaataaaatcgatttgccagcggcagagcctgagcgcgtagcggaagagatcgaagatattgtcggtattgatgctactgatgccgtgcgctgttcagctaaaacgggggttggtgtacaagacgtcattgagcgcttggttaaagagattccagcaccggaaggcaattctgatgagccattacaggctcttatcattgactcatggtttgataattaccttggtgttgtctccttggtgcggattaaaaacggcaccttgcgtaagggtgataaaatcaaggtgatgagtactggtcaggtatataacgctgatcgtcttggcattttcactcctaagcgtgttgatcgtgatgtattgggttgtggcgaagtgggctggttagtttgtgcaattaaagacattcttggtgcgcctgtcggggatactttgacattggcccgtcaacctgcggaaaaaccacttccgggctttaaaaaagtgaagccacaggtttatgcagggctgttccctgtcagttctgatgactatgaagcattccgtgacgcattaggtaaattgagtctgaatgacgcttcgctattttatgagccggaaagttcttctgcattgggttttggtttccgttgcggtttccttggtctgttgcatatggagattattcaagaacgtctggaacgtgaatatgatctcgaccttattacaacggccccaacggttgtgtatgaagtggagacaactagccacgatactctttatgtggatagcccatctaaactaccgccgctgaataatattgaagagctgcgtgaacccattgctgagtgccatatgctgttacctcaggagtatttggggaacgtcattaccttatgtgttgaaaagcgcggggtgcaaaccaacatggtttaccacggtaaacaggttgcactgacttacgaaataccgatggcggaagtggttttggacttcttcgatcgattgaaatctacctctcgcggttatgcttcgctggattataatttcactcgtttccagtcatctgatatggttcgtgtggatgtattgattaatgctgaacgagttgatgcattggcattgattactcaccgtggcaatgcacagtaccgtggtcgggaactggtggagaagatgaaagaacttattcctcgtcagcagttcgatatcgcaattcaggctgcgattggtaatcatattattgcgcgctcaacagtgaagcaattacgtaaaaacgtcttggcgaagtgttatggtggtgacgtcagccgtaagaaaaagctattgcagaaacagaaagagggtaagaaacgtatgaaacaagtgggtaacgttgagttaccacaggaagctttcttagccattcttcatgttggtaaagacaattaataagcttgtaaggagtctaaatggctaacacttttgccctgatcctaacgttggcaacgttagtcaccggcattatttggtgtattgatcgtttcaaatgggcaccagagcgcaagaaaaaacttgccagattgcaggagctgactgagggtacaatggatcaggagcatctggctgagactattaacaagccaacatgggtggatacctgttcatctatttttcctgtgttagccgtggttctgatcctgcgctcttttgtttatgagccttttcagatcccatcgggttctatgatgccaactttattgattggtgatttcattctggtagagaaatattcatacggattgaaagatcccatcactcaaacaacattgattaagactggcgaaccaaagcgtggtgatgttgctgtatttaaatacccgttggatccaagttttgactacatcaaacgtgtggttggtttaccgggtgataaaattatttatgatccggcaaagaaagaattgcgtattttttctaattgcagtgagacagggaattgtcagggagaattaccggtttcttacggttcactatttccaagtgagtggacaatgcagcaatatggtgttgactccaaaggtgaaagtttgagaaaggtaggtgttttccaaatccccgttgaagaaacattgccgccttacagtatgcggcagggtgaacgaattgagaatttggacgcagtgaaccatcatattttggagattcccggtgtactatcggtacctaatttccgtcagcctggcttgccagagggaatgtggattgtgcccgaaggtcactattttatgatgggtgataaccgtgataatagcgctgatagccgtgcatggggctttgttcctgagaaaaatctggtcggtcgcgcttcagctatttggatgagttttgaaaaacaggaaggggaatggcctaccggagttcgcttcagccgtattggtggaattaattaatattcttatattagcgaagcattaattttactcgcagtgtagaatgtcctttcaaacttaaactggctcctataaggggccagtgcaaacgcaacagttttgtcgggggttcctgtaacaggtctgttgcgtgtgcgtttttatttgacgaattctgaccgatattggtagcacatgaatcccatcgtaattaacagattgcagcgtaagctggggtacacttttgatcagtatgatttgctgatacaagcgttaactcatcgtagtgccagcagtaaacataatgagcggctggaatttcttggtgactcaatcctgagttttgttattgccaatgcgttgtatcatcgttttcctcgtgtagatgagggggatatgagccgcatgcgtgccacattggtgcgtggtaataccttggctgaattggcaagggaatttgaactaggtgaatgccttcgtttggggccgggagaattgaaaagcgggggttaccgtcgtgaatcgatactggctgataccgttgaagcgctgattggtgctatcttccttgatagcgatattcagtctattgaaagaattattctgagctggtacgaaacccgcctgaatgaaatcagccctggcgacaaacagaaagatccgaaaacccgtttacaggaatatttgcaagggcatcatctgcctctgccatcatatctggttgttatggttcgtggtgaagctcacgatcaagaatttactattcactgtcaagtgagcggtattgaacagccggttaaaggaacaggctccagccgtcgcaaagcggaacaggcagcggctgagcaagcattaaaacaactggagcttgaatgagcgaacaagaaacctattgcggatttgttgcaatagttggacggcctaatgtggggaaatctacgctgctaaatcagcttttaggtcaaaaagtatctattacttcccgtaaaccgcagacgactcgtcaccgtattatgggtatccatacagaaggtgcgtatcagattatttatgtggatacgccagggttacatattgaagaaaaacgggcgattaaccggctgatgaaccgggccgccagcagttctatcggtgatgtggagttggttatttttgttgtcgaagggactcattggaccccggatgacgagatggtactgaacaaactgcgtaatctacgttgtccggttttgctggctatcaataaagtggataacgtgaccgataaaaccagcttgttgccacatattggttttctcagtaaacagatgagttttcttgatgttgttccaatgagcgctgaaaaaggcatgaatgttgatacgattgccaaaattgtgcgcggatatataccgaaagcggctcaccatttcccggaagattacattactgaccgttctcagcggtttatggcttctgaaatcattcgagaaaagcttatgcgttttcttggtgatgaattgccatattctgtcacggttgaaattgagcagttcgtggcgaatgagcgcggtggttacaacatccacggtttgattctggttgagcgtgaaggccagaagaaaatggttattggtaataaaggcagtaaaatcaagaccattggtattgaagctcgtcaggatatggaaaggctgtttgatgcaaaaatccacttagaactgtgggttaaagttaaagcgggttgggctgatgatgagcgagcgttacgtagcttgggttacgtcgatgatttgaaataaggcatcctcctgtggacggttggcaacgtgtttttgttcttcatgggcgtccttacagtgaaactagtctgttactggatctgtttactgaaaatgaagggcggattagcgtgttggcaaaaggtgcgcgtggccgtcgttccaatttgaaaggctgcttgcagccctttaccccattgctggttcgttggagcgggcggggggcaattaaaacgctgcgtgatgcagatcctatctctctggcccttcctcttaccggcagtgtgttgtatagcggtttatatatcaatgaattgttgtcaagagtgcttgaacagggaacggcttatcccgccttattctttgattatctccaatgcttgcagattcttgctgccagtgaatatacaccggaatatgcattacgtcggtttgaactggcgttgctggcaaatcttggttatggcgttgattatctgcattgtgcgggcagtggtgaacctgtcgctgacacgatgacctaccgttatagagaagaaaaaggatttattgctagcttggttgttgatcattacagttttaccgggcgcgaattaaaatcactggcaactcgtgaattccctgattctgcaacattaaaggcagcaaagcgtttcacgcgtattgcattaaaaccttatctaggtggcaagcctttaaaaagtcgtgaattatttcggcagtttgtacgtcagcagcctgaaaagaaagaaaactaatgaatttgtttctcttcaagatggaaagtgtaaacttgtcatattctaatatgactataccctatggatttcaagatggatcgcggcggcaagggagcgaatccctgggagcatagagaactatgtgaccggggtgagtgagtgcagccaacaaagaagcaacttgaaagatgacgggtatacaggagataaatatggctgaagtattattaggcgttaatattgatcacattgcgacggtgcgcaatgcccgtggtacccattatcctgatccggttcaagcggcttttgttgcggaacaggcgggagcggatggtattactattcatttacgagaagatcgccgtcatattaccgatcgggatgtcgaactgttgaaaaaaactattcagactcggatgaaccttgaaatggccgtgactgatgaaatggtggatattgcctgtcgtattaaacctgaattttgctgtttggtgcctgaaaaacggcaggaagtgacaacagaagggggcttagatgttattggtcagaaagataaggttgctgcggcggttaagcgtctatctgatgcgggtattcttgtctcgttatttattgatgcggaacatcgacaaattgatgcggctaatgaagttggcgcacctttcattgaaattcatacgggtgcttatgccgatgcaaaaaatgaagtagaacaggaaaaagagtttcatcgtattaaagcagccgcgacttatgcagcgagtaaaggcttaacggttaatgcgggtcatgggctgacatatcataatgtacaacgtattgctgctctgccagaaatttatgaattgaatattggtcatgccattattgggcgtgcggtatttagtggtttaactgctgctgtggcagatatgaaaacccaaatgcggaaagctcgccgttaatggctattattgggttaggtacggatattgttgaaattgcccgtattgaaggggttgtcgagcgctcaggtgagcgcttggcaaaacgcattctcagtgaattagaatgggaacaatatcagcaacatgaaaaaccggttcgttttttggctaaacgctttgcggtaaaagaggccgcagcaaaggcattaggaacgggcatccgcaatgggctggcatttaaccagtttgaagtggtcaatgatgcactgggaaaaccgattttgcggctctatggtgctgccgcagcgttggctcagcaattgggggcgacctctttgcatgtgacattagctgatgagcgccgctatgcctgtgcgaccgttattcttgagcgctgatttcagattttatctgcatgatgcagtaatacaaatttatcccacaattgttcttctgtttcttgacggtctggatcgataataatcgtattgtttatcgggcagactgattgacaggttggcgaatcataatgaccgatgcattcggtgcaacggtcggcatcaatctcataaatttcatctcccatcgatatcgcctgattgggacattcgggttcacacatatcacaattgatacagctttttttgattaataacgacatttcaatagattaacttatttttcattttaaatcagtgtgttattgatggttcttatttattactattacacacttcttatatttctatacccgttatccttcaagttgcctctttgttggctgcactcgctcatcccggtcacatagttatctatgctcccggggattcgttcccttgccgtcgcgatgcattttgaaatccatagggtatatacagcataaattacattgaaaaaccaagtctggcaacataagaccataatatatgaaattttttctgtcttagctgtattattcggttagctatataaggaatttcaataacgtgcaaggtcaccaatattgtatgggctaacaagtcgtaggtgataatagttcgaattataacagaatatttacggctatagtattagcaataaaaaaataattaagaccgggcgctatactaatcccggtctttttgttaattacgataatggcggagttggccagtcaatttctggtgcgtttgaagtgtcaactcggttaagcatcattcggtattttttccattctttgagtaatagcatctcttcgtctgttgctatatcaagttcttctgcatcagaaagtggggttattttttatttgcgagagatataaactgctttatttgatgagctaaatacatagttcttgccattcatattaatatcctacagctctataatatgctgctacagggttttgtaagtctgtaatactgctaaaacattggaactgagtattatcgactatcattactgagaatatccctgcgtattgaggggcagtaccaaggtgagttaacgtgacattgagacatttattagggaacggaattggaaatttattcaaattaccaggtgaggaaagagcattacctttaactaacgctgttccccacatttcaattaaccctgagggtaatttttgccagccggtttcagctaaatttttggtgaaaaaggacatatctggaatctgattaaccccaattcctacttcccgttttgccgcttcatttaaacctaaattttttaaaaacgcatttttattgggaatgtctgctccgttttttgctttttctaatgcggagtcggaaattttagttataatttttcgctctaacgctctatttaattgggtggtgagtttggttatattaccatcatccaaaacatcactgtcagattctgtcgcaataaaatcggctacaacagatgatattgtggaagactgacgtaatgccttatttaatatatggagggtaagaccgtctggtgaaaatccagtctgcaattctggactattttcatataaattttgagctaccacattagcaccatctctaatagaaaacgctttaaaatcattctttggattcatatcaattttcctaaggtttaatagtaggtttatattaatatcttaaattgttgtaagtgtaatttactgcctcttatagtttaaggataaaaaacaataattaaatgtttttataaattatgatgttaatagtttttatatgctttgagcaataaacaattcgatactatctaagtaattaatacttattttatagaaactattttaaatgattttcctattaaaagattcattgtgggaagtagattttaatgacgttcgtggtcattaatatcgtatgaagaatagttctgatgataacagaatatttatggctgtagtgctggcaataatacaataacaaaatgataaaggccggggtttaccttaatcccggcctttttattaattacgataatggcgaaattggccagtcaatttccggtgctgttgaagtatcaacccggttaagcatcacccggtattttttccattctttaagggatagtatttcttcatctgttgcgatatcaagttctactgcatcagccagtggggttattttttcatttgccagagatataaattgcgctctttgaacttctgctatggatatcaatccctcttttgttggtggtggaatatcttcccaacaaggaagaccctcttcgtcagaggaaagtatttttcctgtgggcgggattccagagaacgtattaaatatgtcatcagttacagatatagggtcatttggccatgagccagcttcaatatactcctgttgtaataatagcggataaaatgctttatttaatgcactgaatacatagtttttatcgttcatattaataccctattgctctataaaatgcggctacaggaacttgtaaatttggaatactgctaaaacattggaattgggtattattgaccatcattattgaaaatgtgcctgcatgttgaggggcgttaccaacgtgagttaacgtgacgttgagacatttattcgggaatgggattggaaagttatttaaagcaccaggttcggcataagcattgcctttaactgatgctattccccacatttcaattaagcccgaaggtaatttttgccatccgacctgattcaggctagaggtgaaaaacgacatattaggcacttgattttcaccattccctatcgttatatttgttgaatcggataaaccaaggttctttataaatgcagctttatcaggaatgtctgcgccgttttggtcttttgccagtcgattattagcattatcatttacatcagaaacaagcttttgagttggagcgagtgtattactgttgcctatttggtctgtgagctgaataattcctttttctgttaatgaggcatcgcgagtttctgttgtgtttttttgttctaaggatttcttgaattgggtggtgagtttgtctatatccccattatccagaacatcttcgccagattgtgttgcgataaaattagcgacgacagtggatatggttgacgactgacgtaatgccttattcaatagttcaggggtaatatctgctgttggaaacccagtttgtaatttttgttctttttcatatgtttcttggggcattatatttgcattttcactaatagaaaaagccttaaaatcattcttttgactcatatatttttctccaattaatcagtgcattttataagcaatatagtgaatttttataaaaataatttttccctattcacgccagctatagtttagttagaaaaaagaataatggaatattcttataacttatagggttaactatttttatataattgttggtaatgaatatgttaattttttgtaattttaaatgtatctaaactatttgcatttaatatttgaaaatgatgtttattaattccatttatgatctaggggagttatgtggtataactgatttggtttaatattttaatgattattgatattgagtagcgacaaaataccagaatcaataaaatgataaagaccgggttctacctgaatcccgatctttttgttaattacgataatggtggaattgaccagtcaatttatggggctttcgaagtatcaacccgattaagtatcacccggtatttttttatttgcaatagataaaaattttgttttaatgtactaaatagtttttgttgttcataatttttttccaaatttaattaaataattattatgataaattaattttttaattaatatcctattgccctaaaataggtataaacaaaaggttggccgtcacctgaacctctataacatttgaattgactctgatttactacggatgccccgaatattcctgctgctctcgggtcccaatcattgtgagttaatgtgatgctaaaacatttatttgggaatggtattggaaagttattaagatatccgagatcaggtcttcctccggtagaaactcgtgcaattccccacatttcaattaaacctgagggtaatttttgccaaccattctgaaccaagtttgaggtgaagaatgacatatctgggatttgattaactccagtccccactgcccgttttgccgcttcatttaaccctaagtttttcacaaacgcatttttattggggatatctgagccgttttgcgttttttctagtctgttattggcgttatcatttatatcggagaccagcttctgagttgcggccagtgtattgctattgccaactacatttgtaagctgaacaatacctttctgtgttaatgaggcatcgggaattttctttgtaagtttttggtctagtgctttatttaattgtgtagtaagtttggttgtattaccgtcatccaaaacatcactgctagattctgtcgcaataaaatcagctacaacagaggctattgtggacgattgacgcaatgccttatttaataagtgagtgggaacattatctggtggaaacccagaatacaaactctgactttcttcgtatctttcttgactgactacattcgcattattgctaatagaaaacgctttaaaatcattcttatgattcatacatatattccttaagtaaatatacccgttatctttcaagttgcctctttgttggctgcactctctcaccccggtcacatagttatctatgctcccgggaattcgttcccttgccgtcgcgatgcatctcgaaatccatagggtataatattgttttgtaattaacatattgagttatagtataggtaatttatcgagattaatttcaagcatagtctacgccaaaaatggaataataagatttcattattaatcaattgattaattaattgtgtatggctgatgataataaatcgtttaatgtcttgtaatcgaaagtatatccaaaatgtttttattttttatgtatgtttcataaatataagggaatatttttatcaaataatggcatgaattatctgttaaaaaaataaaatgggaaaagggctgctatgcagcccatggttttaatcagcaatataaatttctgtaatatcagggcaatcctctttgtttactatagatagcctcactcctccgtctgatgaatgcacaacgagccatccttttgatccatatccagtgccaaccaaaatattatcgatcggaggcatttgtaaaggtaaaaatatacctgggctaccagtacgtaaatatatacatcttcctcgtatgtcctgactcagtaatatgctacttccactatctccactccttcctatttttcgccatccctgattagggcctttcttttgatatcgttcgtcggattctgaacgtgaatatgcccccacatctctggcttccagattgatgtcttcaatcagtgctttgccgttaattttcctgttattaggaaccgcattttttgccaatgtcacggtttctgataagccaagttcatttacagtaggtttgtttttggttgtataaatgctagtccaatcttcttcaaatccataattatcacgagccgagcgataagcaatacccccgtttttataatgcactttcaactgaaaagccggacaattcccagcgccattatagaagtgcacaacatgatcactaaatttcgcatgcagtaagtcatatgaccctgaatctacattccacgggacttggttatcaacagaatattttcctgttaatccgagcctaaatgctcccacatcgccagccgctaaattgatatctccagtcagcgatttaccattaattttcctactattcggcacagcatttttcgccagattgacggtttccaataagtcgagatttttcacaaactcatttttattgggaatatctgccccattttggtttttggctaatctattgttagcattatcattgacatcagaaacaagcttctgagttgcagcgagtgaatgactattaccaactacatcggtaagctgaacaatacctttctgtgttaatgaggcatcgggaacctttggtgccattttctgttccaatgcctgatttaattgagcggtaagtttatctatatttccatcatccagaacatcattgccagagtgtgtcgcgataaaattagcgactactgaggatattgtagatgattgacgtaatgccttatttaatatattagtggtaataccatcgggtgcaaacccagttttcaaattctgactttcttcatatttttcttggctcgctgcattagcattaatactaatagaaaaagccttaaaatcatttttaggactcatactatactccttagattaagtaatgaattttataaataacatattgaattattgtaaaattgattccttatttaatgcattgaatacatggttttatcgatcatgattttttgctatgttaattaaatgatcgtgacaattttatttttatcaaattagtatcctatcgccctaaaatacgcgccaacaggcgtaggatgattagtagggcttctataacatcggaactgactccgatctactacatgtactgaacatattccggagtcttgagggttataaccaccgttagctaacacaacatttaaacatgcgttcggaaaggggattgggaaattatttaaatatccggcctccatagaaccatagccttgaactagcacaaacccccacatttcaattaaacccgaaggtagtttttgccagccggtagaacctaggtttgcgttgaaaaacgacatatctggaacctgattaacgccagctcctatttcccgttttgcagcttcatttaaacctaagttttttataaacgtatttttatcaggaatatctgcgccgttttttgctttttccaatgcagagttggaaattttagttataattttttgttctaatgctctatttagctgggcgattagtttaacaatatccccatcatccagaacatcatcgccagattgtgttgcaataaagtcagcgacggcagaggctattgttgatgattgacgcaatgctttatttaatacatgaatagtaatatgttctggtgggaacccggtttttaaatcctgtctgttttcgtattcttgttgactcactatgttggcattattattaatagaaaacgctttaaaatcattcttgggactcatatacactttccttaaataaaataatgttctgttataattaacatgttaagttatagtataggtaatttatcgaggttgattctaattatagtctactccaaaaagaggagagtaagattctattataacttaaacgattgattatttatatatgactgatagcaataagttatttaacatattgttatcgaaagtatattcaagacgtttatatttcacgtatggaaattattttatcttatttcttttgggaaattttaaatgatttccacaagttttattaaaatacattatgtcaaagtggtaactacgaaaatactattgttttgtctattgattagattattatatttgttttataccctatggatttcaagatgcatcgcggcggcaagggagcgaatccccgggagcatataccctatggatttcaagatgcatcgcgacggcaagggagtgaatccctgggagcatagataactatgtgaccggggtgagcgagtgcagccaacaaagaggcaacttgaaggataacgggtatagataactatgtgaccggggtgagtgagtgcagccaacaaagaagcaacttgaaagatgacgggtatatgttatgttccataaatatagaggagtatacctatcaaataaggagagaagttatctcctaaaaaaataaaatgaaaaaagggctgccatgcagcccacaatgttaatcataaattatacctgaccggattaatacttcaaaagcatcggaaatcgaccggtcaaaaaagtcattatcatcactggagaaaagatcggggatagaatagtgcccggtcttgataattttattattctggtatttgtggccacttaatatctgaaaccattgaagtatcaacacggttcagtaataccacatacttcttccaggcaagcaataatgctttctctgcgtctgaggccatctcagtttcaatggcatattgtaataaagtgatagcttcattagcctgttgacgaagaatgacacgttgttgttctgcctgtttaatctggttggctttttgagcttcaatatccgttacccatttttcaccatcccacttatcaaaatcggtgcttggttgtttgaatgtcagtgtttctggtaattcacccggtttaatgatttccttctgttccccagtttgggtgttgtaagctattctccctcgatagtctggtaccatttgccagccggttaaatcaggtgaacgacaggcgatatatccctcttgggctttaggtggtgcgtctatgcaggaattggcaggaaggccgataccaacgggaaggtactcatcagaactgtttaaatattccagcgtaatcgcatcgtaattaaacacaacgatacttccggcactgatggcaatattatttttatccagtacagccttattcatcatgcaatcctcacaatgtaattaaatgccacatttcgtggacgtgtttctgttcccgttgaagcagcaatcgcattatccatatagccgtaaccaccagatcccatgccgatagcgatgcctattccgcgaggatcaatgccgtagttaatgttttggtagacactattgagaatacggcccgctgaacctaccccgtcggttccgccatttgagttggaccacatccggacaaccctgtgactatgtggagcaatatctgctagttgcccggataatagatatcggccaatatccaccccacgcccatcatcccagccccggataaattcaccccgtaaatcgggtaatctgccagtagggtaagcttgcgctaattgtggatataaagtttgatcgaagatcgctccattgcatttcacccacccatttggtggtatgtcagtcggccaaggaagtggtattcctaccgggatttcttcaagtaccaacgtgctcattatgctgccctcatcatatagttaaacgctaggttatgtggctttgatacccctatactcgttatctttcaagttgcctctttgttggctgcactcgctcaccccggtcacatagttatctatgctcccggggattcactcccttgccgtcgcgatgcatcttgaaatctttagggtatatcggtcatccgccactggggtaaactgctgctaattttggatataaagttttatcgaagattgctccattacatttcacccactatttggtgtatgtcagtcggctaaagaggtggtgcacctaccggaattagcttttccaataagcttcggtttttcacaagtacatttttattaggaatatctgcaacattttgtgattttttcaatgcgtaattggaaattttagttatgattttttgttctaactctctatttaattgaatgttgagtttaacgatatcactatcattgagaacactatcaccagattgtgtcatgataaaattatctacaacagagactgttgttgacgatcgacgtaataccttatttaataaatgcgtggggacattatctggtagaaatccagaatacaaactcaggattttttcgtatttttcttgatttactacattagcattattgctagtagataaatccttaaaataatttttgggactcatatactttcctcaaattagattatgtatttatagaccataccttgagttgttgtaaagatagtatccgttcatttataatttagttcagaaaaggaataatggaatgatttataacttaggttgttaactacttatatgtagttggtagtaataaatagtcaatgttttataattgaaaatataccaaagctattaatgtcttatttctgaaaattatatacccaagaaacttcaagatggatcgcgatggcaagggagtgaatccccgggagcatagataactatgtgaccggggtgagcgagtgcagccaacaaagaggcaacttgaaagatgacggctatatattaccacaactattaatctcgacggtttaattagaggttatatcatgattatgaagatttctttatgaaaggatgggtgttagctctggacagcaactgaaagattcttatatccataaataagaaattttatttatgatatatttttgtttttcttttgttaatattatgctttaaggatttatctgtatttttataaaaaaatcagactattattgttagatgatatttttgtagatgaactattattttattttgcttattcatttgaccatatttatagagatatcagctcattatatctttgggattaatgcttctatttttcggtatattgtgttgtctttgtgaataaatttattcttaagggagaaatatgtttaaaaaattagaacaagtcatctttgatacccgtgataacaaaagcattttctctcttatttctttggttatataccctatggatttcaagttgtatcgcgacggcaagggagtgaatccccgggcgcataggtaattatgtgaccggggtgagtgagtgcagccaacaaagaggcagcttgaaagataacgggtataaaaagaacaatgggataaataagatggtggctgaaaacagcaatcagcctgaattaaaacaaattatataaaacatgcttaattgattgctgtcattgtgctttttaccgtgggaaggacgggggatttgtatcatccgcgggaaattagattttcaaagcaactgttgtatctgtcagatgcagtagttttccatacccaatggatttcaagatgtatcgcgacggcaagggcgcgaatccccgggcgcatatagataacgatgtgaccggggtgagtgcgtgcagccaacaaagaggcagcttgaaagataacgggtatatttaacctaaacttaattaagggattatttatggggaaatcatcaaaccgtagtgcggaatttttctttactgggaaatatgatgatgatgatggtgggaataatattgttgctattggattgggaggggagatttatgccaaaggagggaatgatcatattaccgttggttcgctaggagcaacaatctatgccagttctggtgataagaccgtagatggtggtgccggatatttaaaaatagtgaatattggcggtgatctgaaggtacatggtgccgcgggttacgcaagtattgataaaaacggtaatggcaatatttcatttattggtgcggcgggtggtgtttctatggatcaccgagggagcagcggtaatctaaatttttctggggctgctgcttataataacctcagtcgtagaggtcaatccggtaatgtgacatttaaaggtattggtggttataacggattatggcacgaaactcatcagggggatttaaactttaatgccgcaggggcgggtaataaaattgaccgtacttggcatgaccgttatgaaggaagcaagggaaatgtgatatttgttggtggaggggcagcaaatagcatcagttcacgggtggaaagcggtaatattgagttcactggtgctggggttgataaccacattattcgtaaagggaaagaaggcaatattatctttcagggtgctggagcattaaatcgcattgaacgtttgcgagatagtaaagataaatatgaacagactcgcggtaatattgaatttgaaggtgccgggggttataacaaagtttattctgatatagctcatggtaatatccgtttctccggttccggtggttacaatgaaatatcaagaataggtgaggatagcgattcgtataataaagctttgggatacgctagcgcggagaaaattgtattaataacggcgaagatgggatcccagaagcctcagcaagtgactgctattaaatcaacgactgagtctaatacttatctctttgcatttgctgacggaaaatatactaagatcagcaaagttcagctaaaaaatgatcctaaaaccaataaattgagttattactccacttcatggcgtaaaaatggtaatcaactcaaaaatcttgctacggaaaatatctctttagagaatggatatgatgatataagcaatgatggtgattatcgtctttccaatttaatctttgaacatcatcaacccgttactattcagcatactgttgaagaagatttgcgagaaaatcagtgggtgacttatgccagcggaaccacggctaaagcagaagatatcaagctgattgatgcaaaaatgcatgggcgttcaatccattctaatggttcggtattggatgtttcggcggtgaaatcgaatcgtcgatcaaatgcttatgtctatgccaaatatgtcgagtcatataccaaagtggttgtggtggaattgaagaatgatgataaaaccggcgagctgaaatattatgccagtgcctggtataaagcgggcgaccatacccgagatttagccaatgaagatttttcacgtgcaaatggttatagctcgatggaggtagggggatattcactcactaaccttaaatatcaagtcgatactgtacgtcgtgtctctgagcatttagaacatattgaagaagatagtcttcaggaatgggtgaaatcatcttcgaatatcggtgatagctccggtgacgttaattttagcggtatgggtggcggaaaccttattaaatccagtgtaataaatggcaatgttaattttgaaggtgatgggattgctaacgtcattcttcatagttcgagatctggtaatacgcattttgaaggcgcaggtgctgccaatatcatcgaaaaaagtggcatagatggcaatctgacattccgtggtgcaggtttggcgaatgtccttgttcaccaaagccggaatggggaaatggatgtttacgctggtggtgcggcaaacgttctggtgcgtgtcggtgatggacggtatctggctcgtcttttggcgattggcaatatttcaatccaccaaggtaatggcgatagccgggtcgtcatgttggggggatataacacccatacccaaataggtaagggcagcgcgaattggttaggtgccggcggttttaatgtcatgacccaaaaaggtaaagggagtatttcttcgttacttttggggggtgctaatgtgttgaccaagcttggcggagataatctggtttccggcatgctcgggggagccaacattatcacgcatatttcgggtgataatgaaatatcagataccacagcaattgcgctgggcggtgccaatatcctgaccaaaaagggaagaggtgatgctgttgcgctgatgggcggtggtgcaaatgttctgactcacattggttatggaagcacgacgggggtgatgttgggtggtgccaatatcctgaccaaagtaggcaacggtgatactaccggcattatgcttgggattggtaatgtgctgactcatgtaggagatgatcagacattaggggtcatgggagcagcaggtaacatctttactaaagtgggagatggaactgcaattgcggccatgattggtgctggcaatatctttacccatgttggcaagggtgatgcatgggcgttgatggggggtctgggcaatatctttaccaaagtaggggatggtaaggcgctggcattgatgatagccgctggcaatgtgtttactcacgttgggaatgggatgagcgttgctttgatgttggctaaaggcaatatcgctaccaaagtgggtgatgggacgaccttggcagcaatgatcggtgaggccaatgtaatgacccatgtcggtaatggctcaacctttgccgcgatgatcgggcagggcaatatcctgacaaaagcgggcaatgatttggcgcttggtttgatggtgggtgaagctaatatctattcgcatgtaggtgatggcaccagcattggcttgcttgccggtaagttgaacgtgatgaccaaaatgggtgacgggacaacgctggcggcaatgtttggtgaagctaatatcatgacccattatggcgacggtttaactggcgtactggcactgggtaaagccaatattgtcaccaaagtgggtaagggttttatgggggttgtggcagcggccgaggctaacgttgtgactcatatgggagcatcaacgacggctgccgtgctattaggtaaaggcaatattctgacgaaagagggtagtgggacgacggtcggcctgcttatttccgatgtgggcaacatcatgacccacattggtgatggcacaaccgtgggtttcgctaaaggtaaagccaatatcatcactaaagtgggggaaggtacagggattaacgccgtctggggtgaggctaatatcctgacgcatgttggtaatggtgatcgttacaatttcgcgaaaggtaaagcgaatatcattaccaaagtgggcggaatgcgagaagtcacggtagttcagggcgatgctaacattatcacccatgttggtaacggtgatgattataccggcgcttggggcaaagctaatgtgattactaaggtaggcgatgggaataatgtagtacttgctaaagctgatgccaacattgtgactcaggtcgggaacggtgacagctttaatgccttgtggagtaaaggcaatatcgtcaccaaagtcggtgatggtatgcaggttaccgcggcaaagggtaaagctaatatcaccactacggtagggaatggtttaagcgtcactgcgacacatggcgacttgaatgtgaataccaaagtaggtgacggagtttcggtcaacgcggtgtggggtgaatataacgtcaataccaaagtgggaaatggtctcaatgttgcgatcatgaaaggcaaaggtaatgccaatattcatattggcgatggcctggggatcaatgcctcttatgcccgcaataatgtggcgattaaggtgggtaatggtgatttctacagtctttctattgcagagagcaacacacaaagtagtcatctctcttctctgtttgagaatattaaacaaactgtgttcaatgtagagggaagccagacgattaattatctgattcgtggtgatgaggcaaatacttctggcgtcaataaaggtagaggggcgattaatttaaccgaagtttccgccattgatggtttccagatggataaaattgatgaagtgagttcggatctggcgaacaacttgagtggcgcaataaccccggtagaaacgcctgatattaacgttattcagaatgacttgcagattggagataatgttggttcagctcaggatcaggcatcaccacacgctgatgcggttgtcagacatgcgaagcagaataaagccgcgcaaaatgcgttaagcgataaagaaaaagcggagataaatcatcagcgtctgcaacaagagaaagataaacagcttaaaacgatttcaaaatcacaaggccaactagaatcaaccaatcaggctgcgctgaataccaatggtcaagtgcaacgtgatgtaataagtgaagagtctaggggagtcacggaagaactattctccctgactcaaggtatgggtgcgcttaataactatggaaattatgatggtaaatcaggtgatgagtggcgtaatcggtttgctggtggatatctggataatatccagaataaattaaatgatgccaaacttactgcacagaaaaaattagctgatgcacagcagcactttattgataaacgagaaacagtaataacagccattaagaaatcagaagtaggtttcacgaaaagcgctgagaatctagatagtgcagacgacgatattgtagacgctgagaaaaaagcggagcagagaaaagaagaggcattattacagaaacaacgagccgataaagcggtgagtgacgccaataccgcgtatgacaaagcgaaacagcgtggtgaaagtgatagtacagcggcggaaaataaaacgatacaggcgcagaagaatgcaaaaagcgtgaaacaggctgataatgctaaaccggatcgcactggggcagcgggcagcggtttgtctggaaacgcttatataccgattgaggtggagaaatcgaagagtcatatcgatcctgcatcaaaagctgaacctgacggttggctcagtgaagatctggcactaacagcagaagatttggctgctttgaataatgcgcaacaagcagtcaatcggttacagcttaataaagggatgcgttcagaaaataccggtgcttcgatcatgtcaatgtttaccgaaacatcatccgatggcgcggtgaaatcaactttaaataaatccagagaattaatcagaaaagcgccgacgatttcaggtattgatctgcaaggattagggggaaataaccctagatctcattcttctgtacttaaaaaactagaacttatcttactgaagaaggataacaagcggtttattgattcgactaaaaggcgtcttggttcgataaataccgatttgcctagtaaggcgctggtggccgtgcgtgaggcttttaaccgtaccgttgagcagcccgatgaacagcatgtattgcagcttgaacaaacattggcgcattggcagcagcatgatcccaaggaattcactcaacgtagcaaactggtgaaaagcttacgttttgagatgggtgagctggttgctcacattcaggcccagagagctgagtcagccgggattttggggatcgctgtggcacctgagcaggttacgcagtttggacagcaggtatcgttcgatgggattggccgtgtggtgggcctgaaaggcgatattgcacaaagcgaaattaatcgtctcactgatttgcaaattaagccattaacccagactaactctgtagcagagcgggaagcacctaagaccgaaaacgaaagccttatcgttttcgtcagccgattacaacaagaagctatcccagaaggtaagccgctgattgaacgtgccagaaaactttggcttaccgggcaagtgacaaatgaaaaaaccaaagaattatttaaggatgctgttgcccagttgcaaacatatcctgaattgcacacgctggctcaacagctattgactgatgctaataaagagaaggccactggacaatatattgataacctgtttggccgccattttgattctgaactggcttatgaactggtgaaaacggcttcaccagaggcgaaaaataccgctgaacgaacaggtaacttcttggtagaagattttgagcggtggataggtgatctttatcctgaaggtgagaaacgtaacggggcaattgataaaaagatgaaatcttttgccgaggctattgataaggattttcgcccttggttcagccgggtacctgaggtgacaacattcttggacgatccgacttttgctaatttcaagaccatgatgaccaaggttgatgatggtttttctgtgattaaggtgccgtttctggcggtaaaaatggcgactacatcgggaatggggatggatgttgctgactggaagagaaaaggggattctttctatctgaacgtgatcaccaaagctcgttcaaccagtactgaactgactgccgggacgaatgcggaggatgttaagtacaaagtaaaaattacggaaaagcagaccaatgattatggcacggcgttgccctaccaacctgcgaataataaacatgacgactttttgtatggtagaaaggtcgcggcaggccggatcttgactcccggacgggaaacggcatttgagagtaatgcattggagcgaggccagtctgtggtaactggcgcgtctggctcgaccaatatcatggttcacctcaatgactatattgccagcaagcaacccgacttctcaaccgggcagagctatctcaatacgctgtcgtttttggtatttgatggtggtcactctgtcaacgaaagtctggtggtttatcaggcactacaagcaactgatgagataaaacgtaaacagatactgaacagctacacggctaattatcaggatctggcggatattgctggggaatcgggtaaggtgtgggtaaatcaggcgctggataacgcgtttaaagaaactcaagagttttatcagaagtatgcggtagtaaaaccacaaagccgccctgcggtggaagacttagaggggttatctggcacaaataaaggggtagaaccgacgattatcggcgatagtcatctgaaaaagcccgttgatggctggcaaaaggtggacgtaacgccgcagactgatggtcgtgaaacccgttttgatggtcagattattcttcagatggaagatgacccgatagctgccagagcagccgctaatctggcgggtaaacacccggattccagcgtggttattcaactcgacgccaacggtaaatatcgtgttgtttatggcgatctggctaaattatcaaataaattacgttggcaggttgtcggtcatggtcgtgatacgtcagagcagaataacattcgtctgagtggttacagtgctgatgaattggcgacgaaattaaagcagttttaccaggcggctaagctgggcaaacaggccatcagcaaacccgatcacatcagtttggtgggttgttcactgattagtgataataaacgggatggctttgcgcgtcgctttattactgaattggataaacaaggcattcgcagtgatgtgtcagcccgtagtagcgaagttgcggttgacgcaacaggccgtaaatttacccgtgacgaaaataaccaatgggttaacaactcgcctgataacaaaattgtattgagcttgaatgcggagaataaactgataacgcataccgaacaggttcgtcgtggtattgctgaaagcgatatcgacttcgctaaagttgggtacacgcaggctgattcggttaccaaaggggaaattgcggataacacagaaattttcattaagccacaaaagcgtgaaaaggttaataccagcgataactcgcatcgtcagctcagttactccggtaatatccaagtggatgtcggtgaaggagagtttacggcgcttaattggggaacctcgaacgtaggtattaaagtgggaaccggtggttttaaatcgctggctttcggtgacaacaatgtgatggttcacattggtcatggtgatagcaaacatagcgttgatataggcggctatcaggcgcttgaaggggcgcagatgtttattggtaaccgtaatgtcagtttcaatcaaggacgcagtaatgacttgattgtgatgatggataaatccatcccaacgccaccgttggtcaatccatttgatgatactgcccgtattgctgaggtattgaaaggtattgctcgttccggtgaaacgcaggattggttagcggcacaagatcagcaatggacaattgccggagcgaggaagtttgtgcgtgatatgtctggtttagaccaaaccagtagcgtggattacaaaacgttgcttgatttggactcacaacatgaacgtagcagccgtggtttgcagaatgacgccgaatcagcactgaataagaaatttaatcagtggttaggtgaaaatggcaatagcattgaaatgggcaaaatgagccgggcagataaattccgtcaggctaatcagaagctggccttcaactttgctgttggcgggcgtggcgctgatattcaggtgacgaccggcaactggaactttacgttcggtgacaatattcagtcaattttggataccaatctgggttcactgtttggtctgatgacccagcaatactcggcaacgggtatggcgaaaacaaccttcacctataccccgcaggatttaccgcgtcagcttcagaataagctgcttggccgattatcggaggtgggggcggataccactttggcggatatttttggtgtggattacaccgcggatggacgtattgtttcccgcacgggcaagcctgttgatggcgaggcgatgctaaaagagatgctggaagtgataaaggaatttagcggtgatcaactggcagccttcaccaacccggggaaattgctggatagtttggaggccggcatcaaagcgggagaagatggggtcaggacatttgcggaaagtcatggtttgaaagagaaagcgcccgataaaaatcaggaacaaggcgcggtggttagcaccaacggagatagcgctcaagcgaataacaaagcagaacgtgcatttggctttaattcgctgaatttgcctaacctgtttgcaacgatgtttagcaaagataaacaagcagagatgcaatcattagtgaccaatttgaaagagaatctaaccgcagatctgctcaatatgaagcaaaaaacctttgatttcctgcgtaacagtggtcatctgcaaggagatggcgatattaatgtgtcgttgggaaattataacttcaactggggtggtgacggtaaagatctcggtgcctatttgggcgataacaacaacttctggggtggtcgcggtgatgatgtttattactcactaggaacatccaatatctttacgggtggtgaaggcaatgatatgggcgttctcatggggcgcgaaaactggatgtttggcggcgatggtgatgataccgccgtggtagccggacgtattaaccatgtctttatgggcgaaggtaatgaccagacgtttgtctttggtgaaggcggccttattgatgcgggtaatgggcaggattacgtcgtgacttccggtaactataaccgggtggatactggggcaggtcaggactacgcggtgaccatcggcaataacaaccgggttgatttaggtgaaggcgatgactttgccagagtatttggcaatgacaaccggatcgatggttattccggcaatgatacgattaagctgatgggctaccatgcgatgattaatggcggagaaggtgatgatcacttgatagccgctgcgatttcgaagttcagccagtttaatggcggtgatggacaggatttgttagtgctgggcggttatcagaacagcttccagggtggagccggtgtcgatagctttgtggtcagcgcagaagtgattgataaccgggttaacgatatcaacgcagaagatatgatcttgtttaatggtgttgactggaaagacttatggttccagcgcagtggatatgatttggtgctgtcagtgaaccgtcatactcaggataacactgctcaggagatctttgaatcggtgggttcagttacctttaatgattactttaatggtcatcgtgccaaattagtgacgcagatgggggataaagacaaatcgggcgagtatgaatttacggcactttctgacaatgcggttgattcattgattcaggcaatgagtagtttttccccgacagtgggcgataatggttttattgagagtctgggcagtaaggcgagagctgctgttgccacggcatgggccgatgtaactcttggcaagggaaaatttgcctaattagctctctgtaaatcagcagaataattgtcgtagaaataaaaatagctcacagaaatgtgggctattttttgtttttttgtgaagttttagtgggtactatttctgagttttatttgttaatgttgaatttattataagaatacaagaagtaataatatttctgattattgtcatgaattatttatttagataacgtattgggatttttttgtggacatatgtaatgctattattgctgaggtagagtcggtttattttgttatattttctttaataacataatgattaaaataagtttattgcttgtttttacattgatgttatctttgtatttgaaagtttctatttaaataaatttttagcaaatgaaatctattgtttttttgtgaggagggtaaatgagtaataaaaatgattttaaggctttttctactaggttatgtccctcaattaaattatggccttaagaaataagcggatacaacctaatttcaccatagcgatataatttcttgctgtcttttcataacgggtggcgatgcgacgatgctctttgagtcgaccaaaacatctttctacaacatttcttcttcgatacgtttcatggtcgaatttaacccgtccatctgaccgcgctttttcatttgatttatagggaattatcacttttattccctgactttttaaccggttacgtaatgcgtggctggcataacctttatcagcaatcaccgcttttgaacgacgtttcataaaaccgtttttacgctgaatacccagaccatccagcaggcgcactgcatattgactttcatgacattgacctgcactgagtaccacattcagtggatagccttttccatcgaccgccagatggattttggagccataaccaccctgagagcgacccaggccatgattttcggtgacatcgggatgttttttttggcgcccgccgcacaatgtgccgcacgaatgttactgccatccagagatatagctgaccaatcaactaaaccttgttcatccagtattgacaataacttattgaaaatgaggttaatgagccccgattttgcccaccgattaaagcgattatagacggttttccaggaaccataacgttcgggtaaatcccgccagggggcaccggaacagagtatccaaaacatgccgttgataacccggcggtgttcaacataaggatgtcccgcccgttgagaatgttcagggggcaataaggggagcagtaactcccatgcttcatcaggaaggtcgtaacgagccataacatgttttttccgaaagtcagagccacatagattattctatctcagcctattgcgggacacaccctagtagtaatgcgaatgtagtcagccaagaaagatacgaagaaagtttgagtttgtattctgggtttccaccagataatgttcccactcacttattaaataaggcactacgccagtcatcgacaatagcctctgttgtggctaattttatgtccactcagtgtggaaaggatgtcttagataatggtgatttggcaacccttaataagacttttactgattcattagagtgtcatgcgaacaaaaatttccccggtagtttatcacttaatggttatcaacaactgccgggtggattaatacttcaatggggaagacataattttactccattagcgataaacaaagttattttaccaacgccttttaagcagggttgtctgaaggtttttatgtcacctgttggtgattggatatttccgatgtcagccgcacctaacgggacattgaatacttttaactcttgggttgcagcgcgaacgattaatgcttatgggactgaaatcaagttatctgctggtgatacttatgtatatggagattattttgcaatcgggttttaattagtatttcaaaatgaataataagccgaacttgtttcggcttattattcatttaaaggaaatataaaaatgttataaaatagaattgcattatatatttggttaattttttggatattttagtagcaagaaatatataaaatgatctcgggtatctattcccaatggattaataagaaaatatatctggaaaacaggtaaaataaatcgttataattgtccctgatgtaatcaaatgagataccgcagtgattgaaatctatagtgacgagtattggatgcagcaggccatcgaacgagcaataaaggcgtgggagcagggggaaatacctgttggtgctatattggttgctgataataaaatcatctcggaaggttggaatcagtctattatcgcgcatgatcccaccgctcatgctgaaattattgtgttacgcaaagggggagagcggttacgaaattatcgtttgataaataccaccttatacgtcaccctcgaaccttgcactatgtgcgctggtgctatgatacatagccgaatacagcggctggtttatggcgccagcgatatgaaaactggcgccgtaggttctttggttgatatattgcgccatcctggcatgaatcatcaaattgatattaccagtggtgtgcttgctgaggaatgttcgacgatgttgagcgcttttttcaaacaacgtcggcagcaacataaagcattaaaagccgccagaaaacagcaggaagaaaatcaagattcactcttttagtacccatatatggtactcgccgtttatcatctctgcgccttccaggattttttcaaagccggggaacttgttattccattcaccgagttggcgaatatattgtaaccggggggcatgttcatcaccaaaacgttctcccggtaggattattggtatacctggtggataaggaatgacacttacagccgatatgcgcccggcgagttcattaagtggtaaatgttcagtacggcctgccatatgatcaaggtgtgcttgtcgggggagtttcactatctcaggtaattggctaaatgatttcttttgctcaatatccatttcatattcttttatatacccaaatattttatccgaaatatctttgagccccatgttttcataatattcagggtattgcttcgcgagttttggcaaacattgtttaagtgaagtattagcgtcatagtgtttcttgaaattcaacaatacattgattaatgttccccatttacctttggtgacgccgatagaaaacaggcaaagaacaataaaatcggtggtacgcgccggcacaatgtcatgctggctgagataagcggaaagaatttcggctggaatgccattttccagcaattcatcattatcattcattcctgggcataaaataccaacttttgttggatctagcaggcaccattctgctgatagattggtaaatccatgccatttttctccctcttttaatacccaacaggaaggatccgttgctaattgttctctgtttgcttcatggaagggaattaatttaccgctatctgcgctaataatctctctggcattccagggtaagaaaaaccaatcatctttttgtttaaattgatgatgggtttttgctaatgtcagacggaagtctacggcttcattgatagcgttttgtatcagtctttgcccctgtgggccatccatcatggccgctgcaatttcattagtggcgataagcgaatatagcggtgaagttgtggagtgcatcatataagactcgttgaaacgggaatgttcaatgggttttttgccattgcggatatggatataggatgattgtgatagcgctgctaacatcttatgcgtggattgagtggcaaatattgtcgggccattattgtcaaaatcatttgggtcatcacgcattgagtaacgatgtttatacataggattaaaacgcgcataagcaaaccaggcttcatcaaaatgaatttgatcaacactttttgctagtaaatcttgtgcttgttctgcgtgataacatattccatcataagtacagttggtgatgaccgcataaacaggcttattgtctattgcgatcgcttttaatgggtgttgatcaatgagttgttggatatattctggttgaaattgatctctgggaatggggccaataataccatagcggttgcgttgaggaataagatatacgggcaaagccccagtcattattaaaccttgtccaatcgatttatggcaattgcgatcgcatataataatctctttctcaccaataacggcacccatgataatacggttagaacccgaagtgccgttaagcacgcaatagctttgatgggcaccaaaaatcgttgcggcatattcttctgattctttaatcgcacctgtatgatctagcagtgagccaagtatttttctttctattccaatatcacttcgaaataaattttccccaaagaaattaattaattctcttcctgccgctgtcttagtcagtgcaacaccgccttgatgtccaggagcagtccaggaatattctggtgattcttgagtgtattgcagtaatgcacgagtgaaaggcggtaataattgcgcataatatttcttaattagcgaactggcgcgagaggcgataaatccagccgtgtcttcaagcatccagacaaattcatctgccaatcccatgacttcaagtgtcagtgtgtcgatgctggaatattccgcggtcaacaataccggaatggttgtattgtgtttgcgtatctctttcagtaattctaacacttgtttatgagattcatagttattatctcctgaagtccaatcaacaaaaatacagcatagtgaggaatcagaagaaacggtagctatgccatcttggaatgtagccgccaggataacagcgaaattgttcttttttaatgcttctattaactcggtaaaggctcgaccattcgccgtcgtcggtctaaatacatggctgctgacgaccataattttgttttgttcgttaatgtctaaattaatcatgatttatcctttgagagagatagtgtcccgatgaatttagtatggttagctgaattagttgtcaaacataatataactgaggatatataatggctgtaattgactccttagagccttatatttgtttactttattttggttggttttcttggggaattaattttttccgattttctttggcctgtaaatatccgactaaactaagctgataacggcgaatattttcaatatagcgataagcttcatgtccacgggcatagccataggtggtatttgtataatattttttctggcttaatagtggaatccgttttttgacatcaagccagctatcgggatttcctttctgtgatgccgtcagtttgcgggcatctaacatatgtccataacccatattgtaagctgccagtgcaaaccagatgcgctcatctttagggatattttcaggtagtcgtttcattagattttgcagatagatcgcccctcctttaatactctcctccggatcaaggcgatcaacgacgcctaaccctttagccgtctggttggttaacatcatcaggccacgcacacccgtgggtgagattgcctgtgggtcccaatgagattcttgccaggcaatggcagcgagcagtttccaactgatatcaccggaatatttttcaaatagtggctgataggtaggcagaatattatcgatggcactgagaaaagagagtgtatcgaaataatcaaatgagtggacgtgaccaaagtatttctcctccaaccgtggcatgacatttttttccgttagctggctgaaaaaatccagcatggcagcataaaggctgtagtcgtcaatgcgttttaaataccatgtcagcgggttatcttcactcacatcaaaagcgacggccagattagggtgagtacgttgttgcaacgcgacattaatcgagtcacctaacgtataatccagtttaccttctgatacctgttccagtagttcgcgagtgttatattgcggtgtctcctcccattcgagttcaggaaaattctctttttctatctttttcaatgtgctggcatgagcagaaccagaagcgaccagcagtttaccttttaagtctttaaaagagcgagggcgtggagtccctttgcgataaatcagttgttgggatacagaatagtaagctggacctgtgcgggtttgatccagcctttcttgatgataagtcaggccagcggccagaaaatcagcctcacccttttccagatcatcaaataactgattgatattttttctaaatttgatttctaatttgacgccaaggtaattagcaaagcgttgtaccagctcgtaatcaaatccattggcttctttcttaccggtaagatggatcagaggtgagctaatggtgctgatccgtagctctcctctggtaatgatcctgttaatctgctcctgctgtttattcggccaactgatgttcagactaatgatggcggcagaaaaaagagcgataacaatgataacgaaataatttatttttatattattcaaatggttatctctgtataacgcagtgtggtgccaggtggaaacgcgctatattgttatggttaaatttccagtgattgagcattttgcggaacaaaaacgggctgtgcaacctaattgatactatttgcatgatttgacgacaggataattggcggtaataatcgtcacgcaaacggtttcgtcatgggtgacaatcctctataatggcttcatttccccttaggcatctattaagctttgcttctaagatgagagaattgattactatgaaaattctacgtggttcacctgctttatctgcatttcgtatcactaaactcctttctgtgtgccaagaacagcaacttccggtcaatgatatttatgcggaatatgttcattttgcagagattaatgcatctttgagtgatgttgattcagcaaagttacaacaattactaaaatatggaccttcgctggctgaacatgaaccccaaggtacattgctgttagtgacgcctcgtccgggaacgatttccccttggtcttccaaagcaaccgatattgctcacaattgtggcctgtcccaggttgtgcgtctggagcgtggcgtggcttattacatccaaagtggtgaaatgagtgatacacagtggcaaatattgtcatcattgctgcatgatcggatgatggaaacggtctttactcaattggaacaggcggaaaaattgttttctcgtcagcaaccggttccgttaaagcgcattgatattctgcaagcaggacgcagtgcgttagaaacggccaatattgaacttggattggcgttagcctcagatgaaattgattatctgatggatgctttccagaaattagggcgcaatccaacagatgttgaactttatatgtttgctcaggctaactcagaacattgtcgtcataaaatctttaatgctgattggattattgatagtcaggcgcagccaaaatcgctgttcaaaatgattaaaaacacctatgagcagacacctgattatgtcctgtcagcctataaagataatgccgctgtgatggagggatctgctgttggtcgtttctttgctagcgcggaaaacggttcatatgattaccatcaggagcaggctcatattctgatgaaagtggaaacgcataatcacccgacggcgatttctccttggccgggcgcatcgacaggttcggggggggaaattcgcgatgaaggggcgaccggtcgtggtgctaagccaaaagcgggtctggtgggattttcggtatccaatttgcggataccgggttttgaacagccgtgggaagaggattttggtaaaccagagcgtatcgttagtgctctggatatcatgatggaaggccctttagggggcgcggcatttaataatgaatttggtcgtccggcgttgttgggctatttccgtacctatgaagaaaaagtaaacagtcataacggtagcgaattacgtggttatcacaagccgatcatgctggctggtgggatcggtaatatccgtgatgaacatgtcaaaaagggtgaaatttctgttggcgcaaaattgattgtgcttggtggtccgtccatgaacattggattgggcggaggggccgcatcttctatggcatcggggcaatccgatgctgatctggattttgcttcggttcaacgcgataacccggaaatggagcgccgttgtcaggaggtgatcgatcgctgttggcagttaggcgaaaacaatccgattctgtttattcatgatgtgggtgctggtgggctttccaatgcgatgcctgagctggtcagtgatggtggtcgcggtggacgatttgagttacgtaaaattcttaacgatgagccgggaatgagcccgctggaagtctggtgtaacgaatcacaagagcgttatgtactggcggttgcgccggaacaactcccgctatttgaagagatttgtcggcgtgagcgtgcgccttatgccattatcggcgaggcaacggaagaacgtcatttgctgcttaatgatgaacactttgataaccagccaatcgatatgcctttggatgtactgttaggtaaaacgccaaaaatgttgcgtgatgtcactacattaaaagcgagcggtgagagccttgaacgccgggatatcgatctggcggaagctgttaagcgcatcatgcatttgccggcggtggcggaaaaaaccttcctgatcacgataggcgatcgctctgtcactggcatggtttctcgtgatcaaatggtgggtccgtggcagatcccagttgcggactgcgctgttaccaccgccagccttgatagctactatggcgaagcgatgtctatgggggaacgtgcgccggttgctttgctggattttgcggcttccgcccgaatggcggtcggtgaagcgctgaccaatatcgcttctgcttatattcaggatttaaaacgcattaaactttcagcaaactggatgtctgctgcgggtcacccaggtgaggatgccggtttgtatgcggcggttaaagcggtgggtgaggagctgtgtcctgcgctagggctgacaattccggtgggtaaagactccatgtcgatgaaaacccgttggcatgaccaaggtgaggagcgtgaaatgacggctcctttgtcactggtgattactgcttttgccagagtggaagatgtccgccgtacagtcacgccggagctttctaccgatgaagataatgcgttgttattaatcgatctggggcaaggaaaaaatacgctgggcggtaccgcattggcacaagtttaccgtctactgggtaataaaaccgcggatgtacgtagtgctgaacaattagcgggtttcttcaatgcaattcagcaactgattgcggaacaaaaattgctggcttatcacgaccgctctgatggtggtttactggtaaccttggctgaaatggcttttgccggccattgtggcattgaagctgatatcagtgtatttgatgaagatattctggctgggctctttacagaagagttgggtgctgtagttcagattcgagcatcggatagaggatttgttgaaagcattttggcagaacatggtctggccgattgcgtacattatttgggtaaagcccaagcaggtgatgattttgttatctttagtggtaatactgaagtctatcgccagaatcgcagtaccttgcgcttatggtgggcagaaaccacatggcaaatgcagcgtctgcgcgataacccggcgtgtgcagatcaggaacatcaggctaaacaggataatcaggatcctggactgaatgtaaaactgacctttgatatttcagaagatattgcagcgccttacatcttgcagcaggtaaggccgaaagtggctgtactgcgtgaacagggcgttaactcccatgttgaaatggccgcggcattccaccgagcaggctttgaggcgattgatgttcatatgagtgatttgttgtctggacgtattggattgagccaattccagacactggttgcctgtggtggtttctcgtatggtgacgtattgggggcaggtgaaggttgggcgaaatcaattctgtttaatgaacgtgtccgtgatcagtttgccgttttctttgcacgacctgatacgttagcgctgggtgtttgtaatggttgccagatgatgtctaacttgcgggaattgatcccgggtgcagaacattggccgcgttttgtacgtaaccgctcagagcgatttgaagcacgatttagtttggtggaaattactgacagcccgtcactgttcttacaggatatggtcggttctcgtataccgattgcggtttctcatggggaagggcaagtagaattccgtaatagacagcatcttgagatgcttgaaagcaaccagttagtggctttgcgttatgtgaataactatggtcaggttacggaaaactatcccgctaaccccaatggttcagtgaatggcattaccgcagtgactagccttgatggtcgagcaaccgtgatgatgccgcatccagaaagggtatctcgcacggtgaataactcttggcatccagatgagtggcgcgaagatggcccgtggatgcgaattttccgtaatgctcgtaaacagttagggtagtgctgcaatctaataaacaagaattgttaaattaaacagttgaaggatactttcaattgataccacaagggggagcaaaaattgctctcccttttggctaatggaatgtcagaaattcagtctctacgcaggcaatattggattagtgcttggcgtaaactctgtcgtgtatttaggaacagtgtagcaattacggtatggttagcttcatctattttgtagattgctcgcagttgcaatttggtatccacatagtcatggtggctggttaacccgatatcagccgtttcctcacatagcggagcacttttaggatatttaagaacacgagtttcaaaattgtataaaaaggtttccagaattttccaagatgcttctgcaccgatatgtctggttaaatagccaaaacgttcatgaagctggttttcaaatgtctgggtatattcaattttatttatgatcaccgtttgctaatttccgtaaattatttcgtagttcactagatgacacaattcgtccagattttatgtctttttcagcaaaagacagcagtcgcaacaatgccatttgttcttgttgcatttcaaactgagccggatcttgaaccacatataacggctccccgttttgggttactgtgactggctgcgatacatccatagaagccaattcttttttaaacgcggagactgtcgtaatccgcgaatttggggtttgatacataagtgtcctccgagtagaaactctgttgcttctgtaataatacatcatttgctgataaaggccatatatggggtaaatatggactattactgatccagatgtgagagttttatatcagcaaattcctaggcgtttagatgccgaattgctctattgtctcaattacccgacaaacacgtgttatgagtgtctcaaaaaggagacatttaattatttgattttaatctatttttattttcatgattttagatgtctttaattggcgacaaaaaataaattttcctcatgtcggaaaagaagctgtttggttgctgaaacgttacgtttaattttttccaaagtaaaaacagctagttataattaaaattttaatgttggcatggaatctgcattaagctggcacagttgctcattcagcttcttatgtcggcccacattaggtggagaaatgccacataaactatcgaatgatgccagagtaaggtgcctaccgtccaactcagtgatatcgctttcgagccttatcaaacatcgggcgacacgtggagtgaggcaccacctatgtctgactgtagataaacaacaggcataagtcaccctcactggcgggatagtagcaaaaactattatcccgtcgtcattgctcaggtgtttacctgcccctttgtactgtttgcgtcttacactgattttcagtcacagcaaaatttatcagccgatgggtttttctatcagccctttgtcggttagcattggtgtactgacaggttacgagatgatttccttgaaaaaatggcgtttatttccgcgctcattgcgccaattagttgtcatggccttctggctggtgttattgccgctgttggttttggcttatcaggcttatcaaagtcttgatcaactcagtgagcaagcggctgatataaaccgtaccacgctagcggatgcccgccgcagtgaggctatgacaggtattgcgttggagatggagcgtagctaccgccaatattgtgtgttaggggataagacgctggaaaacctctaccaaaggcaatatcagcaataccttaagatgctgaaagatcagatggctatacttgatgagcaacaacatattaagacgcttaatagtttattgtcgcaattgacaaaaatcgcttgtctcaatagtgaacctacccaacctgccgctcaattacttgagcagttctccaatgctaatagccagatggtacaggctacccgtgatattattttcagccggggagaacagttacagaaagatattgctgaaaaagggcaattttttggctggcagagtcttattttatttctactgagtgcgttattggtcgcgttatttactcgcatgattatcgggccggttaaagggattgaacgcatgattaaccgattgggagaagggcaatcattgggcgttcgcatagattcttttcaggggccgcgagaactccgttctttggcacaacggattatctggctcagtgaacgcttggcttggttggaatcacagcgccatgagtttttacgtcatatttctcatgaactgaaaacaccgctggcaagtatgcgggaagggacagaattactggctgatgaagtggcagggccattaacggctgatcagcaagaagtggttgctattcttgataatagtagtaaacatttacagcaattgatcgaacaattactggattataaccgtaaactggcagatggcccgacggagcaacagcaagtttctctacgggaaattgttaatgaggtagttttatcacacagtttacccgcgagatcgaaaaatattcagacggaaatccagcttgatgctgatattttatgggcagagcctacgctattaatgcgggttattgataatctctactctaatgcggtgcactatggtgccgaatccggtaatatctgggtttcaagtcgtcagattggtaaatatgttcaaattaatgttgctaatacaggtacgccaattcctgaatcagaacgcagtatgatttttgaaccgttctatcagggaacgctccagcgtaaaggtgcagtgaaaggcagcggtcttgggctaagtattgcgcaggattgtattaagcgtatggggggcgaactgatattaattcagagcgaatttgctgacgtatgttttcgtattaaattgccattagctgctgagaatgaataaataatgcataacaggtctacttaccgttttgtacgaaagacggatcggcagaatattgcagtacaacttggggaaaacgtatcggttgccagattgttattaccacgagtttcagttgggggttttagcatgatgctgctgatcttcgttgtttttttattggcgggttgcgttaaaaatccggttaataataatttagcgacagttacgcaaatggtaataccagagcaacgggtgacggattaccgtattgccgagtgtgggttaatgtgggatttagagacgccgccatcgattgagaatgcgctttactggctgcgactgatggattgttcagatcgcctgacatcagcgagagcacgtaatatggcgaaatacacgcttccggttacttgggatatggcttttaaacaaagtatcttacttaacagtgccgggcctacattgtctgagcgtcggaaaatgattgaaaacttcaacaaataccggttgaaattcccgaacccgttgcgagcgttattgcagttatggcgtgagcagcaagttcagcaaattgcagtggctgaggagcgggcaaaattccaaaaattacaggcagatacggataataaacttgatcgtctgcgtgaaagtcgcgcacggttggagtttgagctacagcaaacttctcgtaaactggaaaacctgacagatattgaacgtcagctctcttcccgtaaacaaaatcaggggagtgctggctcaggcaattcggataaacatgttgaaacgcccgagacgacggcattacctaacaaaaacagtacgccaaacagtacctctgaatcagataaaggagcagcaccatgacagcgcgtaaaccagcccatcttcttctggttgatgatgatcctggtttgttgaaattgttgggaatgcgtcttaccagtgaaggttttcgtgtcacaaccgcagaaagtggcggtgaagcgttgagattgctaactaaagaaaaaatcgatttggtgatcagtgacctgcgtatggatgaaatggatggtatggcactgttcgctgaaatccagaagcagcaaccgggtatgccagttatcattctaacggctcatggctcaattccagaggcagtagcggccactcaacagggtgtctttagttttctgactaaacccgttgatcgggatgcgctttataaagcgattgatggtgcattggcgttgaccacgcctgccagtgatgaacagtggcgggaacagatagttacccgcagtcctgctatgttgcgtttgttggagcaggcgcgaatggttgctcaatctgatgtcagtgtactgataaacggtcagagtggtaccgggaaggaagtgctagcccaggcaattcaccgtgccagtccacgggcgaaaaaaccatttatcgcgattaactgtggtgctttgccggaacaactccttgagtcagaactgtttggtcatgctaaaggtgcatttaccggtgcggtcagcagccgtgaagggttattccttgctgcgcaggggggaacgctgtttcttgatgaaatcggtgatatgccacaggctttgcaggttaaattgttgcgcgtattgcaggaacgtaaaatacgtccgctcggaagtaaccgtgatctggatattgatgtacggattatctcagcgactcaccgtgatttaccgaaggcaatggcaaaaaatgagtttcgcgaagatctctattaccgcctaaatgtggtgaacttgaaaattccagctttgaatggccgggttgaagatattcctttattggcgaatcatctgttgcgtgaatcagcgaaacgccataaaccttttgtccgtagtttctcagttgatgcgatgaaatgcctgatggcggcaagttggcctggcaatgtgcgtcagcttgttaatgtgatcgaacagtgtgttgcgctgactactgcgccggttattagtgaagccttggttacgcaggcactagaaggggaaaatacagcgttacccacttttgtagaagccagaaatcagtttgaactgaattatctgcgtaaattactgcaaatgaccaaagggaatgtgactcatgcggcgcgtatggcggggcgtaaccggactgaattctacaaattactggcgcgccatgaattggatgcgaatgattttaaagaataacttttctgctgctcaggaagtttttacactggtataaagattggtggcttgggagagccaaattttatgagccgtactcttaatattgcccttgcacagcttaattggatgattggcgacattgaaggcaactgtgaacgtatgttgcagacagtacaggaacaacagcaacaaaatgctgatttggtgatgttttctgaactggcaatatccggttattctccagaagatctattattccgagctgattttcatcagcgttgccgtgagcaattggcacgtttacaggctgccagttgtcaaattgctattttagttggtcatccttgggagcaggacggggagatttacaacgcactttccttattctggcaaggggagatcttggcccgttatttcaagcaacggttaccaaattatggtgttttcgatgagaaacgctattttaaagcgggcgatcaaagctgtgttgtgccatttaagggctacaatctcggcttattgatttgtgaagatttatggtttgatgagccgattgatgccttgaaacaggctggtgcagacttagttctttctatcaacgcttctccatatagccgtgaaaaaccttatatccgttatgaactgattagagaacattgccgacgtacagagttacccatgatttatcttaatcaggttgggggtcaggatgagctgattttcgacggctgttctaaagtttttaatgcaagtggtgaagtgactcatcggttagccgcatttaatgaacaaatccaacaatgctgctttaatgaattaaaaattgaacctatggttaatccggcacctgaattaccgccattgcagcaggtatatcaggcattagtcctttcagtgcatgattacgttcgcaaaaatggctttcaaggcgtgttattaggcttatctggaggaattgactctggcttaacgctggcaattgctgttgatgcattgggtaaagagcatgttcaggccgttatgatgccattccgctatacatctgaaatgagtatagaagatgctaaaaaacaggctgatatgttgggtgttgagtttaatgtggtgtcgatcgaaccggtgtttgatgcatttatggcacaatttgaacctctatttgccggtacggccaaagataccaccgaagagaatttacaggcgcgttgccgtgccgttattctgatggcgatgtctaacaaacgccatcgtctcgtgctgacgaccagtaataagagtgaatcagcggtggggtattccacattatatggtgatatggcgggtggttttaatgcgctgaaagatgtaccgaaaacattggtatttgcattagcaaaatatcgtaatactgtttcgccggcgatacctcaacgagtcattgatcgtccgccatcggcagaattggcacccggacagcttgatcaggacagtttaccgccttatgacattctggatgatattctggaaggttatgtggaacaggataagtcggttgatgggctggtggcggcagggtttgatgaacaaattgtacgtaaagttgttcgtttggttgatatcaacgaatataaacgtcgtcaagctccggtgggaccgcgtattacgctacgtaattttggtaaagacagacgctacccgattacctctggtttcggccgtaaaaactggtaacaacaggaaaacttcatgaaaaagattgatgcgattatcaaacctttcaaattagatgatgtgcgtgaagctctggcggaagtgggtatcaccggaatgacagtaacagaggtgaaaggttttgggcgccaaaaaggtcatacagagctgtatcgcggtgcagaatatatggtggattttctgccaaaagtgaaaatagaaattgtcgtgccagatgatattgtcgatacctgtgttgaaaccattatgcagacggcacagaccgggaaaatcggtgatggtaaaatatttgtatttgatgtagcacgtgttgtgcgtatccgcaccggtgagcaggatgaagaggcgatttaacttaatttgaattttttggggtggtgacaggcagataaaaaagccacccctataaagataagatggtagctgaggctaatagattaaacgctaaagcgaaattggatattggcatacagaatcaaaatattggctaatataaaagatattgagaatgcagtaaaaactctgtctctattgatgtggttaattaaataatcatatatatccgtcatctttcaagttgcctctttgttggctgtactctctcaccccagccacatagttaacccgaattctggataagaaattgacgagaagcctgttccaggagcaaagttttggtgtgcaccaaaaacagctccgaggggggaacaggctatggacaacttagttgaaattttctgtgatgtcgatgatttttgccgttttttcatccctcaatgggaacaattttgtctcgatagcgggcatcgtttacgccgccgacaaggtcatatgtatcccagtgaaatcatgaccattttgatcctttttcatatgtcgcattaccgtgattttaaacatttttatctagaacatatttggaaatatcaccataaggattttccaaccttgcttagctatcctcgttttgtcagtgtggctccttccgttttggtgccattatgcagctatctgactcaattaaaagggaaacccacaggcattgcttttattgattccacccgtttgagtgtctgccataacattcgcatccctcgacataaggtctttgcggggatagcaaagcgcggaaaaaattcaatgggctggttttacggtttcaaattacacctggttgtcaatcatcagggtgaaattctcgcgcttaaagtgactccgggtaatgtggatgatcgggaacctgttcgtgaattatcaaaagaattaacgggttctctttacggtgacaaaggttacctcagccaggaattggcggacgatttagctaaaaccgatgtcactttcatcacgaaaaaacggcgtaacatgaaagcgagtatgcaagctgagtgggataagataatgttaaaaaagcgttttatcattgaaacgattaatgggcaattaaaaactctttctcaaatagagcattcccgccaccgaagtataaaaggctttctgttgtgcgttttaggtggattgattgcttactgccttaaattgaagaagccatcactgaaagttttctactcagaagacgatttttcaatgacggattaagcagaattcgggttagttacctatgctcccggggattcgctcccttgccgtcgcgatgcatcttgaaatctattgggtataaatcaattgatttcaaacctccaagcctagccatataccgttttgacaaagaaatttatcttttgcaaatcgcgcatcatgattaataaatgataatattttctcaatcactgaatgtttttttaaattaattgattacctctaactttaataattattcttaatcataaatttattgtgagaatttaaggccatctttgaaaaaacaattaaaattgtattgttgtgtggtttctttcttgtcagataaagaaagagcctctcaactattttatgattcatttaaatttcttatcttttttaagctgaatagtaatgccttgtaaatttggcttaaaatatggaggtacatgtgactgattttcataactttgacgtttatttgtctcaaatcatgaattggcacttttcgcctgaaaccggatcgccgttttggcttgaaaaacgcaaaatattggatttcgatccattgcaagatatacgtactttctctgatttaaggttatttcccgatattgctgatgaacttcgggatgttccgactgaaagcttggtgcctcgtggtttgcagaatgcggccattgcgggggtatttgaaagtggagggacgacaggacgacccaaacgtgttgtcgtctttgaagagtggttagagcagttagtggcctggcgtttgagtgatatgaaagtcgttaatacgggggcaataaagaataccttggcgctggtcccttctggtcctcatgttatcggggcaataagccgtcttcgtgctcgtgctaatggtgggcatttcttcaccgtggatttagatccacgttgggttaaaaagatgatccaacaaggtgatcttgccgggatggaggcttactgcgagcatattctcgatcaggctgaagatattattaatagacaaaatattagttacctaattgtcacgccgccacttttagaacgaatggttaggagagcggcgttggtcagtcatttgaataagagtttggaccttattgcttggggtggaactcacatggacccagatacacaggcatttttgcaatcctcaattttccctgatgtcaaaataacagccagttatggcagtacaatgatactgggcgaatctaaatcaagagataatcaggattttgaagggtcacctatctttgacagctttgcccctaacgtcctttttgaagttatcgatccactgacgcaaaaaccggttccttttggggaacgaggtcgggttgtaatgaactacatcaacaagtttgctttatttccgaatatcttggaacgtgatacagcggtgaggatgccaagaatagatgattacccaggagtttccgttacgctggtgcgtcctgttgaggagatttctggtcatgcggtaatagaaggggtctattaatgctaatcgatagtgtgaagcctgacgtaaaaaccgcaatggagaacaaattgcaacaagtggaggctctcgcactgggagaatcctatgttacacgccggcgtgcggctgttatcaacgtgttagatgaagttgttggagaaactgcgatagcgcctcccgtttatatttgtgaagttgttcgcaagatgagaattgccccccgactgaggttggatgaaattcatgcaacaatgaagcaggcggcaaaaatttattccagtgagagtgtcgccgggctttctccggcagaatatgtgcaattgacacaccgtgtcattgggctgccagcgagtattatcgaaaggtcactgattgaaacttcagaagtgcttatgatgatgtctgagataatcaaagcatctatgccacatggcgctatttggcatgtggatgatagcagagttgcagaaggatgtgctttattcagccgacgagcggatgtgctggctgttctgactggtggtaatgggccgggagcgcatgctttgtggccgcaagctcttgcttttgggtatcgaattttaattaagccttctgttcgtgaaccattcaccgctcaacgattagtctcctcattgcaacaggctgggctcggaaactatgttgcgctcataccgacagatcatcaaggtgctgacgaaatggtttctgcggcagatctgtctattatttatggcgggcaagatatcgttaataaatatcattcgaatcctaaagttttaatccaaggaccggggcgttcgaaaattgtggtaggttcagatgtcaatattgatgaagcagtttcacttgttgcccgatcggtcagtgctcttggtggtaccgcatgtgtttctgccagcgcggtattaatagaaggggaccctgttgattttggtcaacgtttatcggaagcgtttgatcagatggatgctgaggagacatttccattagggtcatcgaataccacggctttattacagaaatcactttatcctgaaaaaaatgaagatcttcggttgtttggtgaacaaacatcatcaggatatatccttagaccttgcgttactgttgtcgataatccaatagatcctttaattcaacgcgaacttccatttccatgcgtcactgttgcaccttatgaccgtttgaagagttcacaaatgttatcagattcgttagttgttactgtattctcgaaaaaaccagaaattctgggtgccgttctgagtaatacaactatcagtaatgtttatgcaggagatattccgacaacctggatggcaccacttgtaccgcatgacggatatttgtcagaatttttgatgcatagccgaggggttcgtattcagaagaattggtttacttaaaatgataaagagaaatgtaacgatatcaatctatgctaaagacccgtgaccgaattgattcaaacttgaaagatgacaggtatatacaaaaaccgcgccataagtcattcatggcgcggttttttattatttagtgttaagttgaaaatttaaatcactttatgtggaccaaaacatgcatagtgaataaattgtttatctattcccatatccaaccactgtttagcgacatattacatatccaaaacaaagcctgtttgaaagttatcaaattccactttgatgctaacgttgcatttcatcatatttccttatgacttcattgcctgattgattaaaaaacatcataattgattttttttgtgatcatttcgtttagggtatatttcagactgataactcaattataggtaatagttgcttatggctaatgatttaaatgtggaacgaaccgggctggtttttactcttacggccggtaatctccctgtgaaaacttttgttgtggttgaatttacactgaatgaagtcttgtcaatgctattcagtttgcaagccacagtgacttgtgccaattcagatattgattttgcggatattttggatcaatacgccacattgaccgtttatcgtgatgggcagcctgagcgttatatcaccgggattgtgactcattttgtgcaggaaacaacgggccgttatcgtagttgttattacttgactctccacccttccttgtggcgtgccggattgcgggttaactctcgaatttttcagaataaatccgtcaccgatattattgataggctattgaaagaaaatggcgttcggcaattctcttgtctattgcgctatgaacatcccgtgcgggagttctgtgttcagtacgatgagagtgatttggcttttttacagcgtctgttagctgatgaagggatcttttattactattactttgatcaggataagggcgagccggcaatgatttttgtcgactcttataccaagaatggttctctttcactgccctacaacccagaacctgatgttacaggcaaccagtgttgcatcagccagtttcgttggggagaacgagtgggcattgctgaaatttcggtgagagattacacatttaaacatccccggtggctttcagattttcaattccatgaaaatcacaggtacatcggcaatcagcgttcggatttaaatagctactattactatgactttcccggacgttataaagatggaaatgggcagcgaataagtcaataccggttggaggcattgcgtaatgatgctttgcttggcagtgggcaaagtgacagttttgctcttttaccgggcatgtggtttacgcttaccgatcatccgaaagaaaaatttaatgcgccgtggcaaataatccaaattactcaccgcggtcatcaacctcaagcggatgaatcccattttggtagcagagggacgactttgacgaacggttttacctttggtagtcccaatttctccgtgaggctaaagaggtttattcgcatgtgaaatctgttgtaggaatgtcttttctgatgccaccttttacacatggcacaggaagtttgataggatagagaaaatgcttagccagtatcgttggtcaataaaaatggccgatctctctcatctgtcatccgaacaggctgaagctgccaggagatttgtcgatctcaagtttcaggtggatacgatggcaagagatcaccggatgacctgcatggcactatgggtggcggtgagtacggcccatctcacggtatgtgtttcttcaatagaatcattccttttctgccctgtgattctgaggttcatgagccggagatcctgtatgtgccgatagcacatacactgggatgcagttggcggtggtggcctgaccattatctatcggaagagaacgaagaaggaataaaattacacattttttcggattatgggattcgtagtaccagttatacttacatacctgaactaggcttgtttctgcccggtgaagggaaaaaccgggttaatttctgccgtcatcacaacattagcgctattccatcccatcattccgaaggctgacagaataaagctttatgtcaaagaggaagccgctggtagagacgttttggctgttctagataatcgctatgttcagaaggttaaccattatgcgtttgcactaccggtccttcaggcttatggagtcatcgtatcacgtaagtggcctagtgacttaccatcaacggatgatatccgggcttatgctagcacctctgttaacaacaagcttttttaccggccggtagtcgatctcgataaagtcagagtagcgttcactaagaagaaggagggggaagagttcatccgtaccacgctttttcatctcctcccagtccgtaaaaaatttacccatatcttcgtgttcatgctgatttttgtggtagcgatgactctgtgggatcacctcggtgaggggaatgtcgcgaatatgttgcttgcagtaggggcttttgctgtcggcagcatgtttgtcatgatggtaccggtttttcaggtaaggaaaaaatacttgactgatgaaagtcagtgacatagtgggtgtgcttcggaagatgtagtggagcaaaaatttcggacatctcacaagtctgctaatctgattaatatgaaagtgaggtattaacgtgaaactgaaacagccaagataccaatattcttctgaattgccctctcattgcttcccacgactcagcataagagagattaccagctgccccgggatagttccatcctgattaatttcgtagttccactcacactgaaccacaataggcatcgcagtgtggtaatacaaaatcacaccctcaacatcagaatatttttaagataatccctagatgtttttatgcgccgtgcagaggcacggtctttcagtgggtgcgaatctcgcccggtacccattagagcagtcgtggcggtaacaaagcatggtgtattaggaagattattttaatgataatgtattccactaaagaaaaatttttagaggaagagctggacgcaaacctggcaatcaagataatacttaacctattatttgctctaacatagggcatatttgagtcgcataatgctgaaaaggcaaaattatgaaaccagtaaccaacaataatttcctaagaaaaattaatataaaaggctacaaatctatctcagaatgtgatttacaaatgggatgtctaaatgtactcattggtgccaatggtgctgggaaatccaatttcatcagtttttttcgtctaatcaccgttgtacttgatcatcatttacaatctcttgttggcaaaatgggtggccccgacacattattgcattttggtcgtaaaaaaactgagtctatgagcactgagctttattttgatcacaatggttataagtttgaactggaacccacaaatgataaccgtatgatgttccaacatgaatcactctttttggacatcaaaggggattttaatattggtgctggacactttgaatctcagatcggtcagcatcataacattgaggattacgcattacttactatgctccgatggagggtttaccatttccatgatacgagtgataatgctagagttaaacaaactcatcgtattaatgataatgactatttacgggaagatggtgctaatttagcggcattcttatatcgtctgcaaaaaaatcatattctgcattacaaacgcattgtcaaaaccgttcaaatggttgcaccattttttggtgatttttacttgcggcccaccccggataatactgattacattcaactcgaatggacagagaaagagcaggatattccctttaaagcgagtgaattgtccgatggtactttacgatttattttattgactaccgtgttactgcaacccgaagattatatgccaagttcaattattattgatgaaccagagcttggacttcacccctatgctattaatgtactggctggtttgatcaaaaacgccagcagtaagcaccaactgattatttctacccagtcagtcgaactggtcaatcaatttgatgctgatgatttgattatcgttgacaaacaacaaggggaatctacctttaagcgtctgaatagtgactttctttcagaatggcttgaagactatagccttggtgaattatggaagaaaaatttactcggcgggaggccacagcgatgatccgtatcaatgtttttgtagaagggcaaacggaagaaacttttgtgcgggatgtgttagctccctattttgtagcacagcaaatctatctgacaccaatattagttcagacgagtaccagtcagaaaggcggtattacaagttatggtaaggtaaaatatcaaattactcgcttatgtcgacaagatcccggtgcattcgtcacaacattaattgactactatggcctgcctactgatttccctgattataatgaacaacaggataatgcagccaacgaacgggtagttaagctagagcaagctttcgctaatgatattgggcaaactaattttattcccaatctgttattacatgaatttgaagcactattgttttgccaacctgaaaaatttgcggattggcttgatgacaacgcccccatttcagtattacaaaccatcaaagctcaatttgatagccctgaagatattaataatagcccacaaactgcaccatctaagcgtattttggcgatagtacccaattaccataagaccttacacggcccactcatcgccggtgatattggattagatacaattcgttcccaatgcccacatttcaatcagtggttaaataagctaactaacctcagttttgtttagggatagctatttcaaaattacgtaaatttaagctcggctttttgtgttgaaaagtgtaggcaattaatcctgacacgacttccagcagaaagccgagaacactacgatgtcttgagtgtgctatttgagaaatatttttcaactgattcactacggtctctaccacaaaacatttttttaacatcaggttatcccatagtaataaagctttggctttcatatttttgcgtatatacccgtaatcattgaagatgcttgattttatccgaaatggagatcattatcctcgctatgaaaatattcattaccgatgaacaaaaagccgaacttgaacatctccatcacacctgccgtgataagagggagtgtgatcgcatcaaagcggtcctgctggcctctgaaggctggagttcagtgatgatcgctcaggccctgcgtcttcatgaaatgaccgttaaccgccatatcagtgattaccttaatcaaggtaaacttaaatctgataatggagggtctgatagtttgctttcccgagaacaaactgattttttaatcaatcacttatctcaacatcttttccatcacacccatgaaatcgtggcctatgttgctcagctctggaatattacctttagcattcccggcatgaataaatggctacaccgtcagggtttttcttataaaaaaccttgtggcgtccctcataaattcgacgcagaaaaacagcgacaatttattgaatattatgagaatcttaaagtcacagcgaaagacgaacccatcctttttcttgatgctgttcacccgactcaaggcaccaaactcagttatggctggatgcgaaaaggcgagaaaaaaaccgtcaaaacaacaggaagccggactcgcctgaatatattgggcgccctcaacctgaatgccattggtcgtacggtgttccaggaatatcagaccatcaacgactacaacatttgctgttttttcaatgaaataagaaagtcttatcctgactatcatcaaaaaattcaccttattgtggatggagcgggttacaacaaagctcatcttgtgaaggagtgggcttatgttagcaatattgagttacattaccttcctccctatagtccaaatttaaacccgatagaacgattatggaaggtcatgaatgaacaggttcgaaataaccgttatttcgcggataaacatgaatttcgagacaacgtcttcaaatttttcaccacaacgctaccggatatagcggactcgctgatgtctagaattaacgaccattttcaggtgctaaaaactgcatcttgaagtttcttgggtatattcgtcaccaacgtaactccttccacagccaggtcttcacacagggcttgtgaaagataacctttatctccatatccacttaaccttttcactcactgtttgaccggttgactatcattcgtattaccgggatcaatttgacctccaaaaactccctgcaatcatggataaccaagagaagtttaaagccatagaaccagcctgtactgctttttcctcgactcactacgtcatcaaagacccgacgcaagttatggcataccgctattctggtcgaatcaataaaagccatctttgctgtcttagccttgggcaatgaaaaggggtgaacgctctttttttcagtgcgagcattcgagtataactgactaatccggggaattctttctggaaataaggtgttacatactcaaagtaaaaggatttaagattctggtaatgactgatgtgaaataagataaggagcgtcatcacttagctgagagaaagaaaagacggtcgattaagctgacgtaatctatccttaatgaattgctgatgccagagaggcacaaagtcatcgacacgcagcagtaaagttcttttaaagtaaccatagcctgaagatatccacgattttgttttctttagcaaaaacttcatcattccttaggttctttgtgagggtgatttgggtgtatgtgtatgattgcccccaagtatgacagtaaaaaaacagtttttcctgttcggggcagtgtttcggtctgctatgattgattcaacgttttgcttgaaaggaataatggatatggcttttctggttaaagcagatcgtacaaccaaagaggtttttgccgaggacttcccggcaaataagggcatggagggcgagtttgatgttcaggatctcactaattttgtgggcgggtatcttgaaatggtaacgctgcggccaccgctaaacatcaacggaaaagaatactgctatatgctttgcgatgaagacggtaagcggaaagagtatccggtcaattacatcgcgtgcgagtatcttgtcggttcccatttagtaggaagtgactttgttgtaggtgatgttgtgttcctcgaacgacacgaaatttcatgaaccacgcttaactgaaggcgagtaaccattaagatatacccgccaccagcatcaatcccagaattgttcaatcggcacacgtccacagcgcagcaactgcacttcggctagccggttaagctcttcgcgcatatcagtcgttttccaaaaataccaagccgtagagggcgcttaacaacaacgtcattcgatggagtaacgccagatacaaagttgccgcaaacccaccggtttcgtacaccctctgcaaaagatgtacgaaagtaagtataatttatttcgtacatgcattatatttcgtacatgcattataattcggacatccattacgtacaggaattttcactatgtcacgagtttttgcctactgccgggtctccactctcgaacagaccaccgaaaatcagcgcagggaaattgaggcggctggttttgccatcagaccccagcgactgattgaggagcaaatcagcggttcggtggccgccagcgaacgtcccggttttgcccggttgcttgatcgtatggaaaatggcgacgtactgattgtcaccaaacttgaccgtctggggcgcaatgcgatggacgtacgaaagacagtagagctgctggcaaagtcagatattcgggttcactgcctggcgctgggcggagttgatcttaccagcccggcagggaaaatgaccatgcaggtcatttcggcggtggctgagttcgaacgtgatttgcttcttgaacgcactcattctggtattgccagagcaaaagtggcaggaaaacgcttcgggcgtccacctgcattaaatgaggaacagcagcaggcggtgatcattcgtctgaaagctggagacagcatcagtgctgttgcccgtcagttcagtacagctcggcaaaccattcacagaataaaagccgggatgattttataacttgaaggggcaaataattcgccctggtgtttcatacagcctgccccacgaggagtttcatggtatcgttaacaaaaaaacaaaccgcacagctttcagagatgggtcatgacgtgctactcaatatcattcatgacctgatacaggataataaacaggccaggaacgcactggtgaacgggtatctgttatcggcagcggaggtactcaaagccgtcgagaaggagtatgtccgacgcgccaaaagcaaacgtttttatgattactatgatgccgatgccttttttgacgagctgacacgcagtatagcgaccccccttgtgggtatcgcccacgcgctccccgagcaggtggaaagtctgagcgtaaaaatgatgcttgagttcgaaaaattcaccggtaacgtggacacctccagcggaagttggatggactactacaccattttgttggatgcgtggatgaaatcactgggagcgcaaaaaaacaacgatcctgcattcattgctaaaaaaatattcaccgttgttgaaagagaattttattttgggattgaaatctttaaaaaataccgcgccttactcggtacagatattttacgtataattcgtgacatgtattatcaaaaaaaactccaccgggaagctttgggtctcagcatgataatgaaagacttggattttctgacgatggcgtttaaaaacgatgagttttgccattccacccattattttgattatgccagattacttatggaagaactgcggtccgatgatgcactcgccgtattaaaaagtcagcggaatgacgatgaggatatcacagataatatcatatggaatgaactattcattcaggccctgattgaggaagggagaaaagaagaggccaaagcccactgtattacagcattcacctttcaaggtgatacccgtttttatcatctgtacacaaaagctgctgaaaaagatgtcgatcacagcccggcattcctgaaaatagcaaaagatacaggattagcgccatatgtctgttttgcatcagacattgaacggtatgacttaatcgacgcctgcattatgggcacgccaaaaaacaacctcgccgactcgctggcttatatcacccattcatatttacggacattatccagtaccctgtataaacacggctatgcgcatacggcgacccttttgcgccgctttttggtggaggacaacattcagaaatcaaaaagcaagtattacagctatgccgcctcagacatgaaaaaagccatcgattatggcgaaggtctggaggattgccctcagcttccggaaacagagggctacctcagaactctctacgaacaacataaacgtaaaaccgcactctggccgctgatgacagataaaatcaaaggattatccgtaggaaaggacggcctacgctacagcggagatgcctcatgacatcacaggaactgtatgaccacgcggtgtcactgctggcaaggcgggattacgcatccggtgagttgacacgggctctgagtaagatgacggaaaacagagagaatatcgacagggcgttgtcgagactgggtgagtgtggttatctggatgataaccgcctgattgataaacatgttcgaaaaaaacatggcccggccagaatcaaacaggagatcaggcaaaaaggtttttctcaggagttggtcgagcagatgctggagaaagtggatgtggactggtatgccatggcaagggacctgaaagtcagtaaatttggtgatgcggtggtatcagaagccaaagaaaaaaacaaacagattcgctacctccagtacaaggggttttcgatggacatgatatttgaggcgttaagctgatcatggttgtcagagccccatccaagacaaatgtcgtcatattgtagcttcgctcccattaccccgtgttgtgggtaggacacgatctccaacaagcaaatgaacgacttcgtttctggatttgagaacaatttgttcgtggccctgcgctatctggaacatcagcaacaaaaatgtggagccacaccgtcgtattcaggccaaactgtagcgtcttttgtcggagtaccgtccaggttcctctttactatgaacaagggaaaataaagcagccctgttagaatgggctgttagaactgaatcagtacaaataattaaagtaacttccgtattacatctcatttattcaattttaatcgctaatatattaactcatttaatatatctatcattataactaaacatgagaatagtcaaatccgagagatttattttatgaaaatgaatcgtaaggagctgacgtccaataggacgggctccacgataaacaaacgccataaggtctctaagataatgatgaattggttttttcagtcatattaagcacattcaataaacatgaatatcagaaccccataaattaaaaatagtttctgttcagttcactttattggctattatcaccctataacgtttttaatattaagttgaaaatttaaatcactttatgtggaccaaaacattcatagtgaataaattgtttatctatccccatatctaataactgcttcgcgacatattgcataaaggcgactgggccacagaaatagaaatgcattccttctgttttcaacgcctcattcagaaccgtcagatccataaaacctttgtgttgataatgaataccttgttgatcttcatcccttggttcgcgataccaaattgtgccagcaaaattcggcattgcttgcgcgatcgctgcgacttcatggctaaacgcgtgatgaccgccgtgttccgccgcatgtaaccaattaatcgggctattgtgattttgctggtggaggtgatacaacatgctcatcatgggagtcaggccaacccccgcagaaattaaagtaaccggcgtttctggtttaatatcaaggaaaaaatcaccgcgtggggcggtcagccagacggtatcgccttcttgcatcttatcgtgcatatggttggaaacgattccttgtggctcacgtttaatcgcaatccggtagctggagccgtttggtgctgccgttagtgaatactggcgaatttctcggttagcaaaactatcatcttgcagataaatacttagatattggccaggcttatagtccattactttcccaccatcttgtggtgcaaattcaaagctgcaaatgacctcactttttacttctttccggttgatacggaatgggcgtaaaccacgccagccaccatctgttaattcaccactatgatagatttgctcttcacgattgataaaaatatcagcgagcacaccgtaagcttttccccaggcgtccagaatttcatttcccggctggaacatttcattcaacgttgccagcaggtgagtaccgacaatctgataatgctctggttgaatattcaaactcgcgtgtttatgagcgatcttttccactgcgggtagtagtacctttaagttatcaatattggctgcataggcgcagatcgcattgaacaaggcttcacgttgatcgccgttaagctgatggctcatattaaagatgtttttcaactcaggattatgtttaaacatccgctcatagaaatgtgctgtcagttttgggccagtcgcggaaagtaggggaatagttgatttgacagttgcaatagtttggttatccagcatggtgaagctcctgaatttctttcaagtgggtaatgaaagttataacatgtaatttaaatgcaacttatacccttttggggactttgtaaatataacgtgtggtctttatggtgaaaaaaatgcccctaaaagatatttacactaaggaaaggactactttaggtcataaattccgacaaaatgaggaaaaatgtagcgtaattttcattacactatttagaaccgataccttgcttgtaatggatatgcaatcgtttgcgtaaaatattttgtcaagactatctcattcggtgaaaagggtttacactgtgtgccattcggccctttgggggtgttgtttgaagagaagttagctgagtcaggagaacccaatgttaaagcgtgaaatgaatattgctagttatgatcccgaactatggcaggcgatggagcaagaagttgttcgtcaggaagaacatatcgagttaattgcttctgaaaactataccagcccaagagttatgcaggcacagggctctcaacttactaacaaatatgctgaaggttatccgggtaaacgctactacggtggttgtgaatatgtagatgttgttgaacaattagctatcgatcgtgctaaggcactgtttggtgctgattatgccaacgttcagccacattctggttctcaggcgaatgcggcagtttatatggctttgctgcaaccgggcgatacgattctggggatgaatttggcacatggtggtcatttgactcacggctctccggttaacttctctggtaagttatacaacgttgtgccttatggtatcgatgaaagcggtaaaatcgattatgacgatatcgcggcacaagctgaaaaacaccagccaaaaatgattatcggtggtttctcggcttactccggtgtggttgattgggcaaaaatgcgtgaaattgcagacagcattggtgcttacctgttcgttgatatggcacacgttgctggcctaatcgccgcaggagtgtatcctaacccggttcctcatgctcacatcgttactaccacgacgcataaaacactggcgggtccacgtggtggtttgatcttggcaaaaggtggcgacgaagagttgtataaaaaactgaactcttctgtattccctggttgtcagggggggcctctgatgcatgtgattgcaggcaaagcggtggcattgaaagaagcaatggaaccagaattcaaagcgtatcaacatcaggttgctgataacgcgaaagcgatggttgaagtgtttttggctcgtggttacaaagtggtttctggtagtacagaaaatcacttgttcctgctggatctggttgataaaaacatcactggtaaagatgccgatgctgcattgggtcgtgcaaatatcacggtaaacaaaaatagcgtacctaatgatccgaagagcccatttgtgacttctggtgtgcgtattggtacacctgcgattacccgccgtggctttaaacaagccgaagcacgtgaattggctggctggatgtgtgatgtattggacaacatcaatgatgaagtgaccattgaaatgattaagcagaaagttttggctatttgcgcaaaatatccggtttacgcataaattaaaattttaatataccctatggatttcaagatgcatcgcgacggcaagggattgaatccctgggagcataggtaactatgtgactggggtgagcgagtgcagccaacaaagaggcaacttgaaagatgacgggtatagctcattacaaaacctgttccggctaacatcgtttgcttaagtgagatattgaggagtgatgcgtggattttccccccgggggatatccacttcaagataactctcaatatcttaatttcttgagctaatcaagttagttaagggcgggtttttttgcattttttaccagggaggactaatggttattcgatcgacgcgctggctggcgttagattacttcacatatttcttttcttacgggatatttttacctttctgggcaatctggctacagggtgaaggtatagagcacgatatgataggggttctattgggtgcaggcttgatttcccgttttttgggcagtttattaattgcacctacagttaaagatcccgcaaaacttatttttgcgctacgtatatcagcattgataacctttgttttcattgttggctttacattaggaaatcattgggcgtggctcctgttcgtcatggttggcttcaatctatttttttcgccgatgatgccactgagtgatgcgctggcgggaacatggcaaaagcaatttccttttgattacggcaagatacgggtttggggttcaattgcctttattatcagttcagcattaaccggggaattaatctctgtctggggacatcgtgccatcctcatcacgatattgtttagcgtcttctctacgctgttggtgacattgcttaggccctctatcatgccggttggtgaaaccaaatctgccaaagtggatgtcgtgtcatttaaacagttgttgtctgaaaaatcggtacgtcgattcctattatgtgtggctttattgcaaggtgcccacgcgggatattacagctttagtgcaatttactgggaaaacgcgggctattctgcctcggtagtcggttatctttggtcattgggcgtagtggctgaagtcattatttttactctgagtaatcaattatttcggcgctggagtgcccgtaatcttctgctgctttccggtatctgtggtgttgttcgttggggattgatgggaacatacacttcattgccggtgttaattatcgtccaaatcttgcattgtggtacgttcactgtctgtcatttggcagcgatgcgttttatcggtgcgagaaaggaaggggaaattgtgcgtttgcaagcggcctattctgcactggcaatggggggcggtatcgctgtcatgacggtaattgcaggatttatgtatgattatctgcacagtggaattttctggatgatggccttagttgcttttcctgctatcttcttgcgaccgcaggttaaagctcataattattaacaacataaatttagtttcttacaatatttttgtaagaaactaaatacctcaataatatttttatgagatatcatgtcgaataaattaacaataaaagatatcgctcgcttggctaatgtcagtaaatcaaccgtctcgcgagtattaaacaatgagaatagtgtcagcccacaagtacgtgaaagagttgaaacgattatccaacaaaataattttattccttctaaatcagcaagagcgatgcgagtaaagagtgacaaaatcattgctttaattgtgtcgcgtctgggatctttttcagaaaatttatcgataagtgccatgttacccctgttttaccagcatggttacgaccccattattatggaaagtaattttgatccacagcttttacaggaacatctacgtcagttggcattacgtcatgcagatggcattattttgttcggttttactggattgtcagaagagtctctcttcccttggcgtgacaaaatggtggtatttgctcgtgaatataccggtttttcttctgtatgttatgacgatattggtgctgtccgtttattgatgaatgaattctatcggcgggggcacagagagattagttttcttggtgtagatgattgtgataccacgacaggttttcttcgccatcaatcctatctggcttgttgtgaacagcaaggtttgcgcccgctttctgttcaatgtgatttaagctatcagagtgggtttcaacatattaataaggtattgagagagaaaacgacagctttaatctgtgcaaccgatagtttggcattaggtgcatataaatatttgcagcaaaatagtcgggaagatatacaaataggtagtattggtaatacacctttattgaattttttataccctaacacggtttctattgatttgggttatagtgaggctggtaaatatgcatctgatcaattaatttctcaaataaatcgtcaatacttcaaacaaaaagtaatcattccgagtaagttggcttaaaaataaaaaatatttccgtttcaatgtgatcttcaacccatttttgggaacgttcccatgacaagcataaccaaatgatattaggatgaaattagtttactaagcatgctaattagtaattgatactaacttatgatgactggctattatgaaaaacaaaataaattctaaagatatagaaaaactaattacattaatcggtggttgtgaaaatatagccagtgtaactcattgtattacccgattgaggtttatattagttgaaccagttaaagccaagccggatgagataaagaatttatcgatggttaaaggctgttttaccaatgctgggcaattccaggtagtgataggcacgaatgttggtgattattatcaggttttaaatcgttatcttgaccaatctgaattgaataaaaaagataaacagcaggttgagaagaaaaacatgaaatggcaagagcgtttcatttctaagtttgcagaaatattttttcctctcttaccagcattaattagcggtgggcttattctaggtttccgtaacattattggtgatattccttttagtgaaggcaaaactttagctcaaatatatcctatttggaaaacgatatatgattttttatggctgctaggagaggcaatatttttctatctgccagtgggtatttgttggtcggcggttaggatgatgggtggaacaccgatattgggtattatattgggagtaacactggtctctccacaattaatgaacgcttatcacatagggcaacaaatccctgatatatggaatttcggcttgttcacgattgggaaagtgggttatcaggcgcaggttattccgtcacttttggcgggtattactttggggtggattgaggttcagttaaagcgggtggttcctagttatctctatttggtgattgttccggtcgtttcgttaatattggcaacctttttagcacatagtcttattggaccatttggtcggttactgggtgatggggtagcttgggttgtgaaggcgttgatgaccggaagttttgctcctattggtgcagctttatttggattcttttacgcgccgttggtgattaccggcatacatcagaccacattagccatagatatgcagatggttcaaagtataggtggaacaccgatctggcctattattgcattatccaatattgctcagggatcggcggttgttggtattattttagtcagtaagaagcataatgaacgtgaattatccgtacctgcggctatctccgcctatttgggtgtgactgagccggcaatgtacggtattaacattaaatatcgattccctatgctctgtgccatgattggctccggtttagctgggttgatttgtgggttgagtggtgtattggcaaacggtattggtgtgggtggtctgccaggtattctttcgatcaaaccgcaattttggctaatttacgcattagctatgtttgtcgccatcattgttccgttgattctcacgactgttgtttatcgcaggaagaatatggccggtatgttagcggttgaataatgcggctaaatcttcacaagtaacagatataaaaataaccatgtggttattcaattcatggttatttaattcaggaaatatattgataaggtgtttttgatggacaaaatcattccgtggtggttacaaggtgtcatctatcagatatatcctaagagtttccaggatacgacgggtagcggaacgggcgatcttaacggcattacttaccggcttgattatttgaagaaactgggcgtagacgctatttgggtgacgcctttttacctctcaccacaggtagataatggttatgatgtcgctgattattatgcgattgatccggcttacggctcaatggatgattttaagcgtttggttgatgaggcacatcaacgtgatatccgtatcatcgtggatattgttttcaaccatacatcgactcaacatccgtggtttaaacaagcacaggatattgatagcccttatcggcaatattacatttggcgggatggggtacctggaaccccgcctaataattggttgtcgaaatttggtggcaatgcttgggcgtggcatgaagcaagccaacagtattatttgcacctgtttgctgttgagcaggctgatctaaattgggaacatgagccagtacgggctgaattgaaaaagatttgtgaattctgggctggccttggtgttgatggcttccgtctggatgtcattaacttggtttctaaacagcaagacttccctgagtcaactcagggggatgggcgtcagttctacaccgatggcccgcgtattcatgaatttctgcaagaaatgaacagagaggtattccagcctgccggagtgatgacggttggggaaatgtcttctacttcactggaacattgtcatcgctattcttcattggatggtgaagagttgtcgatggtttttgcttttcatcacttaaaagtcgattaccccaatggtgagaaatgggttgcagcgccacctgattttattgaattgaagaaaatttttgccaagtggcagcaaggtatgtacgaacgggcatggaatgcgctgttctggtgtaatcacgatcaaccgcgtattgtttcacgctttggcggtgaaggtgtttggcgggtgccgtccgctaaaatgttagcaatggtactgcatggtatgcagggaaccccttatatctatcaaggagaagagctggggatgactaatcctcacttttctcatattgaagagtaccgggatatagaaagtttaaatatttatcaagagaagattgagcagggcaatgataaacagcaaatcttatcggtcttagcgaagaaatctcgtgataatgggcgaacgccaatgcagtgggatacgactgctaatgcagggtttactcaaggagagccgtggatagcgctgaatagtgattatcaggatgtgaatgctgaaaatgcgatgcaggatgatgattcagttttccattgttatgcacgtttaatcaagctgcgtaaggaatatcctgtattgacttatggcagctatgaagacttattaccatctcatccttctctttggtgctatgtgcgtcgttgggaaaatcagacgttgttggttattgctaatctcagtgttgaagtgcagaaatggtcgctggacgcttctttatccgattgctcatgggttaaattgatggggaactatcctgaaaaccatgtacctgcaaaagatatgcagctacagccttatgaagccgtttactggttagcggagtaacaacggtctttgttgttagttaaatgaatcgtaaggtagaccgcgttttttgcggtctacctaaattaccatccgtcaattcttatttaggatttactggaattaacgtttcaatgcttctgataattcatcacgcatttcagccaaaatatctttaacaacgcgtggattacctgcaacaatgttgccggaatgaatataattatgaccgccaacgaaatcagttacgataccgccagattcacgaactaacagttcgccacccataaaatcccacggttttaggccaatttcaaagtaaccatccacccgaccagccgcaacataagccagatccagtgcggcggagcctgtacgacggaagtcagcacaacgaacaaataatttacctaaagtattaataaaaacagtggaatgatgttttgctttaaatgggaaacctgttgccagaatggtgccatccagatcacgggcattggtaccacgtagacggtagccattcaactgtgccccttgacctcgggttgtggtgaaaagctcattacgcattgggtcataaacaactgcaacttcagtacggcctttaatgcgtaccgcaatagagacggcgaagtgagggaggcgtttgataaagttagtcgtgccatccagtggatcgattacccattgaatatcagcctcttcgcctaaaagctcgccactctcttcggtaataatcgagtgtttaggataagatttgcgaataacgtcgataatgagtgcttctgcggctttgtcaacattggtaacaaaatcgttactgcctttttggctagcttcaaccgcatcgggagtttcataatttttggcaattaggttgccggctttacgcgctgcgcgtatggcgatagtcagcatcggatgcatgggatatcttccaccaggatgttaaagaacgggtaattaatcggcgcgtagtatagcagtaattcggaaaaatgactaatgctgtgttaagatatttgattcttataactatccagactattcagaagttgtcatgttagaaaatatccgcattatcctggttgaaacttcccacaccggaaatatggggtcaaccgcccgggcaatgaaaacaatgggattaaccaatctttatctggttaatcctttagttcagccagactctcatgcgattgcactttctgcgggtgctagtgatgttattggtcatgcgacgattgtcgatagtttggataaagcgctggcgggttgcggcttggtgattgggaccagcgcccgttcaagaacgttatcatggccgatggttgaacctcgtgaatgtggtgaacgtagtgttcaacaagctgaacatgcgtcggttgccattgtttttggccgtgagcgggtagggttgaccaatgaagaattgcagaagtgccattatcacctgaatatcccaactaacccggagtacggttcattaaatctggcaatggcggttcagcttgtcagttatgaaatccgtatggcctatttggcgcgtcaggataaaactgagcaaaaaactgatgaagtggaatatccattagctgatgatatggaacgcttttatcatcatcttgaatgtgtgttaaatgattcgggtttcattagaaaagcacacccaggtcaaataatgaatagattgagacgcctttttacccgtgcccggcctgaaatgcaggaactgaatattctgcgtggcatcttgtcctccgttgaaaaatgggcgaagaaatagttgagtaaattactaggttaaatagttgactaaaatactcaggaatgacacaatttcttcatatttcaccacggggtaattcatttatgagattgacatctaaagggcgttatgcagtaactgccatgcttgatgtggcgttacactcacaagaaggtccggtaccattggccgacatttctgaacgtcagggtatttccctctcctatcttgaacagttattttctcgcctgcgcaaaaatggtctggtttcaagtgtccgtggtccgggtggtggttacttattgggcaaagatgccagtgaaattgttgttgccgaagtgattttcgcagttgatgaatcagtagatgctacccgttgtcagggtagagaagggtgtcagggcggtgatcgctgtctgactcatgctttatggcgcgatttaagtgatcgtattaccggtttcctgagcagtatcagtttagaagaattggtcaataaccaagaagtattggatgttgctggtcgccaggataacgataaacgccgtgcacctaacggcagagcacaagaaacaattaatgtcaatctgcgcccataagcagaacttgtgatgaattgaagtattagaagtagggagcatgtgaccaatgaaattacccatttatttagattactcagcaacgacaccggttgatccgcgtgttgctgaaaagatgatgaactatctgaccagggacgggatatttggtaatcccgcttctcgttcacatcgttttggctggcaggctgaggaagcggttgatattgcccgtaatcagattgctgatttagtgggtgcggatccgcgagaaattgtttttacttctggcgcaacggaatctgacaatcttgccattaaaggggcggctaatttttaccagaaaaagggcaaacacatcatcaccagcaaaaccgaacataaagcggtgctggatacttgccgtcaattggaacgtgaagggtttgaagttacctatttggcacctcaaagcaacgggttgattgatttaaacgatctggaagctgcggtgcgtgatgacaccattctgatttctatcatgcatgttaacaatgaaattggcgtggtacaggatattgctgctatcggtgaaatgtgccgtagtcgcggtatcgttttccatgttgatgctactcagagcgtaggcaagctgccaattgacttaaccaaattgaaagtcgatctgatgtctttctccgcccataaaatttacgggccgatggggattggcgcactgtacgttcgccgtaaaccccgcattcgtattgaagcacaacaacatggtggcggtcatgaacgtgggatgcgttctggtactttgcctgttcatcagattgtgggtatgggtgaagcttaccgtattgccaagcaggaaatggagagtgaatctcagcgtctgcgtggtctgcggttgcgtctgtggcaggggatcaaagatattgaagaggtcttccttaacggggatttagagcacggtgcgccgcatattctgaatgtcagcttcaactatgttgaaggtgaatcactgatgatgtcattaaaagatctggcggtttcttcgggttctgcatgtacttctgccagcttggagccttcctacgtattgcgtgcgttgggaatgaatgacgaactggctcacagctctatccgtttctctttagggcgctttacgacagaagaagagatcgactacgccattgaattgattcacaaatctattggccgcctgcgtgaactttctccgctgtgggaaatgtttagacaaggtgtggatctaaatagtatcgaatggtctcatcattaatcagacggtttcaggagtaataacatggcttacagcgaaaaagtaattgatcactatgaaaatccacgtaacgtcggttctttcgatagtgaagatccaatggttggcagcggcatggttggtgcccctgcgtgtggtgatgtgatgaaactgcaaatcaaagtcaataatgaaggcattattgaagatgcgcgtttcaaaacttacggttgcggttctgcgattgcttccagctctttagttactgaatggatgaagggcaaatctctggagcaggcagaagcgattaaaaatactgaaattgccgatgaattagaattgccgccagtgaaaatccactgttctattctggctgaagatgcgattaaagcagcgattgcggattacaaaagtaaacgccagggcagataattgcccttgataataacaaaatagaaaaaaatttggtggatacgggatacgggttgttacataccatccggtatccgcctttgctggttttaataagtgaggttgttgtatgtcaatttcccttacagaaagtgccgcacaacgcgtttcgtcattcctgagtcaccgtggaaaaggtgttggtttgcgtctgggcgtcagaacatcaggctgctcaggtatggcctatctgcttgaatttgccgatatgattaacgaagatgacactgtatttgaagataagggtgtcaaagttatcgtagatggcaagagcatggtctatctcgatggtacggaattggattttgttaaagagggccttaacgaaggctttaaattcaacaacccaaatgtttccagcgaatgtggttgtggagagagttttaacgtttaattccgtttttcggccaaatccagagtaagtttagattatggactatttcactttatttgggctgccggctcgttatactgttgatcgagaacaactggcaagctgttatcaagaattgcagcgtcagtttcatccggatcgctttgcgagtcagccagagcgtgaaaaaacgctggcattgcagcaggcagtgactatcaatgacggttatcaaacgcttaaacatccactgaaacgcgctgaatatatgctctctctgcatggttttgatttagccaatgaacagcacaccatgaatgacaatgctttcctgatggaacagcttatgttgcgggaagaattggaatgtattgcggacaaagctaatccagaagtggcattggctgatttcgctgcgcgcctgaatgggatgattaaaacccgtagtcagctaatggtgcagcaattggatgaacagcagtgggaacaagcagccgatacggtgcgtaaattacgttttttggataaattgcaacagcaggttgagcaactagaagaacgtttactggacgacttttaaggaaggcgtatatggctttattacaaattagcgagccgggtttatccgctgcaccacatcaacgtcgtttagctgtcggtattgatttaggcacgacacattcattagttgccactgttcgcagtgggcaagcggaaacattgatggatagtgaagagcgttacctgcttccttcggttgttcgctaccatgaaaagggtcctgaaattggttggctggcccgtcaacaggctgcgtatgatcctgcgaataccatcagttcagtaaaacgtatgatgggacgctctctggctgacattcagcaacgttatccaaatcttccttatcaatttcaagcgagtgaaaacgggttaccgttaattaacaccgcaacgggtttggtcgatcccattcaggtttcctcggatattcttaaatcgctggtgcagcgtgcagaagaaacactggatggtaagcttgatggtgttgtgatcactgttccggcctactttgatgatgcacagcgtcagggaacaaaagatgcggcgcgtttagccgggttacatgttttgcgcttacttaatgaaccgactgcggctgcgattgcttatggactggattctggtcaggaaggtgtgatcgccgtttatgatttaggtggcggaacatttgacgtttctattctccggctaagccgcggtgtctttgaggtgttggcaacgggtggtgatacagcccttggcggtgatgatttcgatttaatactggctgactggatccgtgaacaagcggggattggcagtcgagatgaccatagtttgcaacgccagctactggatatggctactcaggtaaaaatcgccttgagtgatgctgatattgcagagataaacattgctggctggcaaggtaaaatcacccgttgcgaatttgaagccctgataaccccgttgataaaacggactttactggcaagtcgccgggcattgaaagatgcagaagtctctgcggatgaggttctacaggtggttatggtgggtggttcgacccgtgtgccgttggttcgtcatagggttggcgaattttttggccgcgaaccgctgacttccattgatccagataaagtggtggctgtgggtgcttcgattcaggcggatattctggtgggtaacaagccagatagcgacatgctgctgttggatgtgattccgctttcacttgggctggaaacgatggggggcttggttgaaaaaattatcccgcgtaacacgaccattccggttgccaaagcgcaggaattcaccaccttcaaagacggccagagtgcaatgagtattcatgtggtgcaaggggaaagagaattggtaagtgattgccgttcgctggcccgttttaccctacgtggtattccgccattaccggctggtggggcccatatccgggtcactttccaggtagatgctgatggcttgttgaatgtcagtgcgctggagaaatccactggtgtcgaagcttttattcaggtgaagccttcctatggcttatctgatgaagaaattgctcgtatgataaaagattctatggcaaatgctcaggaagatatcaatgcacgccaactggcagaacaaaaagttgaagcggcgcgggtactggaaagtgtcaccagcgcgttagaaaaagatgccgatctactgaatgaacaagaacaggcggcaattgatgctgccgtagaaacacttataacaagcgttcagggcaatgatcctgaaattattgaaaacgcgattaaacaactggataagcaaacgcaggaattcgctgcacgtcggatggattcatctattcgtcgagcgttggcgggccattctgtggacgagatttaattatgccgaaaattgtatttttacctcataacgatctttgccctgatggtgcagttctggaagccaaagagggggaatccattctgaatgttgcattgcgtaatgggattgaaattgagcatgcttgtgaaaaatcctgtgcttgcacaacttgccattgcatcgttcgtgaaggtttcgattcactggaagagagttctgaactggaagatgacatgctggataaagcttgggggctggaaccagaaagtcgtctgagttgtcaggctaaagtttctgacgaagatttggtggtagaaattccaaaatacaccattaaccatgcccgtgagcactgattggcaggagaaaaataaatgagcctgaaatggtctaacagccgtgaaatcggtgaagcgctatatgacaaatttccagaggtagatccaaaaaccgttcgctttactgatatgcatcagtggatttgcgagctggacgattttgatgatgtagctgagaaatccaatgaaaagattttagaatcgattctgctcgtttggttggatgagtttgaataacaaatagcattaatttgttatttatctgtcatcgttttaagttaggctgctcttcaatgaaaaactggctttggccggtttttttgtagggtgaatatctggcaggcgaagaattatgtaggtaatacccaatggatttcaagatggatcgcgacggcaagggaacgaatccccgggagcataggtaacgatgtggccggggtgagcgagtgcagccaacaaagaggcaacttgaaagataacgggtatagaagcttgaataagctcctcactgccatcaagcggtaataataagaggtgagaaaagaatgactaaacaaatcatgccaataacactgtcttatgaaccagcagcagcttgctggggtgaaaaagcgctgattagttccagtgagcaaggggtgatggttcacctggttggtaaaggtaaattaggggcagtgcaacgtgctggacgtaaaattgacgggcagggaattcgtcatgtggctctggtgggtgaaggttgggatttagagaaaagttgggctttctggcaaggcttccgtgcgccgaaaggtaatcgttctattgaatggcctcaattacctgcggctgaaaaacaggaattggaaagcagaattaaaattattgattgggtgcgtgacaccatcaacatgtcagcggaagagcttgggccggaacaattggcgaagcgtgcgattgacctgatgtgtggtatggcttgtgaatcagtaagttatcgcattattaaaggcgaagatttacgtgagcagggttatacgggtattcacaccgttggccgtggttcttcgcgtgatcctattttgttggcgttagattacaacccaactggcaacccgcaagcgccggtgtttgcctgtctggtaggtaaaggcgtcacatttgatactggcggctacagcctgaaacaatcttcctttatggattccatgaaatcggatatggggggagccgcaactctgacaggtgcattggcgctggcaatcagtcgtggcttgaaacagcgagttaaactgttcctctgcatagcggataacatggtcagtggtaacgcctttaaactgggtgatgttattcattaccgtaatggcaaatctgttgaagtgatgaatacggatgcggaaggtcgtctggtgctggctgatggtttaattgatgccagcaaagagaaagcgaaattaatcattgatgcggcaaccttgactggtgcagcgaaaacggctgtgggtaatgactaccactctgtactcagctttgatgacaaactggcggatgatctgttgacggcggctgcatccgagaatgaactgttctggcgtttaccattagctgaattccatcgtagccaactgccctcgaattttgctgatttgaacaacgttgctgcgtcaccgcatactgcgggtgccagtaccgcggcggctttcctgtctcactttgtggaagaataccaaaaaggttggattcacattgattgctcggcaacttatcgtaaatctgcggtagaacattggtccgctggggcaacgggttatggagttcgttcaattgctaatttattgttggcgaaggcgaaataaatttattttatctaaaaaactgattggagatttttatgggttcattaagtgaattaatttcggttgaaattgatgttccaagtggtagtaagctaacgcttagccaaccggaagaatatccttcaccgctcattgaagctttagtcagtttatttagccaacgtaaacctgttcgccgtgcttttatcattcaggttcatgataaaaatgtggatgaaaaccccaatttattaattggactggaaataaatggcaccgcagacgaaattgagcaactgatccatgaagcgggcactattgcttgtgaatacacatcggaagaagagccgattgacttctgtttagttgatgaaaaagagagtggcatcagccattatttgattcagcatactcagccattttaccagcgtaaattaggcagttggttacgtgaaagcattccggttatgaataagtgattatttagcgggtgataatatatacccgtcatcttgaaagataacgggtatagcagctttatctgtatctggtagtcaagctcaataacttttaccaggtttttaacttgaaaagccgaccagattctccttcgtcatgcagttgaagaacaatttctgtactgtcaaacactggcagctctttaggagatctagtaggaagatctgaatctattagtgtgataacagactgaatacctaattcaacgtaatcgcgtaaaatagccaataaattctctttctttctattatccaaagactcgaatactccatcatgaaaggcaaaatgaggaaatttctcacctttatgaactcttagtacagctaaatcaaaagcgatacatagcagctttctataagtatgtcctaaatctgcactcgttgcgttgcctgattcatcaagaatttccgctttaaattgcaagtgtccctctcgatttggagatacactgagcaatgctttacggctaatgacagtatcaacaatttcactaaaatagagccgaatttgagagaaaatgctagcttgatcggagttctgagactcaacattattctcaattttggattgtaaatgactacactcttcggaaagcgatcgaatttcagttctaagctcttgcaacttgtgtagatgtgccttttgtctctctagagtttcaatatctgcacgtaaggaaacgagttctcttgagagaattttatatttggaaaaaacctctgtgtcacttaagaatgacaaacttttcgaacgacgtgttcctagttcgtttagcctagtgtttatgattctcaatttggcttcaatttctgacttttcttcggtcagatatccaaatcgttcttcagttatcgctttattaaatcctaacagttgttcgaagtccttttttatctgaccgctaaaaagcacgcctgcctcattgaaaagcttttcagcttcttcagtattgaataaaactttatcctcctctaaggattttaggattttctttctattctgatttaacgaatatctttcctgattaagacttgcgatctcttcatctatctcttcaacaagtacttttgttttctctttgtcttgttgtcgaaaatcaaacgcatcaagaagttcctgtttcttctccgcatctttcttctttaatagcaaaataccttcaactttactgatgtcttcgagtgacccccccaactctttctttaccgctttttcagttgtctgtttctcttccagagctttttcttttttatagtgttcttttataagctctgcattaaatccgagtatatgagagagatagggcttccatgatgcatctttggaacgaaactttctcaattggaaaacatcgctataatcatcctgagatcgaataaggtatccaagactattgcgataactccagggttttatcacgctaagatcaagtaaactatctagcagctctttggctttatcaaaagagacatcttcatgatcccattgatctgtaggcaaaagagagtaatcttgatttttttcttgatgtttcttgaagcatatcttcgagggttgggcaacatccctacggatagtcaagaaacttgaatcttttagttcgatctcaagaaaaaagacaaactgattaaatatgtcagggtgtttaaataggaaaaagtctgtatttcgcctagataatagtgcgaagtctatcacacgacccaatgtgcttttccctagattatgtgtgtctttttctttgttttctgggagccgaatttcaccatatataacattaagcccttcgtgaaaagcaatgggctcaaaaagagatggcttgtttgaataaatcttagatagtttcattgttattagctacatattcaatggcatcagttttaggacgatattcaatgatacccataataaataaaaagtttagagctgggagaaacaatacatcaccaccggaaactgctttctttgtatagctcagcaggtcgctataattctcaattctcaatcctttaagacgtgaaataataatcaaagcaacattgattactgttctgtctggatgggaatgtttagttggtcgcagcatattcttcttcactaccgatgtcgcaattccaatacatgtaaaaaagcattattttagtaagtcgtctatgcttttttagaacaggatcccttccaaaaagaagatcgaaaaggtaattcattacgctatcaaagttttgatattcctttctttttgcaattattttaagttgaaactcttcaactacattttcatagagctgcataatttctgcattttccggtgcagccagaaaagctttaatttgagctgtctctttcagatatctccttcttaatatttcagcatattcgttgctcatgttgttaatttggtttttctgactatagggtattctgggggttggtggatcgtctttcgtagataaacctttttttgctgagccgctaaagcgtatacaacatcagaaagagcgtcggggcttacgattaaaggggagtccaccggatcaagagcagctctcccagcaaccttcggaaaagatttaagccatgtttccaataattctataccacaaaggcaaatagaggattcgggtatatcgcacttttttgctaaataggatcttatctcactttctgcattacctgccagccgcctgttagaaaacaacatgtagtgatctaattgtttcgcatttcgtagctttttaatcctgacaatttctttacttaaaacacttgagttgccatcagggttgtagaaatcagactccgaaaagagcttgttgtacccgttagtatgttttgcttggataatgatggtgccactccaaggtgcagatatgctgggataaagagcgctggtacctataaacttggcatctctgccgccatcggggcctttcgagaagccttgtacggcaatcccatgtagttcttggcataaaaaaacgatcagttgctcaaattggtcgtcacccaaatcttcataagcatacttcatttatctataaattcccctgttggtttaatagggataatttcaagccgcattccaatcgcatttaatgatgaacacggagttcttatggtcggattcctgttgctgagagtgctttgtagagagattctctagataaaccagtctctttggcaataaaggagaatccaccatgcgccttggcaacttgtcttgcagtttccagtaacaaacgaacatcttgagttttcctgctctcattcaattctgggttaaggtgtccaatagcactcttgttttttacagatttacccaattttcctaccccccttttaacttgttatcagaagttagtgtactgtagcttaaaagatataaactataaatagtaatcttagctaaaaaactgggatagtctattcatcaataggctatcctttaactataatgaataaactaaaaatcagaaagtgataattataatccaattttattttatatataataggataatattaaatcggagatttaaattaataaattaaaaactaagaaaataatagtaaaattcaatgccaaagataataacgaaacaaataaattcaaatcctgacaacctgtaaataactcggctcctacattatatattaacctcttgtcttttaaataaataaaatagttttcaattgacatttctattttttacaataaatctaattttattttttcagaaataaacttacagaatagataaagtgttcgttacctgttaatacgaattttccttattttttagattgttttaatagtcacttaataaaattattaataaatgattttataaaaatttttaaattcactatatgaatagttaaatagataataattttataagaaaacattgataaaaattagcaatatttttttgccttaaatagctatgttatacaaaacaattgtttatttgttttatgctatttttatcacgtttatattaaataacttttcaaaatagtagaacacttggagggaactcagtccaatttttgcaatctgatcaattgtagataatcccaaaccactaaacggactgagttatgcctatcatagcacctataccccgcaatgaacgacgccagatgaaaaaaattatccagaacacccgagataaagattatgctcgcaggctcatggccatattgatgctgcatcgaggcgagtctgtctctctggtcgccaaaaccctttgcgccagtcgttcttctgtctatcgctggataaactggttgactttatatggtctggaaggactcaaaagcctgcctgtgggcagacccgctgtctggaatttaatcccgctttatcctttactgtcttttttattgcaatattctccccagcaattgggctgcctgcgttctcgctggagtcttgagttttttataattaaaatcaatgaattattaaacataaaattatccatcagtaccttctatcgttacttacataaaatgggtatcgtgtggcgaagggcagccccgacgcttaaattacccgatcccgagtaccatgaaaaaatggcgaaaattaccgaggcattgtcaacgtgttcagaaaaacatcccgttttttatgaagatgaagtcgacatcgagctgaatccaaaaatcggggctgactggtatttaaaagggcaacagaaacgtatagtgacaccaggaaaaaaccaaaaacattattttgcaggttgcctgaatgttcaaacgggaaaagtgacttatgctgacgggttaaataagaattctcagttatttatcaatgtattggaagaacttgaacgccagtattgtcatgctgaaaccctcactttgattttggataattacagtatccataaaagccgacgggtcagagattggctggcttgtcatcctaaatttaatctgttgtttttacctgtttattcaccctggctgaataaaattgagcgtctgtggcaatccttacatgaaacggtgacacgaaatcatggctgtcagtatatgtggcaattgcttgagaaagtgaaaacgtttttaaattcatgtccctacaggaatagcagagaataaaaagagtgagtgtattataattatgaaaagttatttaaaaaaatatgttaattattttttacgtaattaactttagtgttacttttatggacagggattttaaattgcgtggccgggatagcccattgtttctaggttttattgacaggtgtttaattaaatagacaggttttatacccaatggatttcaagatggatcgcgacggcaagggcgcgaatccccgggagcatagagccgtcattccgcaccgtatttctgatttaaaaataatgtgatcttacacaggttttttgtattgatgacatcggtggggttgacggtaatcgccaattttgatctattacttttatttgccggaaagcgaatatgtccacacctatacctgccattaaacgtctcgatcatcttggccttatcgccgctttttgtcatgaagccggtttaccccgcatgattgatgccattatcccaaaatattcatcgcataccgtctctcacggcgacgcttttctggcgatgatccttaacgggctggggtttcacagccggacattgcacatgttttccggcttttttcaacataagccgattgcgcgtttaattggcgctgacattgaagctgaacaccttaatgatgatgtgctcggccgaacactggatgccttatatgaagcgggggtgtcggaagtttatcaggtgcttgctgagcaagtagttgataaattagggttaaatcccgattccgttcatttggatatcacgagttttcatgtcgatggtgactatgacagcgcgttgggagatgacacaaaacgcattgcactggtgccgggttatagccgggatcaccggcctgaactgaaccaggttgtccttgaactgatttgcgaaaatcaggcaggtatccctgtctatatgcaggctatgagcgggaatacgaatgatgccaaagcctttgcccagacgatcaaaacccatattcaatgcctgaaagcagcacaaaacagccgctactttgtggccgatgccgccctttatactgaagccgcgatcgcttcgcttcatcagcaaaaacaacgatttattacgcgtgttcccctgacgatcaaggaagctaaacagtctctcctgaacgtgacagcggagcaattcagccccatcagtgagggctattcaggctgctgggtgacgtcatcatatggcggcgttcctcagcgttggttactggtgaacagtacggcggcagaaaaacgtgaaaaccagactttccggaaaaacacactcagggaaacagaaaacgagtctaaacagttcgacaaactgggcaaaaagccctttgcctgccgggaggatgccttacaggcactgcatgattttgagtctcaatgccagtttatcggcatcgcctcgccggaaattcaggcgattaccgcgtatgcggggcgcgggaaacccggcaagcatcaaccccccaaatcggttcattatcaattagccggtcaggcttatacccggttagacaaggtgaagcaggccagattgcgggtcgggaggtttattttagcgaccaatgaacgggatgaaggacggcttgatatggcggcgttactggctaattataaggcacaacaaaaggtggagcggggttttcgcttcctgaaaagtccggaattcctgacgtctgccattttcctgaaaaaaccggagcggatagaagcgctgttaatggtgatgacatgttgtctcatggtttatgcggcgctggaacataaaattcgccatgaattgaaacaaaatgtgccgtttttccccgatatgaagaacaaaccgacacaatcccccaccgcgcgttgggtatttctggcctttgaagggatcagcacctttgaatttcaagaacataaaatggtgacaggaatgcaatcttaccaccatgagcttttgagtttattaggtgcacaatataaagcggtttattcctgaattaggtgcggaatgaaggatagagaacgatgtgatcggagtgagtgcagccaacaaagaggcaacttgaaagataacgggtatatatctaagctttgaacttatggagaaatatatgtctttaaagaggaaaatttcatatttggaagaagttagtggttcagcaaaggcaaatgaggtattgacctggctacaggcttatattccaggtaaagatcctaatattgtcgttgggcatgagcccagtaaagatgcggcgaaagagttaatccgaagtgattaccgttgggggcatcagagtaatgacaaatctgaaactttccaattaacgtataatttcctggagaatgaaccggataatatgccgtggattatttctggattttcagcatttaatgaagaacaagaagctgctgcaaagctgtcaattcaatcttgggctgatgtcgcgaatattaaattcaccgaaacctatgatgtcaaggaagcgaatatcacttttggtttctttgattttagtttaacaggtgattatgcgtttgccgagatgccgaatccaggtttgaaacaagtcggaacttggtatatacccaagaaacttcaagatgcagtttttagcacctgaaaatggtcgttaattctagacatcagcgagtccgctatatccggtagcgttgtggtgaaaaatttgaagacgttgtctcgaaattcatgtttatccgcaaaataacggttatttcgaacctgttcattcatgaccttccataatcgctctattgggtttaaatttgggctatagggaggaaggtaatgtaactcaatattgctaacataagcccactccttaacaagatgagctttgttgtaacccgccccatccacaataagatgaattttttgatgatagtcaggataagactttcttatttcattgaaaaaacagcaaatgttgtagtcattgatggtttgatattcctggaacaccgtacgaccaatggcattcaggttgagcgcgcccaatatattcaggcgagtccggcttcctgttgtttttactgtttttttctcgccttttcgcatccagccataaccgagtttggtgccttgagtcgggtgaacagcatcaagaaaaaggatgggttcgtctttcgctgtgactttaagattctcataatattcaataaattgtcgctgtttttctgcgtcgaatttatgagggacgccacaaggttttttataagaaaaaccctgacggtgtagccatttattcatgccgggaatgctaaaggtaatattccagagctgagcaacataggccacgatttcatgggtgtgatggaaaagatgttgagataagtgattgattaaaaaatcagtttgttcttgagaaagcaaactatcagaccccccattatcagatttaagtttaccttgattaaggtaatcgctgatatgacggttaacggtcatttcatgaagacgcagggcctgagcgatcatcactgaactccagccttcagaggccagcaggaccgctttgatgcgatcacactccctcttatcacggcaggtgtgatggagatgttcaagttcggctttttgttcatcggtaatgaatattttcatagcgaggataatgatctccatttcggataaaatcaagcatcttcaatgattacgggtataacgcggaaagcggtactttcttaaaaaatgatattggagtgaatggctatggtcgccatacatttactcatgagatcggccatacattagggttggatcatccggctgattatgatgcgtctgataaggtagtaccgacttacaagaataaggcgacttattttgaagatagcggtgcttataccatcatgggttatttcagtgaaaaaaataccgggcaggactttaaaggtattgattcttctgcgccattacttaacgatatttctgctattcaggcgttgtatggtgcaaataatactactcgtaccgatgacacggtatatggttttaattccaacactgatcgcgatttctttacggcaaaagatgcaaagagcaaacttgtgttcactgcttgggatgcgggtggtaatgatacctttgatttctctggttttactcaggatcaacgcattaacttgaatgaagcttctttctcggatgtgggtggtttgaaaggaaacatctctatcgcccgtggtgtcacgattgaaaatgcgattggcggcagtggtaatgacattctgatcgggaatgatgccaataatactctgaagggtggtacaggtgatgacatcatttacggtggattgggagctgatcatctttggggtggggaaggcaaagatacctttgtctacttgaatgccgaagaatcatcgtttcttgagcgtgattggattcatgactttgtttccggtgaagacaagattgatttgtcattgttcgatctgggtgcagcaggaaaaggcactattaagtttgtcgaggaattcactggtgctattggggaagctgtgatcagctatgacagcgttaacaaggtaaatgatttcgttattaatatgggaggagaattatctcaagatggttttggggtgaagatcgttggagaaccgctgatagaggccgatttcatcctttcataacacaaccacacaaccgcatctgaccggatgcggttattcgtttagtcactttgagcgcttgggcgtgcaattttgctctcttctgtattctgtcttctgttttctgtccatgtggttggagttcctaatctattatttttctattatataataagtcaaatacatttgaataagtaattaatagtgtgatttttctattttataacaataaacaaataatctatttttaatttaaaattatttactgatgatattaaatgtaattaatgcatacattgctcgtattatttcattatgacaaaacaatatatgtggaagttagttttagtttgaaattgtttcatgccggtgttaaatgtaattaacgtttacattagttgtataatttgattattataaaataatatgtaatcagactagttgataatttttatgtgtataaatatacattaatcaatataaccaagtgataaataatgtctttttatggtggaatctgtttcctattggaatgcggataggtccatttttcagagaattatcaaagtaaattcggtgttaattggggagcaggaggtttagtttgtctcgataattatttaatttttcgtgaaataattcacatatgatattaattcaaaatggacagaatacagcagggatttaatactcatgccagtaaatatattcaatatacccaatagatttcaagatggatcgcgacggcaagggagcgaatccccgggagcatagataacgatgtgaccggggtgagtgagtgcagccaacaaagaggcaacttgaaagataacgggtataaatccatttttatttagttatggaattcagcgtcagccaataaaaaattgcacaaaatcaaaggcgcttattaaaaaaataggaaaaaaatggaatatcttttgccggttcacttggtgaatcgtttattccgttatcaggaaaataattgtcgaagaattgctaattatgaggctattaaccgggctattacctccagcgtccaagagaatgtgctgtctgaggattttaattgatgcctgatgtgtgcccgtttttatttcttggggggaaggaagaagggcaaaacatttgtgatgactgttgagaatgacagttttcaaataactaacagattcattgaggtagtaagtagatgaaagatagcatggctaaaaaggaaattatctttgatgctggattagtgcaagtactgtcaaacaaggtcggtgacgacatatctgttcagaaacttaatttgttgtcagaggctgaacgtacactgctattggaaacttggaatgccactgaaaccgtctatcctgaccagttaggtatccatcagttgtttgaacgacaagtggagaaaaccccgactgcgacggcgttaatcgcaggggataagaccctgagttatgcggaattgaatgcttgtgctaaccgactgactcatcaactgattaagcaggggattggcccgaatgatcatgtggcaatcctgttagagcgatctatcgaattggtggtagctcaattggctattctcaaggcgggggcggtttatgtccctatcgataccagcgtgccggacgagagaaaaaagtggttgataaacgatggcttcgccaaattgttgctcaccggcgcacaagcgaatatcccggctaatctggatatcccgctaattcgtctctctgatgagacagacgcggacaaggcggaagagagttttaatcctgacttactttattccggtactgcgccagcgtatatcatgtacacctccggctcgactggcacccccaaaggggtgatcgtgcctcaccgcgctgtggtccgactggttattaataatggttatgttgaaattgaacccaatgatcgggttgctttcgcggctaacccggctttcgatgccagtacttttgaagtgtgggcccctttactcaatggtggggcattggtggttatcgaccacaccactttgttgacgccgccggaatttgtacaggaattagaccgttatcaaattaatatcttatggttaagcgtcggcctgtttaaccggctggcggcggagttgtctccagttttgccgcagttgaaaaacctgattgtcggcggcgatattcttgatccctatgtgatttcccaggttttacgcaacaacccacctcagcagttattgaatgcctatggaccgaccgagggtaccacctttaccaccacatatcggattgaaaccttgcccacgggagtgaccaacattcctattggtcgaccaattgccaacacgcgggtttacttactggatgagcagggccagcccgtgccgttggggaggatgggcgagatctatgttggtggcgacggggtggcctgtggttatctcaatcgccctgaattgactgctgaacgctttttggttgatccatttagtgatgtgccggatgcgcggatgtaccggaccggcgatttagctcgctacctgccggatggcaatctggaatttttgggccgcaacgatcagcaggtgaaaatccgcgggttccggattgaaccgggagaaattgaagcccgattggtggagtattcgacagtacgtgaagcggtggtgttggcgttaggtgaggggcaggacaagcagttagttgcttatgtgctggcagagtcggataacgaattgcctacccacttgcgtgagcacctaagtgcgcgattgcctgattatatggtgccggtggcctttgtacggttggatgaattcccgctaacacctaatggcaaactggatcgtcgggcgttaccggcaccgggtgaaaacgcctttgcccgtcaggtttacgccgcaccgcaaggggagcgggaaattgcattggctactatctggcgtgagttattgggtattgagcagataagtcggtatgacagcttctttgccctaggcggtcattcactgctcggcgtacgcatgattgaacagctacgccatttagggctgacgttatctgcccgcgacctgtttcaatcaccaatactggcggagttggcccaaacattggggcagcatcagattgtgacagtgccgccgaatgtcattaccccggcgaccaccgcgctgacaccggagatgttaccgctgattgatttgactcagcctgagattgatcacatcgtcgagcaggtgccgggtgggggggctaatattcaggatatctatgcactgtcaccgttgcaggacggtatcttgtttcaccacctgctggcgaaagaaggtgatccttacttgctggcctatccaatgatctttgctgaccgtggtttgctagaccgctatttatttgcggtacaacaggtggttgaccgtcatgatattttgcgtaccgcttttatctggcaaggattatctgttccggcgcaggtggtttggcgtcaggccccattgtcagtcactgaactgacgctgaactcggctgacgggcccgtcggtgatcaactggcgcaacgttttgatccgcggcaataccgtctcgatctcagtcaggcaccgttgttacgctttgtgatagcacaggaagaggatggccgctggtatgtattgcaattacaacatcacctgattggcgaccataccacgctggaagtcatgaacctcgaagttcgggcctatcttgacgaacaggatgataacctgccgacaccggtacctttccgcaatctggtggctcaggctcggcagggggttgaccagacagaacatcaccgattctttaccgacatgttggcagaagtggatgaaccgacattaccgtttgggctgaccgaggtacatcgtgatggttctcaggtcacacaggcgcaccggatgttgtctcctctgctgaatgatcgtctacgtgctcaggcgagacgcatgggtgtcagtctggcaaccctgtgccatctggcttgggcacaggtgctgtcgcgtaccagcggacaagagaaagtggtgtttggtaccgtgctatttgggcgtatggccgccggggaaggggccgacagtggcatggggctgtttatcaataccttaccgttgcggctggatatcgatgatacctcggtacacaatagcgtcaggatggcgcatacccgattagctggattgttggattatgagcatgcttcattggcgctggctcaacgttgcagtggggtacagggcggcacgccgctttttagtgctctgttgaattaccggcataatgagcaaccgatgatcccgcatgaggtaatgccgggtattgaatttctcggtgaacaggagcggaccaactacccgtttgtgctgtcggtggaggatggtggcgataccctggggctgactgctcaggtagtacaaccatttgattcagaacgagtatgtggttacatgcaacaggcgctggaaagtctggcggatacccttgaacaggccccggaaacgccggtacgggcgctaaatgttttgcctgcatcggaacgcacgttgttgctggaaacgtggaacgcgacagaaaccccctatcctgaacaacgctgtattcatcagttgattgaacaacaagcggagaaaacgccagaggccgaggcgttggtgtatgaaaatcaaacgcttagctatggacaactgaatatcagcgctaaccggcttgctcatcaactgattgccttgggtgttgtgccagagcaacgggtggcgatttgtatggcaagttcaccggcgcgggtgatagcggtgctagcggtgctgaaagcaggcggaacttatgtaccgctggatccggcttatccgggagaacgattgtcacatatcctgaccgatgccgtcccggctgagggggtgaagacaatcgggttgaaggcaatgggggtgaaggcaatagtgttggcggatagtactgggcaggctgcattgggtgagcaaatgcttgcggggctgacggtactagacccgaatatcttacctgatcagccggataacaatccgcaggtttctgccttaacttctcgccacctagcctacgtgatttacacttctggatcgaccgggatacccaaaggggtgatgattgagcatcgtgggctagtcaatctgatccgggataaaattatccaattcgacattcgccctgttagtcggatgttacagtttgcttcatttggctttgatgccggtgtctgggaaatcatgatggcattaggcagtggagcctgtttggttattccggccgaaaccgttcgtcaagatccgagtcgcctctggcattacctggaagaacaatcggtgacgcacgcttgcttgacccctgctttgttgcgagaaggggccgatttgccaacgataacaataaaaccgacattaatattgggcggtgaagcccctagccccgtgctactacgggcgctaagtcatcaagcaatcctatttaatgcctatggcccgacagaaattaccgtctgtgccaccagttggcgttgtccatcacactatactgatgtgttggttcccattgggcgtccgacagcgaatacccgtatttacctactggataaccacggccagccagtcccattgggcgcagtgggggaactctatattggtggggatggtgtcgcccgtggctatctcaatcggccagatctgaccgatgaacgctttctggctgatccatttagtgatgctgccgatgccaggatgtaccggaccggggatttggtgcgctacttaccggacggcaatctggtgtttgttggccgtaacgaccagcagattaaaatccgtggtttccgcattgagccgggagaaattgaagctcggttggcagagcacccggtggtgcgtgaagcgcgggtcgtggccttgggagatgggcaggataaacgtttagttgcctatgttgtagccgaagcggatagtggactggcggccagtttgcacactcatttgagcgcgatgttgcctgattatatggtgccagcggcctttgtgcgtttggcgaccttcccgctgacgccaaacggtaaattggatcatcaggcattaccggcaccgggagaggatgcttttgctcgccaaatttatgtcgcgccacagggagacatggaaatcgcagtagcggctatctggtgtgaattactgggcattgagcaaatcggccgacacgataatttttttgccttgggcggacattccctgttggccgtgcggatgatgaaccggatagccgctttcagtgttgacctgccgttggccgcgttgtttgtgtctccgtcattggcgacatttaccgagaaaatctgcgcacagatctgtgcacaacgtaatacgggcagtgataaattgcctgaaattaggtccatatcccgtgatagtgtcttgccgttatcatttggtcaacagcgtctgtggtttctggcgcaatttgagggagttagtgatacctaccatattccgacagccttgcgtttacgtggacggctaaacttttctgcctggcagcaggctctgaatcgcctgtttgctcgccacgaggcgcttcgttctgtttttatcacagttgatggtcagcctcaggttgaactgttaccggcggaatttggtctaccggtgaaaaaatacgatttgcgtaaagcatctaacgtggacaaacaatttaagcgtttgtgtgtacaggaagccaaaacgccgtttgatcttgctcgtggccccctaattcgttgcgcattgatccaactggccgatgaagagcatatattcttactgactcagcatcatattatctctgatgcttggtctttaaagatacttgaatcagaactggttgcactttacgcggcgggtctaaatcaacagccagatccgttgttgccattgaccattcaatatcctgattatgcggcttggcagcggcaggtattttcaggtgaaggagtacaggcacagagtgattattggcgtcggacgttggcagatgcaccggtgttacttgaattgccgatagacagacctcgaccctctcagcaatcatttaccggcggccgggtagcggtgcacattgatgccccgttggtacaggccctaaaacatctggggcaacagcacggtgccacactgtttatgacgctgttaaccgcttgggctgcattgctatcgcgcttgtctgggcaggatgatgtggtcattggtataccaagcgctaaccgcaatctgcgggaaattgaaccactgcttggcttctttgttaacacattggcgttgcgtatcgatttatccgacatgccggatgtggccacactactgcggcgtgtacggcagacgacactgggagcgcaggagcatcaagatctgccgttcgagcaggtagtggaaattgttcaaccgccgcgtagaccggagcatacaccactgttccaggtaatgtttgcctggcaagagagtgaaacagaggaatggcaattaccggaattggcggtaacgccatttgagctaggatacgatatagcgaaatttgatctgcaactggaattaacggagaaggcgggcgaaattgttggagagctgaactactcttctgccctgttcgaccatgaaaccattgaaagacaggtgggttatttgcaggctatattgtgggcaatagtgaaccagcctcaacaacctgtcacggctatcgatattttgtcatcctctgagcgggagttattactggaaaattggaatgcgaccgaagaaccgtatcctactcaggtatgtgtccatcagttgtttgaacaacagatagagaagactccggacgccatagcggtaatctatgaaaaccagacgctcagctatgcagaactgaatgcccgtgccaatcggctagcccatcagcttatcgctttaggcgtagcgccagatcagcgggtggcgatttgtgtgacgcgctcacttgcgagaatcatcgggttattggcggtgctgaaagcgggcggggcctatgtgccgttagatccagcctaccccggtgaacgtctggcttatatgctcactgatgcgacaccggttattttgatggcggataatgtcgggcgggcagcattaagtgaagacattctggcgacgctgacggtgctcgatccgaataccttgctggagcagccagaccataatccgcaagtctctggactgaccccacagcatctggcctatgtgatttacacttccggctcaaccggtagaccaaaaggtgtgatgattgaacatcgtagtgtggttaatttgacgctgacacaaattacccagtttgatgtttgcgccaccagccgaatgttgcagtttgcctcatttgggttcgatgccagtgtctgggaaatcatgatggcgctgagttgtggggctatgctggttattcctacagaaaccgtgcggcaagatccacagcgcctttggcgttacctggaagagcaggcgataacccatgcctgtttgacaccggctatgtttcatgacggcaccgatttaccggcgatagcgataaaaccaaccttaatatttgcaggagaagcgccgagtcccgcgctatttcaggcactgtgcagccgggccgatttgtttaacgcgtatgggccgacggaaatcaccgtgtgtgcaaccacttgggattgcccggccgattataccggaggagtcatccccatcggcagcccggtcgccaacaaacgtctctatctgctggatgaacaccgccagccagttccattgggcacagtgggagaattgtatattggtggcgttggggtagcgcgtggctatctcaatcgtcctgaattgacggctgaacgtttcctgaatgatccatttagcgatgaaacgaatgcccgaatgtaccgggcaggagatttggctcgctatttgccggacggcaatctggtgtttgtcggccgtaatgaccaacaggttaaaatccgtggtttccgcattgagccgggagaaattgaagcacgactggttgaacactctgaggtaagtgaagcgctggtattggcgttgggtgacggtcaggataaacgtctggtggcttatgtggtggcgctagcggatgacggactggcgaccaaattgcgtgagcacctgagtgatattttgcctgactatatgataccggcggcttttgtgcgtttggatgcctttccgctgacccctaacggtaagctggatcgccggtcgctgccagcaccgggggaggatgcctttgctcgccaagcttaccaagcgccacaaggggaaattgagatagcattagccactatttggcgcgaattgctgaatgttgaacaggttggccgacatgacagtttctttgccttgggcggtcactcgctgttggcagtcaggatgatcgaacgtttacggcgtataggattgggcctgtcggtgcaaacgctattccagcatccgacattaagtgtattggcccaatctttggtgccgcatcgtgaaattagcgtgcctgataacggtattaccgcggataccactgtgctgacgccagcaatgttgccgctgattgatctgactcaagctgaaattgatcgtattgttgagcaagtaccgggtggaattgccaatattcaggatatctatgcgttgtcaccgttacaggatggcattttattccaccatctattggcaaatgagggtgatccctatctactgattactcaacaggcttttgctgatcgacctttacttaaccgctatctggctgcggttcaacaagtggttgaccgccatgatatcttgcgtaccgcctttatctgggaagggttgtctgtgccggctcaggtaatttgccgtcaagcacctttgtcagtgacggaattgacgctcaatccggctgatggagcgatcagtaatcaattggctcaacgttttgacccgcgtcggcatcgtattgacctgaatcaggcaccgttattacgtttcgttgtggcacaagagagcgatggtcgttggattttgctgcaattgttgcatcacttgattggcgaccataccacgttggaggtgatgaacagcgaagtacaggcttgcctcttggggcaaatggatagcctgcctgcgccggtcccgttccgccatttagtggcacaggctcggcagggtgtcagtcaggcagaacatactcgcttctttactgacatgttggctgaggtggatgaaccgacgctgctatttgggttggcggaagcacatcatgacggttcacaggtgacggaatctcaccggatgctgacagcgggactgaacgagcgcttacgtggtcaggcgcggcggttgggcgtcagtgtagcggcgctatgtcatctggcttgggcacaggtgttatcgcgtaccagtgggcaaacgcaagtggtgttcggtacggtgctgtttggacgtatgcaggcgggtgaaggatctgatagtggcatggggctgtttattaacaccttgccgttgcgattggatatcgataataccccggtgcgggacagtgtacgtgcagcccatagccgactggcgggattgttggaacatgagcacgcttcactggcgctggcgcaacgttgcagtggcgtagagagtggtacaccattatttaatgcgctgttgaactaccgacataatacccagccggtcacaccagatgaaatcgtgagcggcatcgaattccttggcgcacaggagcggaccaactatccatttgtgttatcggtagaggatagtggctctgatctagggctgacggctcaagtggtgcaaccattcgatccagaacggatatgtggctatatgcaacaggcgttggcaagtttggtgcaggcgcttgagcaggcgtccgatatgccggtacagcagttagacattctgccggcaactgaacgcacattgttgttaaaaacttggaacgccactgaaacagcctatcctgagcggttgtgcattcatcaactgtttgaacagcaggtggaaaagaccccggatgccacggcgctgatacatgaaaaccaatcccttagttatgtggaattgaatgctgatgctaaccgattggctcaccaacttattgcgctgggtgtagcgccggatcagcgggtggcgatttgtgtagcaagttcaccggcgcggatagtggcgctgttggcggtgttaaaagcgggaggcgcttacgtgccgttagacccggcctatccgggtgagcgtctggcccatattttgactgatgctgaaccgattattttattggccgatagtgttggtcgttcagccttaggtgagcaaatgcttgtggggcagacagtgattgatccgcattcattgcctgatcaaccggataacaacccacaactatctacattgacctcccgtcatctggcgtatgtgatttacacctctggttcgaccggcacgccaaaaggggtgatggtggaacatcgtgggttagtcaaccttattcaggataaaatcgcccgatttgacatttgccccgctagtcggatgttgcagtttgcttcatttggttttgatgcgggtgtctgggaaatgatgatggcgctatgcggtggtggtgctctggtcattcctgatgaatctgtccgtcaggatccacagcgcctttggcattatctgcaagagcagtcagtgacgcacgcctgtttgaccccggctttgctgcgggatggggctgatttgccggtgataacggtaaaacctaccttgatattaggcggtgaagcgcccagtgtggcgttgcttaaagcgttgcgcaccaaggccacggtattcaatgcttatggtccaacggaaatcaccgtttgtgcaaccagttggcgttgcccgccaaactataccgatgtgttatataccgatgtgttagttcccatcgggcacccaacagccaacacctgtctctatctgctagatgccctcggtcagcccgtgccgctaggggcagtgggtgaactctatattggtggcgtcggtgtggcgcgtggctatctcaatcgtcctgaactgactgacgaacgtttcctggcagacccatttagtcatattgctgacgcccggatgtatcgaactggggatttagttcgctatctgccggatggcaatctggtgtttgttggtcgtaacgatcagcagattaaaatccgtggtttccgcattgaaccgggagaaatcgaagcccggctgacagaatactccggggtgcgtgaagcgcgggtactggccttgggcgacggacaggataaacggctggtggcttatgtggcggcggaagcggatgacgggttggttaaccgtctgcgtgaacatctgagtggattgttacctgattacatggtaccggcggcctttgtgcggctggatgcttttccgttgacgcctaacggcaagctggatcgccgggcattacccgcaccgggggaggatgcttttgcccgccagatttatgctgcaccgcaaggagaaaccgaaaccgcactggctgctatctggcgtgaattactcggcgttgagcagatcagccggtacgacagcttctttgccttggggggccattcgttgcttgcggtacggatggttgaacgtttgcgtcatttgggtttaacgctggcagtacgtgatctgttccaatccccgatattgtctgaactggcgcaaacattaaggctgaatcagaccgaaaaagtgccggccaatgtgattacaccggccaccacggtgttaacgccagaaatgttaccgctgattgatctcactcagcttgagattgatcgcatcgtcgaacaggtaccgggtgggatagccaatattcaggatatctatgccttatcgccgttgcaggatgggattctgttccaccatttactggcagacgaaggtgatccttacctgctagcgggtcaaatggcctttgctgatcggcctttgctggatcgttatctggcggcggttcagcaggtaattaaccgtcatgacatcctgcggaccgcctttatctggcaaggattgtctgtaccggctcaggtcgtttgtcgtcaggcaccgttgtcggtgacggaattgacattagatgtggctgacgggccgatcagcgaccaattagcacaacgttttaacccacgtcaatatcgcctcgatttgggtcaagcgccgttgctgcgttttgtggtggcacaggaaagtgatagccgttggattgtgttgcaactgatgcaccatttaattggtgaccataccgcgctagacgtgatgagtaatgaagttcagacataccttgacggacagggcggcaacctgccagcgccggcacccttccgcaatctggtagcgcagtcccggttagggatgagtcaggctgaacatacccgtttctttactgaaatgttggctgaggttgatgaaccgacgttaccgtttgggctggcggaagttcgccatgatggctcgcagatgactgaatcgcaccggatgttgacccctgagttaaatagcagtttacgtggtcaggcgcggcgattgggagtgagcctggctgccctatgtcatctggcttgggcacaggtgttatcgcgtaccagcggacagcagcaagtggtatttggtaccgtgttgtttggacgcatggcggcgggtgaaggggctgaaaatggcatggggctgtttatcaataccttgccgctacggttggatgtggatgataccccggtacgagaaagcgtacaggtagcgcatcaccggttggcgggattgttggaacacgaatatgcctcgttggcactggctcaacgttgtagcggggtgcagggaggaacgccgctgtttagtaccttgctgaactaccgacacaatatagcttcggtggaatcgaatgaaatcatgagtggtgttgaatttctcggtgcacaggagcggactaactatccgtttacgctgtcagtagaagattttggtgatgcactggggctgacagcgcaaatcgcccagccgtttgatgccgagcgggtgtgtggttatatgcaacaggcgctggaaagtctggtgggcgcactggaacacgccccggaaaccccggttcagcggttggaaattttaccggcagtagaaaggaaactgttactgaaagtcggcaatggcccgcaaacggcctatcccggctcgttgtgtattcatcatctgtttgaacagcaagtggcgaaaaattctgaggctacggcactggtctatgaagaacaggctctcagctatgcagaattgaatgcatgtgctaaccgactggctcatcagttaattgaactcggagtggagcccgatcaacgggtggcgatttgtgtcacgcgttcaccgtcaagagtagtggcgctactggcggtactcaaagcgggtggggcttatgttcccttagatccagcctacccgggtgaccggttagcttatatgctcacggatgcggcaccgtcagtggtactggcagataatgtgggtcgtactgctctaggtgaacaggcgcttaccgcgttaacggtacttgatccgaatgttctgcctgatcaaccggataacaatccgtacatcccggcgctgacctcacgacatctggcgtatgtgatttacacttctggttccaccggtacaccaaaaggggtgatggtcgaacatcatggcttggtcaatttaatttgggagaaaatcacccaatttgacattcactcggatagccggatgttgcaatttgcttcatttggtttcgatgccagtgtctgggaaatcatgatggcactgtgtgggggagctaccctagacattccggttgatagcgttcgtcaagacccgctgcgtctgtggcgttatctggaagaacggcgggtaacacacgcctgtttgaccccggctctattacgggatggggccgatttaccggcgataacgataaagcccaccttgatactgggcggagaagcacccagtgcggcgttgttgcaagcattacgtggtcgggcaacgctgtttaatgcttatggcccgacagaaatcaccgtctgtgcaacctgctggcgttgcccgccagactatactgatatgctgatccctatcgggcgtccgacagcgaatacctctatttatctcttggataatcagggccagccagtgccatttggagccgtgggggaactgtacattggtggtactggtgtcgcgcgtggctatctcaaccgctctgatttgacgactgaacgttttctgacggatctgttcagcgatcaaccggatgctcgtatgtaccgaaccggggatttagcccgctacctgccagatggcaatctgctgttcgttgggcgtaatgatcaacagattaaaatccggggtttccgcattgagccgggtgaaatcgaagcgcggttgatggagtattctgatgtgcgtgaggcgattgtattggcactgggagatggtcaggataaacggctggtggcttatgtcgcggtgctagaggataacgagctggcaagccaattacatcgtcatttgagagccttgttgcctgactatatggtaccgtcagcctttgtgcgtctggacgcctttccgttgacgccaaacggcaaattggatcaccgggcattgccggtgcctgatcagaacgcctttgctcgtcagatctatgaagcgccacaaggagaaacagagatcgccttggcggctgtctggcgtgaattactgggggttgagcgaattggccggcatgacaacttctttaccttgggtggacattcgctgctcgctatgcggatgatcaatctggccgcagaacgagggttgatttgctcattgaataatctgttccaattcccggtgctagcggaactggtggcagagatcacctcagattcgctgtctcaatcgcaaagcagcgccataccggtgcgaccggatggaaccgaaccgccgctcttcttcgtgccgagtggcatggatgactattcctatgtttttgggctggctcagcatattcaggcggattacccgatttatgcgctaccttggccgtctatcaatgaggagcagacgtcgaccattgaagctctggcgaccagaatgatcacctttgtgaaggccgtgcaatcagaaggcccgtatcggatatacggctactcttctggcggtatactggcttatgccattgctcagcaactgctgcatgccggagagacagttaatttcttggggctaattgatacaccggctccgcactgtttcaagacacgagttgatcaacctaaacttcagttccttgctgaattggcaaggcaatcagtggatgaacatcctcaagagattgccgcattgcatcagaaaatggatgaacttaatttagtgcaatttattgccgcagcgcaggagctggaattatacccatcaaatctgcgtcctgacttaattgccaaacgttggctacagatgggaaattatgtccagatggtcaaggattatcagccgaaagcactggcgataacactgcatcaattctatgcaatggaatcttatccacagatcccgtttgttaccgatgttgcgctacagtccgtcacaatggaaccgtcgttaggttgggaacagatagttcctgactcttcgctacagttaacctcggtgccgggggatcattttagtctgatggaagatagtgaaaataaaactattttagctaagaccttaagcatggcgctggcaatgaattgtgaagcggaggcgctgtaatgtcagtgatattgtgggatgaaaagctatatttaaacaaagatagttaaaaatcaatttgtccggttaaaagtttttataatagccggacaatcttactgaatataggcaccgaatgttaatcacttcggtgccttatttttttatcaaatcctacacctgatgctagtggagaaaccctatttttcagcattgtctacgcttgtaaacaatgtttacacttttaaacaactcttacacttttaaacaattattacacttttaaattaatttaaacactcttaatgcttcaatgtcgaatataatgggagttattttctgtcatttacacacttataatcctatgaggtttaaaataatgatgattatgtttctatcctttaaagcagaagatgctctgtgaaaatgtgagtaataggagttcttattaattcatcgtgctcgattattctcatctgtatgactgaatttattctcattcgcattaacttaagctgataatcatgcttatacccgtcatctttcaagttgcttctttgttggctgtactcactcaccccggtcacatagttatctatgctcccggggattcgctcccttgccgccgcgatgcatcttgaaatccatagggtatattttacttgttccactaaatattttacctgttgtgccgtgggggtgaaaattattttggctgttgattatcttattaattaattgaaaataaaagataatttaatatttaaaacatttgtttgacctatatggatgatatgattcaccggccgattaatatttttaaaacaagttcaatttttatgaaaataaattcaatttcgtttatatttcgttgatatattgtttattcaatctcttgattaagatgttttatcatctgattgagatgaagcaaaaaatgcttttagataaaaaatgacttgattttatataaatctgtttagagaatccctttacccagaaaaatagcctgcctgataaatccatttatctattgcagtgggtgttgtcggttttctcttattttccgcttggttagtgcctgctttgaaatatctgaatccggttttgtttctgaaatgcgttgtggcatgaacatcatgtcactcattctattttattgttgaggagtcacttatgacccatagttttcaaaacgagatccctaaatcgcgtattaatatcaagttagatttacatacaggaggtgcgcagaaaaaagttgagctgccgctgaaattattggtcatgggggattatagcaacgggcaggaacatctccctcttggggaaagaaaaaaagtggctatcaataaaaacaattttgatagcgtactggctgaattcagtcccgcgattaacttgacggtcaaaaataccttggccggagatggcagcgaggagaatatcgcccttatttttcggcaaataaaagacttcgagcctgaacaaattgctcgtcaaatcccgcaactgcgggccctgctttctatgcgccatctattgcgcgatctgagatctaacctgctcgataacaccacctttcgccgggaactggaacatatcctccaggatcaagcgttaagcgatgagttacgggctgaactggccgcactggcaccaaaaacgatttgattattacggtatatatcaggagataggattaatgactgaacaacaaaccgctgcggcggcgataacgactcacgccgaaggcagtgtttatcaatcgttatttaagaaaatcaatttacagccggtggagcagttaagcgatattgatcgctttcagagcagtgatgcgctggctgatgtgacggtagacgagcgggtcacggcggctgtcagcgtttttctctctgtgctgaaaacctcggcgcaaagggttaaacggctggataaggcattattggataaccatatccgcgagttggacgagcaaatcagccgtcaattggatgtggtcatgcatcaccctgagtttcagcaggtggaatctgcctggcgcggcctgaaattcttggttgatcgtactgattttcgtcagaacgtcaggattgaagtgttggacgtcaccaaagaggatttgcggcaagattttgacgatgcgccggaaattgttcagagcggtttctatcaccacacttacattcaagaatacgatacaccgggcggtgaacctatcggatcggtgattgccaattatgaatttgatgccggcacgcaggatattgcgctgttgcgtaatatcgccaaagtttcggcggcggcgcatatgccattcattgccgctgctggtccggctttttttggcaaacaaacgatggatgaagtggccgcgattaaagatatcggtaactactttgaccgcgccgaatacatcaagtggcaagcgttccgcgacagcgacgatgcacgctatatcggcttgactttaccccgcgtgctagggcgtttgccctatggcccggacaccgtaccggtgcggacttttaactatgttgaagaggtcaccggtccggatcacgataaatatttatgggccaacgccgcctttgcttttggtgcaaacatgatcaagagctttgtcagtaatggctggtgtgtccagatccgcggtccaaaagcggggggagcggtgactgatttgccgatccacctctacgatttggggaccggtaatcaggtcaaaattccatcagaagtgatgattccagaaacccgcgaatttgaatttgcgaatctgggcttcattccgctctcttactacaaaaaccgggattatgcctgcttcttttccgctaactcggcgcaaaaaccggcattgtatgacaccgatgaagcgacggctaacagccgtatcaatgcgcgtctgccctatattttcctgctgtcacgtatttcccattatttgaaactgattcaacgggagaacatcggcaccacgaaagatcgacgtctgcttgaaatcgaactgaacaactggatcaacaccttggtaactgagatgaccgatccttccgatgatttgcaggcatctcatccgctgcgtgaagcgcacgtcattgtcgaagatattgacgacaaccccggtttcttccgggtcaagttgtatgcggtgccgcattttcaggtagaggggcttgacgtcaatctgtcgctggtttctcaaatgccgaaatccaaaggttaacaataggggagcatcatgaaaattgagcgcccgctatgggtaacaggaaccatcttgtctccccaacagtttcagcagcaggctcgttgggaggcatatgccaatgagtcgattgctcgtctgggactggcgcatccttggggcgtgctgaccgcggtgtttgatcaacacaccttagcgttggggcagttgaaagcggatcacctgtgtgtgcgttttgccgatggatcgctgattgacaccgatcaggccgatcgcctaccgccggtgctggaattggccgccgttttgccgacagatgcgcagcaggtcacggtcttactggcattgccgtacacttacgccaatggcggtaactgtcttaaacccgatgaacgcgccgatcgtccggtgcgttaccagcaggagtgggtaccggtacaggatgaattcagtgatcgcagtgaatcgatggcggttgctcgttatgcgatatcgctgcgttttgacagcatggaaaacggtcaatatctcacctgcccggtggcgcgtctgttgcgcgatgctcaaggaaaatggatttttgatgagcaatttgtgccgccattactgcgtcttagcgcacatgccggttcgatagctcggctcgatcagttgttgacgcagttacgcgctaaacaggctcgattgatggcaatgcgccgagagagcaatgagcggatggcggattttgcggtggcggatgtgtcgttgttctggctgcttaatgcgcttaacagttatgaaccgatattgagtgattttaaggcccatccagatgtgcatccagaactgttctaccgtgaagcggtaaggctggcgggcagtctgttgaccttttcactggaccataacgccagcgtgatcccgcgttatcagcacgataatttgacggcggtattcccgccgttatttgacttgctgagacaattgctggagatcagcttgccgtcgcggatggtgacgattgagttgaagaaaccatcggaacagcagtggatagccactctccacgatgcccgtttatgtgaagcggcggatttttatctctctgtccgctcttccataccggcacaccagttgtacacccggttcccgctgttatgtaaagccggtgcgccggatgaggttgatcggatgattagccggtcattaaccggcatccccttagtcgcacttagccatgtcccggccgcgatcccgttgcggctggagaaccagtactttgcccttgatctcacccatccggcgggcaaagccatgctggcggcagggagctgtgctttctacgtgcccggagtactgggcgatattcagcttgaactgtttgcggtattgaggacatgaataaatcacctttatcaactaaaaaatcgccaccggatatcgatgccttgttacagaacagctacctgttggtggcagagctctgtcagggcgcatcggtggaacaggcggaggtggtgtggcagcactgcacccgcgagatagaacagacacggcaagcgctgagtgatgcggatgttagcgaatccgcgataaatcatatcagctacgcccagtgcgccctgctggatgaaaccgtgctggagcgagcgccggaacagggatatgcagcctggcgggcaacatcattacaggagcatttctttgataccgccgaggccggtaaccagttgtatgaacggatgcgtactgtactgaatgaaccggccgccgatcgggcagtactgtaatgttccggtgaactcaccttgcgtggtcagataaccacaaaatgggatgttaacggaagggattctcaggccagggcaacagctcattcaaccgattgttcggccagacaggcagccggctgaggacatcacgtaaccagacccagggctcatgtccgttggctttggccgtttccagcaggctcattatcatggccgcccgttgccccgcggccagtgaacccgcaaaaagccagttctttcggccgagcgccacaccccggaccgcattctccgcccggttgttgtctatcggcacccccccgtcatccagataacacaccagcgccgaccagcgcttcagcgtgtaatctatcgctttgcgtaaccccgagttgggggccgtttgggtctgcatcgtttgcaaccaggaccggaactcattcagccacggccgggcataacgctgccgccactgacgccgtttatccggcggccggtgtttgatttttcgctccagcttgtacaggtcacgaatgccatccagcgcctgtttcgccaccggactttggctcgctttgtattggtcaaagaatttgcggcgggcgtgagcccagcaacccgcttcggtgatatccgcccgggcatgcagtgcgttgtaaccggcatagtcatccgtcaccaacgtgccgcccgaccagtctttcagcaggctctgggcataacggccgctgcggccgggatgcagctcatagtataccactgccggcgaggtatcggggccggtgacagacgtccacaggtaagctcgctgggtctggccttttcccggggccagtatcggcaacggggtctcatcggcatgcagcaccggggacgtcagcagcgtctgcttcagggcatcggctaacggttgcaacgccaccgccacctgccccacccagtccgacagggtgctgcgggccagggtgacaccgctgcgggcatagatttgctgctgacggtagagcggcaggtggtcacgatatttagcgaccaccacctgagccagcaaccccggctctggaaggcccttttcaataagatgggcgggctgggctttagcatgcacacactgacagcgcgcgcagctgtactgcgggctgatatagcgccggacgataaacgtggccggacggtattccagtcgctcactgatttcatcacgcaaaaagcgcagggcatgaccgcaatccgggcagctctccgtctccggcgccagccggatatcttcacggggtaaagtcgccggcaaaggctgacgtttaggctgggccggggtcgcgttttccttgatatgcaggcgtgacagccgggtttccagcaccgcgatatcggtatcggcatcttcctcaaactgactgcgtttgggaccggcaggcagggtttcgctgtgcgcgccaaaacgccagcgttgcgcctgtttcagggcctcttccagctggcgaatataatcaccttgttgctgaagcagcgccagtgcccgcaggcggaactggccggggtcatccagcgcgattaagtcattgagcgtcatgccgacagtgtaccggataattccccgtcgttatccggtaaaagtgtgaccggggtagcggaattagtttcgccagccggacaggtcatctccctcgacctgttgccagtgaatgccgcggatgagccagtcaaactgggcgggcgtcatcacccagctgcgctcgccctgcttcggccagacaaaatgggcccggtgcagacggcgggtacacagccagacgccgtgtcggtcccagcgcaacaccttgagacgggagcgggccttgttgcagaaaataaaagcggcttcgtcctgccagcgcaaattcagcccctccaggtgctgggtcagggcatcaatgccccggcgcatgtcgacgggctctcgcaccagaaagagctgttgcggtttcagcatcgggtcagtacccgcatcacgtcaggcaacagcgtcaatggacaggcgatggcatagccgtctggggtatgcagggtgacggtgcgcgcgtcgtcaggctggagtgaaaccggtaagagggcgggcagtgtctggctgagaggttgggggatgttgttactgtcggcaatccagtcgcggaaagcggaaaaactcagctgatgctgttcgcaatactgttttcgggtcaggtcactgtggcgccattgggtcacatggtgttgtttttgttccggggtatatcggctacggctcatggtgtcagtctccaggtgaagataaggaagcggtagcgtgcatgggccggagaggaagaacaaggtgagatgaccggacgtttacgcagtactgacctgttttcaccgcgtgttgctgttgggatttcagggaaagtgtcaggaggatacctcattgatacgtgaacaactggtgactcgcttgagtcaacaggtcgtacctttcggcacggctcagcaatcaccggtgttaaccaatgtgccattgtcccatctcaggctacgctccatcgtcggccaactagccgtggcgatctctgggatggtcatcgtgttgttcggtgtctggtgggggttaggtcactatctggcaacgctatttccggggttggcgagatgagtgtcatgttgcgacgggtgttatggggatggggggccgggctggcgctgctgctctgtctggtctggttgcccttatcgccggtgggccggtgggtgggggcagtcattatcctgctctgtacgctgatggggctgttttatcgcgggcgttctcaacggcgagagcgccttaacagcctgtcagcggtactgccgcctgaaagtaatcgcctgccggtggtgttggtatatagcgacattcaggacagcttgtttggtaatgaactgttgcgtcagacgccacaaggctattggttgtgcttaccgacagggacttctctgtctgacgcgatagttagcttgctggccgcccggccctcttggggcggtcagttaagtgtgatggcggtgataaacccgcagcaataccgtgacgccgccgtactggctggttgggtgcgagaactacgctggcagttatctcaagcgcgtcaacgacatgctatcccgctgcctttactgctagcgggttacgtagccgggccgtcccgacaacctgacgattcaccgtggtttgagtggcaatcaggacgaaccacggtaacggcttggcgcgaaggtgcctcttttcaaccactcgcggattggttggaacagggcacgctggcagaacagatggcacgttttcagtgtggggttgagttgactggctgggctgattggatgaaggcgcatgtattgcccgtctgcctgaccccggaagatggcttatctccttgtccgccgctggcgatggtattgaagtttgtaccggcattaccgcattgggtaaccggccatgtctggcaacagtggttacaaaccaaaacggcgctgaacagggcgggcgatccgatagccacatcggctaccgctacattgccattcccggacagtgtagtgcggctgctgcccaccagtgcgctacaaacagcgctacagcgggccgtggggatagctctggggctgtttctgctggcgggcataacagcgctaggttgctcggcctggcataaccgacagttattgcgtcaggtggagagtgacctgctgcattaccggtctattgccgcgacggatgagagccgcaaggcacaggcggtggcggtactgagggatgatgccgatcggcttgagaagtatcaccgggatggcgtgccgtggcgtctgggattggggctatatcaaggagcacgattacctccgccattgcatgcggccattgccggttaccacgctaaaccgagggagaaaacgccggtaacgccgggggaaccacagaccatcagccttaacagtctggcgctgtttgatgtgggacaggcgaaactgaaagcgggttcgaccaaagtattagtcaacgcactaatcaacatccgtgccaaaccgggctggatgatcctcatcgccggacatactgattccaccggtgatgccacgaaaaatcaggtgctgtcactggcacgcgccgaagcagtacgcgattggatgttacaaaccagcgacatatcgccggcttgcttcactgtacaaggcaagggagcaacgagtccaattgcgactaacacaaccgctgcggggcgagctgccaatcgcagggttgaaatccgtctgataccgcatgtggccgcctgtgcgcgaccgcagaaagtaccggacaccttatcaacaacgtcgccgctaccggcgacatcacttaagtaacaattaggagtaatcattatggcgattcccgcttatttatggctgaaagatgacggcggtgctgacatcaagggctctgtcgaggtacggggccgggaaggtagtattgaaattgtggcgttggaacatatgttgcacatcccgacggacaacaataccggcaaactgacggggacccgtgtgcatgccccattggtattcaccaaagaggtggatgcatcaagtccctatttgtataaagcggtcaccaccggccagaccctgaaatctgctgaaatcaaatggtacaacattgacgacgcaggtcaggagaaagagtacttcatcacccaactggacaacgtgaaggtggtgaaagtggcaccgctgatgcatgacatcaaagaccctaccaaagagaagcacaaccatctggaacgcattgagttgcgttacgaaaaaatcacctggacctacaaagacggcaacatcattcatgctgatgcgtggaatgagcgcacgacggcgtaacaagcttggcagacggattaatccgtctgctgttgtttcattttttgcgtaattgcgggggcgggaggccccgcgataaaaaactgaaaaccagataaatcatgaccttatgggcctcggtatacggctatgggcggtagcgtacccgcacgactgaggaataatcgggagaaaatatgacgaacctaacaccgatgatcatctttgatcacagccgttacagactaaaagtgtggcgcaataaagcaccgctggatgtgctggcctttaccggacaggaagccttaagccagccgtttcgctatgccattgaattcaccagtgcggagaaagggattgaaccggcacagatgctgatgcagcaagcctcatttaccctgacctcgcctgcgatcaatccggggatacggtggatgccggttgtgccgccggagccgctgcgctcggtttacggggtgatcagcggctttaaactgctctccacttcgcgggacgaaagccgttacgaagtgacgctggagccccggctggcgctgctggcgagaagccatcaatacgctatttaccaaaaactgtccgtgccggagattgtggagaaaatcctgcgggagcgacatggttttcgcgggcaggacttcctgttcagtctggcgtacagctacccgaggcgggaacaggtgatgcagtatggcgaagatgacctgcgctttatccaacgcctgctggcggaagtgggtatctggtacaaagtgacggcggatgaccggttaaagatcgatgtggtggagttttacgacgaccagcgtgactaccagttcaatgtctacctgcctgcccgcaatccgtcaggtatgcacggcgaggaggacgcggtggtgtggggcatggagaccgcgtatcaggtggtggaggggaaaattacgactcggaattatgactaccacgatgcccggccgtatcccggcttgaacaccgaggaggatgtgacacggggcgatcgaacgacttatggcgaagcgtaccattaccgtgacgactaccgaatacccggtgatcgttacgcctatcaaccggagacggaaagcggggtgttttatgcccgtttgcatcacgaacgttacctgaatcaacgtattcgcctgcggggaatgaccacttccgctacgctggtgccggggcaggagttgaaagtgaaaggtgacgccccggaaacgtttcgcaaaggggcgatcatcacccacatcaccaacagtgcccgccgggacagcagttttgagatgacattcacggccattccctattccgagaccgtgtgctttcgcccggagcgggtgccgaaaccggtgatggccggcacgatacccgcgcgggtgagcagtaccaaagtgaatgatacctacggcgatatcgacaaagacggcttatatcgggtggcgtttaactttgaccgggagaaatggccgcaaggcggcgaaagcttgtgggtgcgtctggcgcgcccgtatgcgggagagaactatggctttcactggccgttgctggaaggcactgaagtggcgatcgcctttgaagggggcgacccggaccggccctatatcgcccacgcgttgcacgactcagtgcacccggatcacgtcaatctctacaactacaaacgcaacgttctgcgcactccggcgaataacaaactgcggatggatgacgaacgcggtcgggaacatatcaaactgagtaccgagtacggcggtaaaagccagttgaacctcggtcatctcgttgatagccagcgcccacacccagataaacggggagaaggctttgagctgcgaaccgacgactggggagcaatccgggccggtaaggggttgtttatcagtgcggataaacaggcccgggcgggcggcgaggtgctggcgatggaggcggcgctgaatcaacttcaacaagcgcagaccttaaccgaggcattatgcggcgcggctgaaatggctaaagcggaactggcggatttgcagcaacagaaggcgttgttaagtgaaacattagccgagctgaaaaaatccgcgttgttactctccgcgccagaagggatcgcgcagacgacggcaaaaagcctccagttggcggccggggaaaatattatcgccaccagtgggaaaagtaccgatttcagcgtattgaaaaaattcacggtagcggcaggtgaaaggatcagcctgtttgcccaaaaactgggcatcaaactgtttgccagcaaaggccgggtagagattgaagcgcagggtgatgagatggggctggcggcactgaaagatatcacggtgaatagccatgagggcaaagtgatcatcagtgctaaacaggagattttgttggttagtggcggtggttatatccgaatagggaatggtcaggtggagtgtggtgcgcccaatcacatcatccaacgggcggcagtgtggcagaagtttggcgggcagagtgttagtcagatggtttcccaacgtgaaacagtggatttttccgtcacaccgcaggtgctctggccttttgatgatatgccggtgaaggatcaacatgcctttttgcacaatcatgacgatagtcagcactcttcgataacgggtgcagacggtaagacggctaaacagaagaaattgggtgtggaagcaataaagttttatttaaaagaaggtaaggagtgattatgactgattcatcagaaaaagtggttgtttatcctgtttatgatgagcatggcaggttgtattacccgctagtgagtgcgcccagccataaggacctgacggcgatttgctataaggtgcctaaccgggtgatcccagtgatttttctgcccggcgtgatggggagtaatttgcaagatcaatatggaacgtcagtctggcgtttagacggcatatcgagcaccttggaatggtttattagaggagcagaaacacgaaaaaaattgcttgatccggaaaatactgtggtcgattcgcgtggaaaggtagatgacaatcataaagaaggccccaaatttccttctcgtcaagagcgaggttgggggcaggcatcttatatgagttatggagaatttttaccctggctccaggctgcgttggatgatcaggatgagttattgtttaaccggttgaataagacaggagaactgaccctgcgccagaaactggagtttatggatctacaggcggaaacgggggaagaaaagcttttatcgaaagagattaaactgagttatcaatatcagtttccggttcatgtcatgggttataactggctccagtctaatgcggattccgcaaatcaactggctgagcatcttattgatattattacacactataaacagcgtggtcagccctgtgaaaaagtgattctggtgacacactcaatggggggactagtggcgcgtcactattcagagaaattggagggaagtaagaaaatattaggtattgtacacggtgtcatgccgacctatggcgcgccgacggcttataaacggatgaaagcgggtgaaggggggggagtcggactggttatcggcagtaatggcgccaagatgacgccagtgatggcgcaatcaccgggaccacttcaactattacctagtttgagatatggcactgggtggttgcagattaaagatggtaagacactttataccttacccaaacgcgatccttatgaagaaatctacttgcaacgtgataagtggtgggggttatgtgaagatcgtctaattaatccgaccaatgagaaaagaaatccggtagtaatgcaggcagattggaaaaaatatactcatatactgtctcgtgtagtccaaccttttatcgaagagttaactggttgttaccacggcaatacctatgccttttatggtaacagtaccgaacacctctcttacggcgtcgtgaggtggactcgtagaagttatgttgaccggggagatgatcctaatctggcatttaatagaccggtatatgatccttttaataatcacctttccgatacacgcatggtgggatattccctcgacccaaacaaacccgatgaccatagccatttaagagcttttattcttgaaaagccgcagcaacccggtgatggaacagtaccggtgcagggtggaaagtttaccgctggagggctgcgttcaatattgggagcggaggttgatcatgagcatgcctataatactgataaaacccgtttttttactctgcgggcaattatcaaaatagcgcaattagttaaacaaacttccttggcttatcccgatgaatagaaaaagagtattaatcattattgcaattgtcagcttgttggtggtggtgttttacgggttatggcaacagttacagccttatccccctcatactatgttaaatcagaaggaaaaattagccgtggataaattattaacaaacttacaaacccgttgtattggccgatatttggttgatttgccagcggactacaataacactgtaaatatggctagggtaaatgatagttgggtagagactcaacggctctatttacctgcttttgaacagcgtattcagttacgggaagaagcattacggcaaacaaaaacagtgaatccggttaatatgccctatttgaaaaatatctaccgcttacctgagggaatgcaagggattatttttgaacgtgtgcaagatcagagtgtatcggatgcagcccgagtattggaagctcatttgtacaataatggtgtggcgattaaagtagaaatgaaagtttcaaatgcttctgctgcacgttatgacaaagggaggcaaacttttcctgatatttatgataatgatgtgccagagaaattggttgagctgaaaaatttattatcccgtatacaaggacgtaaggagacggaaatacccactaccgctgggagttgtattcccaatgcgtttattatcgataatcacagggataaggaagatattggttcattatataaaacgaacccggataattatttgaatgtgaggatacagacggataactttatccgggaaaaagacagcatgctggaacgcctcggtgtaattaaagcgagtctgtatcgaggcagcattttccgtaaaggagtgaggaaaattaataagttggataccgaagagttgctgttggtggggcagcagccgaatagtgatgatcctcgttatcagtttacattactgacaaatgaaaaaactggcggaaaggaaacaccggtgtttgatttaacggtggttaatgatgaagaaacaccaacagcctatactcagaatgaaatcgtggcattttgggatgcgattagtcagaccgtcagggttagacccggtgcttttaaacggcaataacatgcttcaaataaaaccccttatagggatgtaagggttaataatcggaatggagaaagaagagcagatacgagaacagcgattttacgttctgctattgaaacagtacaggcggtgaaaattgaataggaaaacgaccttactgactttagcggttatttataccttgtggtggcatatgcctgtattttattacccgattttaactgaaaaggaaaagaaaatgacaactgaaatgttatcaaatatgcagacccgctgtgtgggccgttatttgatagatcttcctgctggatttgacaatgttgccgatcgagggatatttattggtgatgcgcaaatagaaaccgagcgtttatatccacctgcatttgaacagcggatacagttaagagaacagaagttaaaggaagctaaaactattgatcctaaagatatgccctttttgagaaaagtttatcgccttcaagataatttgaaaggtgtgattttcgaaaaaaacgaagatattgacattccgagctatgcgagggtattagaagctcacttatataacaatggggttgcttttactataacaatgaaatttatggatttgtctgatgaaaaatatgctcgtgatagagccggttttatcaaagatggtttttctgaagataaattaaaggctacagatagaacgatgatgaaaatgaggaacttattatccagaatcagcggccgaaaagatacagaaatacctacagaggcaggtacttgtattcctgatggttttattactggcagtcgtgatgagaaagaaaatatgacctttatctatgagcgaaatgaaagtgatcattttacttttagtattgagatattgaatgatcttcaagagaaagaccatatgttagatcgtattgtcagtatggaaggtgtattactggctatgcatactaagctaataaggaaaggaaaacgggaaattcatggcacttatacggaggaaattttagcaaaagtgccgacaaaagtcatcgatcaaccggaaattgaaatcccgggatatgcatttaatttgattgcaaatgaaacagccggtgattataagaatccttttgttaatatcgaattagtgaatgatcggtcatccgcaacgccgtacagtgaaaatgaactgataacgttttgggatgcggtaacgagtacttttcgtaaaaggcccggcgcttttaaacggcaataacatgcttcaaataaaaccccttatagggatgtaagggttaaccgttagcggaaggagaaacccgatgtttaaagaaataaccagttagtggggttcgatgtgattagttttggtttttggggcttggcattatacgcctatgttttcttattattctacacctggccgataattgtgatgcttgatgtatctgccatttgtcgaataaagaaatgcattaaagataagaaatactggcgtgcgtcattcttgatttttgccgctgtattaatgagtggctcccttatcttcttcatggtatggataggtttatatggttaaacggatgaggagataattatgtttatcagtcatatcactgatcaaagtagaatcgtaagcgtgacagcattaacgttctataataaagacaaaccggttaaattaatcggtggcctgattttttatttaaacgcgaaacagggtatacattcaatggtgatatatgattgttgttgcccgttttcgattccattccccagaataatatcgagctattattatgagttggcctattcctgaaataccggaacttaaagtcgtggcacctttgcgttatcggttatggtttatcattttacttttgatattgattgtcggcacattggtttacgctgtgctaaaagataccactgatttctattacgcggcgatttatagcagtttcccgtcctttctggtgtggctgctgttatttggtgcggtattaaatcgctatgagcaatattgtgcggcagcatacgcttgggaagaagccagtgccgaaacccgtttccaatggcagcaatggagcagaaaacaactggcggtgattggtaatattattctgacgcctgagcaacaaggtattgcgccactgttaggtgatgcggaagagatccctgcttttcctgaacaaggacgggcattatctctgccatcgagcgataggcggcaattattggctaaaatggatcaggattttgaacaacagtgtccgggttatcgttctcttttacgccagatttatattgcttccgacgatcacgcttcttatgaatctgcgatatatcaacagtggaaaataagcatcttaccgataataaaccgagatgagatcgataaattatacgatgaggatgatttcgaagggctgataatggttattgcgttccagtgctggccttctgaaaataataagaaagcgtacagtgaatttgtctcggctcaattattttcgtcgacaaaatttgccacgcaggaaaaacttactgtccttgccggtatgggaagaacattaccttcattacccggagaaataatcaaagatttacagatattgtttgaatataaccgtattgataaaaataacatgcggcacctttggataacgggtgtcacgaatgatgttctgactgaactggcaattaacagtcatgattctgcgtttaatcttttcaccgaaaattcggttcatttaatcgatcatacttttggtcctccggggccgctatcgatatttttggcatcagccatgttaactgaggcaattagcctgaccggtagcgatcatatcgttatcaatcaattaccagaggggagcgctagcctctatttaatgactaaggaattacatcaatgaaagttaatcgtcaccaccaatatggctattttggatatatttttattacccttagccttgtcgggatatttctcatgttgatctacttgaataaaacattacttgaggaacgggggctgcttaaatccgcattgtatgcctacgccacagtttttccgctcttattaataggcttatttagcaatgctgtctggtggcatattcggcagaataaagcgcagaaaaaactcagacctgaaaccgagcggacagcggatcgctccagtcagtctgctttggtactgagtgacttgggcgatcgcatgcgcctccgttacgggcggttctggtggtataaagtccgcattttactggtggtgggcgaagtggagcaggtggaagccatcgcgccggggctgaccacgacgcactggctggagggttatcgcacgctattgctctggggcggcagtttgcaagcggaaccgaataccgctcaattgatggccctgcgtcgcttgcgccgttaccgcccgctcaatgccattgtctgggcgctgaccgaaaaccaaagtgcgcagccggtatggatggataaggccctgaggatgttgcaaaaacaggcccaccagttgcgctggcaggctccggtctacctgtggcaggtgtgtcacagtacctggtctcaggaaggtcgtatcactcagaccgtcggctgcttttttcctgaacgctgtaccccggatatcgtggcgacacagttacaaacgttggttgacccgttgcgcgagcgcgggatgcagcaactgttggagaagacggcccacgattttctctgtcgtctgtccgcgaacttgaaacaacaggggattgcgcactggcaacaggtcctgacgccgtggttagcggagtatggtgatgtggtgtcgctgcggggtttgatgttcagtttgccgcttaaagcgcagacgactcgcctcccgcagatctggctgcccgacacggcatggcagggggtgttggagggcagtcgttgtttccacggtcggcgggtgggcatgctccacacacagaccgtttgtcgtggcctgatagtgctgggcttgttatggggtgccggaatggtgctctcctttttcaccaaccgtgaccagctagccgtggtgcaggcggcggtaactgacctgaaagtccagccggagaattctgatgcccagttgatggccttgaaggatctgcgtaacgaggtggaccggctgcaagaccgggctgaacacggcgtgccgtggtatgagcgctttggtttgagtcagaatcagaaactgttgacggcggtgctgcccgattatgcgcaggttaataaccgcctgatacgggacaaagccgctgcggtgttgcatgcgaaactgagtgcgctggtgaatttaccgccgggcagccctttgcgggctaagtgggcgcaagccggtcatgaccagttgaaagcctacctgatgatggcgcagccggaaaaagtggatgctgtgtttttaacccggatactggatgaaaatgaacccgagcgggccggtattgcccccgctgtctggctggatatggcgtgggatttgtggagtttttatgcggagaatctggccgcgcatcccgaatggcggataaccccggataaggcgttgattaaacaggtgcgtcagttgttgctgctccagctaggtaagcacaatgccgaagcggcgctttaccagcagatgctgcaatcagtggagaaaaattattcggacctgacgttaaggcagatgaccggcgacaccgatgcggcgcggctgtttaccacctctcacgtgataccggggatgtttacccgtcaggcgtgggaaggcgggatacaaaaggcgatagcggaggcggtggcgtcacgtaaagaggcaattgactgggtgctgagtgataaccgtcaggcagtctcggcttcggtatcgcccgaagagctgaaagcccgtttgaccgcccgttactttaccgattttgccggggtgtggcaggattttctcaacagcctgcgctggaacaaaacccgtaacctgtcggatgtcatcgatcagttaaccctgatggcggatggacggcagtctccgctgattgcgttgatgaacacactggcctatcagggcgagaccgggcaacaggggccgagtttatcggactcgttggtgaaatccgctaaaacgttattgaataaaaaaacgccgcgaatgattaatcaacagacggctggcttgcacgggccgatggatgaaacctttgggccgttgctggcgctgatgggagaaaatcaggcagaaggaagaatcaaggcggacagtaccctgaatttacaaaccttcctgacgcgggtaaccgatgtgcgtctgaaactgcaacagatgaacaacagcgacgacccaccggcaatggcgaatgcgctggctaaaacggtatttgaagggaaaagcactgatttgaccgatactcagggttatgggcgcttgatagccgccagtctgggcggccaatggcggagttttggtcagacgctgtttgtcgagccattagcgcaggcgtggcagggagtattgaaaccggcgacggcgaatctgaatagccagtggcagacggcgatagtggacaactgggatcgggcatttgcgggccgttatccgtttgccggtggcgacagtgaaatttcattgccgatgttggggcaatttatccggtcagattcagggcggatagagcagtttttgacgcgtcagttaggcgggatactgcataaagcgggtaaccagtgggtagtggatgaggtgaatggtcagggcgtacagattaacccggattttctaaaggcgataaatcagctcagtcagttatcggacctgttgtttgcggatggcagtcagggattgcggtttgaactgcgggccagagcggtgcgggatgtggtggaaactgacctgacgatagatgggcagaaactgcgttattttaaccagatggaaagttggcagagctttcgctggccgggagagacctataaaccgggtgtgatgctgacgtggaccagtgtcaatgccggggcgagattgtttggtgattatcaggggaactgggggctgatccgctggctggcacaggcgaaagcggagaggctggatgaaagccgttaccgactaatatttaccgcgccggatggattaccgttaacctggattttgcgcacagaattgggcgaagggccgctggcgttattaaaactgcgcggatttaaattgccgaaaaatatctttgtagtgacgccgggtaatcacacgacaatatcagcggtaaatgacgatgatctgataacggaatagtgcatgcgattggcgataaatgaggaaatagcgtaaccgttaactgctttcattaacaaaatagctgtcagaatgaatatcactacagatattccgattaagatgtttggctatatgggtgagaagcctgatttcacttttctcagtgaagaggcaatattgctatggggttttcttgatgttattggctatcttattattcgtgtggcatgaatgagaattattcttctttatcgtgatggagtgaataagatttaaaaaggagtgatgagactgaaacagcgataatctattagataaaattaaaataggcattattatcatagggatgtgattaaaattgcgtattcaggccgccttcattttatggaaaataatgttagtttacttttgtcaataaatgtcatgttattgtcatgaagtttaaattattctgttcgacatgctgttatatcggcggagataaaagggtgcgcattaaaaatcgtttttttgaaaaaagagttgatctttataggcacccattaagaagatgggagaatttataaatcgcttgccttgttcatcccttgatatattgcgaaaacatgaatggcctgtgtaaatatttacggctcagttaacttccgaccgggaaatagtggcgtgggttatttcccggtatgacaataatgatatggcctgatattgagttcttattgttgactaatggccgcagaaaatttaggagaaaatatgacgaacctaacaccgatgatcatctttgatcacagccgttacagactaaaagtgtggcgtaataaagcaccgctggatgtgctggcctttaccggacaggaagccttaagccagccgtttcgctatgccattgaattcaccagtgcggagaaagggattgaaccggcacagatgctgatgcagcaagcctcatttaccctgacctcgcctgcgatcaatccggggatacggtggatgccgattgtgccgccggagccgctgcgttcggtttacggggtgatcagcggctttaaactgctctccacttcgcgggacgaaagccgttacgaagtgacgctggagccccggctggcgctgctggcgagaagccatcaatacgctatttaccaaaaactgtccgtgccggagattgtggagaaaatcctgcgggagcgacatggttttcgcgggcaggacttcctgttcagtctggcgtacagctacccgaggcgggaacaggtgatgcagtatggcgaagatgacctgcgctttatccaacgcctgctggcggaagtgggtatctggtacaaagtgacggcggatgaccggttaaagatcgatgtggtggagttttacgacgaccagcgtgactaccagttcaatgtctacctgcctgcccgcaatccgtcaggtatgcacggcgaggaggacgcggtggtgtggggcatggagaccgcgtatcaggtggtggagggaaaaattgcgactcggaattatgactaccacgatgcccggccgtatcccggcttgaacaccgaggcggatgtgacacggggcgatcgaacgacttatggcgaagcgtaccattaccgtgacgactaccgaatacccggtgatcgttacgcctatcaaccggaggcggaaagtggggtgttttatgcccgtttgcatcacgaacgttacctgaatcaacgcattcgcctgcggggaatgaccacttccgctacgctggtgccggggcaggaattgaaagtgaaaggtgacgccccggaaacgtttcgcaaaggggcgatcatcacccacatcaccaacagtgcccgccgggacagcagttttgagatgacattcactgccattccctattccgagaccgtgtgctttcgcccggagcgggtgccgaaaccggtgatggccggcacgatacccgcgcgggtgagcagtaccaaagtgaatgatacctacggcgatatcgacaaagacggcttatatcgggtggcgtttaattttgaccgggagaaatggccgcaaggcggcgaaagcttgtgggtgcgtctggcgcgcccgtatgcgggagagaactatggctttcactggccgttgctggaaggcactgaagtggcgatcgcctttgaagggggcgacccggaccggccctatattgcccatgctctgcacgactcagtgcacccggatcacgtcaatctctacaactacaaacgcaacgttctgcgcaccccggcgaataacaaactgcggatggatgacgagcgcggtcgggaacatatcaaactgagtaccgaatacggcggtaaaagccagttgaacctcggtcatctcgttgatagccagcgcccacacccggataaacggggtgaaggctttgagctgcgaaccgacgactggggcgcgatccgggccggtaaggggttgtttatcagtgcggataaacaggcccgggcgggcggtgaagtgctggagatggccccggcaatcagtctggtaaaaggtgcggtgaatcaggtgctggagtggggaacagtgaccaaaactcacctgaatcatcagccggatactgaaagcctgaaaacctacttacagcatgtggatcaactgaaaatggcggccatgctgctcagtgcgccggaaggggtggggattgtcagcccgcagactgtgatggtgcaaagtggtcaggcgctctatgcccaaagtgcgggggatgtgcatattgccagtgcaaaccggattgggatgaattcgatacaggctatctccctgttagcacaaaacgaagggatgcgtctggtgtcagggaaagggccgctcgccattgaatcacatggcgatagtttaggtctcacctcattaaacgatgtcaccgtcaattcaacacagggtcacgtccagattacggcgaaaaatggcctgacattggcgtgtggaggcgcgtacatccgtctttctccggcaggagaaattgaaattcacgggccgggcctgttaagcctgaaagggcagcacaaaatggcgtcaccggcgaaacaggactttcctttgcctgacctgcctgaatcggtgtgtaaaacgtgtttggaaaaagcgcaggaattgtcgcaggggtttgttttgaggagttaaccaatgaatgaccatcaaatagctgactggattgcatcacttgcatcgtctgtaacggaaaccggcataagttgtatcgatatgattgtggatcaatcagggggtaagttccccctaattccggcattaaaaagtttttcatctgagatggattggtgctcgctatttcagggattgccggaggagattgtgacagataaagccccgatcttaattcggattgatctaacacaacctgttcaacggcaatggatgaatgaaatcatgatgcgcttaggcggcaagcctatgttgctgattttatgttcttcatggtcgtttgatcgcttgtcccaatatttgattcagtgcgtggatgcagcctacgccgagaaaggcgggatcttacgtttttatgatccgcgtatttttcctgtgttgttttcccatgtattggacaaggaacagcaacaacaatttttcaggcccgcgctgttctggagttggcttgatcgtgatggggctccacatgttatctggcgtgaaggccatgcagggccggttgatgaaacctttcagaaaattgatctcacagatgagcagctagaacatctcttgtgcgtttctgatgctcacatactgatgttgaaactgagtagtcaggttgaatattcagaattttcccgcgaacaactgttcaacaattgttatgccttgatgatagagacatctggtgaagacattttactggatgacgacagagagtcgttcgtacttaaacaccttaaagccagattatcgtcatagaggtagaagatgaaaaaacaacaattgaggctggcggttttattcctgctgctggtcgcctgtagccaatttccggcacaggcaggcatcattatcgccattaatcgtactaaatgggcgattaaccggttcactgtggatgatcaaccgggtatcgacagtatcggcccgtatcagggcggtggtggcggttgctgctatcgggctccagataagtggcgaccggggatgacggttaaggtggattgggagaccggtgtcgctttttccgacgactttcccggttatgaaaatgatgagaagtatttggcgtggagggacaagattaacgcccagaaacgccagcatagccaagtagtgccggttccttattatcagaatggtggtgatacctgcggtattacggtgcacttcctaccctgtgatcaaattaaagttacgacctcgtgttatgcctacggtagcccgaactacccgattaaagaacccttggaaatgaaggaaccaaaagtatgtccgaagtaaagcatgcaagcacctcaagtccagattgtcactaatgtgaaggtatagaagatgaaaaaacaacaattgaggctggcggttttatgcctgctactggtcgcctgtagccagttttcggcacaggcgggaatcattgaagcgattaatcataccaaatgggcaattaatcggttcagtgtggatggtgaaccgggtatcgatattatcgggccatatcagggcggtggtggtggttgctgctaccgggccccggagaagtggcgaccggggatgacggttaaggtggattgggagacaggtgaagcatccacaaaaggctttccgggttttgctgatgaagagaagtatttatcttggcgtaataagttgcgggctaatgatcgtcagcatagcaaggtagtgcctgtacccgattataccgggcagcgtacctgcggtattacagtgcacttcttaccctgtgatcaggtcaaaattaccacttcctgtaacacctacggtagcccgaactacccaattaaagaacccttggaaatgaaggaaccaaaagtatgtccgaagtaatgcataccggcatttcaagtccagattgtcactaatgtgaaggaatagaagatgaaaaaacaacaattgaggctggcagttttatctctgctgctggtcgcctgtagccaatttccggcacaggcaggcatcattatcgccattaaccatactaagtgggcgattaaccggttcactgtggatgatcaaccgggtatcgatattatcggcccgtatcagggcggtggtggcggttgctgctatcgggctccagataagtggcggccggggatgacggttaaggtggattgggagactggtgttggggacatgggggggtttcccggttttgcagatagaaaaaaatatttggcgtggagggacaagattaatgcccaaaagcgccagcatagccaggtagtaccgttgcccgattataccgggcagcgcacctgcggtattacagtgcatttcttaccttgtgatcaggtcaaagttaccacctcgtgtaacacctacggtagtccgaactacccaatcaaagaaccgttggaaatgaaggaaccaaaaatatgtccgaaataaagcatcatgatcttgtctggttgccagccccttttccgtctcaggggcggttacctgccaaaaattatttggtggtggaaaactgtcagcaacagagcagtcaggaaaaagcttactatcaggaactttgtctggccgccaatcgtcgggtaatccgtccctgttgtaacacgttgcatgtcagcctgttttttgatggcaccggcaataatttatataacgacctttatcaggctgttcctaaccatccgaccaatgttgtccgtcttttccaggcaaccattggggcgggttatgccggaggggcatcaggtaagccgttactggataatattgagagcaccggaagaaagtactttaagtattatattcccggggtgggaacccctttcccggaaattaatgagctggattacagcaaattggggctggcggttgctagcgggggagaagaccggatcaattgggcattactgcggttgattgatgtattaaagcgcgtattggtaaacgacacaattgatgatgttgcttgtcaaaaatccctgaaagcgatggcaaccacatggaatatgctggagttgggaggcagcaataaccgctatgaggagttttataagcagtttgcgagcttaaaacgtgaactgaggatagcccgcagtcagccgggacgaggtaagtgtaagttgttgggcatgaaattgtatgtgtatggtttttcccgtggggctgcggaagcgcggacttttgttaactggttgactgaactgtttccgccgtcgagagaagcaggccagaaaccggctcagtgtctgcaacataaacacgagacagacccggatagcaagttacccatcagcgtagaatttctcggattgtttgacacagtggcatcggtcggggtgccccatatgatccccgttgttgaaggtcatatggcctgggcagacggcacgcaggaattgccatcggaggcgacttacggtggtctggtgaaacgttgtgtgcacttggtctcgacccatgaacagcggttgtgttttccgatggattccattcgccgttccgatggcacttacccgacaggcagcaccgaggtgatttatcccggtgtgcactctgatttggggggcggttatccaccgggagaacagggtaaggcaataggaaaacgtgacaatctattactctcacagatctcattacatgaaatgtattcggcagcgtttgagattggagctccattgaaagttcctaaagatattttgccacaagagttatctcaatatagctggcgttctatgccaccagatgtcggtgatgaatttgatattgacacacaattagtcaaccgcttcaacgcctggcgtcaggtcactctggggttggagatgccccaacaacctctgtcggatgaagaagcggcccgctttgaaccggtgcgggcctctgtggcattggaacaggcgatgaaaaaccagatggactggctgacagcctggcgtatcaatcgttacgccaacggcacgctgcttggtgagccattttttcatgaggctcctaatcgtgatgcgaaaaaggcgcattatgaacagagtgaacaggcacaaaaagcggcacaacagcaggtcgaggctaaacggaaagtgcagtggaatgaattttttcgcgatggaggaaaaacgcagccgttgttaatgcagggagtgccggattttgacccggaaaccgctcaaaaccagttgcgagaagcggccgcggaatttcgcaatgactactacggtgaccggcgggaacaacacagtaagtggcaatttcttttcgatactgtgccacgtcaggcaatttacatgttggatgatcatgatgacctcctggagtatctgcaaatgaaagcagggggagaggcattggtcaaacagctttttcggcctgttccggcggcaaaacccggtcaacaggaaccacccgagtcattgctggtcgccttgtatgacaatcaggttcacgattcccgtgcctggtttatgtactcgacactcggttcacgtgaaccgtggggaggctatttccgctaccgagtcatttacttcggtacaatttgcagcagaccgctgtcacttctgtcagtggctggcactgtggcggggttcatgtcgccggccgcagagagtgtactgcttttgtttaaacagaataaagtcgcaaacacgatgggggatgccatcgacaaagtgtccaagggcaccgctgctgagtgggaagtgaccgcgcagtatttaacttccggcaagctgatcaccctgttagcaggaccggagtatagaaaagcgttcacccataatgtgggcgagatgaccagccagcagagaaagtttatcgaagagcagcggttgcaaacggccaaagataatctcaaagcgcattgggcgggaaaaacgcaggaaccgaccccgttcaaggagcctgagaaatgaaaaacgtaatccgtcagggtgatagcctgcgcgaatatggcggtacggtattgtcgggccactatctttgtttcggacaacccattgcttgcaagggtgatcctgttcagtgtcaccgtcatggcatgactaccattgctcaagggagtgcggcctgcctgatagacggccagccggtggcgttgcatggtcatcgttgtgaatgtggttgtacgttagtcagctcttttcccgattatcaggtgacgtcatgaaagcgatccctctttttccgccttattgtcaggcttcgcctccccgttttaaacgttggttgggagtcggcaccggattggttttgttgatcagtaacatcgtcgcgctgataagacctgaaatcggtgacactttctccttatatgccctgatccctggattggcggcgttatggctgttatgtctgttatttcgcgtgctgttttaccgctttgctgtgcataacgcctggacttaccagcagcaggtcgagcgggttcagcaacagtggtggcgtaaacaccgtcaacagattgcgttggtggattatgtattagctgggccgctagggtgcacgcccgatgtatggaataaagtggttaatcagcctcattgccacgtggaacctatcgaggaagagagtggtcagtcggtgcgtctgctgcgttcttttgccgctgatattgaacagcgggaaatacaactggcgggcatgtcggtggaacagtggcataaacaaaggaaggcgcagtcgccgttgcgttgtacgccattacgttgttattggttaggctctgtcgctgcctggcaagagtttaccgcccagatggcggagcggtttcctgatgtggagttgcctgaacagccacagccttggtgtggtatcgatacgctggatgaaataattgatttgctcaacacgacaaaggaccaacacgcgactattttgtgtgcaggttgtcagtgcgtagacagcgaggctgagtcagccttacccgccggtgaagcagcatttatctggttattgaaaaaacagggcaacgtctgtttaacccgtggtgaatttttttgttctcaaagtgatgaagaggttgttgacgtcgcggccagaacatgggttcaagcggatatgtctcagccaccggcaacctgctttctgttttctcagccggatatatcctcactggagaaactcggctggaatatcactcaacatcaacaggatctcaattggggcaatattggcgggatggaggcgatcgtagtgcaaacactggcggcgatctcggcggaaaataccggccaaccctgtgggtggttagcccgtgatcctcaacatactttagcgtttggaatagtaaaatcttatggcactgcaagagaataaaataccgcctatttcggtggtgaagacacttatcttactgataggcaccattaccctgctggtttcgttggctggtctgggatggtgggtttggggagaacaccgaaccactgatgccgaaactttcaaccatctgttgtgggtttgtggaatagcttgggtgctcactgtggtggtgagtatgctaggttttatcacggtaacgttgtttgtcaaaaacaaagtcaccgatgtgaagtccgatacccggccacttttgccagccagcgaaccgtatgattatggtgatttgggcgatcgcatgcgcctccgttacgggcggttctggtggtataaagtccgcattttactggtggtgggcgaagtggaacaggtggaagccatcgcgccggggctgaccacgacgcactggcaggagggttatcgcacgctgttgctctggggcggcagtttgcaagcggaaccgaataccgctcaattgatggccctgcgtcgcttgcgccgttaccgcccgctcaatgccattgtctgggcgctgaccgaaaaccaaagtgcgcagccggtgtggatggataaagctttgcggatgttacaaaaacaggcccaccagttgcgctggcaggccccggtctacctgtggcaggtgtgtcacagtacctggtctcaggaaggtcgtatcactcagaccgtcggctgcttttttcctgaacgctgtaccccggatatcgtggcgacacagttacaaacgttggttgacccgttgcgcgagcgcgggatgcagcaactgttggagaagacggcccacgattttctttgtcgtctgtccgcgaacttgaaacaacaggggattgcgcactggcaacaggtcctgacgccgtggttagcggagtatggtgatgtggtgtcgctgcggggtttgatgttcagtttgccgcttaaagcgcagacgactcgcctcccgcagatctggctgcccgacacggcatggcagggggtgttggagggcagtcgttgtttccacggtcggcgggtgggcatgctccacacacagaccgtttgtcgtggcctgatagtgctgggcttgttatggggggccggaatgatgctctcctttttcaccaaccgtgaccagctagctgtggtgcaggcggcggtcactgacctgaaagctcagccggagaattctgatgcccagttgatggccttaaaggcgctgcgtaacgaggtggaccggctgcaagaccgggctgaacacggtgtaccgtggtatgagcgctttggtttgagtcagaatcagaaactgttgacggcagtggtgcccgattatgcgcaggttaataaccgcctgatacgagacaaagccgctgcggtgttgcatgcgaaactgagtgcgctggtgaatttaccgccgggcagccctttgcgggctaagcgggcgaaagccggtcatgaccagttgaaagcctacctgatgatggcgcagccggaaaaagtggatgctgcgtttttaacccggatactggatgaaaatgaacccgagcgggccggtattgcccccgctgtctggttggatacggcgtgggatttgtggagtttttatgcggagaatctggccgcgcatcccgaatggcggataaccccggataaggcgttgattaaacaggtgcgtcagttgttgctgatccagccaggtaagcacaatgccgaagcggcgctttaccagcagatgctgcaatcagtggagaaaaattattcggacctgacgttaaggcagatgaccggcgacaccgatgcggcgcggctgtttaccacctctcacgtgataccggggatgtttacccgtcaggcgtgggaaggcgggatacaaaaggcgatagcggaggcggtggcgtcacgtaaagaggcaattgactgggtgctgagtgataaccgtcaggcagtctcggcttcggtatcgcccgaagagctgaaagcccgtttgaccgcccgttactttaccgattttgccggggcgtggcaggattttctcaacagcctgcgctggaacaaaacccgtaacctgtcggatgtcatcgaccagctaacgttgatggcggatgggcggcagtctccgctgattgcgctgatgaacacgctggcctatcagggcgaaaccgggcaacaggggccgagtttatcggactcattggtgaaatccgctaaaacgttattgaataaaaaaacgccgcgaatgattaatcaacagacggctggcttgcacgggccgatggatgaaacctttgggccgttgttggcgctgatgggagaaaatcaggcagaaggaagaatcaaggcggacagtaccctgaatttacaaaccttcctgacgcgggtaaccgacgtgcgtctgaaactgcaacagatgaacaacagcgacgacccaccggcaatggcgaatgcgctggctaaaacggtatttgaagggaaaagcactgatttgaccgatacgcagggctatgggcgcttgatagccgccagtctgggcggccaatggcgtggttttggtcagacgctgtttgtcgagccattagcgcaggcgtggcagggggtattgaaaccggcgacggcgaatctgaatagccagtggcagacggcgatagtggacaactgggatcgggcatttgcgggtcgttatccgtttgccggtggcgaaagtgaaatctcattgccgatgttggggcagtttatccggtcagattcagggcggatagagcagttcttgacgcgtcagttaggcgggatactgcataaagcgggtaaccagtgggtagtggatgaggtgaatggtcagggcgtacagattaacccggattttctaaaggcgataaatcagctcagtcagttatcggacctgttgtttgcggatggcagtcagggattgcggtttgaactgcgggccagagcggtgcgggatgtggtggaaactgacctgacgatagatgggcagaaactgcgttattttaaccagatggaaagttggcaaagttttcgctggccgggagagacctataaaccgggtgtgatgctgacgtggaccagtgtcaatgccggggcgagattgtttggtgattatcaggggaactggggactcatccgctggctggcgcaggcgaaagcggagaagctggatgaaagccgttaccgactgatatttaccgcgccggatggattaccgttaacctggattttgcgcacagaattgggcgaagggccgctggcgttattaaaactgcgcggatttaaattgccgaaaaatatctttgtagtgacgccgggtaatcacacgacaatatcagcggtaaatgacgatgatttgatagaggaatagtgcatgtgattggcgataaatgaggaaatagcgtaaccgttaactgctttcattaacaaaatagcggtcagaataaatatcactacagatattccgatgaagatgtttggctatatgggtgagaagcctgatttcacttttctcagtgaagaggcaatattgctatggggttttcttgatgttattggctatcttattattcgtgtggcatgaatgagaattattcttatttatcgtgatggagtgaataagatttaaaaaggagtgatgagattaaataagatttcaaaatagcgctacatcttataccactcataattctatgtataacaatgggttggatggggctatgtgtagcataattacgaaacgttatttaaaacagcgataatctattgggtaacatgaaaataggcattgttatcatggggatgtgattgaaattgcgtattcaggccgccttcattttatggcaatcaatgccagtttacttttgtcaataaatgtcatgttattgtcatgaggtttaaattattctgttcgacatgctgttatatcggcggagataaaagggtgcgcattaaaaatcgtttttttgaaaaaagagttgatctttataggcacccattaagaagatgggagaatttataaatcgcttgccttgttcatcccttgatatattgcgaaaacatgaatggcctgtgtaaatatttacggctcagttaacttccgaccgggaaatagtggcgtgggttatttcccggtatgacaataatgatatggcctgatattgagttcttattgttgactaatggccgcagaaaatttaggagaaaatatgacgaacctaacaccgatgatcatctttgatcacagccgttacagactaaaagtgtggcgcaataaagcaccgctggatgtgctggcctttaccgggcaggaagccttaagccagccgtttcgctatgccattgaattcaccagtgcggagaaagggattgaaccggcacagatgctgatgcagcaagcctcatttaccctgacctcgcctgcgatcaatccggggatacggtggatgccgattgtgccgccggagccgctgcgctcggtttacggggtgatcagcggctttaaactgctctccacttcgcgggacgaaagccgttacgaagtgacgctggagccccggctggcgctgctggcgagaagccatcaatacgctatttaccaaaaactgtccgtgccggagattgtggagaaaatcctgcgggagcgacatggttttcgcgggcaggacttcctgttcagtctggcgtacagctacccgaggcgggaacaggtgatgcagtatggcgaagatgacctgcgctttatccaacgcatgctggcggaagtgggtatctggtacaaagtgacggcggatgaccggttaaagatcgatgtggtggagttttacgacgaccagcgtgactaccagttcaatgtctacctgcctgcccgcaatccgtcaggtatgcacggcgaggaggacgcggtggtgtggggcatggagaccgcgtatcaggtggtggagggaaaaattgcgactcggaattatgactaccacgatgcccggccgtatcccggcttgaacaccgaggcggatgtgacacggggcgatcgaacgacttatggcgaagcgtaccattaccgtgacgactaccgaatacccggtgatcgttacgcctatcaaccggagacggaaagcggggtgttttatgcccgtttgcatcacgaacgttacctgaatcaacgcatccgcctgcggggaatgaccacctccgccacgctggtgccgggacaggagttgaaagtgaaaggtgacgccccggaaacgtttcgcaaaggggcgatcatcacccagatcaccaacagtgcccgccgggacagcagttttgagatgacattcactgccattccctattccgagaccgtgtgctttcgcccggagcgggtgccgaaaccggtgatggccggcacgatacccgcgcgggtgagcagtaccaaagtgaatgatacctacggcgatatcgacaaagacggcttatatcgggtggtgtttaattttgaccgggagaaatggccgcaaggcggcgaaagcttgtgggtgcgtctggcgcgcccgtatgcgggggagaactatggttttcactggccgttgctggaaggcaccgaagtcgcgatcgcctttgaagggggcgacccggaccggccctatattgcccatgctctgcacgactcagtgcacccggatcacgtcaatctctacaactacaaacgcaacgttctgcgcaccccggcgaataacaaactgcggatggatgacgaacgcggtcgggaacatatcaaactgagtaccgagtacggcggtaaaagccagttaaatctcggccatctcgttgatagccagcgcccacacccggataaacggggagaaggctttgagctgcgaaccgacgactggggcgcgatccgggccggtaaggggttgtttatcagtgcggataaacaggcccgcgcgggcggtgaagtgctggagatggaggcggcgctgaatcaacttcaacaagcgcagaccttaaccgaggcattatacggcgcggctgaaatggctaaagcggaactggcggatttgcagcaacagaaggcgctgttaagtgaaacgttagccgagctgaaaaaatccgcgttgttactctccgcgccagaagggatcgcgcagacgacggcaaaaagcctccagttggcggccggggaaaatattatcgtcaccagtgggaaaagtaccgatttcagcgtattgaaaaaattcacggtggcggcgggtgaaaggatcagcctgtttgcccaaaaactgggcatcaaactgtttgccagcaaaggccgggtagatattgaagcgcagggtgatgagatggggctggcggcactgaaagatatcacggtgaatagccatgagggaaaagtgatcatcagcgccaaacaggagatcttgctggtcagtggcggtggttatatccgaataggaaatggtcaggtggagtgtggtgcgcccaatcacatcatccaacgggcggcagtgtggcagaagtttgacgggcagagtgttagtcagacagtacagcaatggcaaaccgcgaattatgcggtaacgccgaaggctgtacgggcttataagatttctccgttagaccgtcaaaatatgcagttccatgccgaagatggcggcgtacaggcattatcaaccatacagaatggaaaaacccctttgcaaaagcaggttggggtggaaatcagtcaattgaaaataaaagatgaggagtaaatgatgagtgagccgaaagaaaatgagatttttattcaccctgaatatgatgaactgggcctcccttattacaacgtgccgaatgccagaattgaagaaaatctggtggcgacgtgtttgaagtacgcgactaaagtgatcccggtaattttcctgccgggggtgatggggagtaatttgaaatcgacagagggggagtcagtctggcggctaaacaggatattaagttttgatgttttaggttggatgtgctcgggtgcgtcttacaggaagaaaactttagacccgaataaaacaaaggttgatgattccggggatatcacgcctgatcacactgagaagaataaattccagacttgcaagcagcgcggttggggggagatagcccatatgagctatggcactttcctgccctggcttcaggcggtgttggatgatgagcgtctggcctttgagtactgtctggcagagaagggggaaaaaacccttcggcaacgtatggttgatatgagtttgaatgcggagtggggggaagagccgctgaccgaggcagaggttgaccatagttatgattttctctacccggttcatgtgatgggctataactggttgcaatctaatgaggagtctgccaagaggctggagcaatatgtggataaggttttagctttctatggtaaacggtgtgcaactaaaaaggtgattttagtcactcactcaatgggagggctggttgctcgttattattcagaattgctgaatggcagagataaaattttaggcattgtgcatggggtgatgcccgctacgggggcgccgaccacctataaaaggatgaaaaccggtgaagatggtgtgaccgggctggttgtgggttacgatggtgaagatatgactccggtgctggcgcagtctcccggcccattacagcttctgccgggaaaggagtatggtcgaggctggttacatatcgccgatggtaaaatgacgcataaactgccgaaatcagatccgtatgaggagatttatctggaaaaggatcgctggtgggggttatgtgaaacccggtttttaaacccggataaaaaggataagtggaaagatggagcaagctggaatagttatcggaaattgataagaaacacagtcaaaccatttattgaagagttaaccagtaagtaccatccgaatacttatgccttttatggtgccagcgagaaacatttatcctatggagttatctcctggcaagaagccagtaaggattattacaataaaacggaggattattccggcctgacatttgatcggccgatatacgatccttataacctggagacgggcgcaacccgtatggtgcagttttctgttggcccttcttttcaggatattgcggcgaaaacttttaagctggcaccgcccaaagagccgggagatgggacggtgccggtacagtctggccgtattgcagccagatatttacgcagcttgctggcaacagaagtcgaccatgaaggcgcatataaacaggataacgagacggaagagacgtttgcccggttattcactttgcgttcaattgtgaagatggtgcaagcggtgaaaggtgaaaattgaataggaaaacaaccttactgactttagcggttatttgtaccttatggtggtatatgcccgtattttattacccgattttaactgaaaaggaaaagaaagtgacaactgaaatgttagtgaatatgcagcctcattgtgtgggccgttatttgatagatcttcctgctggatttggcaatgttgccgaacaagggatatttattggtgatgcgcaaatagaaaccgagcgtttatatccacctgcatttgaacagcggatacggctaagagagcaggaattaaagaccatgcaatctgttgaaccgaaagatatgccttttttaaagaaagcctatcgcctccaggataatatggagggtgtgatcttcgacaggaatgaaagttttggtattcccggttttgcccgagtattagaagcgcatttgtatagtaatggtgtcgcttttaccgtaacaatgaaatttatggagttatcagatgataagtataaggaagatagagatttttatataaggcaagggttttctgaaaggcaatacaatgagttatatcaaactctggagaagatgaaaagactgctatccagaatcagcggccggaaagatacagaaatacctacagagacaggtacctgtattcctgatggttttattactggcagtcatgatgagaaagagaatatgacttttgtctataagcgagatgaaagtgatcattttactttcaatgttgaaatattgaatgatcttcaagagaaagaccatctgttagagcgtctgaggggaatggaaggtatgtttttgtccatgcatgctaagataataaggaaagggaaacgggaaattaatggcacttatacggaggaagttttaacaactgcgccgacagaaaaaattgaagaaccggaaaccaaaattccgggatataaatttattttaattgctaatgaaacaatcggggattataagaacccttttgttagaattaatctgagaaatgatcggtcatccgcaacgccgtacagtgaaaatgaactgataaagttttgggatgcggtaacgagtacttttcgtaaaagacccggtgcttttaaacggcaataacatgcttcaaataaaaccccttatagggatgtaagggttaaccatcagcagaaggagaaaccagatgtttaaagaaataaccagttagtgggggttgatatgattcattttgagctttggcaacttgtattaggcatatatcttttactactatattacacttggccgataattctgatactggatgtatttactctttatcggataaagaaatgcattaaagataaggaatacgggcgtgcgtcacgcttgatttttgctgctgtattcatgagtggttcccttatcgccttcataatatggataaatttatataattaaacagatgaggagatgattatgtttaatatgattggtttcagccatatcactgatcaaagtagaatcgtaagcgtgacagcgttaacgttctatgataaggacaaaccggttaaattaatcggtggcctgattttttatttaaatgcgaaacagggtatgcattcaatggtgatatatgattgttgttgcccgttttcgattccattacccaggataatatcgagttattattatgagttggcccatacctgaaataccggaacttaaagcagtgtcgcctctgcgttatcgattatggtttatcattttacttttgatattgattgtcggcacattggtttacgctgtgctaaaagataccaccgatttctatcacgcggcgatttatagcagcttaccgtcctttctggtgtggttgctattatttggtgcggtattaaatcgctatgagcaatattgcgcggcagcatacgcttgggaagaagccagtgctgaaactcgtttccaatggcagcaatggagcagaaaacaactggcggtgattggtaatattattctgacgcctgagcaacaaggtattgcgccactgttaggtgatgcggaagagatccctgcttttcctgaacaaggacgggcattatctctgccatcgagcgataggcggcaattattggctaaaatggatcaggattttgaacaacagtgtccgggttatcgttctcttttacgccagatttatattgcttccgacgatcacgcttcttatgaatctgcgatatatcaacagtggaaaataagcatcttaccgataataaaccgagatgagatcgataaattatacgatgaggatgatttcgaagggctgataatggttattgcgttccagtgctggccttctgaaaataataagaaagcgtacagtgaatttgtctcggctcaattattttcgtcgacaaaatttgccacgcaggaaaaactcactgtccttgccggtatgggaagaacattaccttcattacccggagaaataatcaaagacttacagatattgtttgaatataaccgtattgataaaaataacatgcggcacctttggataacgggtgtcacgaatgatgtcctgactgaactgacaattaacagccatgactctgcgtttaatcttttcaccgaaaattcggttcatttaattgatcatacttttggcccaccggggccgctatcgatatttttggcatcagccatattaactgaggcaattagcctgaccggtagcgatcatatcgttatcaatcaattaccagaggggagcgctagcctctatttaatgactaaggaattacatcaatgaaagttaatcgtcaccaccaatatggctattttgggtatatttttattacccttagccttgccgggatatttctcatgttgatctacttgaatcaaacattacttgaggaacgggggctgcttaaatccgtatggtatgcctacgctaccgtttttccgatcctattaataggcttatttggcaatgctgtctggtggcatattcggcagaataaagcgcagaaaaaactcagacctgaaaccgagcggacagcggatcgctccagccagtctgctttggtactgagtgacttgggcgatcgcatgcgcctccgttacgggcggttctggtggtataaagtccgcattttactggtggtgggcgaagtggagcaggtggaagccatcgcgccggggctgaccacgacgcactggcaggagggttatcgcacgctgttgctctggggcggcagtttgcaagcggaaccgaataccgctcaattgatggccctgcgtcgcttgcgccgttaccgcccgctcaatgccattgtctgggcgctgaccgaaaaccaaagtgcgcagccggtatggatggacaaggccctgaggatgttgcaaaaacaggcccaacagttacgctggcaggctccggtctacctgtggcaggtgtgtcacagtacctggtctcaggaaggtcgtatcactcagaccgtcggctgtttttttcctgaacgctgtaccccggatatcgtggcgacacagttacaaacgttggttgacccgttgcgcgagcgcgggatgcagcaactgttggagaagacggcccacgattttctctgtcgtctgtccgcgaacttgaaacaacaggggattgcgcactggcaacaggtcctgacgccgtggttagcggagtatggtgatgtggtgtcgctgcggggtttgatgttcagtttgccgcttaaagcgcagacgactcgcctcccgcagatctggctgcccgacacggcatggcagggggtgttggagggcagtcgttgtttccacggtcggcgggtgggcatgctccacacacagaccgtttgtcgtggcctgatagtgctgggcttgttatggggggccggaatgatgctctcctttttcaccaaccgtgaccagctagccgtggtgcaggcggcggtaactgacctgaaagtccagccggagaattctgatgcccagttgatggccttgaaggatctgcgtaacgaggtggaccggctgcaagaccgggctgaacacggcgtgccgtggtatgagcgctttggtttgagtcagaatcagaaactgttgacggcggtgctgcccgattatgcgcaggttaataaccgcctgatacgggacaaagccgctgcggtgttgcatgcgaaactgagtgcgctggtgaatttaccgccgggcagccctttgcgggctaagcgggcgcaagccggtcatgaccagttgaaagcctacctgatgatggcgcggccggaaaaagtggatgctgtgtttttaacccggatactggatgaaaatgaacccgagcgggccggtattgcccccggtgtctggctggatacggcgtgggatttgtggagtttttatgcggagaatctggccgcgcatcccgaatggcggataaccgcggataaggcgttgattaaacaggtgcgtcagttgttgctgctccagccaggtaagcacaatgccgaagcggcgctttaccagcagatgctgcaatcagtggagaaaaattattcggacctgacgttaaggcagatgaccggcgacaccgatgcggcgcggctgtttaccacctctcacgtgataccggggatgtttacccgtcaggcgtgggaaggcgggatacaaaaggcgatagcgaaggcggtggcgtcacgtaaagaggcaattgactgggtgctgagtgataaccgtcaggcagtctcggcgtcggtatcgcccgaagagctgaaagcccgtttgaccgcccgttactttaccgatttcgccagggtgtggcaggattttctcaacagcctgcgctggaacaaaacccgtaacctgtcggatgtcatcgaccagctaacgttgatggcggatggacggcagtctccgctgattgcgctgatgaacacgctggcctatcagggcgaaaccgggcaacaggggccgagtttatcggactcattggtgaaatccgctaaaacgttattgaataaaaaaacgccgcgaatgattaatcaacagacggctggcttgcacgggccgatggatgaaacctttgggccgttgctggcgctgatgggagaaaatcaggcagaaggaagaatcaaggcggacagtaccctgaatttacaaaccttcttgacccgggtaaccgacgtgcgtctgaaactgcaacagatgaacaacagcgacgacccaccggcaatggcgaatgcgctggctaagacggtatttgaagggaaaagtactgatttgaccgatactcagggttatgggcgcttgatagccgccagtctgggcggccaatggcggagttttggtcagacgctgtttgtcgagccattagcgcaggcgtggcagggagtattgaaaccggcgacggcgaatctgaatagccagtggcagacggcgatagtggacaactgggatcgggcatttgcgggtcgttatccgtttgccggtggcgacagtgaaatttcattgccgatgttggggcaatttatccggtcagattcggggcggatagagcagttcttgacgcgtcagttaggcgggatactgcataaagcgggtaaccagtgggtagtggatgaggtgaatggtcagggcgtgcagattaacccggattttctaaaggcgataaatcagctcagtcagttatcggacctgttgtttgcggatggcagtcagggattgcggtttgaactgcgggccagagcggtgcgggatgtggtggaaactgacctgacgatagatgggcagaaactgcgttattttaaccagatggaaagctggcagagctttcgctggccgggagagacctataaaccgggtgtgatgctgacgtggaccagtgtcaatgccggggcgagattgtttggtgattatcaggggaactgggggctgatccgctggctggcacaggcgaaagcggagaggctggatgaaagccgttaccgactgatatttaccgcgccggatggattaccgttaacctggattttgcgcacagaattgggcgaagggccgctggcgttattaaaactgcgcggatttaaattgccgaaaaatatctttgtagtgatgccgggtaatcacacgacaatatcagcggtaaatgacgatgatttgatagaggaatagtgcatgcgattggcgataaatgaggaaatagcgtaaccgttaactgctttcattaacaaaatagcggtcagaatgaatatcactacagatattccgatgaagatgtttggctatatgggtgagaagcctgatttcacttttctcagtgaagagggaatattgctatggggttttcttgatgttattggctatcttattattcgtgtggcatgaatgagaattattcttctttatcgtgatggagtgaataagatttaaaaaggagtgatgagactgaaacagcgataatctattagataaaataaaaataggcattattatcatagggatgtgattaaaatagcgtattcaggccgccttcattttatggcaatcaatgccagtttacttttgtcaataaatgtcatgttattgtcatgaagtttaaattattctgttcgacatgctgttatatcggcggtgataaaggaaagtgcattaaaaattgtatttttttgaaaaaaagagttgatttttataggcacccgttaagaagatagtaaaattcagaaatcgctcattctgttcacccattgatgtattgcgaaaaggtgagtggcctgtgtaaatatcttctatccggttaactaccggttgggaaatacctgtgaggttatttcccggtatgacgataatgacatgccgaacttttattagttttgtgttgtctgccaacgaccgtaaaaattattaataacgtcgccagtatttgagacaccatagagtaaataggagtaggtatttaaagatgaaaaaacaacaactgaggctggcagttttatgcctgctactggccgcctgtagccagttttcggcacaggcgggaatcattgaagcgattaatcataccaaatgggcgattaaccggttcagtgtggatggtgaaccgggtatcgatattatcggcccatatcagggcggtggtggtggttgctgctaccgggccccggagaagtggcgaccggggatgacggttaaggtggattgggagactggtgtcgctttttccgacgattttcccggctatgaaaatagagaaaaatatctggaatgggatagaaaaattagagcccagaaacgtcagcatagccaggtcgtaccagtgcccgattataccgggcagcgtacctgcggtattacagtacatttcttaccctgtgatcaggtcaaagtcaccacttcgtgtaacacctacggtagtcctaactacccaattaaagaacccttggaaatgaagggaccaaaagtatgtccgaagtaatgcatgcaagcacctcaagtccagattgtcactaatgtgaaggagtagaagatgaaaaaacaacaactgaggctggcggttttatgcctgctactggtcgcctgtagccaatttccggcacaggcaggcatcattatcgccattaaccataccaaatgggcgattaaccggttcactgtggatgatcaaccgggtatcgacagtatcggcccatatcagggcggtggtggcggttgttgctatcgggctccagataagtggcgaccggggatgacggttaaggtggattgggagaccggtgtcgctttttccgacgactttcccggttatgaaaatgatgagaagtatttggcgtggagggacaagattaacgcccagaaacgccagcatagccaggtagtaccgctgcccgattataccgggcagcgcacctgcggcattacagtgcacttcttaccctgtgatcaggtcaaaattaccacttcctgtaacacctacggtagcccgaactacccaattaaagaacccttggaaatgaaggaaccaaaagtatgtccgaaataaaacatcatgatcttgtctggttgccagccccttttccgtctcaggggcggttacctgccaagagttatctggtcagggaaaactgtcagcaacagagcagtcaggaaaaagcttactatcaggaactttgtctggccgccaatcgccgggtaatccgtccctgttgtaacacgttgcatgtcagcctgttttttgatggcaccggcaataatttatataacgacctttatcaggctgttcctaaccatccgaccaatgttgtccgtcttttccaggcaaccattggggcgggttatgccggaggggcatcaggtaagccgttactggataatattgagagcatcggaagaaagtactttaagtattatattcccggggtgggaacccctttcccggaaattaatgagctggattacagcaaattggggctggcggttgctagcgggggagaagaccggatcaattgggcattactgcggttgattgatgtattaaagcgcgtattggtaaacgacaaaattgatgatgttgcttgtcaaaaatccctgaaagcgatggcaaccacatggaatatgctggagttgggcggtagcaataaccgctatgaggagttttataagcagtttgcgagcttaaaacgtgaactgaggatagcccgcagtcagcccgggcggggtaagtgtaagttgttgggcatgaaattgtatgtgtatggtttttcccgtggggctgcggaggcgcggacttttgttaactggctgactgaactgtttccgccgtcgagagaagcaggccaaaaaccggctcagtgtctgcaacataaacacgatacagacccggatagcaatttacccatcagcgtagaatttctcggattgtttgacacggtggcgtcggtcggggtgccccatatgattcctgttgttgaaggtcatatggcctgggcagacggcacgcaggaactgccatcggaggaaacttacggtggtctggtgaaacgttgtgtgcacttggtctcgacccatgaacagcggttgtgtttcccgatggattccattcgccgggcggacggtacttacctgacaggcagcaccgaggtgatttatcccggtgtgcactctgatttggggggcggttatccaccgggagagcagggtaaggcaataggtgaaaccgatggtttgctgttatcacagattgctttgcatgaaatgtatgcggcagcctttcagactggggcaccccttaaggtcccgaaggaggtattacctgacgatttacaagatcaattgtggcgggcaatgagtgctgatatccagcgggaatttgatattgacacacaattagtcaaccgcttcaacgcctggcgtcaagtgactctggggttggagatgccccaacaacccctgtcagatgaagaagcggcccgctttgaaccggtgcgggcctctgtggcattggaacaggcgatgaaaaaccagatgaactggctgacggcctggcgtatcaatcgttacgccaacggcacgctgctcggtgcgccgttttttcatgaggctcctaatcgtgatgcgaaaaaggcgcattatgaacagagtgaacaggcacaaaaagcggcacaacagcaggtcgaggctaaacggaaagtgcagtggaatgaattttttcgcgatggaggaaaaacgccgccgttgttaatgcagggagtgccggattttgacccggaaaccgcccagaaccagttgcgagaagcggcagcggaatttggtcgtgactaccggggagaaagtcgtgagcaaagcaatctaaaacaatttgctattgaaactctcgcataccacatgctctatatatgggacagtaatgatgacgttaaggaatatcagcaaatgaaaacggcgggagaagcgttggtcaaaccgcttttccggcctgccccagtgggaaaaaccggccagcaggagtcacccgagtcattgttggtcgctctgtatgacaatcaggttcatgattcccgcgcctggtttatgtactctattctggacacccgcgagccggaaggcggttacttccgttaccggataatttatttcggtacggaatgtaacaagcctttatcacccctgacgatagccggcaatgtcgtcggatcgacgaccccggttggtgcagcgttgcttttcttgaaagataaaaaagtcggcaacatgttgtcggatgccgccgacaaggtacccgtcacaacgtgggaagtgaccgcgcggtatttaacttccggcgagctgatcacgctgttagctggaccggagtatagaaaagcgttcacccataatgtgggcgaagtgacccgtcagcagagggaatttcttaaagagcggcggttgcaaatgaccaaagatgatctcaaagcgcgttgggcgggaaaaacgctggagccgactccgttcaaggagcctgagaaatgaaaaacgtaatattactttgttttaacctaaaaaggaaaattaaatgaaaactgaaatattagccaatatgcagactcgttgtatcgggcattatctgattgatattcccttggcatttgaaaacatcatcaataatgagatatttattggtgaggcaaaaatagaaaccaagcgtacgcatttatccgcatttgaacagcggatcgagataagagagcaaaaattgaggacgactaagactaccgatccgaaagatctgccctttttaaagaagatttatcacctccagggaaacttatatggcgtgatttttgacagaaataatagtgtcagtgaacccggtttttcccgagtattagaagcccatttatatgataatggggtggcttttattatagaaatgaagtttacagaaatatcagatgataaatacagttattcaaaggaccgttatataaaatccggattgaatgaaagccaatataaaatgctttctcaaactctggacaaaatgcaaaggctaattaccagagtcagcggcagaaaggatagcgatattccgacagtggcaggaatctgtatccctgacggttttattgccgactataatgatgaaaaagaaagtataaagtttgtctatcaaggaaatcaggatgacaattttacgctcagtgttgaaatcattaatgaccttaaaggggaaggcactttacttgaacgtattagtgaggttgaaagggattggtttattaattatggcaagataataagaaagggggaaagagaaataaatgggatttatggggaggagttattagcagtaggtctgcaatcttttgacaatagcccgcgttatcaatttgattttattgcaaatgatatgatgttggatgataaaaaaatctgtgttgttattatgttaatgaattatcagttacctgcaacgccatatagcgaagatgaattgatcatgttttgggatgcaataacgaaaacttttcgtagaggaccggatgctttcgaatagtaataaagtgagagagtgagtgttttaaataattcactaatgagaggtccaatgtgttatggtttatttttccagtgttttttttgattcatatgttgtttttaagtccggtaatattgtttgttgatatacttatcatttgtcggatagttaaacgtggtgggtggaaaaaatataaaattgtgttttttttaattcctggtgtgttattgatgagtgtcttggttattggtgtgacctccgccgttatcatgttgttcggttttttatgtgaccattttggttaatggcaataatttcaacatcaatagcaaggtatttcgatatgaagtattgcctttgaatattaattgcttattgtgtgattgctctggcaataaaatagagaatatcgttatgtctggcattattttttttaggtgatatcagattacagctatttttctctactattttacttcccttctgattatttattctgaacgggaaacgatattttttaataacttttttggaggaccatcctatggatgatttaaccctgcgctattatgaggcagaaatgcgctatctgcgtgaagcaggcagagagtttgctaaggcccatcctgaccgagcagccgcgcttaatctggataaaatcgttatgcgtgatccttttgtggagcgtctgtttgaaggctttgcttttatgatcgggagtctgcgtgagaagctggatgatgacttgccggagttgacggaagggctggttagtttgttgtggccgcattacctacgcacgattccgtccctttccattgttgaatttgggatggattgggcacagttgaaaaattcggtacaggtgaaaaagggttttgagatcctttcgcaaccgatcggcccaagcaagactcggtgtcgttataccacaactcaggcggtccagttactgcctctggcactgaccgacgcttccctgcaagaggaaccgaatgggcgttccgtgattcgattgcgttttgactgtggaacactggtggactggcaccaaattgatttgagctgtttaccgctgtatctcagtgctgacagtccgctggcctatgcgttacatcgagcgtttacgctgcaaacccaacagctttacctgcgtttacccggtcagcccgatcgtcagccatttgacggccgattctcaccaatggggtttggcgaagaggaaaggttatggccgaaaggggaaagttcgttcagtggttatcaactactgctggagtatttcactttccgtgaaaagtttatgtttgttacgctctgtgggctggaaaagttgactctccccgagagaacgccgtggtttgagctggatgtggttctgcgtgaaagttggccctttgatttgccattttctgccgagcatatccgtttgcactgtaccccggtgattaatctgtttcggttggaatccgatccgcttcaactggcaccgttgcaaactgagtatttgctgtatccggtccgctatcaggatgggcataccgaggtttattccgtggatgaggtgtcttcttcgaaacgcgagggccatcagtatgtgccgttcagtagtttccgtcataaaggcggcatgttgcgccatgatgcaccggagtgctacttccatacccgtgtgaaacgcgggccatcaggtctgtgtgacacctggattattctgggtggagcggattttgatgataatgaactggacgaagaagatatcttatctctcacgttgactggcactaatggtcaactgccgcgtagggcgttgcaggatacgctgttgaataccgccgttaatcctccgttggcggaatttacggtacgtaacctgtgtgaaccgacattgccctgttatccacccaatcgggaccgtttccactggcgagtgctcagccatctgggttctaactttcttagcatgatggataacccggaagtgctacgcgggacattagccctgtatgactggtccgacaatgagatgaactatcgccgtctggaggcgattgtcgcggtgaagcattcgctgattgagcgatttgagcagggaagtttgcggcggggcgtgcacattgaagtgacattggatagcaacggctttgcaggtgccggtgatatctgcttgtttggcgaaatgctcagccgcttctttgccttgtacaccgatattcatctgtttaaccgacttacgctgattttacaacctacgggggaacgactgttatgggaagaacaacactgtcagaacattcccggttgatggcaatactggaatcggagatttcgacactcgatttctaccaattctgtcagatgattgaacgtgcagttcctgatcggccgcctctggggagtacggaaaatccggttgatgatgcgatacgtttgcggcctcatcctggtctgggatttcccgccagtgaattgaaagcgatagaaactgacagtgaacatccagagcgtccaccgacagccagaacaaactttatgggactgtatggagtagattcttcgttgccaaccgcttacctgaacgatatcgttcagcaaagggaagggaatgaaactatcgaagcctttctggatatttttaaccaccggatgttcacccagttttatcgtatctggcgtaaatactcctatccggcaacttttgctaccggaggaaccgatagaacctcccaatgtctgctcggattgattggcttagggataccgggtagtcagcaacagattgccacgccgatgtcccgttttctggcgctgctcagtgttatgcgtctgccaactcgaaccgctgaaggcgtatcggcgctggtggcattgttggcaccgcaaacccggatcgtggtgacacctgcttgcccgcgacagatccatctgatgcaaccggcgaatctttcagacactcaccgaatttccctctcgcagcgtaccgtgctaggcagaatgggcactgatatcaatagccagttattgctggcgctgcataccgattgcccggatgaagcgtggggctggttgccgggcgggcagttgcacactgattttttggtgttgttacgggtttatttaggctggcgataccaagccagattgcaactgactctgccgacccgaatattaccgccaccgctgctaggtggtcagcctgttcggttagggctaacaggagtattagggttaaaggctgaaaatcatcagctagcagtgcctgacaacattacggtgaatttggggtgttatcaggggatatcaccagacagcaatcaagacaaagggggagattatgttaactatccctttttataaaatggtgccggtaatggcgacgatagcattactactgacaggctgtggtctgactcagaccgtgactgatggcacggcagcggccacccggtccttttttcataagcgggtgaaaacgttgcatctggattttattccacgggcagcggttaataccgacacgggagaaagtgttgctctgtccgttccggcattagttcgggtttatcagttgcgggataacaacgctataaaaaaggtggattatgcggatttgttggatgacggcgaccggatactgggcgctgattgtctggcgagtgaagaggtagtggtgaaaccgggtagtcacgcatcgcttgatatgccgatggcggcgcaggcgaaatatgtggcggtggtgggattattcagaaaccccgatgtagccaaagggacttggcgtcggatcataaaacgcaacgagttgttaccagatagtcctcgtattattgcgcttaatgccggtggcttgactttattacctgaaaaggggtgagtaaatgaaaaaaccttctctgtatgaaagccttttcggcaattttaattgcggtctggagttgcatcaggtgagtgaagaagagcaagttattttgtcggtattagacaatatgcagcgtatcctcaatagtcgtgccggttcgcttacccatctgcccgattatggcctgcctgatctcaacactattctgcgagggttgcctacgtcgtcacagcgcttgatctcgacgattgaacataccttgttgacttatgaaccgcgtttgaaacgagttgatatcacgttattgccggagctggcaccggggcatctgcgttatgacatcaatgctgaactcaaaggtgtggggctggtgcgtttcagcactgagtttgtaccggaagggaatgtgttgatccgccatttacgccagcaagggtatgtggattagcattattgctgttgagctatacccgtcatctttcaagttgcctctttgttggccgcactcgctcaccccggtcacatagtttgctatgctcccggggattctctcccttgcttggaaatttctggtgttatttttcaatatcggagtaaataaatttttaaataaaaaatagagcgaaattattttaattcgtttttccataatgaaattaatgatgttgtttcagcggtagccttattaatagatcaaggctaccgttatttcttctggtcaatccagattgaatattattgtcaggagcagaagagtttaataataaaattgctatgacaataagaatttttctggtacataatgatgaaaattattcgctaaacagtattcttccagttgttggctagaatgaattcctatctttttatatatctgagccatataggtttcaatggtgcgataagcaatatttaatatctgtttaatttgttgcctggtgtatttttgtaaaaagaaaaaaatgatatcccattcacgtggcgtaaaaatatcgcttggtggttgaagtataatggatgtcggtagttctttataatattgatgtaggctggctaatgagtagcttttggcttcccaacaatgatacatgacgccgatacaatttccatcttcatgataaaaaggcaatttttcacaaaagtaagatgacaggatttgatcttgtccgaatatatgtgtttcaactgaacatattctctgttcttttgccatgaccattctgtcttgaataataaattccttagcaaattcagcgccgttccaagggagttcatgatcataaagcccatcataattaaatgaggctttaaaattatgaatatatttctttgttgctgagttaccataaatgaaatttgaagaactatcttttattccccacggctcattgctgatttccatcgtgttgataatttgaggtgatattatatagttcttcataaagactccttgaaaattttcagcttgaatgaacattctactttgagattccctagcgctttctgagatatagcgataaaattgatgtttttcataagaattttctagtgttatatgatttcatgattataaagctttctgcaatcgaatgatttttcaagattatgaataaattattttgttgctggattgccgtaaataaaacatgaagaactatcttttactcctctacaattcattatccattgtattgacaatctgaggtgatattgcatagttcttcttcatgaaaatttcgttgtgatttagcgcctaagaaaacattttgcttttccgtttcacaaatctctctggcacgtagaggtcatagtcattcgtgcgacaatagtcttctaattgacgactggaatgaacaccaattcgtttatatattcgtgagaaatggctttcaaccgtacgataggagatatttaacatcctaccgatttgtttactggtatacttatgtaacatgaggaaaataacatcccattcccgtttcgtaaatatatcggttggtggagagaacagaatagatgatggtagtttcccataaaatagacgggtaaatgagaaatcctgagctttccatccgtggaacatggtaccgacacattcgttatcatcattatagaatggatatttttcttggaaataagatgaaagaaaattatctttcccgaacatatgtgtttcaagcgaacatactcttgagtctttctccattacagttttatcgtgaataacaaattcttttgcaaaccccgctccatcccagggaatttcatcatcatattgcccttcataatcaaatgaatctggaagattctggatatgcttaagcgctaaattaccataaataaaacatgaatttttatctttgatcccccaaggttcattactttgctgcatggtgttaataactgaaggtgaaatatctaccttattaattttgttcataatgagatcctattgtaaagttaagttagtaattatggtttataactctctactgccaatagtgataaaacgttcaggaatataaagatgatagttatttttctgacagaaatccgctaattctatctgtagtggtaaattaaatttctggtaaattgactgaatatgattaacaacatcttctgtgctcatcgttaattcttcaccgatgctctcttcatcctgtgaacgcagggttagaaaaagcacttcccactcagtttgcgtcaatatattatttggtggcgtaaattgcaggtttgatggcaatgttttgtcataatagtaagaaacagaaaaatcttgaggttgatacatatgaaagaagatcccaatgcaatcattattctcatcataaaggggaaatttatcacaaatatagctttgttggacgttattttctccaaaccgatgtgtttccagtgaagtgatgcgttgcatagtttggatggctttttgatcctgacggtggaattcttctgcatattcggcgataggcgagggcaattcacccgtggtaagcccgataatatcgaaatcttcaggaaggttgagtagttgatagaaagcagggttagcataaataaatcttgactgatgatctctggcaccccaaggttcattgcttttgtcccacatcagggttaattgtggtgtaataagggtggatttgtttcgtatgtttgacatagtaactcctaaattcctatttaaatcattatctgaatggttgctctttcgattatatcttaagttgacagccatataatagaatataatgcttttctcgtcaaaaagcgtatgtttattaattgaatttttactatttaataatgaaactttaaattgataggaatataactatatatactattttagatgaagattatttaaatgatttattgaaagagtaggtaaaagttgttgttatgctcgctgcggtgcctgatatcagctatttttagctaaaaaataggtactgttaatggtaaatgagtgcaaattatacttgaaattatcagcatcctcattgttgtcagttgctcaatagttatttgtcctaatgcttaagagctgttctgttaaactatttgatttactcgtctttgtaataaagaacaaatctgagcagcggcatgaaaaaaatgagggtttttggtcatatttttgatgtgacataaagattaaactcaataaattacgcctgttgtgttaagtatatgctcttggttttttacattgtttgtgctcattacccctttaaaaggggtgttgccaagagtgactctcttgggattaagtcgtaaatacttaatcaacgacgctaacataaatttggtttttttattggaatttaattttttcttaatgctataccctatggatttcaagatgcatcgcggcggcaagggagcgaatccccgggagcatagataacgatgtgaccggggtgagtgagtgcagccaacaaagaggcaacttgaaggataacgggtatattaggtcatggaggatatcaacagtagaaacgcaaccgttgttattgaacttagggttcaatatcgccaccatcgatcgaaggtgcagttatcaatttgataactgtattgtcctttttagatgattagcggggaataggaggaggttatatgccagcaagattggtaaatcctgaaaaggttaatgaggttttcgctcatctgaatgaaagctcagataatcataccctctatactgcgttgatgaatggggttgatattactgatcagataaaagggttgttgctttcaccaggttatcgcatggttcgtgttgatggtcgatttggtaatcgtatcagtcaatcccacttcgagttggcattggttaacgatgtgtctaaagaagttgcctattataatcgagtggttatacagccagatgtggtatcaaattgtcgcccagtaacccaaattcttgtttggcgtatcaggacgcctcaacaccgcgctgttctacgtgatctggctggtaaggtgttctttgattacttgcttgaacattacaacgtgattgtgtcggatatgaatcaaacgacggatggtatcgctttttggcaggatagaatgtacgacgcactagcatataatatgcatgtttatgcttatgatatgattacctgtgagttgcgtaagattttgacccagaatgatgttagtcgccaagaatcttggttatggggagatcctgaacaccatcagaatagattggcaattatttcgaaaagtgaattacccatctatggggtataaaagttcataacattatagttggtaatgttgtacttattggtcgtatttattcagataagagtgatggggttaaagggttatttttcactatagatattttattgcaaataaataagttaaattttcctgcatttctgatgcaacaacattaataacttaacgttattaatttcagttatgaaaaattttcaataattaaaataaaaacaattatttaaattgaattttaatcttgttttttgactattttatttgcattgttaacattaatgtagggatatagggcaatatatagggggtaaacagacttttttatgtattaatgttgattttgagtttttgctctatattattttattctgcttataccctatggatttcaagatgcatcgcgacggcaagggagtgaatccccaaactatgtgaccggggtgagcgagcgcagccaacaaagaggcaacttgaaggataacgggtatattcatttaatcgtatttgcagatatatataccctatggatttcaagatgcatcgcggcggcaagggagcgaatccccgggagcatagataactatgtgaccggggtgagagagtgcagccaacaaagaagcaacttgaaagatgacgggtataaactcattatgtctctgagcttagggtttttgcttcactatatatttcacaatttttgtgagtaaatttcttgttgaggaagaaatatgtttaaaaaattataacgaatcacttctgatatcagttataacaaaggcgttttttatcattatttcgttggttggaaagaaaacaattagtggaataatagcttaatagagttagaataatctgactaattagactggattatataaataatgcctgattgatagctgtcattatatttttttaccgtgggaataacggtggagttgctttgcccacggaaaactagattctcaaaaccgctgctgtatctttcagatgcagtggttttctataccctatggatttcaagatggatcgcggcggcaagggagcgaatccccgggagcatagataacgatgtgaccggggtgagagagtgcagccaacaaagaggcaacttgaaagataacgggtatatttaacctcagcttaaattaagggattgtttatggggaaatcatcaaaccgcagtgcagaatatttctttactggaagatactacgatgatgatgatggcaataatattgttgccattggtgtcggagggattatttatgccaaaggaggagatgatcgtataaccctcgggtcaattggagcaacggtctatgctgattcgggtaataaggttgtcaatggtggtgccggatatttaaaaatagtggataaggaaggtaatctggccgtacatggtgccgcaggttattcaggaattgataaatgtggtaatggtaatatttcatttaccggtacggcggggggcgtttctatggatcaccggggtgaccacggtgatctcaatttttcaggagcagcggcttataatggcctgaatcgccaaggacaatccggtaatgtgacttttaacggtgttggtggttataacgaattatggcatgaaacgaatcaaggtaatttaaattttgccggcgctggggccggtaataaaattgaccgtacctggtatgatcactatgagaaaagccacggtgatgtgaaatttgacggtgggggagcagcgaatagtatcagttcgcgggttgaaagtggcaatattaatttcacaggtgtcggggctgataaccaccttatacgtaaaggtaaagaaggcaatattattttgcatggtgcaggggcatcgaaccgtattgaacgcttgcgtcaaaatcaagatcaatatgaacagacccacggtaatatcgaatttgaaggcactggtggttataaccgaatttattctgatattgctcatggtgatattaccttcgaaggggccggtgcttacaatgaaatatcaagaatcggcgaagatagtgattctcgtaatgaagcactggaatatgctaaagctgaagagattgtattaacaacagcaatgatgggagggagttggattcagcaatcccaacaagtaaccggtattaaatcaacggccgagcctgacacttatctctttgcatttgccgacgaaatgtacactaagattagtaaagtccaactccgaaatgatcctgaaaccggtaagctcagttattacgccacttcttggtacaaagagggcaatcaccttaataatcttgctacggagaatatctcttcaagtaatggatttttcgatatacgttccaatgggggttaccgtctctttaatctaatctttgaacatcatcaccccgttattattcagcatactgttgaagaagatttgcaggaaaaccagtgggtgacttatgccggtggaaccaatgccagagcagaaaatgtcatgctgactaatgccaaaatgcatgggaatgcaatccattctggtggtttgatattagatgtttcagcggtgaaatctaaccgtcaagcgaacacgtatatctatgccaagtatgttgagtcatataccaaagtagtgatggttgagttgagaaatgatgctaaaaccggtgcgctgcaatattacgccagtgcgtggtacaaagcgggtgatcatacaagcaatctggctgctgaaaaggtttccccccaaaatggttatcgctcaatggatataggaggatattcgttaaccaatctgcaataccaagtgaatacagtgcgccgtgtttctgaacatttagcacagacagaagaatatagtcatcaggagttggtgaaatcatccgcggatatgggtgacagctccggtgacattaatttcaagggcatgggcggtggcaatgtcattacctccagtgtaactcgtggcaatatcaattttgaaggcgcgggtgctgctaatgtcatcgtgaaaaagggggaacagggcgatttgacgttccgtggtgcaggtctggcaaacgtactggttcatcaaggccaacgtggagaaatggatgtttacgccggcggtgcagcgaatgtattggttcggatcggtgatgggcgatatctggctcgtcttttggcgataggtaatatctcgatccatcaaggcaatggcgatagccgagttagcatgtttgggggttacaacactcatagccaaataggtaatggcaacgccaattggttaggtgcaggcggttttaatgtgatgacccaaacaggtaaggggaaggtctcctcggtactggcggggggtgccaatgtgctgactaagcttggtgccggtgatttggatgccggtatgcttggtggtgcgaatattatcacgcatctcaacgatggtgaaatatcaggtaccacggcggttgcgttagggggggccaatattctgacgaaaaagggcagaggtaaagctattgcgctgatgggtggtggtgccaacgtgttgactcacattggcaatgggagtacgacggggatgatgttaggtggcgctaatatcttgactaaagtcggaaacggtgacgccacgggtatcatgctcggcctgggcaatgtgttgactcatgtcggtagcggccagacgctgggagttatgggagccgcaggcaatgtttttaccaaagtgggtagtggaactacgattgcggccatgattggtgcaggcaatatctttacccatgttggtaacggtgatgcatggggattgatgggaggtttggggaatgtttttaccaaagtggggaatggtaaagcactggcattgatgatagccgctggtaatgtgtttactcacattggtgatgaaatgagtgttgccttgatgttggctaaaggcaatatcgccaccaaagtgggcaacggcatgatgctggcagccatgatcggtgaggccaatgtgatgacccatattggtaatggctcaacctttgctgcgatgatcgggcagggcaatatcctgacgaaagtgggcaatgatttggcgctcggtttgatggtgggtgaggccaatatctattcgcatgtaggtaatggcaccagtattggcttgtttgctggtgagctgaatgtaatgactagggtaggtgatggcacaacattggcggcaatgtttggtcaagccaatatcatgacgcattccggcaatggtttaaccggcgttttagccttaggagaggcgaatattgtcaccaaagtgggggatgattttatgggagtggttgcggcggcggaggctaacgtcatcacccataagggatcatcaaccactgctgccgtgctattcggtaagggtaatatcctaacgaaagtgggcgacgggaccacagtcggcttacttatttccgatgtgggtaacatcatgacccatgttggtgatggcacaacagtgggctttgctaaaggtaaagccaatatcattaccaaagtggggaacggtaccggcgttaatgcggtttggggggacgcgaatattctgacgcaggttggtgatggtgaccgttataacttcgccaaaggtaaagcaaacattattaccaaagtgggtaataatcaggaaatcacggttgttcagggtgatgccaatatcatcacccatgtggggcaaggtgatgattataccggtgcttggggcaaagctaatgtgattaccaaggtcggtgatgggcgcaatgtcgtgcttgccaaagctgatgctaatattgtgactcaggtcggtaacggtgacagctttaatgccttgtggagcagaggaaatattgtcactaaagtgggtgacggtatgcaggttactgcggcaaaaggtgaagccaatatcacgaccaaggtggggaatggtttaagtgtcaccgcgacgcatggcgattttaatatcaataccaacgtgggtgatggtatttctattaacgcagcgtggggtgaatataacgttaatactaaagttgggcagggtctcaatgttgcgatcatgaaaggtaaaggcaatgccaatattcatattggtgatggtctggggattaatgcctcttatgcccgtaataatctagcgattaaggtgggtaacggcgatttctacacgctttctattgctgaaagcaatacgcaaagtaataaccttccttttctgtttaaaagtattaaacgaactgtgttaagtgtggaaggtagtcaggcaattaactacctgattcacggtaatgaggcgaatagttctggtacatatagaagccgaggggcgattaatttaactgaagtttctgccattgatggtttccagatgaatgccatcgatgatgttggttcggatctgcgtgataaattaagcggcacagtaactcaggtggagattcctgatactgaggctatccagaacgccttgcatattggagacaaagttgattcgacgcagagtgaatcatcatcacaagctgacgctgttattaaacaggcaaaacaggacagcgctgagcaaaatgcgttaaatgataaagagaaggcggaggaaaattatcgcattctggaacaagaaagggataaccaacttaaagaaatttcaaaaccacaattccaattggaatcaacagatcagaatgtgctgaataccaatgggcaagtacagcgtgatgcaataagtggagagtctagggcagtaacgaaagagttgctttccatgactcaacgtctgaatgcgcttaatgacgatgggaattacgctggggaattgggtgatgagtggcgtaatcggtttgctgtgggatatttggaccgtattcaggagaaattagatgacaccaaattgatctcacagaaaaaattagctgatttatcgccgcgctttattgataaccaacaacaagtcaaaaatgcagttggtaaatcagaaacaggtttagagcaaagttatcacaatataaagaacgcagacgacaatattgaggatgcgcatacaaaagcgaaatcaagacagaaagaagcagatttacaacgtctgcgggcaacaaaagcggaaagtgacgcctatgccgtgtatgaagaagcgaaacaacgcggtgaacatgatagctcggtagcgaaaaataaagccgctcaggtacaggctgatgcgaaaggtgcgaaacagactggtgatgtaaaacccgagcgtagcggggcgaccggcagtggcttgtctgggaaggcttatacaccaatcgacgtagcgaaaccgaaaagtcatatcaatcctgaagccaaaatggaagctaatggctggaacagtgaagatctcacattaacagccgcagatttggcgggattgaatagtgcgcaacgggcgattaatcggctacagatcaacaggagtagtcgccctgagaatgtcggtgcttcgatcatttcgctgcttaccggaacgccatctgatagggttgtggaacctatctcgaatcaaaccagaaagttaatcacaacagcccctgtaatgtcgggtatcaatttgcaagggttagggcaagttatcggtggagatagctttaaatcccattcttccatcttgagagagtttgagccttttttgctgagtcagggtgacaaacggtttattgcttcaacgaaaagatatcttggtcagataaataccgatcggcccagtaaggcgctggtggcagtacgtgaggcgttcaacaatgcggccgaacaacctgatgaacagcatgtgttgcaacttgagcaagcgcttgctcattggcaacagcatgatcccaatgaatttgccaagcgtggtcgattagtcaaaagcctgcgttttgagatgggggaactggttgcctaccttcaggcaaaaagagctgaatcagccgggattttaggggttagcttagcgcctgaccatgttgcacagtttgaccaacaggtatcctttgacgggttcgggcgtgtggtgggtctgaaaggcgatatcgcacaaagcgacattcatcgtcttactgatttacaaatcaagccattgacccagattaactctgcggcggagcgggaagcgcctaaaactgaaagtgaaagtctcattgttttcgttagccgattgcaacaagaagcgattcccgaagggatgccgctaattgaacgagccaaaaacctttggcttagcggacaagtcacacgacaggaaaccattaagctatttgaggatgcggttagccaattgcagacacatcctgaattacacacgttagctcagcagttattggctgatgctcgtaaagaaaagaccacgggacaatatattgacaacctgtttggccgccattttgattctgaattggccgatgagttggtgaaaacagcgccacaggatgctatgaccacagcccggcagacaggacaatttctggtagagagatttgaacagtggatagggggtttttatcccgatgtcgccgagcgtgaaaagattattgctaaaaagatggccggctttgccagggccattaacaaggactttcgtccctggtttagtcgggtacctgaattgacgacgttcctggacgaaccgacttttgccaatttcaaaatcatgatgactcaggttgatgatggttttgctgtgattaagataccatttctggccgtaaaaatggccattacctcaggaatggggatggggcgtgcacagtggaaggttgcaggggatcgcttctatgaggaggttatcaccaaagcccgttcgaccagcagtcaactgactagcggggctgatgtcacatataacgttgaaataactgaaaagcagactaacgattatggtacagcgttgccctaccagcctgctaataacaagcatgatgactttttgtatggcagaaaggttgctgcgggccgaattttggtccccggatgggaaacgagatttgagcataatgcgttagcgcaaggccactctgtggtgacaggagcctccggctcgaccaatatcatggttcacctcaataactatattgctagtgaacagattgccagtgaacagcctactttctcggttagacagagctatctcaacacgctggtgtttctggtatttgatggtggtcattctgtcaacgaaagtctggcggtttatcgggcactacaggtaaccgatgatgaacaacgtaagcagttactcaatagctacactgccaattatagggagctggtggatattgccggtgaagaaggcaaagtgtgggtaagccaggcgctggataacgctttccgggaaactggggagttctatcagaaacatgccaaggtgaagccacaaagtcgcccagcggtggaagcgttagactggttatcgggtaagaataagcggccagagcctactatcatcgacgatactcatcaggataaaaaaataagcagactactcggtgattggcaaatggagcaggtgacgccacaagctgatggccgtgaaactcgctttgatggtcagatcattatccaaatggaagatgatccgatcgttgctaaagccgcggccaatctggcgggtaaacactcagattctagcgtagtggttcaacttgattctaagggcaaatatcgtgtggtttatggcgatcttacccgattatccggtaagttacgttggcaggttgtcggtcatggccgtgatacgtcggaacaaaataacattcgcctgagtggttacaccgctgatgaattggcgaccagattaacgcggttttatcaggacgttaatcagggtaaaagcataactcacaaacctgatcacatcagtattgtgggttgttctttgataagtgatgacaaacgggatggctttgctcgtcgttttatcactgtgttagataagcaaggcattcgcagtgatgtttccgctcgcagtagtgaagtggctgttgatgtcagtggacgcaaatttacccgtgatcaaaataaccaatgggttaacaatctgcctgataacaaaatcgtattaagttggtatgaccaaaatgagctgatcacacataccgaactagttcgccgtggtattgccgaaagtgatattaacttctccaaggtagggtataccgaagctgatactgttattaacggagcgatctcgggtaacgttgaactatttgttaaaccaaacaaacgtgaaaatacgattcagattgattccaatgagaaaacgaataatcaactcagttactccggcaatatccaggtgaatgtgggagatggggagtttaccgcactcaattggggaacctcgaacgttggtatcaaagtgggtagcggtggttttaaatcactggccttcggtgataacaatgtgatggtgcacatcggtaatggtgatagtaaacagagcttcgatattgcaggctatcaagcgcttgaaggagcgcaaatgtttatcggtaatcgtaatgtcagcttcaaccaaggtcgcagtaatgacctgattgtgatgatggataaatccattccaacgccgccattgattaatccgtttgatggtgtggcgcgtattgccgatgtattgcaaggtgtcgcgggtgccagtgaggatcaggattggttagcggcacaagatcagcaatggaccattgccggtgcgaagaagttcgtacaggatctctctggcttagaccaaaccagcaatgtggattacaacacgttggttgagctggattcgcaacatgaacgtagcagccgtggtttgaaatatgatgctgaattaaccttgaacaagaagtttaatcagtggctaggggaacatggcaatggcgctgatatgggcaaaataagtcgcatggataagtttcgtcaggctaatcagaagctggccttcaactttgctgtaggcgggcgtggcgcggatattcaggtgacaaccggtaactggaacctgatgttcggtgaccatatccagtcgattctggataccaatctgggttcgctgtttggcctgatgacacaacaatattcagcaactggcatggcgaagaccacctttacctataatccacaggatttgccgcgtcagcttaagaataaactgattggccgcttagcgagtgtaaatgcagataccaccttagcggatatttttggcgtgaactacaccgcagaggggaaaattatttcccgcacaggcgaatcggttgatggtgaggcgattctacaagagatgttggaagtgattggggagtttagcggtgatcaactgcaagcgttcatcaatccagaaacgttacttgatagcctgaaggcgggtattgatatgggcgaggagggcgtcaggtcatttgcggagagtcatggcctgaaacagaaagcgcccgatgagcgtcaggaatcaggatcttcggtgaatatcaatggagaaaatgttcagaccaataataaacccaagcctgcatttggttttaattcgctgaacttacctaatctgtttgcaacgatgttcagcgaagagaagcagcgggagatgaaatcgttagtggctaacctgaaagaaaatctgacgactgatctgcttaatatggaggaaaaaacgtttgatttcctgcgtaacagcggccatctgcaaggggatggcgatatccacgtatcgttggggaactataacttcaactggggaggcgacggtaaagatcttggtacctatctgggcgataacaataacttctggggtggccgcggtgatgatgtttattactcgctagggacttccaatattttttcaggtggtgaaggcaatgacttgggcgtcctgatggggcgtgaaaactggatgtttggcggtaagggggatgataccgcagtggtggctgggcggattaaccacgtgtttatgggggaaggcaatgaccagacatttgtctttggtgaaggcggttttattgatgctggtaacggacaagattacgttgtcaccgctggcaactataaccggatggatactgggaaaggtcaggattatgcggtgatcattggtaataataatcaagccgaattgggtggaggcgacgactttgccagagtatttggcaatgacaaccggcttgatggttattgcggcaatgatgcgattaagctgatgggctaccatgcggtgatcaatggtggagaaggtgatgatcatctgatagccgcggcgatttcgaagttcagccagcttgatggcggtgaaggtcaggatttgctggtattaggtgggtatcagaaccatttccggggcggtgcaggtgtggatagttttgtggtcagcgaagaagtgattgataaccgagtgagcgatattaacgcagaagatatgatcttgtttaacggtgttgactggcaaaatttgtggttgcagcgtagtgggtatgatctggtgctgtcagtgaagcgccatactcaggacaacacggctcaagggagatttgaatcggagggttctgtcatctttaatgattactttaatggcaatcgtgccaaattggtgactcggatgagtgataagaacgcgtcaggggaacgcgaatttacggcattgtcagataatgccgtggattctttgatccaggcaatgagcggttttgctccggcagtgggtgataatggttttattgcgggtctggacagtcaggcgaaaacggctatcgcaacggcgtggactgatgtgacgattggtaaggggaaatttgcttaatcagctctttataaatcagtaaaaaagttttaataaggtggctcacagaaaagtgggccattttggggatttttattcaggaattatttctgagttttatttgttaatgcttttactaattctcggtagattcacataataagtgcaacattgttaacctggaagtaaacacatttgtattcccttaaataattcattcggtgtttctcccgttcctatattatacggaacccgtgagattggtggggcaattatttcagccaggatatataccgaagatcaacaatgatcatacagcaacattttgggttgtgttggttgctatacattttttagcctaaagataaagaatctttaattctttatatatcaggcatatagtttctaactcattgactttattagagttaaccttgtcagggttgcgcatttagaggtacactatatgtgtagattgccagtttggtatttcgaaaaagtcttggaggtttctatgttttgcgaagaaaaagtagcccaaatggctgcctacttgctgtataagcgcggcgggcgcatggcatatctgaagcttatgaagttgctttatctggcagatagggtatctatgaatgactatggctatcctatcactggcgatcgaatggtatctatgccgagagggccagttttatcgcaaaccttaaatttaattactggagattacgccagtgatgaatttgggtggggggcatggattaaaagtgaaaagaattatgaaatttcactcaaacggaaaggtataacaagggatgattttgaatctctttctgatgctgaattagaagttctggatgccatttgggaacaattcggtcatatgagccgctttgatattgtggagtatacccataaacattgtactgagtggcaagatccaggcggcagttcttatcctatttcaccaagttctgtttttattgctgtcggtaaatcaccagaagttgctgagaaattggcgcaagagttaatagaaaggcaacaactggactgttttcttcaaggattgcggtgatgccgggtgggattttaaggaaaggaagtttacttatcccatctggatatacagatcacttatatattatctgctgtgatccagttttttaccctaaaaaaacgaagacatgttttttggctgtaaatattagctctttaaaactggacataccgtatgatcgaacgtgtatattgaattgtggcgatcatccttttattagacatccgagttttgttttctatggtcgcgctgatatttttggctcagtaaccgttgaacagcatatggctgctggtgatattaaaatccatgaaccatgtggtgattctgtttttgatcggattctttctgggtttgatatatctccgcatgtaactttagaaattagaaatttctataaaaaatattgtattaactgaatttcgttttaaatattaaattcaaggctgcacttcggtgtggcctttttttatgggtggaatatggcaaaaaaatcaaaggtcaaaaaggcgatggcggtaagcaacgaactctaattgaggccctagactcaatttaatcaatatctgaggtcaagctactaatagctcttggtgaaggtgaatttattggtggattagatggtagcaatgtctatctggacgatacctctatacccgccatctttcaagttgcctctttgttggctgcactcggtcacatcgttctctatgctcccgggattcgctcccttgccgtcgcgatgcatcttgaaatccataaggtatattgtagttatgccagcaacttcaatctgagaagagcgggttgatctctcctgattgatggaagacttttgttgggattggtatttgttgtaatagacacaaataagattggaagatttgctggtctctaaggggcctgttagccccgattttaggattcaggtcaatattcacttcatattgtgttctacctcctgcatagattgctgcacgaactctgcaaatggcttcacattctttcctaccgaggctgattctaacgctgatagatactgagttctatttttgagtttaatcaccgtccaggggtatcctccgattaccagcaagaaattcattaagaatctggcagtgcggccattaccatcggggaacggatgaatataacccagaaaaagatgccccaagatagcctttaccacaaagtgtttctcagtagcgatcaactctttcagtgcttccatacagtccatcaattgctcgctggagggcggtacatgcattgaagtgcggatatagattggtcctttgcgaaatcccgccaaatccagtctgtcgataattccggcatctacacagggattgaacaacgcagtgaaccagtcagtcaagccaacgtcaatcaggtagtggatgtccaagccttccttatcttcatgtgcttcacgcagtagctctttcaccttgttgaaggcatcgtaatagcctctggcagccattgcatccttctgctccttgtccctttggatggtattcggcgaccagtcacctttagacagacgctcgattaattctggcgtaaccttgtaaccctcgatggatagtgagttgtaggcatcgcttatgtagaggctgctcatcatggcgtgtgttttttcgattgagcgctcaaagaagtcaaaaggtggtggaaagtcatcaaatacctcgacgacttcttgtctcatctcctgccacaagagcctcacacgaactgcgcttggggattctccccgactaccgcctactatcatcggaatatggccaaatgggttaacctgcttaataccttcaaaaccggctccttccatgatggtttgtagtttccggctttcggccctcatctttagctgctggtaggcaccaattaatctgttccctgaagcaacattcttggttgtcagtactgcttctgaaagcagactcagatcagcattcctgagtgctagctgaatgcttatagggttggctctgaaagtttgtgggccagtttcaacgagtgcgctttctaacgaatgaacatttataccgtttactttgacagtcttacagggaacccttcccttgatgatcaccatactcatgttgttaggtagattaagtgtgcgaggcgtcgtgtctgaggtgtagacgattatctggtttggtaaggcattgtttgctgtatgtaaatcaagagaggattcaggacttagccagtaatcatcttcgaagatactttcgacgtactgcccaacgaaagaccagatggattcataccaaagtactgaatcacccgctttttcagtggtgagatctgcatccaggagataccatcctctgatgatttgcttgaaatagcctttattgatcagaagtgtgcgttgtttatcagtgattgacttagaactcagcacgttgcccacggccgcatcgcttgcagctctcagcgcttctgccaacctttcgtttccagtttttgccatgtctttcttccagcagatgttcaagtattagctaatacgggaatacaatattagctattacgatattgaattactagcttttacgaacttacattattagcttttacactcaaatacagtaaatctaagtcctctatcaactgattgctgatggtcaacatgctgcaaaggccaaacagatcgtttgggattttttataactcctcatattgctcaaaccgaattgagttccttcaaagtgctcgactatttgcaaagttatttagagcaaattaaccataatattaataacagtattctttactacaaagttattaatttttttatttaatgttacagatcgcatttttgtgaaccaaagagacgctattatgcatagtgaaatcgcttaacgacggacaaagatgaggttgtagtctatttgtccatataacgataaaacctgctattcaatcttaataattactattcattcagaggtctttatgggcagtaccggaagtgtcagtgcgtgggatgaagcgttattaattgcggctattcaatatcctgttcctattattaggggacctgaagatattcaggttcaagtgcagcagatttgtaaaacaatggattcaactaaagccggttatcctgacttggattttattgtatttcctgaatattctgctcagggattaaataccaagatctggacctatgatgaaatgttattatcgttggacagtccagaaattgactgttttcgtcgagcttgtattcgtaatgatgtttggggtgtgttttcaataatggaacgtaatgaagatccgtcacagataccttataacaccgcgattattattaacagcaatggtgaaattgtattgcattaccgtaaattgcagccttgggtgccgattgaaccctggatgccgggcaatctgggtatgccggtctgtgaggggccaaaaggtgcaaaattggcggtgtgtatttgtcatgatggtatgtttcctgaattggcacgcgaagccgcctataaaggttgtaacgtttttattcgcatttctggttattctacccaagttaacgatcaatggatttggacgaatcgtactaatgcctggcagaacttaatgtataccgtatcggttaatctggcaggctatgatgaggttttttattatttcggtgaaggtacaatttgtaattacgacggtaatattatccagcaagggcagcgtaatccgtgggaaattgttaccgccgaactgttcccgcgtctggcggataaggctcgtgagaattgggcgctagagaacagtatttttaatctcggttgccgaggttatgtcggtaagccgggcggagagagagctaattatctgacttgggtgcgcgatttggcaaacggtgaatataaactgccttgggatgaaaatatccgtattcgtgatggctggaaatattacccagaaggtgtgaaactggggccattaccgaaaatcgatgaataactgacaggttgataatacggcaccgcaaggtcattgtggtgttgttatttttccatcttgaaatccataaggtatagactaatttaattttaaattatttatttacgaaataaaattaatttttatattaattattggctgccctaaatgatttattaaaaataagtgatcatctggaagggattcagttaaatttttgcgatcttaacatccaagattaacggaaatataagtaatcgatattttgataaagggattatcattatgcgaatgcaagttaaaaactgattgaaatgaatggttttcataaagtaattgttgtaaatataatgttttctctttttttcttttctggtatttgattctttaggctcttctattaatgcattcggtaaagatttgcctgagaaaatatgggaagatgttttttgtagcttggtagaaatactataaatggtaatgactaactaataagacagagaaacagattgtggcaaagaaagaaaaacggcctcaccatgacggattatttaaatattttttaacgcagcctgaaacggccagagagtttctatccctttatttgcccgaagaaatccagtcgttgtgtgatttagccacattgaaactggagcccggcagttttgtggatgagcatttacgtcaactgcacagtgatgtgttgtactcggtcgaaacggcccggggacagggctatatctattgcctgattgaacatcagtccacccctgacccgttaatggcctggcggctgatgtattatgccatgttagccatggcggctcacctgaaaaaaggccatactgaactcccgttggtggcacctctgctgttttatcatggtgagattcggccgtatccttactcaaaccggtggctggattgtttcacgctccccgaacaggcggctcgcttataccgtcaggcgtttccgttggtggacgtcagtgtgctcagcgatgaagagatcctgacgcataaaggggtagccctgatggagctggtgcaaaaacatattcgctgtcgggatatgcaggaatggctcctccaattggtggaactcttgaatgcagggtataatacaaccgagcagcgcaatgtggtgttacgctatattttactgaatggacatacgctggatctctcacattttgtccatcaactgattgaacaatctccggagcatgaaacgatgttgatgactattgcagaacagcttgaacaaaaagggcttgagcgaggtatcaagcaaggtattgagctaggtcgagaggaaggtattgaactaggccgagagaaaggtaaagtggaaacggctcgtgccttattacggcatggcgtgagtttggatattattgtcaccagtaccggactgagccgggataaaattgaaatgttaaagcattaaattcatcttctcttttacagcaaaatgccgatattcaagatcggcatttttgttcttattccaggtaatggctatacaaggcacttttacgtttgcccggcgaagctgaaaccggtcaaactgtagtagtgcaaacctcgttagcagtcagagcagggagtttttcctgctctgtactatcagtctaaatccaattccttgagcttcccttttctggttcttaactgagaggtagattccagaagacgattcgcgttggttggtgatctcatcaaataagctgtttcttgcaaagattcgacatcagttaatgacataagtatgcaactttcgccatttttacgagtgataatcactgggctacaatcgttcacgacatttgtcatcgtttcagaaagattttgttttgcttctgagtaagttaacactttcatttatcctacctatgccaagaaataacctgaaaaatacaacgaaatatccattcatcgtatagcatattgtacgattttttttgtatcttgcagacttctaagtttgtaatttgtggtagctaagcgatagcggtcattattatcagattaaccgggatgtaatatgtacattgtgacaagtacaaatatgaacataaacatctttttatagtaatgacatttggctatagttgaacatgacaaatgacggttaagggggttttatgcgagcttatactccctttgctcaacctattgataagacgctttggcgtttcgcaggtctaccaggtaatcgaggacttgatctgactaatgtcctacagtctggtttgcctatagaagtctttgacagcattcacaaatggtcagatatgtctaaagccgacattatgcgtatcgccgggattaaggagcgaaacgttgcccgattaattcgtgtgtttgatgccgcagtacaactttttggcggaaataagaatgaagcatggacatggttaaaaaatcctgtgagggggcttggtgcagttactccaatgtctcttaattgcgactgaaagtggtgcacttgaagtgttagatctcattgggcgtctggaacatggggtgttctcgtgattttctatagaattacgaaaaatcattctccttctttaacctctcttgtctagattaatacccagttaaatgtgaactgggcattttttaacgtcaggatagatagaatcgatattaattatttcaaatgattattattgtaaatatatattatgtttgtgaaattaatattattcgtgagaatatatttttggtgttttaataaagaaaaaataaataattgatcataattagtgaaacgttatatcttatgtgaaagaaaaaagttttctgcgttaaatattgtttttgaatgttggttttgttttatttgatagatttatttgactgttaattcctgcactcagtatttcagataaagcttaatcattgagcaggaatgtttgtttctgccagaatggtcatgctctttggttacagttataacattactaataatttgctctgttatctttttttgctgaggaaagacagaggatttgtattgtttgtgaaatgggatgttcaatgtaatcatgatattcgtcgagggcggttttaacttctattaaactaaaggattgtttatggggaaatcatcaaacaggagcgcggaatatttctttaccgggaattatttcgctgatgacaatgataatgacattgaggccattggatttgggggttacatttatgcctgcggaggaaatgaccatattacgctggggtcgattgccgccaaagtctataccggcacaggtaatgataccgtagttggtggtgcagcatatttatcggtcgaggattctaccggtaatctgaccgtaaaaggtggtgcgggttacgttgatattgataaagatggtgatggtgatatttcgttttttggcgctgcgggtggcgttgttatggatcataccggccatcacggtgatttggactttaccggcacggctatttataacgaaatgaaccgtgacggtttgacgggtaatatgatcttcgaaggttcgggcggttacaacaaattatggcacgaaaccaatcagggcaatttatactttaatggtgctggcgcgggtaacaaaatcgaccgcacttggtatgacaattacaatggaagccgtggcgatgtcacatttaatggcgcaggggctgcaaacagtattagctcgcggatagagagcggtgatattgttttcaatggggccggtgctgataatcacattatacgtagaggtaaagaaggtaatattatcttgcatggtgcaggggcattgaaccgaattaagcgtattcgccaaaaagaagatatttatgcgcagactcgtggtgatatttcctttgaaggtctagggggttataacaaaatttattctgatgttgcacacggtaatattcatttctccggtgccggtgcttacaacgaaatatctagaataggtatgaatgacgattttcgtgatgaggcgctggaatatactcaagttcaagatatcatattaactacagcaacgatgggtggaagttggattcaaaaaaaccagcaagtgacaggcattaaatcaacgactgagcctgatacttatctctttgcgtttgttgacgaaatgtatacaaaaatcagcaaaattcagctccaaaatgatcccgaaaccggtaagctcaattattacgccacctcttggtataaggaaggtaattaccttaatggtctcgcttcaacggaaatttcttctggtaatggctttgtcaataccaataccaacgatgcttatcgtctttttaatttaatgattgaacatcaccaaccgatcactattcatgcggttggagagggtttgtctgaaaacgagtgggttatttgtgctggcggggtaatagtcagggcggaagatattaccctctttgaggcaaagatgggagggtatgcgatcttttctgatcgtcagaaagttgatgttgccgcgatgagatcgaatcgtcaaccaaatacgtatgtgtatgccaagtatctggaatcatgcactaaagtagtggtagttaaattggaaaatgatcctgttacgcaggaacttaaatattttgccagcgcgtggtacaaagcgggtgatcataccggtaatttggcaaatgaagatatttcgctggcgaacggttatcgcgctataaatgcgggtggctgcacactaagtcaactgcaatatagtcttaatacaacaatacgtcgtgcttctgatcgattagcgcataccgaagagtatcgtcagcaagaacttgtgaactcatttgcccgtaatggtgagagctccggtgatattcaatttagtggcgctggcggtggaaatattattatatccagcgtcacgcaaggcaatgttaattttaacggtgctggtgctgctaacgtccttgttcatcagagtcagcgtggagaaatggatgttaatgccggaggggtggcaaatgttgtggtgcgggttggggatggacgatttctggctcatcttttggcagtgggtaatatctcgatccataaaggtaatggtaatagccgggtggtgatgctaggtggctacaatacgcacacgcagataggcaagggtagagcgagctggttaggtgccggtggttttaatgtcatgacccaaaaaggcagtggccgtgtttcctcggtattggtgggtggtgccaatgtcctgactaagcttggtgccggtgatttggtttccggtatgctcggtggcgctaacgttatcacgcatatcactgatgatgccgaaatgtcgaatacccgggcaattgcattgggtggggctaatgttcttaccaggaaagggcatggtgatgtactagcagtcatgggcggcggcgcaaacgttctgactcatattggtaacgggaatacgacaggtgtgatgctcggtggtgccaatatcctgaccaaaataggagacggcgatactactggcactctgtttggggtaggtaatgtactgacccatgtcggtagcggccagactttggcggtgatgggggccgcaggcaatctcttgaccagagtcggggatggagttgtgattgccgccatgattggtgcaggcaacctatttactcatgttggtaaaggcgatatatgggcattgatggggggtgcagtaaacatctttactaaagtgggtgacggtaatgcgttggcactgatgatagccgcaggtaacgtgtttacgcatattggggatggtaccagtgttgccctgatgctggcaaaaggcaatgttgcgactaaagtgggtaatggtatgacgctggccgcaatgattggtggggccaatatctttacccatgtcgggaatggtaatacttttgtggctatgatcggtggggccaatgtgctgaccaaagtcggtaatgacctgaccgccgccttaatggtagggaaagccaatatctattcgcatgtgggcaatggcaccagtatcggtttgtttgccggtgaactgaacgtgatgacgaaagtcggtgatggtacaacgttggcggccatgtttggtcaggctaatatcatgacccatgttggcaatggcttaaccggtgttttggcattaggagaagcgaatgttgttaccaaaactggtaatgattttatgggggttgttgcgggggcgaaagcgaacgttattacgcatgtaggcaactcgatgactgctggcgtactgcttggcgaaggtaatattctgaccaaagtgggagaggggacaaccgtcggcttgctggtgtcgaatgtggggaatgtcatgacccatgttggtcatggcacaacggtggggtttgccaaaggtaaagccaatatcatcacgaaggttggtaatggtaccggcgtaaatgcggtttggggtgaagcgaatatcctgacccaagtgggaagtggtgaccgttataacttcgcgaaaggtcaagcgaacatcataaccaaagtgggtgatggacaagaagtgacgatcgttcagggtgacgccaatattatcactcatgttggtcacggtaatgattacactggcgcttggggcaaagcgaatgtcattaccaaggtcggtgatgggcgtaatgtggtgttggctaaaggtaaggctaacattgtcactcaggtaggtaacggtgacagttttaatgccttatggagtgaaggcaatgttgtcaccaaagtgggtgatggcatgcaagtcaccgtggcaaaaggcaaagcgaatatcaccaccactgtgggaaatggcttaaatgtaacagcgacgcatggcgacctgaatgtgaataccaaagtgggtgagggtgtttccgttaacgtggcgtggggtaatttcaatgttaatactgaggttggtaatggcctgaatgttgcggtgatgaaaggtaaaaataacaccaatattcatattggtgatggtctggggatgaatgcctcttatgcacacaataatgtggcgattaagattggcaacggtgatttctatagtttctctgttgcagaaagcaatacgcaaagcaacagactctcttccttctttgaacagatcaagcagacagcgttaggtgtagggggcagtcaggcgatcaactatctggttcagggcggtgaggctaatacgtctgggatgcacaaaggcagaggggcgattcatttagccgaagtttctgctattgatggttttaagatagatgaaattgcgccggtaagttcagatttaagcggtcgtttgagaggttctgtaacagcggtcgaaacgcctgagctcggaagtatccatgattcattgaatattaacgaaagcaatgctccggggcaggaagccaatctgatcatcaatggtaattttgaacaagttaattatggctggctgacaactaatggtattgaagcatctcactcagccggtacttatggtcttgataacaaggggcatggagaacgcgtcagtgaacttgatgcggatgtgaacaccacgatttatcaggatttacaaaacttgttcgaaggagaagttatttcactgagctttgattttgccaatcgtcataatgcttatcttactaacaatggcatggatgttttctggaatggtgaacgggtattctcaacttctggagatgtcgctggatggcaaaacaaaacgttggcgctaacagcaaaaacgggtagtaaccgaatcgaatttaagggtacaggtttaaatgatggcgtaggttatattctcgataatattgttgcgaaatctgagagctcactacccgccaagtctgttatcgaacaggcgaaacaggataatgcggcgcaaaatgcgttaagtgataaagatagagctgaagaagatcgccgtctcttagaacaagaaaaagagcagcaactggcagcaattgcaggaatgcagactcaactggaatcaacagatcaggcagcgctaaacaccaatgggcaagcgcagcgtgatgcggtaaaagaagaatcacacgcagtaacagatgaactgctctccatgactcaaggtctggatgcactgaatgacgttgataattaccacggtaaatcaggtaaccaatggcgtaatcaatttgccgctggattattgaacaatgttcagagtcaatgggaacgcaccaaatctactacacaggaagagttatttaatgctcagcaaaatgttaccgataatcaacaacaagtaaaaaaagcgattgcgcaatcggaggctggtgtagcgaaaagtgagcagcatcgtattggtgtgcaacaagatgtcatagatgcttataaaagaataaatttgaaagcggtacagttacaacaacagcgagcagaaaaagccaaaaatgaggctaacgttgcctaccaagaggcggagaatcgaggcaaacaggatattgccgtggctgaggataaagtggttcaggcacagactaatgcaaaggaagcgaaacagagagacaatgctaaaccgcagcgagtgggtgcccttggcagtggtttgtctggagaggcttaccagtccacggctatagttgaaactagcagttatgttaaccccgagtttgttgtacaggcagatggacgattcagtgcaggattgatggaagaagatctggccgtactgaaagaggcaaaaaacaggattaatcagttgccggtcaataagctagcactgttggataaaaatctgctgacaacatcttctcaacatcgtggggcaatcaaaggggatgtgctacaaaaaattgataataagatcttcgaccttatcgcgaatgggaaagcgctggaggcttattcattccattttagccaggatggtaatgtgttggaaaaaatcagcaaaatcatcccggaaattggcagtgtgctcctgactaaaggggataccgctgagtctaaaaagttcatgcaaggattgtgttttgctttatctgcccgttacttaatggaagaacgtgtacagggttcagggggaggtaaagcttatatgttgtggttaaaagacacggtaaaagcctataacgacaaatcagtcaataagaaagccgatattaacgccattgaatcggctttgttgattcaatatcgccgtcaaaatattgggctggttattgaagatttattatcgatgcagtacagccagtctatggatagctctacccctgaagcttatagaaaagcgaatgctgcttatggcggcaaattgaaagctaatggattggccgggccgaatattaataatgcactgaattactctgttgaaggctatgaatccgtcatggataagttgcgtcatgtgagaaagtcgacttacatatcattcatgtctgaagaacatgccatgtccgttgtggtgcataaaaaacttaatcaaacagtttggtcattttatgatcctaattatggtggtaaatcgtttgctaactataacgatttccgccgttttatggatacgtttcataaagggtttataacgagttataaattccaggcaagtaaagagtctggccaaagcttttatattcactttaataagtttgaagagggaaccattgcgagatatgacggcgtttggaaaacgtcacgtgatggtgaacaaaactacgtattgcgtgcattgaaagagcaaggcacggtatttaacttaggttcaaacgtcactgggcgtgtcattgattaccggaaaggtgatatcaccttggaagtaacggctaagcaaggtaaacaaacgaagaaggttctggttgacgttgagagcaataactttaagcaagctgccagctttgtgcagtcgaatatcaataaagtcctctcttatccggcagcaaaccggctgatactgaaagtgccggttgagggggatgcggcaagccccttactggaaaaatggtcatcaagtgacgcgatcaaaaataaaaatgcagaggcgtgggagcaggtaaccgtcaccccacaaaccgatgatcgtacaactcgttttagtcatcaggtcattattcaaatggaggatgacccggtcgttgccaaagccgccgccaatctggccggtaaacacccagattccagtgtggttgtacaactcgatgctgacggtaaatatcgtgtcgtttatggcgactctgccagattatccggtaagttaacccgaattctggataagaaattgacgagaagcctgttccaggagcaaagttttggtgtgcaccaaaaacagctccgaggggggaacaggctatggacaacttagttgaaattttctgtgatgtcgatgatttttgccgttttttcatccctcaatgggaacaattttgtctcgatagcgggcatcgtttacgccgccgacaaggtcatatgtatcccagtgaaatcatgaccattttgatcctttttcatatgtcgcattaccgtgattttaaacatttttatctagaacatatttggaaatatcaccataaggattttccaaccttgcttagctatcctcgttttgtcagtgtggctccttccgttttggtgccattatgcagctatctgactcaattaaaagggaaacccacaggcattgcttttattgattccacccgtttgagtgtctgccataacattcgcatccctcgacataaggtctttgcggggatagcaaagcgcggaaaaaattcaatgggctggttttacggtttcaaattacacctggttgtcaatcatcagggtgaaattctcgcgcttaaagtgactccgggtaatgtggatgatcgggaacctgttcgtgaattatcaaaagaattaacgggttctctttacggtgacaaaggttacctcagccaggaattggcggacgatttagctaaaaccgatgtcactttcatcacgaaaaaacggcgtaacatgaaagcgagtatgcaagctgagtgggataagataatgttaaaaaagcgttttatcattgaaacgattaatgggcaattaaaaactctttctcaaatagagcattcccgccaccgaagtataaaaggctttctgttgtgcgttttaggtggattgattgcttactgccttaaattgaagaagccatcactgaaagttttctactcagaagacgatttttcaatgacggattaagcagaattcgggttaagttacgttggcaaattgttggtcatggccgtgatacgtcggcgcaaaataacattcgcctgagtggttacactgccgacgaacttgctgtgagactaaagcagttcagtcacgatcttaaaccggtgggcaaacttgaccatatcagcctcgtggggtgttctttgatcagtgatgataagcgggacggttttgctcgtcgctttatcacagcgttagataagcaaggtattcgcagtcatgtttctgcccgccgtagcgaagtcgcgattgatgcaacaggccgtaaattgacccgtgatgcaaacaaccaatgggttaataacttgcctgataacaaaattgtattcgaatggaataaacagggtgaattgacgccccgtacagaaagggtgattcgcggaattactgaaagtgacatcacccttgccaaagtgggatataccggtgctgatgtggtgacgagaggggcagttgcagattatcgttatccttttactgcgccaaagaaacgtgaaaataccattcagattgacgccaataataaatcgaataatcagcttagctactccggcaacattcaggttaatgtgggtgaaggggagtttactgcgctcaattggggaacatcaaatgtcggtattaaagtgggtaacggaggctttaaatcgctggccttcggtgacaataatgtgatggttcatctcggtgacggagatagcaaacacagcttcgatatcaggggttatcaggcgcttgaaggggcgcagatgtttattggtaatcgtaatgtcagcttcaatcagggcagcagtaatgacctgattgtgatgatggataaatccatgccaacgccgccgttggttaatccatttgatggcgtgatgcatgtcaccggagtactacaaagtattgctcactttggcgaagaacgggatgggttaatcgcgcaagatcagcaatggacactcaccggtgcgagcaaatttgtacgggatatgtccggtttggatcaaaccagcagtgtgaactacaaaacgctggttgagctggatttacagcatgaacgtagtagccgcggtgtgaagcgagatattgaaaccacattgaataaaaaatatcaccaatggctaacctgcaatgtgactgatatgggcacaatgagccgcgcaaatagattccgtcaggctaatgagaagttggcttttaactttgccgtcggggggcagggggcagatattcaggtaacagccggtaactggaattttatgttcggtgaccatatccagtcgattctggataccaacctgggttcgttgtttggcctgatgacgcagcaatattcggcaacgggtatggtgaagactacgtttacctatcatccgcaagatttgccgcgtcagcttaagaacaaattgcttggccggttagccagtgtaaacgaggagacgactttagcggacatttttggcgtcaattataccgcagagggacaaatggtttcctgtacaggagaaccggttgatggcgaagcgattctgcgagaaatgctggccgtgattgcagagtttagtggggatcaactgaaagcgtttacaaatccgaagaagttgcttgatggtttgaaagcgggtatggatatgggggcggatggcatcagatcatttgcagaaagtcatggcctgcaagggaaagcgcctgacgaaaaccatacaccggaatctccagtgagtgtcgatggaaagcgtgctcaggccgatgataaagcaaaacctgcatttggctttaactcactgaatttgcctaatctgtttgcaacgatgttcagtaaagataagcagacagaaatgcactccttagtcacgcatctgaaagagaacttgacggctgatttgcttaatatggaggaaaaaacgtttgatttcctgcgtaacagcggccatttgcatgatgatggcgatatccatatctcgttggggaactataacttcaactgggggggtgacggtaaagatcttggtgcttatctgggcgataacaacaacttctggggtggtcgcggtgatgatgtttattattcaattggtacttccaacctctttacaggcggtgaaggagatgatctgggcgtcctgatgggacgtgaaaactggatgtttggcggtcatggcgatgataccgcagtggtggctgggcgaattaaccatgtatttatgggtgaaggcaatgaccaggcatttgtttttggcgaaggtggttttattgaggcgggtaacggacaggattacgtcgtcgcttccggcaactataaccgggtggatagcggtgaaggtcaggattatgttgtcaccatcggcaataataaccagattgagttaggtgaaggcaatgattttgccagagtatttggtaatgacaaccggatcgacggctatttcggcaatgatgcgataaaactgatgggctaccatgcggtaattaacggtggagaaggtgatgatcatctgatagccgcagcgatttcgaagttcagtgagtttaatggcggtgatggtcaggatctgctggtgctgggtgggtatcagaaccgcttccacggtggttcgggggcagacagttttatggttagcggagaggtgattgatacatcggtcaatgatatcagcgcagaagacatgatattgcttaataacgttgactggcgaaacctatggttgcagcgcagcggatatgatctggtgttgtcggtgaagcgccaaactcgggacaacgatgctcagggggtgtttgagtcagtaggttcggtgacatttgataattactttaatggcaatcgtgccaaattggtgactcagataggtgataagaacgcattagggaagcgtgaatttactgcactgtcagataatgtggtggattctttgatccaggcaatgagtagttttgctccgacagtcggtgataatggttttattgaggggctggagagtcaagcgaaagtggctattacaacggcatggaccgatgtcacgattggcaaagggaaatttgcctaattaacttcatgataattaagtggctcaagataagtgagccacttttatcgctaattaaccggttttctacattaattccgtattagtattaaggaaatgatgaattgcctttaacactgcgtcgggtttttctgcgtgaacccagtgatcgcaaccggcgataacccaagctttggcttgtggaaattgtctggtgatattattccggtactcttcctggatataagaggaaaggccgccacgaataaacagggcagggcgaggccatgtagggatttcttgccagccgatgatcttttcatactggttaattaataccggtaaattgaatttccattccccctgatggaatgatttcagtaaaaactgaatgacaccttcttcctgaatattttctcgcataatcttagcggcgtcttgacgggatttaactccggctgctgtcactttgttcagtgcggtaaaaatttggtcatgacggtgaacctgataggcaacgggggctatatcaataagaacaattttttctatccgctctggtgctagtgcagtcattgccatcgcgatcttaccgcccattgaatgaccaataataatggcggactgaatttgcagatgatccagcagggaaataacatcttgtgccatatcgtggtaatccatgttatttgcccgtggagataaaccgtgattgcgtacatcgacttgaatgacgggatagtattgctgcaaatcacgagccaaaaccccaagattattgagatcaccgaataacccgtggattaataccacagggataggagagagcggattttccggtatctgcatatggtagtttaatgggttgactaatttcatgatgagaattgttttctttcaggtattgatatcatgccgtgtatattgttgcttaaattataaaaaagcaaccaggctgtacaattatagttaataatttcttataattacatcgttctcaaaatgttcatgtatcaaaaacttgttaatttttctatagtaatacttaatgaattgaaaaataaaggttcttcgaataaataatatttttaaatggaaagttttaaataacttgtgagatgattattggttcaatcatcttagtggggttattgattgtgtgtttatgtgatctatatcttaaaaaattgtgtgttaattttaattttttgtgaaaaaataatgaaaatttactttatattttattaaataaaggtataaagtgcatttaacaaaaactatatcgttctaataagaataaatagaatctgatttatactatggattagggaattaagaagtgaagaaaaatttactaaagagtctttattttcaagttttgctcgcaataactatcggtatacttctgggtcatttctatccggagcttggtacagaaatgaagccattgggtgatggatttgttaaattaatcaaaatggttattgctcctgttattttctgtactgttgtaactggcattgcaggtatggaaagtatgaaagctgttggtaaaacgggcgctattgcactggtgtattttgaaatagttagcacaattgctttgattattgggctaattgttgtcaatgttatgcagcctggtgcagggatgaatattgatccctctacgttagatgttaaagcggtatccctatatgcggagaaggctgctgaacaagggataatagcatttttacttgatgttattccggccagtgtcatcggggcatttgccagtggtaatattttgcaggtcttattatttgctgtgttatttggttttgcacttcatcgtttaggagagaaagggaaaccaatcttcaatattattgatggtttttcgcatgtcattttcggtattatcaatatgataatgcgattggctcctttaggtgcttttggtgcaatggcatttaccatcggtaaatatggtattggtacgttggtacaattaggacaattaatagtttgcttttatatcacctgtattctttttgttatatttgttttagggacaattgcaaaagcgacaggatttagtatattccggtttattaattacattaaagaagagttattaattgtattgggaacatcatcttctgaatctgcattaccgcgtatgttagataaaatggagaaagcgggatgccagaaatctgttgttggattggtaataccgacgggatactcttttaatctggatggcacctctatttacctgacaatggctgcggtatttattgctcaagcaacaaatactcatatggatattgtgcatcaaataacgctattggttgtattacttttatcttctaaaggtgctgctggcgtaacaggtagtgggtttattgtattagctgcgacaatttctgctgttgggcatttaccactagctgggctggcattaatcttgggaatagatcgtttcatgtcagaagcaagagctttaacaaatctgattggcaatggtgttgcaacgattgtggtcgcgaaacgttgtcgtcagcttgatgaaggcaaattaaacgaagtgttaaatgccaaataagcaaaatctttaggtttttatctattcgatgaccaattaataaaatgatgccgacctttggtcggcattaattctaatcaataatagagtaccgtgtaatttgaaaaagctgactatttgaatggatagcatttctgtattgtactgattattgatatatgtgatttatttcagttgagatgtagcgaaaggtttcaaagaaatggatagggcaacataagcaggttggtgacaatgtggtcaatattatctctagagttgggtgttttggtagtcagtgctggagagtggtcttgtttacctgaatcagataaagaaatcaggttttatagggtggcataattaggtatataacgcgtaattaaggaagatgaataacaaaacgccatgtagggcttacattgaatagcacaaaatggtaaattaactaaacgtcaacaacttaataatatgaaatgtttaaaaaattaactttaccattaactgccatatttctttctggatgtgttcacactactcctatgcctgttcaaatatcacaacctggtgacaatttgatgtcatgcgagtctgtcatttttgaaatggagaaaatgcagaatcttgttaaacagaaggatagtgaattgaatggacaaatagcgaaaaattcagccttgggtgtcactggagtgtttttgctgattccgcttttcttcatagatactagcgatgcaaaaacggtagaaggaaaggcagcaaaagataggtacgaaaaactacagcaaatctatcgtgataaaagctgtgcagagaaagaaaaaaagtaaaaattctattttgaataaaagcgccaagtaaggcgcttattttttgtatggataagagaatcaataatgattgtatttatacccttcatctttcaagctgctgctttgttggctgctcccagtcacatagttatctatgctcctggggattcgttcacttgccgcctcgctgcaactcgaaatctattaggtatagattccactaaacaaaaacggacttgcttagacaagcattgaatttatttacatgatttaattggaaaaatctaagttcattaaccttggtgggatgtgcttctggcgtcccctgctggaatcgaaccagcaattagcccttaggaggggcttgttatatccatttaactaaggggacatagctttattataacggcttttcattcataatataaggcgttataaactgtttgcctatttaatgatcgcttgaattgagtaccattcaagttggattgtcagtaatatttacattattgatggtcatcggcgagtcgtgcaacaaactgatctgccggatctagaaggttattacttggagagatgtatgaagtatcgtttgggcggaatcgctcttgccgccgcattactagtgggatgcgctaattcatctgatactgttgaacaggagcgttcagacctattggaaggttttaaccgtacaatgttcaactttaattatgatgttcttgacccttatgttttacgtccagtcgcggtagcgtggcgcgattatgtgccgatgcctgctcgaaatggtttgggtaattttctgagtaatctcgaagagccggctagtatggtgaacagttttttgcgcggtaacccatatcagggaatgaaacattttaaccgttttttcctaaataccatcttgggtatgggggggctgattgatgttgcaacgatggcaaaccccaaattggcaaaagaagagccaaaacgctttgggagtactttgggctatcataaggtggggtatggcccttatgttgtattaccgggctatggcaattttaccctacgtgatgaagggggtaactgggcggatatgacttatccaatgctgagttatctgactatttggatgtcagccggaaagtgggcatttgaagggattgaaacccgtgctcgtttactggattctgatggcttgttgaagaactcgtcagatccttatttgatgatgcgtgaggcttacttccagagtcatgattttatggcaagcggcggtaaactgaaagccacggaaaatccaaatgctgaagcattacagggtgatttggatagcattgattgatatatccgttatctttcaagttgcctctttgttggctgcattcgctcaccccggtcacatagttatctatgcttccggggattctctcccttgccgccgcaatgcatcttgaaatctgtagggtataaatctttatttggtgttgaactgcgtagataaaaaaggatagcaatggagctatccttttttagagtggcatattgttagaatgcgtagttgaagttcacaccatacaaccaggcagaacccttagcttcgaattcgtatgcgttaggtaacgcttcagacaatttctctttaacagtgactttctgaccatgcatatatgaaacgcctacatcaacggaagcatctttgttaaatgcgtaggttgcacctgcactcaaccagaaacgatcttgatctggaatggagatagaacggttttcagcaggaatcgggctatcgtcaaaggcgatacctgtacggaatgtccaattgtcatcgtgataatacgttgtacctaaagcaatacggtaggcatctttgaagccttcatgtttactaaacaaaactgcaccgtctttttttctggtccctttcagttcattaaattcactccagcctgcatatgccaagctatagtgaatagcccatttaggtgctacgcggttgtaaccggaaacctcccagatatctggcaaattgagatccaatctaccgccaatggtttggcctccagtagcaggtaaattcactcccgctttttgcagcatttgacctagctgaacaggtacgtcatttttatagtcaccgtctttaaacttaattttaactttagagcggtaagtcaggctgtaacggttattttcatccacttcatacataatgcctgcgttccagccatagccccaatctttaccttccagattagcaacctcatctgttggttttacgagaccttttggcatcttggggtgctgatccagcatgtatgacagagcgcccgcatgacggacaatttttgcatccgcataaacagcgttcagtcctaaaccaaagctaaagtgatcgttcaggcgataagctccgctcagattgaagttcaacgttgtcaggtcagttttaccgccgatagggcctgcttcatagttattgctaaaatcggttgccaggccgaaattggtggtgaccgaggtaccaacaaaccattgatcatcgattggcataatgaaatgtatgttaggtatccaagcggtaggagcaatatttttagcgttagtacttttgcctgttactggggatttaccggtaatatcaacatctgggttgatatagacggcgccaatagagaatgatgggcgatcaaacagtgtcattgctgctgggttacggcttcctaccgctgcgttatcagcaacaacgccttccccggaaaaagcgcggcccaaagccgaagtagaaaattcatttaactggaaaccagcagcgccagcattcgatgaaattattgccactgcaaccgctaatgctgaacgggtgaacaggtttttctggttcataaccaaaaccctcttgtttattatttaactatgccacttatcttagcaaggagcgcaggattgtaggatcggtttgtcttgatgacaaatcagaccagttgtgaagtataggtctgataacagttggtgttgcaagaatgtttttaaaatattaccaagttgatatcaaaaacgcgactcagttaacaaaaaaatgatttttgatattaataaaaacgtttaaaaacgattttttaagatcaaatttcggcagataaatattctgtaagaggtagtgtgagtttcccggtagttaagagggataagatattaaaattcattatgaatattttagtaatgaaattatggctggtgtaatagacccgtgtcgcaaaaagaagcttgagaacatgttcgaataagtattgaaaccatttagttattaaataaattaaagttgcgcttcctctcatttttgatttattccggtttgctatttataaacattacgctaacaatgatctatcaggtcagacctgtctaggttggttgaagcgttttttcagtaatttgattcagttaacgataatctttcaggagccgttatgagtcgtccgttaacaaaagtgacacagcaaggtgatcgtatcgccattgtcagtgggctacgcattccatttgctaaacaggcaacatcgtatcacgacataccggctgtggatttgggtaaatcagtcgtcagtgaacttgtgactaggagtggtttactccctgaaaagattgaccaactggtgtttgggcaagtagtacaaatgcctgaagcgccgaatattgcccgtgaaattgttctcggtgctgggttaagtgtgagtactgatgcttacagtgtatcccgtgcatgtgctactagtttccaggcgattgccaatgtggctgaaagcattatggctggcacggtgaatattgggattgctggtggagcagattcctcatctgtattgccgattggtgtgactaaatccttggctcgtactctggtggagatgaataaggctaaaacgctatcgcaacgccttaagttacttagccgccttaaatttcgcgatttattgcctgtatccccggcggtagcggaatattcgacaggtctgcgtatgggagataccgcagaacagatggcgaagacttaccgtatcagtcgagaagaccaggatgcattagcacatcgctcccatattctggcagcaaaagcttgggaacaggggttgttggttgatgaagtcatgacagctcatttccctccataccgtgaagcattgcttgaagataataatattcgtaaaaattctgtactgacctcttatgcgaagctgcgtccggcatttgaccgtaagtatggcacggtcactgctgcaaacagtacaccactgacagatggtgctgcggcggtcatattgatgcgtgaatcagtggctaaggcgttgggaacaaaaccgcttggttatctgcgtagctatgcgttctcggccattgatgtctggcaagatatgttattagggccgtcatacgccacgccaatagcgctcgatcgtgcaggtattacactgaaagatctaactttgattgatatgcatgaagcttttgcggctcagacactggcaaacctgaaaatgtttgccagtgatgaatttgctcgtaataaattagggcgtgctcaggcaattggtgaagtcgatatggacaaatttaatgtcttagggggttcaatcgcttatgggcacccatttgcagcaacaggagctcgtatggtgacgcaggtattgaatgagttgcgtcgccgtggcggtggccttgggctgacaaccgcttgtgctgctggcgggttgggcacagctatggtattggaggtggaataatgactcaagctcagcatgatgctgcacccatcactacgggtacaaaccaaactgcttctgttttcagttttgacgtcaggccagataagataggcatcatcaccattaatgtaccgggagaaaaggtcaatacgctgaaagcagaatttgttgatcaatttctgaatgttttcaagcaagctcagcaatcttctggtcttaaaggattaatattgatttccggtaaaccggatacgtttattgccggtgctgatatttctatgattgccggatgtaagaccaaagaagatgcgcgagatttggctgaaaaaggtcagaaactattttctcagatagccaattaccctttgcctgtcgtagcagcaattcatggcgcttgtttggggggcggtttggaattggcgcttgcatgtcattggcgtgtatgttcacaggatgataaaactcgtcttggattaccggaagttcaacttgggttattacctggctctggtggtactcagcggttgccaaggcttattggtgttagttcagcgttggatatcatgctgacaggtaaacagctacgggcgaaacaggcattacggctcggattggtggatgatgctgtgccgttggatattttgctggatattgctatcgaaaaagtcaaaaagggtattcctgtgcgtaagcctttgccgtggcaacagcggctattagttggccccgtcggaagatactttttgtttaatatcgttcgtaaaaagacactggcgaaaactcgtggacattatcctgcacctgaacgaattattgaagttgtcaaagaaggtcttgaaaaaggtatgagccagggtttacgggctgaggcggtggcatttggtgaattggcaatgacacgggaatctgctgctttacgtaatctgttttttgctgcaacttcgttgaagaatgaaacggggtcatcagagaagccggcgaagatcaagcacgttggtatattaggtggtggtttgatgggtggaggcattgccaatgtaacagccacccgaggcaaactaccggtgcggattaaagatattaatgaaaagggcattagtcaggtattgaaatatacttgggatttgttgtccaagcgggtgaagcaaaaacgactacgcccggcagagcgtgctcaacaaatgatgctgatttcaggaacgacggattatcgtggtttcgcacaaactgatattgttgttgaagcagtgtttgaggatttgtcactaaagcagaaaatggtggcagaaattgaaacgaatgctaaaccagaaaccatatttgcatctaatacctcttcactacctatccatcagattgctgaaaaagctcaacgaccagagcaggttattggtctgcattattttagtccagtggataagatgccgctggtggaagttattccacatcaagggaccagtgagaaaacgattgctacagccgtttctttggcgaagaagcagggtaaaaccgcgatcgtggtgggtgataaagccgggttttatgtaaaccggattcttgttccttatatcagtgaagccgcgcattgcttggtagcaggagaacctattgaccatatcgatggagctctggttaattttggttttccggtagggccgattaatttattggatgaagtaggtattgacgttggcaccaaaatcatgccagttctggtagaacaattaggcccgcgttttgctgcacctgaatctctcgatgctgtactgaaagatggtcgtaagggtaggaaaaatggccgtggtttctatttatatgccccagggcccagaaaattctggcagtttggtaagagagacaaaaaagttgatagctcagtgtataccttgctgaatataacgcctgagtcgcatatgctctcgtcagaaattgctcaacgttgtgtgatgctaatgcttaatgaagctgttcgttgcttggatgaaggcattatcagaagtccacgtgatggtgatattggggcggtatttggcattggttttccgccattctttggtggtccattccgttatattgatagccttggttgtgccagagtggtggagattctgcgcaggctggaaagccagtatggagacagatttgtaccttgtgagtgtttagtgaatatggctgaacagaataaaagtttttatccatagtggcttgtactgtattgatgaaaagagggattccggtgccgttggggctccggaatcatattgagtgtttttgaataaaaaagatctctttatataccctatggatttcaagatgcatcgcggcggcaagggagtgaatccccgggagcatagcaaactatgtgaccgaggtgagcgagtgcagccaacaaagaggcaatttgaaagatgacgggtatagattcaagcaacatctattattgggttgtcgttcaaccattttatttatttttgttttgagtagaatgcttgttcaccctgtctgaaatgtttttgtagtaacaatttttattgtataactcagattgagattactgatatttattatcagaagtataactgcacttactcattcatacggtggactatgcaaatttttattatgcgtcatggtgacgcggctttagaggcaattagcgatgctgcccggcaactcactcctcgcggttgtgatgaatcgcaaaaaatggcttgttggttagcacagcaaaagcatcagattgatctcgtattggtgagtccttatattcgcgctgaacaaacgttacagattgttcgtaaatccttatctttgccggatggtgaagaggtgttgttggggttaacgccgtcaggtgatgcgactacagtgagtagttatctccagtttcttgctgagcaaggtcataacgctattttagtggtctctcacttaccattagtcagctacttagttgctgagctatgtccggcagaaacaccaccgatgtttgcaacttctgcaatgatatgcgtggatttaaacagccagactggcaaagggactcttgtctggcaggtcagcccgtctcaattggcagcaaaagcctaatgattcagcggcgtattggctcaaggctcatcaagttcgataagtatcaatagtgcggcgttacctccccattcctttggcgcttgatggaaggctatgatatctgggtgttgggctaaccacagaggtgtttgctgtttgagaatgtgttttccgtggccgtgcatgatgcaggcacaatagacatgttcacgacggcaagcagcgatcaaggctccaatttcctgtttggcttgcatttgagttaatccgtgtaaatcaagaaacagttctggcgaatagtcacctcgacgtaatttcttcaattcataatggtttgtatctccccttacgtaacgggtagggccctcactatcaaggttgggttgaaattcatcagaaaaatagtagctggcatcaatttgctcttgctgaattcgttcaggggcaatatagctggttttttttcttctgggagaatgtaagacggtatcttggttgatgcgtttagtgcctgctaccgattgttgaaataagtgaatctcttcctcattcagggagtatttatttttcatcattgctcagttaattaaaccattttgtgacaagtgtactgcatctttttaactattaaacctgattatatttaataaaacctgattttaccgagtttgtggtttaaaaatgctgataagaaggtatatccaggtagttaataaaataatttgacaatgacagttggttggaaaataaatgtatatacaattaaaaacctgatttataccctatggattaagaggtaacttgaaagatgacgggtatatcagatacagaccaatacaggatgctgatcatggtaatagaactgcgtgatactgatatcatctggcgtaatgcaagactggcaacaatggatcctgctgtcaatgcagcttacggattattaaaagaatatgatcttgtcgtgcgtgatgacaaaattttagctattttgcccaccgcagcattacagacgagtcgttgtcaggtcattgatgttcaacaacgcttaattacccctggtttaatcgattgtcacacccatttagtgtttggtggtaaccgggcttatgagtgggaacagcgtttaaatggtatgtcctatgctgaacttagtgcccaaggaggggggattaatgcgacagtgtctgcgactcgggccagttctcatgaacaacttgagcgttctgcgcaacagcgtcttactgcatttatggccgaaggtgtgaccaccattgagattaaatcgggttatggattaaatctggaaaatgaagaaaagttgctacaggttgtgcagcacttagcgcaacataacccgatcgagatcagccctacattgcttgctgctcatacttgtccacctgaatataagcataatcccgatgcttatatggatctgatttgcgaagatatccttccacaactttggcaaaaagggctgtttgaggcagtagatgttttttgtgagagtgtaggatttaatctggcgcaaactgagcggctctttcaggcggcacagcgttggaacattccagtaaaaggtcatgtggagcagttatctcatttaggcgggagtgaactggtcgctcgctatcatggtctttctgtggatcatattgaatatttagatcaggcgggagttgagtcgctcagtcacagtggtacggtagctgttttgcttcctggtgcattctactttttgcaggaaacacggtgccctcctattgatttattgcggcaatttaatgtgccgatagccgtatctaccgattttaatcctggaaccagcccatttgcttctttgcgaatggccatgaatatggcatgtgttcaatttggattgactcctgaagaggtatggttaggtgtaacccgacatgcggctcgtgcattgggcagagaaccgcgtcacggacagttgcgcgcaggagcttacgccgattttgtggtctgggatgcagagaatcccgttgatattttctatgagttgggtcataaccctttgaataccagagtgtttcgtggtgttatgactcattccagcatatataacagataaggagcggtaaatgaatttatggcatgctacttcgccgactatttggcaaggacgaaatgatttggcagaagcggataatgcactacggctttttcaaacagttaaactatctccgtattttacgccggaagaattttctcactatgttgctctattagggtttgaatgtgatgaaggtgtgaagcgcaatcagggaaggcccggtgccaatcaaggtcctgattatttgcggcaatcgttggcaaatatggctagtcataaagggcatgataaattggtagatttgggaagcattcgtgctaatcccaatcaattgagtgaagcacaacaagctttgtctgatgccgttacccaatgtcaatgtcagaatgtacgtaccttggtattgggtggtggacatgaaacggcttttgctcatggtgttggaatttatgatgcttttccacatcaacgtgttggtattattaactttgatgctcatctcgatttacgtcggtcgccgcagcccacttccggtacaccatttcgtcagcttgctgaatattgtcagcaacatcaacgtctgtttcactatacttgcattggcgcaagtttggcgtctaatacgcaggcattggtggatgaagcaaatcgcttgaacgccacgattatatgggataatcaatgtcgtgaaactatgctggacaaggtacaacagcagatacaagatatactccagcaagttgatttgatttacatgacgatcgatttggatgtattacctgcttatcagatgccggcagtctctgcgccagccgcattggggctgccattggagcgccttctgcaattaattcagccaatttgtcagagcggtaaactacaggcggctgatttggttgagctcaatccactatttgatatacaaggtataggtggaagagcagcagcacgtcttgcctggcaattagcacattggtggtattgattatctaaaataacagtactattgtgttttctattttggcaaagatagcttgatacagtgagtgtaattaatcacttaatatttttacagcataaggaatttattgtgacgactcactcatcaggatcatttgccaaacctgtgcctctgtatgccaaagtgaaacaatccatcattgaaaaaatctacactggtgaatggaaatcaaatgatcgtgttccttctgaagctgaattggttaaacagtttaactgtagccgtatgactgctaaccgtgcactgcgtgagttgaccgctgaagggctattagtacggctgcaaggcgtgggatcgtttgtcgctgaaccgaaggggcaatccgctctgtttgaaattcacagcattgctgatgagatttcagctcgttctcatcagcatcgctgtaaaatattaaaattatccgagctggatgcggatgtgaaacaggccgctgaattggacattattgttggtacgccgatttatcattcggttattgtccattatgaaaacgatgttcctgttcaaatagaagatcgttatgtcaatgctcaagcggtgcctgattatttgcaacaggattttacgaaacttacgccacacgattatttgtcaatgattgcacctctaacggaaggtgaacacattgtggaagcgattgctggtgatcctcgatcctgcaagttgttgcaaattgagtcaggggctccttgtttattaattagtcgccgaacttggtcgattcattacattgtttccagtgccagtctgttatttcccggtaatcggtataaattgaaagggcgtttcaactcatagctatattctcatcactgatttttttccgtatgagctaatagggttgccatagattattaccttcataatggattaatgcgatttcccgtattttatccgtcccatttatggcaaccgtattggtaagcgcattaaataaggggatgtcagagccagaatcaccataggcaacacatttttccaaatttagcccatgttcctgtacatattttttcactatctgtaatttactttcggaaattattattatctgtatttatcgtactataatcatagttttttgcggcgtaataatgattgtcatttaaattgatgcctatattgtataacaagctttttaattagggcaagatcgctaatgtttttttaatcacgaatatatccgtcatctttcaagttgcctctttgttggctgcactcgctcatcccggtcacatcgttatctatgctcccggggattcactcccttgccgtcgcgatgcatcttgaaatctttagggtataaagaatagatcaattaatttggaggaatagcgctaaaaacttttctcagtggtcaaattgagtgaaatacagacaatgtaactcctgacaaggtaatgccgtcatgatgactcgttctgttttgaaaaaagacaggtcagcgatcgaccaccatcgtcgaaaaatagatgaactagatgcgtgcgcaatacgggttatgactgtagtactaggaaaacctttccttccttaaatcatatttttgtaaaattaatgtaaataatttgtgattataaacacaaaaataagaaaaatatgattccttgataattggagagaaataatattaacaaattgattcataagaaaataaaaataataaactgatcaatttgtcattttggctaatggtttgatctattgaatatacatgtatatacaactatacatttagcaaatatctaaagatcaaaaggagccagaccgtgaccgcccaaaatagtaaattccgtagtgtcggtatccgggcacccagaggaacacaattaacagccaaaagttggctaaccgaagctcctctgcgcatgttaatgaataatcttgatccagaagttgctgaaaactcttatgaactggtggtgtatggtggtattggtcgggctgctagaaattgggagtgttatgacaagattattgaaacactgaaagagttggaagatgatgaaacgttgttaatccaatcgggtaagcctgttggggtatttaaaacccatagcaatgccccacgggtactcattgcaaattcgaatttggtgccgcactgggcgacttgggaacacttcaacgagctggatgctaaagggctggcgatgtacggccaaatgacggcgggtagctggatttacattggcagccaaggaattgttcaaggcacctatgaaacgtttgtggaagctggtcgccagcattataacggtaatttacagggccgttgggtgttaactgcgggtttaggcggtatggggggagcacaaccactggctgcaacactggctggagcgtgttcgctaaatattgagtgtcagcaaagcaggattgatttccgcctgcgtactggttatgtcgatgaacaagcgaaagatctggatgacgccctgactcggatcgaaaaatacactcaggaaggtaaagccatctctattgcactgtgcggcaatgccgctgaaattttgccagaattagttcgtcgtggcgtacgcccggatttggtcactgatcagacaagtgcacacgatcctctcaatggctatctaccgaaaaactggagttgggaagaataccgccaacgtgctatttcagcaccggaagaggtcatcaaagcagcaaaatcctcaatggtggaacatgttaaggcgatgctgattttccagcagcagggcattcctgtttttgattacggcaacaacattcgccaaatggcatatgaagttggcgtagaaaatgctttcgattttcctggttttgttcctacgtatattcgcccgttattttgccggggtatcgggcccttccgctgggtagcgctttccggtgatccacaggatatctataaaactgacgccaaagttaaagaattactccccgatgatcaacatttgcatcattggctagatatggcgagggagcgcatcagctttcaggggctacctgcccgtatctgttgggttggtttagggcaacgagccaagctagggttagcttttaacgaaatggtacgcagcggtgaactttcggcaccgattgttattggtcgtgaccatctggattccggctctgtagccagtccgaaccgcgaaaccgaatccatgtgtgatggctctgatgccgtttcggactggccgttgttaaacgccttacttaacaccgccagcggtgctacttgggtttctctgcatcatggcggtggtgtcggcatgggtttctcacaacatgccggtatggtgattgtttgtgatggaactgatgaagccgcagaacgtatagcacgggtgctgcataacgatccggctactggggttatgcgtcatgctgatgcaggttatgaaattgctatccattgtgctaaagagcaaggattagacttgccgatgcttaatacaaaataaggaacattatgaagcaactaactatttatccaggaaaattgacccttgatgaactacgtcaggtttatctacaaccagtaaaaatcactctggatagccagatttttcctgctattgaacgcagcgtagagtgtgttaatgcgattcttgctgaaaatcgcactgcctatgggattaataccgggttcgggctattagccagtacacggattgaagaagataatttagaaaaattacagcgctcgcttgtcgtctctcatgctgccggggtcggcaaagcgttggacgataatatgacccggttgatcatggtattgaaaattaacagtctctcccgtggttactcaggtattcgtctcgctgttattcaggcattaatcgcgttagttaatgcggaaatttatcctcatattccctgtaaaggatcggtgggggcttctggtgatttagcaccgttggcacatatgagcttgttattacttggggaaggacaagcgcgttatcagggcgaatggctgccagccaaagaagcgctggcaaaggccaatttacaacctattacattagcggctaaagaaggtttggcgttgctcaatggaactcaagtatccactgcttttgcgttacgtgggttatttgaggcagaagatctgttggcggcagcgatagtttgtggttctttatccgtagaggcggcattgggttcccgcaaaccatttgatgcccgtgtacatgtggtacgggggcaacaggggcagatcgatgttgccgcattgtatcgtcatgtattagaggagagcagcgagctatcagattctcacatcaattgccccaaggtacaggacccttattcattacgttgtcagccacaagtcatgggcgcttgcctgactcagttgcgccatgctgcggatgttattctgactgaagctaatgccgtatctgataacccattggtgtttgctgagcagggagaagtgatttccggtggtaacttccatgctgaacctgttgcaatggcgtctgataatttggctctggtattggcagagataggggcattgtcagaacgacgtattgcgttgttgatggattcacatatgtcacagcttccgccttttctggttgagaatggtggtgtgaattcaggttttatgattgcacaagtgacggcagcggcgcttgccagcgaaaataaagcattggcacacccggcgagtgttgacagtttaccaacttcggccaatcaggaagatcatgtatcaatggcaccggctgcgggacgtcgtttatgggagatggcagaaaatacccgaggtattctggcaattgaatggttatctgcctgccaggggatcgatttccgcaatggtctgaaaagcagcccgattttggaagaagcgcgtgttatcttgcgagcaaaagtagattattacgatcaggatcgtttttttgcacctgatattgatgctgctgtgaaattattagccgagcaacatctctcctcattacttccttctggacagatattacagcgtaagaataaccgttaaataaaccaatggccggcacctgaccggcctgattgtcacatttatctttctcataaaacccaataataaaagataagagggtaaatcatgcaagcttcattacaactagagcgaggactcaacgcacgccatatccggtttatggcgttgggctctgcgattggtacgggtcttttttatggttctgctgaagcaataaacatggccggtccggcggtattattagcttatttagtgggcggtgctgctgtctttatggtgatgcgtgctttaggggaaatggcagtccacagaccggatgccggctctttcgccagttatgctcatcaatatttaggcccgttacccggatttattactggctggacctatactttcgaaatgatcatcgtttgtctggcggatgtgactgcttttggcatttatatggggctatggtacccggaagtgccgcgttggatatgggtactgagcattattttcattattggcgcgctcaatctttgtaaagtcaaagtatttggcgaaatggaattctggttatcgattctgaaagttgctgcaatcagcgccatgattattgccggaaccggtattattctgtttggttttagcggtcattttcaggcaacgggagttcagaatctgtggcaacacggcgggtttatgccgaatgggctggggggcattattgagtctctggctgttgtgatgtttgcttttggtggcattgaaatcattggtattacatccagcgaagctaaaaatccggcgaaagtgatcccgcaagcgattaactctattccgtttcgcattcttctgttttatgtactcactatttttgtattaatggcgatttacccttggaatagtatcggccaagaaggtagcccatttgtcgcaatatttcaggggctaggcattggttcggcggcgaatattctgaatattgtcgtcattacggcggcaatttcggccattaacagcgatatctttggtgcgggtcgtatgatgtacggtatggccgagaaaggattagcccataaaaaatttatgcatttaagccgtaatggcgtgccttgggtgacgattatggttatgaccttggcgttattgtgtgctgtggttctcaattatttgctccctaaacaggtatttgtcattgttgcttcaattgcgacttttgccaccgtgtgggtctggttaatgattttgctatctcaatttgctatgcgcagaaaaatgtcaccgggagaagcacaaaaattacaattcccagtaccgatgtggcctgttgcgccgattttaaccatcgtgtttatgatatttattattgctgttctcagttacttccctgcgacacgaattgcattctatgtgggaggcgcatggatcgcgctgttaacatccgcctattatttatggatacgaaaaaatgtcattattgtgagcgctcaatcagccaaagaaacacggtgttaaataggtagaaaccaaaccgtcttgttgttgaataagacggtttgcaccgaaaattaattaaaaatctgcgataaaatatctggattgcctttttagttatcgttccttaattcattgctagctcaacattagtacttaaaattctatatcattaacctgatataaagctgatttgtttcaatgatcgtggcaaactagcaggctaatgaatttgcagggctggaggcgcttttggacaagatttttatcgatgaggcagtagctgagttatataccattcaggatatgttgcgctggtctgttagccggtttaatgcggcgaatatttattacgggcacggtacagacaatccttgggatgaggcactgcaactggttcttccatcgctgtttctgccgctggatatcccacaagagatgctgactacgcgactgacatccactgaacgtcatcgtattgttgaacgggtattgcgccgtattaatgagcgtattccagttgcttatttgactaatagagcttggttttgtggtcatgaattttatgttgatgagcgggttttggttccgcgttcaccgattggtgaattaattaataatgaatttgcaggattgatccctgagcagcctgccaatattctcgatctctgcacaggtagtggttgtattgccattgcttgtgcatatgctttcccggaagcagaaatagatgcagtggatatttccgcagatgtgctggctgtgactgaacagaatattcagaatcacagccttgaccaccgggtcattccgattcgctctgatctgttccgcgatatgccaccggttaaatacgatcttattgtcaccaatccgccttatgtcgatgccgaggatatgagcgacttgccggaagagtttcgccgtgagcctgagttaggtttggcggcgggttcagatggtttgaaattggcacgtcgtattctggcaactgcgccaaattttctcaccgaacggggtgtattgatttgtgaggttggtaacagtatggtgcatttgattgaacaatatcctgatgtgccatttacttggttggaatttgaatatggtggtgatggcgtatttatgttgacgcgccaacagcttattgaacatcacgagcattttcgcttattcaaagattgaataggttatagctgcggtaataacgcaaaacgggcagcgttaaataaaagaacggttaacaggaaggaattgggatggcgggaaatagtatcgggcaatttttccgggtcaccacttttggcgaatctcacggtttggcgttgggatgtattgtcgatggtgtgccaccgggcattgcaatcacagaagctgatttgcaagttgatttagataggcgtcgtccgggaacttcccgttatacaacgcagcgccgtgagccggatcaggttcgcattctttctggtgtatttgaaggggtaaccactggcaccagtatcggtttactcattgaaaatactgaccagcgttctcaggattacagcgctattaaagatgtatttcgtccaggccatgccgattacacttatgagcagaaatacggtatccgcgactatcgtggtggtggtcgctcttctgctcgtgaaacggcaatgcgtgttgcggcaggtgcaatagcgaaaaaatatttgctggataaatatggtattcgtgtccgtgcttgcttgacccaaatgggtaatatccattgccaattgaaagattgggaactggtggaacaaaacccatttttcagtcctgatgaaactaagcttgaacaacttgatgccctgatgcgtgaactgaaaaaggcgggcgattctattggtgcgaaagtgaccgtggtcgcggaaaatgttcctgctggtttgggagaaccggttttcgaccgccttgatgctgatattgctcatgcgctgatgagtattaacgcagtaaaaggtgttgaaattggtgatggtttcggtgttatcaatttacgcggcagcgaaaacagagatgaaataactgctcggggattcaccagtaatcatgcgggaggaattctggggggtattagcagtagccagccaattgttgctcatattgcgttgaagccaacttctagcattatggtgcccggcaaaacgattaaccgtcagggtgaagaagtggaaatggtcactcgtggtcgccatgatccctgtgttggtatccgtgctgtaccgattgcagaagctatgatggcgattgtgctgatggatcacctattacgccagcgggcgcagtgtgctgatgtcgaatccagccttcctcgctggtgaatttgagaatgaagctagccttgaaaatcccagagactgaaatgggtagcttaatgttgataagcggtttcttttgatgggatgaaatatggactggttattgtcattaggtgcggaagtttacgttctgctctttctggttgcagtaatggctgggtttattgactcgatttctggtggtggtggtctattgaccatccctgcgctgttatccgttggtgtctctccggtgcaagcgttggcgaccaacaagttgcaggcagtgggaggctctttctctgccagtctctattttgttcgttacggtgaggttgatatcaaatctcaacgttttgccatactgatgacattacttggctcaatggctggtgcgattattgtccagtttataaagccagattttctctgtcagctattaccggttctggtcattatcattggtctttatttccttttgacgccagccattggtatggaagatcgccatcgtcgcttgacgccggtggtcttcgccttgcttgttgggagtgggcttggtttatatgacggcatatttggccctggggttggctcattttatgcgttagcttatgttgtgttgtgcggctataacctggcgaaatccactgctcatgctaaagtactgaactttgcttctaatataggttcactggcgctttttatccttggcggtcaagttttgtgggtattgggccttgtgatgttggcagggcaggtgattggtgcgcggttgggcgcaagtttggttttgactcatgggcagaaattgattcgccctatgattgtcatcatctcctttttgatgagtattaagttactgaatgataatcacggcgatacgatccgtagctggctggcattttatttctgattcagggttttgtttttaattcatgataacgcataactatcaacaaattattgatatttttaatcgccgttttggtgacgaatacaacacgcatttggttaaaggtgataacgaacctatttacctgccggcagatgaagaggtcccctataaccggattgtgtttgctcatggtttctacgccagtgcattacatgaaattgctcattggtgcattgcgggtaaagaacgccgtaaactagtggattttggttactggtattgcccggatgggcgtgatgcacagaggcaaagtgaatttgaaaaagtagaaactaaaccacaagcacttgattggttgttttgtactgcggcaggttttccgtttaatgttagttgtgacaaccttgaaggggattttgaacctgacagattagcttttcagcgtaaagttcatgctcagatcatggattatttagcgcaggggatacctgcaagagcggagtgctttattcaggggttgcactcgttctacaatacgcccccattgaaagcggaatattttccttatccggaagatatattcgcagaatgaaactgaatttgaggaaaaatgatgctcgctgagtttgaaacgcgtattttagcgcaaattgatgacatggtagatcatgccagtgatgatgaattgtttgctggtggttatctccgcgggcatctcaccttagcagtagcagaattggagcaggaaggcgcacatacggctgaacagcttcatgaccgtgttgaagaaagtatccaaactgcaattaaagcgggagaattggcaccaccggatcaggttcttgtgcttaatacctggcagcgcctattggataatgctaaaactcaataattttattaagaggcagaaaacgaactgtactacccaaattcatatgaatatctgatagttggtggtgcagttccttatggcttttcaattttcaatttacgacctttcagtagttttttgatccaaaaacggtttgggtgaagggtcgccagtatttcattatccagtggtaatggctcatcaaagatctgcccggcaagaatttctgcactgagtggcgcagagcataatccacgagaacctaatgccccgataacaaatagattggaataacagggtgcatctgtaatggggctccctgtgcggattttttctggtaaatcttgataatctgtcattattttattgagatccggcacatttcccaccattggcatatgatcacggataacgcagcgaataccttgacgggattgtttagcagaaacatcaacctgatttacccattcggcatcagataaacatttcagcaaccggtcacggttttcctgttgttctgtttcagaatattcattatcaagccgatgacgctgataactggcgccgatacagtggtgttgattggctggattagccggtgtcatataaccatcgtagcaaagcacattttgcaattggctcaagtcagttgtggttggaatgtgactgacttgaccacgcacagcagttactggcagtttctcggtttgttcaaactggggtagatgatgaccgttggcaatcaccaccgttttgtgttgtgcatttaacgattgtccttgatgcatgagatgcaattgccagccatgttggttgtggctaagcgcagtaacttgatgattgaagcaacagagcatgccttgctgttgtgccaactctgttgctgctttagtgagttctgccgggcatagccatccgccctgtggatagtgaatgccgtggtgatgaatatccagcccacatttttcactcaactggtgacaattcatgccgatggcgagttcattcggccattctgttgccagcattttctcaattttcttgctacttttttcatcataagcaagctggctgacaccacaccattgatggtcgaaatcaattccctgcgctgagaactgctcatattggcggcgggcaaaggtaaatgcagaggtaaagaatttttcgagtccgttattactaccgttcagtagcgggtaaagtgctccttggcgattaccagacgcaccttgtgccggagctacatcctgacaataaagcgtcacctgtgctccacgacgcaatagcgcgagtgcggtaagaataccggcaatcccgccgccgatgatagcgatatcatcgttgtggcttgctgacggacgggcaaaccaaggtgctggtaatggttgatacttctgagttgccagaactccggccagcatttctcttttacggccaaatcctttgattttactgacattaaaaccagcctgttgtaaaccacgacggacgatacccgcagaagtaaaggttgcaaaagtgccttctggatgagcaaattgcgccattgcagtaaacaactgttcactccacatttgtgggtttttggcaggtgcaaagccgtctaaaaaccaggcatctattttgccgtgaagacttgaatccattgttggcaatagatcattgacgtcaccaaaccataaatccaatgtgacagcgccatttgccataatcaaccggtggcagcctgccagtggttgaggccattgctggtaaagttgctgtgaaaaaatctcaagctcaggccagcgttgatgcgcggcttttaagtcgttggttttcagtggatacttttcaaaactgatgaaatgtagacgtttcaatggcgcatcaggattttgctgtcgaaatgcatcaaatgcttgccagagcgtcagaaaatttaatcctgttccgaaaccggtttctgcgattacacaactagaacgggaatgggtgcagaatcgttgggggaagcagttaccgttgagaaatacataacgggtttcttccagtccatcctgatttgagaagtaaacgtcatcaaactgtgttgaaatcggagtaccttgatcattccaacttaaggttgcggtacaaatagcagaatttttcacggtaatgcctgtaatattgctgataataatgcgattttagcgaggttggggttgatgtaccacctgacagaagaaaagggtggaaaagtgttgagccttgcttgcggtgtgtacggttattggaagaagcaggggtcattattaccatcatttttgtgtgaataatggctttatcagttgataaagttggaaaattttttgttctaaaacatttgttgctataatcttgagtattttccgtaattcagtcagtaatataacatagggattgattcatttcataaaaattttattcatccttattattcttagttattaaatttgtttctaattagcaagaaatttaataaaaatggcaagtatagcaacctctatataaatataagtctactaatcattattcggatgcttgacaagttcatgtgtattgcattgatattattatccttaacataaatttttgatggaaattaagagtgtttttttgatcttattgtttaccaacataattcctatctgaaatttatttttatctattaaaatctgaattttttttactgtattctatgagagttaacagtcattttgacgtgaaaacatattgggatttttagagagatgaatttttattcgtaattttatcctgatcggacttgttcagcgtacaagtgtacgctaaagtgctacatagctatagatagaaatcccgcagataaacacatttaatgaggtatttaatgaagcgcgtagtgatcactggcttgggtattgtctccagcattggtaataatcagaaagaagtactggcatctctgaaagaaggccgctccgggataactttttctgaaaaattcaaagagataggaatgagaagccatgtctggggtaatgtaaagctggatacctccggattaatagaccgaaaaattcagcgcttcatgagcgatgcctctgtttatgcttatctggcgatggaagaggcaattaaagattctggcctggctgatgatcaggtttctaatattcgtagcggattggtagtgggttctgggggtggttccccgcataaccaggttgcgggtgctgatgggatgcgtactcgtggtttgcgtggtgtggggccttatatggtaacccgctcaatggcttccggtgtgtcagcttgccttgcaactccctttaaaatcaaaggggtaaactactctatcagttctgcatgttctacttctgcccattgcataggtcatgcggctgaacttattcagttaggaaaacaggatattgtttttgctggtggtggtgaagaactctgctgggaaatgagttgtgaatttgatgcaatgggtgcactttcaacgaaatacaacgaaatgccagaaaaggcgtcccgtacttacgataagagccgtgatggttttgttattgctggtggcggcggtattgttgttgtggaagaattagagcatgcattggcacgcggcgcacacatatacgctgaaattgttggttatggagcaacctctgatggcgcagatatggttgttccatctggcgaaggtgcggttcgttgtatgaatatggcactgcaagatgtgaaaggttccattgattatgtgaacacgcatggtacatctactcctgcgggtgatgtgaaagagttggaggcgatcagggaagtctttggtgatacaacaccggcaatttctgcaacaaaagcgatgaccggccattcactgggtgctgctggtgtacacgaagcaatttatagcctactgatgttagagcatggttttattgcaccaagtattaacattgaagctcttgatgataaagcggtaggcatgaatatcatcactaaacctactgagcaaaaattgaataccgtgatgtccaatagttttggtttcggtggtactaatgcttctttggtgatgagcaagtattcagcttaatttccctcatcacagactgtttcgatcgtgtccaaacaacaatggtcgttatttgatttatcttaggtgactgcgtacagcgagtcacctttgtatgtatacccgttatctttcaagttgcctctttgttggctgcactcggtcaccccggtcacatcgttacctatgctcccggggattctctcccttgccgtcgcgatccatcttgaaatccatagggtataaattcaaacctgttttgctgaattttgattttgtgtgaaatataatgtgaatacggaagtatattcctgttacggtagaaaagcccataatatttttatacccgtcatctttcaagttacctctttgttggctgcactcactcaccccggtcacatagttatctatgctcccggggattcgctcccttgccgccgcgatgcatcttgaaatccatagggtatataataatgatgatcttgtaatattataggcttttatttgttacgttttattttcagtagccatttgctgaatacggcgcttacggataattcgtaatattggtggaataatcagaaccagagctgctagtatcaataaactctgagtaattgtgctgctccacagaatgccaaattctccattactaatagaaagtgcgcgacgtaaattttgttccagcatttctcccaatacgaaaccgaggattaatggcgacatcgggaaattcatctttctcagaatgtagccaaaaatacccaatcctaccatcaacagaagatcaaatgtcgtactgtgtatggcatatacaccaaccgctgaaacagtagcaatcgctggaacaaggaaccagagtgggatagtgagcatccgtgtaaatagacctatcattgggatattcataatcagtaggataatattggcaatcaataaagccgcaattaacccccagacgatatccggttgttcagtgaacattcccggcccaggcgtaatattatagagcgttaatgcccccatcataacggcagtggtacctgaacctggcacgcctaatgttagcattggaataaaggagccacaggccgaagcattattagccgcttctggtgctgctacgccgcgaatatcacctttaccaaatgaatcgctattcccactgagcttcttctcagtcatgtaggtaattgcgctggcaatagtcgctcctgcaccaggcaaaataccgacaaagaaaccgataaaggatgatctaagcgttggcatagcgcattcagccgcttccttgcgattgaacagcagacggcctgttttgcggataatggttttgccggccgaggtactctctaacatcagcaaaatttcgctgacagaaaacagacctattaccacaacaataaattgaatgccatctgacagatgaacgttgtcgaaagtaaaacgataaaccccggtgttggcgtctactccgacagttgccagacccaatcctattaatgctgctaatagtgatttcagcggattctggctcatcatgctacccagacaagcaatagcaaaaaccataagtgcaaaatattcagcagggccgaaagccagtgaccactgcgccagtaatggtgcaaacaaaataatgccgaaaattgccagcaaagaaccacagaaagaacttaccgcggaaatagatagcgccacacctgcacggccctgtttggccatcggataaccatctaatgcggtcataatggcagcggcatcaccgggaacattcagcagaatcgatgatatacgcccaccatactcacaaccgatataaacagttgccaataagatcagggcagattcagcaggcagttttaaagcgaaagccagtggcagcagaatcgcgacaccattaattggcccaagccccggtaacagcccaacaatcgtaccgacaaaacagccaattaaagcaataatcaggttttgcggcaccattgcaacctcaaacccttgactgagatacatccaggtttccataaattctccgtcagttgagccagctaccgagaggcagggttacgtcaagtaagcggtcaaaggcgaaatataatgtgacgccaaggaacaccccggaaatgattgcggcaggcagtgttgcgttaaacaacagcgcgacactgaatgtcagcagcgctgtagccagaggaaaaccaagccactcgaatgaccaaccataaataaccaaagagagaatcaacagcattaggcgacggataacgggggcactaggccaattgctctgctctggttttttgaaaagtagtagtaaagcacagagtgccatcagagacagaatgatcattgggaaaggtctgggccccagaggttcataagtgtattcgctctgaattccccaaccaataactatcccaatggcacagagtactaaccagatagtagcaaagatacgatcgttcatgatgatgactctgttatttggctaaaccaaaagctctggcttgttcacgatattgttcaacctgttttttcacatagctgtccaactctttgccggtcatgttgaattcaaataacccacggatatcacgttgttttttaaaagcatctgtttgttgtagtttattaaaagcatcaacccaccattgatactcttcgtcagaaacttttggtcccatgtaaaatccacggataattggccatatcaggtcataaccttgctctttggcagtaggaatattggctaaatcaccatccagtcgtttatctgcataaacagccagaacccggattttgtctccattcagataaggtaccatctcgctcagatcaccggaaaccgcctgaatatgattacccagcagggcggtgataggttcacctcctccctcaaaagcgacataacgcattttgtgaggatcaattccaacctcttttgccagcagtgcggttttcatccagtcctgactaccgatagaagcgccggcaccaaatacaatgctgctgggattatccttaaaagcattcatcaaatcgttcagggtacggtaaggtgaatcggcacggacagcgatcattccataatcagtaccaacacttgccagccagcgaacatcgttaacgttatagcgaccaaattttccctgagacaaattgagtagagagccgccagaaaaggcgacaatggttcctgcttcagtaggtcgctgtgcgacgatagcattgtaagcgacagcaccaacaccaccgggcataaaagtgacacgcataggcttgctgatctctttcgtatccagtagtgaaacttggaccagcttgcaggtcaggtcgaacccgccacccggttttgcaggggcaatacattcggtccggttaggtgcactggcagcaaaaacactacttgtgccaaatagtaaagcggttgccgctaacatcttgatcgttatagttttcatttgtttgctctcatcaatacccttgtaagatataatcactacaaacagacctggttggcttaattagtaataacaaaacctttcatttacctttcagtaacaagaaaagttgttgatatgtgatttcaatcgcttaaatttgcgtagcgtttcgcattaatgagtttacaaatggctacaggcttccttttttgttttggtttgttgtaagtttctcgtagttttgatgttgttctgttttactcgcggtaactttacattcgactaaggaggtattatgcaaatggtaattatttatttatgcaatgtgtcaaattaaatggaaaatttattgaatataatcagactttatcttgaggaagtctgaattgaggaaatgatgagaaaattgattctttgcagtgctatgggtagtgctatggcttttactttggcgggatgtaaaacagaactcagtacttcggtatctgttaaccaactgttatctgaacaagttaaaacggtgacatctgatttgttagttgaagtcagtgcctgtggtgattataaagattccagacaatcatcaaaatcattgttagacactcaagaaaaagtaccggctatttttgccaatgcggaatacgtggaatgttttagaaaaagtatggattcgtttgctcactttaaagttcctgtgagtgtagggaattcaagtataactggttctactaagggcattcatctttatggtaatggcgcagatatcttggtgataagcgtaccaaaagcgataaaggagaaaattaaccagatagatagttcaatggcatcaaagaccaaaatttcaattaatattaagaatgatactggtgaagttttaaaaatgacgggtttatccgcattccttaatgataaagagccgatggtgatatcgaattttagtttaaaagtaggtagtgaaataaaactcactttgtctaatgtctctgtggcgtctgcattggatgaacgttttgattttactcctgtgctcatggcaatatctgagtaaatggaagcggtaatagagatctattacttaatttggtatggcaaaataccctgttatttatagcgaagtattttggcatgaaaatggaattaagttgaattgagttagtgtctgactatttttcagaaaaataggtgtggcgatataccctatggatttcaagatgcatcgcgacggcaagggagcgaatccccgagagcatggataactatgtgaccggggtgagcgagtgcagccaacaaagaggcaatttgaaagataacgggtataaactggaaatatagttatatctgtaattatatttatacccaatggatttcaagatggatcgcgacggcaagggagcgaatccccgggagcatagataacgatgtgaccgggggtgagtgcagccaacaaagaggcaacttgaaagataacgggtatatattaatcgattagatattgaaaatatgcgtttacttttagtggaagaccaccctgaattattgcattggctgcaaaaagcactgagtagttcaggatttgccgtagatgttgctagtgatggtatagttgctgatcaattattacagacagaaaactatgcattattgattctggatgtttctttgcctaggttggatgggctttctctattagttcgtttgcgtaagcgtgggcaaaatttgccggtattattattaacggcgaaaactgatgtttctgagcgagtgaaagggcttaattctggtgccgatgattatctgacgaaaccttttgatttacaggaattggaagcacgtatccgggcattacttcgtcgtagtgcaggtgttctacaggagacgctgacattcggctcccttgtttatcaggatgatggttactttgttctgaacgatgagccattggctttgacaccaagggaactttcggttttgacaacattgttccatcgtcgggggaggcctgtttctaaacaacagctctttgaacaggtatttgcactgtcagatgaagcgaatccacaaagtattgaactttatgtgcaccggattcggaaaaaattatcaggcagtaatgtggggatcagtacattacggggattaggctatcgtctggagcgtcagaaagatgacatggtttaaagtaccgaactcattgtttcatcagttactcttgttttttggtgtcccattgtttgtgttgggttgtttatcggttggcacccattattttagtgcagagaatgcggcgacattggcttatgaccgtactttattggcatctgctcgaactgtggcagaacggctgactgttaaaaataaccaattaattgtcgatgtaccttatgtggttctggatagttttgagcgaaatatgaatgataggctgttttatcaggtgttatcacccgaaggggaaataatttccggttatgatgatttgcctttgatccctaaagatacgcttcgctccaatttatacacggctctagtttatttttatgatgctgaatatcacggccggcccattcgggttgctgccctttatcagccgatcaatgaagggggaatgatgggaatggcgttgatactagttgctgaaacagtggcttcccgtcattatcttgcgcaacaattattaatatcttctttgatgagccaaggaaccgtggttgggttgactctgattctggcttattttctgttgaagcagttacttaaaccgctacataaactttctggcgtcatggtccgtcgtcccgcaaatgatcttactccgttaccggatatgttgccttggtcggaactttccccattgttatatgcatttaatcgttatatagagcgactgaaattgatggtgagtcggcaggagaggttcagtgcggatgcttctcaccaacttagaacgccattaacagtattaaaaacgcaagtagcggtagcgcttgccagcaaagatccagcgcaatggaaagaaagcttacaggccattgatagtacattggataacactatctctctgacggatcgtttattacaactttctcgtttgaaagcgcatgaaaaggaggccgttcgggattataggccggttaatctagtcgaattgttgcaacaggcatgtttttctcgtttgcaacaggctgaaagtaagaatattgatttgggttatgaaggcgaaaatgctcaatggatcaagggggaacctgtattactgacggaaatgtgtgctaatttattggacaatgcaattaaatatacaccggaaggtggcattgttacggctagagtgattctcaactcttgtaagacatattgttatttggaagtggatgacagtgggccggggattgctaaagaagacgtcaatttgtctctgatggcttttaatcgtcttgataatgctgcggggcatgaaggggcaggattaggattagctctggtaaaagatatcggtatttatcatggtactcatccccaattattgcccagtgaaacactgggcggtttattagtaagaatcccttttaggctttctgatgattaatttcctgaggtttttctaataagaggggtacgtagttgctgtgccagtataacgcctaataacgttatactgccaccaatcaggtggtaactgtgcatctcttcatgcagaaccagaatagcgataatagctgtaaatatcggcgtcaaattcataaatatggtggtggtattcgcaccaagttttatgacgccttgtatccataaatagggggcaatgatcgaagctggaataccggcgaataagactaacgagatattgctggcattcaattgaacatctttggtcaataggaaatttggcagtaataacaggacaccaaaagtgatttgtacatatagggattgccagttgggtaatggaatagaccaatgtttggttaatacgccatagagtgcgtaggagatggaagcaagcaacatcatcaattcgccgcggcctaaaccgtgttgcaataatgatatgggatcaccggcgctgaccaaccagattaaaccagacagagatagaacggtaccaagagcaaggccgacagtggggacaacacgtaaaacaaatatactgatgatcacagtcaaaagaggaatcaatgagctaagaattcccataaatgttgcactgatactgtgcgcagcgtaataggccaagctttgataaagtaccatgccaagtgcgccaagaattaataatttccaccaatattgacagattgttttccatcgccgaatgaccgagagtacaacaaagggggttaatgtgagaaaggctaggaaccagcgataaaaagaaattgccgccggatcaatagctgtagcggaggctttacttactacggcattaattgaccaaatcaggactgctagaaacgggaaaattatattcatatagatagtcgcattgagataaaaatgagtgtgtttagtctaatagtgtctgatttattatatacatatcctatggatttatgtttggttaatacgccaaagagtgcgtaggagatggaagcaagtaacatcatcaattcgccgtggcctaatacgacagccgtacttatttctcttaacagaaaagacactcatagaaaagcttaattcatgcggtttctcagaattgtgagcatcaaagaaaatgcaactttctggtatctacggctgtagtactaaaccgtgttgcaataatgatatgggatcaccggcgctgatcaatcagattaaaccagacagagatagaacggttccaagagcaaggccaacagtggggacaacacgtaagacaaatatactgatgatcacagtcaaaagaggaatcaacgagctaagagttctcatgtgaaaaatttcatttgaaaacagtatgttaaatataaacacatataaaacataaaaataaattataataaatgaaattcttattataataaaagagtcctttgaaatatcgtttttttgccaacataactaactttttatatttaaggagttaaatatgccagcagctcaagcttatgctccacccggtttttggggccttggattgatttacaaggatggtttggtagtaacagccacggtgttataccctatggatttcaagatgcttcgcggcggcaagggagtgaatccccgggagcataggtaacgatgtgaccggggtgagcgagtgcagccaacaaagaggcaacttgaaggataacgggtatagatatactttcgatacagaatcacaggctccatccacttttttcgttgaaatacaatatgtagatgaaccaacactaaaaacgatacaaactataggccctggtgattatctggtccgtagtaacggcggaataggaacagatagaatcaggtgtagaagtcattctataggacaaaacattagaattacttggtaatttattttaatatactgttaattgcagccctacccgaactttaagtagggctatattctgtaaaatcgttcagtatagtaggatcaaaattatgagaaatttattggttattatgttacttatatctgccataacagggtgttctagtaatccagataaacaagtacaaagagaagatggattgaaatttacattctcatccggtgataaatttatcttaacccgagcctgtacagatcaaatcgattatataggggtagatgaaggcggtaataaccaattagcaatagtggtaaaaaaaataaaccctgttttccctaccttgatacattaatcaataaaaatatcggctcccaagtgacaatatcattcaaaggtatacctattatattgaataccatccaaactgctttaggcccttcattcagaatggcggtaaaagatacacaacaagccatgaatatcgttgatatattgaaaaactaaatagtaatcagttccttgctaaaaaatcaattataccctatggatttcaagatgcatcgcgacggtaaggaaacgaatccctgggagcatagataactatgtgatcgggggggcgtgaatacagccaacttttttgatgtgggttatagctcatcttctgcttttatcgctatgtttcagcaattggcaggcacgacaccggaacgtttcaggaaaagttaacaacaaaaaaaccgttattatgggttttgttataattaaatggcagaatagctcgctacgtcagttttaatgccacaggatggaattaagtgaagattctggttgatgaaaatatgccttatgctgatcaactatttcagcaattgggggatgtacaagctattccggggcgtccggtaccggaaggtgtactggatcatgctgatgcatttatggtccgctcagtgactaaagttaatgaagaattactgaaaggccgcgcggtaaaatttatcggtacggcaacggcagggactgaccatgtggatcagtcatggttatcacaggcaggaattgggttttcagcagcgccgggatgtaatgccattgctgtggttgaatatgttttctcagcgttaatgttgctggcggaacgtgataattttgagcttaaggataaagttgtcggaatcgttggtgtcggtaatgtcggaagtagactggctgaacggttagccgtccttggtatccggacacttttatgtgatcctccaagagctgacagaggggacgctggtgaattttggtcactggaaaaattggttaaagaggcggatattctgacattccatacgccactcaataaatcaggtccgtataaaacacatcatctggtggatgtggaattattgtcggttttgccggataaccgcatattgattaacgccagtcgcggtgaagttattgataatcaagcgctgcttactgcattgaaatgtggcaagaaactccgtgttgttctggatgtatgggagccggaacctgatttatccctaccattactggaattagttgatattggtacaccgcatatcgcgggttataccctcgaaggtaaagcgcgtggtaccacacaggtatttgaagcttactgtgaattccttggtcaaccccgtaaagtggctttatctgatttattgccagaaccagatttcagccgggttaccctacatgggaatgtcactcaaagcacactgaagcggttgatgcatttagtgtatgatgtacgccgcgatgataccccgttacggcaagttgccggtcaaaaagggcaatttgattatctgcgtaaaaactatttagaacgccgggaatggtcatccctaactgtatgttgtgataatagagagagtgctgagttgctagctgctcttggtttcagtacagaactgatttaatccgtgcagaaatatatctacatgtcagaaagatagatggagaaaaccaacatgtcagaaggttggaatattgccctattgggtgcgacaggggcagtaggtgaagcgatattggcgttattacaagagcgtcagtttcccgttggtgaattgtatcctctcgccagtgagcgtagtgccggtgaaagcttgcgttttaatggcaaaaattttgttgttggtgatgctgctgattttgactggtcacaggtacagctcgctttttttgtggctggattagaggctacggcacaatatgttgaaaaagcgacagaagaaggttgtttggttatcgatagcagtgggttgtttgctatggagcctgatgtacctttagttgttccaggggtgaatcctcatgttttggcggattatcgtaaccgaaatattattgccttagcagatagtatgaccagtcaggtactgacagccattaaaccgctggtggatgcggctggaattgcacgtttgcatttgactaatctgttttctgtttctgttcacggcaaagcggccgttgatgaattagctggacagagcgcccgtttgcttaatggcattccaccggagccaggtcatttcagtaaacaactggcatttaatcttttgccgttgccaacagaagctgaaggttctgtgcgtgaagagcgtctccttgtggatcagatacgcaaaattttacaggatgagggattacccatttcagtgagttgcgttcagtcttccgttttttatggcaatgctcaagtagtccatttggaaacattgcgtccggttggggtggaagaagttcgagaagaattagagcggatggttgatattaacgttgcagatgaaggcgattatccaactccagtgacggaagcatcgggtaatgatgtgctgagtattggttgtttgcgccatgattatggtatgccggaaatattacaattctggtctgtggccgataacatccggtttggtggtgcattaatggctgttgagacagcggaaaaactgattcaggagcaattttactgatgttcggtacagaacaaacagaatctgtgccaggttcaaagatgaaaattgcattgggaattgagtacgatggcagccgatattatggctggcagcgtcagcaggaagtaaaaagtgttcagggatgccttgaggaagcactatcaaaagtcgccgatgaacccatatcggtattttgtgctggtcggaccgatgctggagtacatgcaacagggcaggttgtgcattttgaaacgtctgttcagcgcaaggatgcggcgtggacaatgggcgtgaacgtacatttaccgccagatattgctgttcgttgggtgaaaaccgtggatgagggtttccatgcccgttttagtgcaactgctcggcgatatcgttacattatttttaatcatcgttatcgtccagcagtgctggccaatggtgtgacccattttcactatccactggatgaaaagcggatgcatcaggctgcgcaatgtatattaggagaaaatgattttacctctttccgtgcagttcaatgccaatctaaaacgccttggcgtaatgtgatgcatattaatgtcaatcgttacggacattacgttgtcatagatattaaagccaatgcttttgtgcatcatatggtgcgtaatattgcgggtagtctgatggaaattggctgtgggaatcaggatattaactggatggcccagttgcttgctttaaaagatcgggcgaaagccgctgcgacggcaaaagccgcagggttgtatctggttgctgttgattatccggtgcaatttgatttgccttgcgctgttatgggacctctgtttttggcagatgatctgatttaacatttctagttgccgacacggatgttttggcatagtggggaatattatggaatttctgactcattttgttgattttgctaaatttattattgatttcattctccatattgacattcatttagccgaactggtcgcacaatatggtgattgggtatatggcattttgtttctgattttattttgtgaaacagggttagtgattactccgtttctaccgggagattcgctgttatttgttgccggcgctttagcggctctgggctcaaatgatctgaatgtgcatatcatggtggcattgatgattattgcggctattattggtgatgcagtgaactatgctattggtcgcatctttggcgaaaggttatttactaatccaaattcaaaaattttccgccgcagttatttagataaaacacatgagttttatgaaaaacatggtgggaaggcaattattttggcgcgatttgtaccaattatcagaacatttgcaccattcgttgcaggtatggggaaaatgtcttatcgtcgttttgctgcttataacgtgattggcgcactagtatgggtactgttattcacctattctggttatatattcggtgatatgccaatggtacaacagaatttgaaactgttgattgtcgctatcatctttatttcaatcctgcccggagtgattgaaatctggcgtcatcgtcgtacggtgatgaagcagaagagtgataaccggtaacaggtttgagcagttttttatccacactgtaatagcattgtggtttaatggcacacaataacaaaactggcataagccagattcagacggaaagatcattcaatgagctggattgaaaaaattcttaataaaagcaacattacccaaacgcgtaaagcgaatatcccagaaggggtttggactaaatgtgatagttgcagtcaggtgctctaccgtgctgagctagagcgcaatcttgaggtttgccctaaatgtgatcatcacatgcgtatttcggcgcgtacccgattggctacattccttgatgaaggagcaacgacggaattagggggggaattagagccaaaagatattcttaaattccgcgattccaaaaagtataaagatcgtatatcagcggcgcagaagcaaacccaagaaaaagatgcgttagtcgtgatgaaaggtaccctgagtggtatgtcagttgttgctgctgcttttgaatttgcatttatgggcggttctatggcttcggttgttggtgcccgttttgtccgtgccgtagaacaggcgttggcagacaattgtcctctgatttgtttttcttccagtggtggcgctcgtatgcaagaagcattgatgtcactgatgcagatggcgaaaaccagtgctgctttagcaaaaatgcaggaacgtggtttgccttatatctctatcatgaccgatccgacaatgggcggtgtttcagcaagtctggcgatgttgggtgatatcaatattgctgaaccaaaagcattgattggttttgccgggccacgagtgattgagcagactgttcgtgaaaaattaccgtccggtttccagcgtagtgagtttttgctggcaaagggagcgattgacatgattgttcgtcgtcctgaaatgcgtgacacacttgcaagtttactttctaaactaactcatcagtcgcagccaggtactaagccaattgttgctgaatttgtggcagaacccgctgatgttgaggcggatattcaaataagtaccaataaagaagatgcctgacactttacaaattcctcaagccacgtcgccattgatgacgtggctttcctaccttgggaacctgcatactacggccattgatatggggcttgagcgtgtggggaaacttgcccgaactttggcgttggttaatcctgcacctaaggtgataaccgtatccggtactaatggtaaaggtactacctgttgcacgatagaatctattctgttggcggctgggctgagagtgggtgtttacagctctccgcatcttgtacgttataccgaaagagttcgtattcagggtaaagagttacctgaacaggaattctgtcgtgtatttgcggatattgaatctcgtcgcggtgatatttcgctgacttattttgaatatggcacattagcggctttgcaactgtttaaacaagcttgtttggatgtggtcatcttagaagtaggcttaggtgggcgactggatgcgacaaatattgtggatgccgatattgccgcgattaccagtattgcaattgatcatattgattggttgggtgccgatcgcgaacatattggtcgtgagaaagcagggattttccgtaaagatcgctttgccgtggtcggtgagccggatatgccatcttctattgcggaagttgcgggtgaattaggagccaagttgttccgttgtggcattgactggcgtttctctcaacagaataaaaactggcactggcaatctgatgataggctatttagcaacttacctttgccaaatgttcctctgatgaatgccgcaacggcgatgggtgttatttgttgcctgttacgacaagatgataaagtcagtcgagctattaatgagagtgcaatccatcaagggctacagaatgcgcagttgcctgggcgtttccagatagttcgtgaaaagccattgttgatcttggatgtggctcataatccccatgcggcggcttatctggtacagaaattggcccagttgccccgtcagccgggcagtagaatccttggtgtagtgggtatgctaggtgataaagatattgccggtacactgacttgcctgtcacagcaaataaatgagtggtattgcgctccgttgactgaacagcgtggtgcagatgcacagacactggctcagcatcttggacagccacggatatttactgatgtggaaagtgcttggcatcaggcgatggttgatgctgatgagcaagatattgttgtcgtttgtggctcattccacacggtagtgcatgtcatggaggctctggacagggagaaaggaagtggcaagtaaatttcagaatcgtttggttggtacaattgtattggtagcattgggtgtcattgtgctgcctgcgttgctagacggcaataagaaatataacgaagataaatttgcatcaattcccttggttccaaagccaggggatgagcaagaaattgactctatatctcctctaaatccaccaatattatcagtgcctctggaagatgaaacagaggcattgcagccagaaacactggagcagccggaaataccattggttaccactcctcagcttgcgccgatagtccctcctgctgttcagccagaagtgaagcctcaaccacagattaagcttgaaccaaaaccagatactaagccgtcggcaccggcgcttaagtctaaaccagacattaagtcagagtcgaaacctgaagttaaaccgattgaaacagccccgcaagggcaggcttatatcgtacaactgggtgctttgaaaaatgccggaaaggtagatgaaatcgttgccagactgcgtttgtctggttatcaggtttatacggttccttcatctccggttcaggggcaattaacgaggatatatgtcggtccaaatgcgtctaagcaacaacttgactcggcattatcagaattgaaaagtttgactggattacaagggcaggtaaggagttacaggccgtaataaaagtgggtaatgcctatgtgacaaatctatgtgacaaataggacaactatcatgaagaagtaaatattaagtgactgcggcgatgataattattcaaattcgtcgtcttaattattttcagtgggataggaaatctgctacgcaaacgttttcgttttctgttagaatgcacctgaaacggatgccgaggtgtctattttggaattaaaacatggtttggattgattacgctattatcgccattattggcttctcggcattagttagcctgattcgtgggtttattcgtgaggcattatcactggtcacctgggggtgtgctttctttgtagcaagccatttctatacttacttagcggtctatttcacccgttttgaagatgaattggtgcgtaacgggatcgctattgcgttgctgtttattgctacgttgattgtcggttctatggtgaactatgtgataggttctcttgtgcaacggactggattgtcaggtactgatcgagtactgggggtctgctttggggcattgcgtggtgtgctgattgtcgctgctattctgttttttctggatacatttacaccattggctcgaagtgaggattggaaacagtcacaattgatcccgcaattcagtcatatcataaggtggttctttgactacctgcaaaatgcgtcaagtttcttgccggagaaatatacctctccgtttggctgatgaggaagaactacatgtgcggtattgttggtatcgtcggttttacaccggttaaccagtcgatttatgatgcgttgacggtgcttcagcaccgtgggcaagatgctgcgggcattgctactattgatggtaacaatggatttcgtttacgcaaagccaatggcttagtgagagacgtgtttgaagcccggcatatgctgcgtttacagggaacgattgggattggtcatgttcgctatccgacagcgggcagttccagtgcatcggaagctcaaccgttttatgtgaactctccatttggtattacattgacacacaatggtaatttgacgaatgctcatgagttgaagaaaaagttgtttgagaatgcccgtcgccatgtgaatactacgtcagattctgagattttgctcaacgtttttgccagtgaactggattgctcccagcattatccattggtgcctgacaatatttttgcggcagtagcggcaatgcataaacaggtgagtggtgcttatgcctgcattgcgatgattattggtcatgggttagttgctttccgtgatccgcatggtattcgtccgttggttttaggtaagcgcactttggatgatggccgtaatgagtatatggtcgcttctgaaagcgttgcattagatacgctaggctttgaattcctgcgggatgttgcatcaggtgaagcgatttatattactgaacaaggtcagttatttactcgtcaatgtgctgaaaatccttctctgactccctgtttatttgaatttgtctatttggctcgcccagattcctttattgataaaatttcggtttataacgcccgcatacggatggggcataagctaggggcgaaaattgcccgcgaatgggaagacttacatattgatgtggttattccaatccccgaaacatcttgcgatgttgcgttagaaattgcgcgcatactcggtaaaccctatcgtcagggatttgtgaaaaaccgttatgttggccggacatttatcatgcctgggcaacaggaacgccggaaatcagtccgccgtaaattgaatgctaatcgcgcagaattccgtgataaaaatgtgctattggtggatgattctattgtgcgtggtacaacgtcagaacagattgtcgatatggctcgtgaagccggcgcgaagagagtttatcttgcttcggcagcaccggaagtacgtttcccgaatgtttatggcattgatatgcccaatgcaaatgaactgattgctcatgggcgtgaagtggatgaaattcgccaacttattggtgcagatgcattgatatttcaggatttaactgatctgatcgacgctgttcgtgaagaaaacccggatgttgacgggtttgagagttcagtattcaatggtgtttatgttaccaaagacgttgaccagacttatctctattatctggagaatctgcgtaaagacgatgaagtaaaactgaataatcagaatgaagttgaaaatctggatatctataatgaaggttgatgactttcgggtttagcgagttgttcagtgtttgtatgaggaaaaaatgaaaagattgatcgtagggcttacaggagcaagtggggccatttatggtataaggctactgcaagttttacagccagttgaagggatagaaacacatctggttatcagtcattccgctcgccagacactggcacttgaaacagattatagtttacgggatgtgcaggcgctggctgatgttgtgtatgacaacagagatatcgctgctgccatctcttcaggttcattcaaaacttcgggcatggtaattctaccatgctcaatgaaaaccctatcaggtattgtccatagttatactgatggattagtgaccagagcggcagatgttgtattgaaagaaagtcgtaagttagtgcttggggtaagggaaacgccgttgcatttggggcatctcaggctgatgactcaagcggcagaaattggcgcggtgattatgccgcctgtgcctgcattttatcatcagcctcaacagattcaggatattattgaccagacagttaaccgcgtgcttgatcagtttgatattgagctacctcatgatctatttacccgctggcaaggggctaaaagcgttgagatttagcatccagtaagtcttgaaatgcctcttttagctgaaaataacggaagccaaaacccgcttgttccaagttatgcggtatggcctgttgtccgcccagtaccagagccgcagcttctcccatcagtaatttcagcacaaaagcaggcgttcggataatggcaggacggtgcaatacttctcccagtgttgcggcaaattgatcattatgtactggataaggggcggtcatattaaaaggaccactcaaaccgggcgtcattaacaggtaatagataccattcaccatatcgtcaatatgaatccagggcagatactgttttccgctccccatcgggccaccaagtccgagacggaacaagggaagcatttttttcagtgctccgccgttttttgccagtacaacaccagtacgtaaaagacaaacacgggttttatcactggctgcctgtaatgcaagttgttcccactgcttacagagctgatgagtaaattcatcatgaggtggctcatgctctgtgacaattgtttgattctgatccccgtaatagcctaccgcagagccggaaataaagacttctggtggtgtctggctggcattaatcagcttgctgagttgctctgttaatgtccagcgactctggcacagcttctctttttgcgttgaagtccatagtttgtttactatgggctcgccagcaagattgattacggcatcaaaatcgttgagatcggttttatctttcagactggtccagcattcagcttgattgctgaatagagaataaactttttgaggtgagcggcttagaatagtaatggaatgggatagggaaagaagttggcaaaccagacggctaccaatcaaacctgttcctccagtgattaaaatacgcataaccactcctataacctaaattgttgatataagaactgttgttgatataaaaactatagcatatagcagagatataagggttggtagttaaagatatagctatctgtcagcctgatcaagttttgcggggaaatagttaccccgcagacatattagattttactgtaggcaatttgagtagcggggcgctgactgatagcgtcaaaccattttttcactgccggataatcattcagatcaatactctgacgttcataagcacgaacccacggataagttgagatatcagcaatactgtattcctgaccgctcagatagggtgttttttccaattgggtattcaggacttgatacaagcgctttgtctcttcctgataacgattaatcgcgtaagggactttttccggtgcgaaatgactaaaatggtgattttgccctagcatcgggccaaagccaccgacctgccaaaacagccattgcaggctttggacacgctcacgcatatctttgctaagtaacttgcccgttttttctgccagataagtaagaatggcaccagattcaaaaatagcgataggtttgccaccatcgattggttgctgatcaacaatcgcgggaatcttattattgggcgaaatggcaagaaattcaggcttgaattgatctcctgcgctaatatcaattcggtgaatagtataggaaaggccagcttcttccaggaagagtgtgattttatggccgtttggcgttggagcataatacagatcgatcatggaacctccagtggaacacgtaatggcatcacacattatcattaattggtgtagcgtgtaagctatgttgatacccttcttggcatgaataatgatcttcctgaacagcacgacaggaagatctattaataaaagaggtgatcagcttttcttctggagaaaagcatatttatctggagcttgtttttatgctgccatccgcgttaactgttgcccgacttccgccgtacagatctttcctgaaagtagagtaatctgtgtggacatcatcacggccttctaattgtgccaatatttcctggctggatatgctaaatcctttggcatgtataggagaagagaagggttcggtatagagattcaatccccactgaggcgctaaaccgtggttagccgcacctaaattaacttcaatcatagaatgatgattatcatcaaccagataacctgttgccagccatcgagtgagctctttcatttcccgctccccgcgttgaattgattgctctgttgattcactgctagtaggcgtacctaaagcaagatcatttttcaggcccgcacccaacaacctggccgcagtaataaaacgatctgtggtgccggaaggtgcagcgacagttggcaaattgtgcaaagctgcatccttggaaaatccggtattttctttcacattccagacagaaaaaccgttaccacgttgtacgataatgttttccttagctaattcttgatgtgctttgataggttctgattgaccaaattgatagtcagttctatccagccggttgcgaggatttaaactggcaaacgccaactcccggttggtcaaacgattatcagcctcaagtgaagcggcggctgaccagacactatccttatcaggagccggtgctctgaaatcattctgaacttttgtaagactattgccagccagagccgggttactgataacttcttgcccatttacctgtttagtcacctgatataattcgggattttcagaggcattaaattgattttcatttttaaaagtatagagcgctaattgatcaggtaagggcttttccttcgtggaaccgcgggcaggtgcaaagtttttactttccaagtaaccaatatcaattatatctttgaattctgatttcaattcgggtgatgaatagatcttctccagagtgtcccggaaataagctgagttggtgagatcataataagcagtggccttctccctcaatgttagcggttctgtattagctctatcagagctggcaccattctgccgtgcttcgctaatgatgcgagtaaatccacctgcgccaagctgaccgacaatactaaaaccgggtttatcaccggtataggcattaagcatcttagtgattgcggttaattcattaccctctgcccgaacaaaaagtttcactaggttggataagagagaattaaccgttttgtgggcagcagtgctttcgccggctaagcgagaaatattagcttcaatttgtttattggttgcgacggatttttcattccatcgtgtgataacagaagttggtgctgtaagtggattatcaatagtattattcagcaacggttcacagcagtggcaagttttatctgttgtagttgtttgatgcaactcattttgaggaatatcaatcctagtattagctctctgtattgaaaagtctggcatattttttctccatgatgttattgtattttttgctgtgaactttttaaatttacggcttgagaaaacaggtcaaaccaaaatattgtgggatgaagctgaagtggtgggcttagtttctggaaaaggaagttcagctcttattttttgcaggttccccagaatattatccaagtcagtagcatcgattcgttctatatcttgtaataaacagagacgaatagtttgtgttggctgatgtaatgcgagccatgctccgccaagtatatttatattactgtttaatgagagccaaaattccgcatcactattaataaatgaagctactgtatgatgaaaagtcagcattgatcccgttgaatctacttctaaccaccagggaccataatcaccaatgttcaattgcactgcgccggtagaaagattcaacataatgttggtttgatcggcaaaatctgcgcataatttttctaatttggacataaataaatctcatcaaaaaaatcaacagtaaaatattgcctaattatgaagttgaaacacaaggtagtctatcaaaaatagacaaaaatattgtaagaattaatcagatagatggattatgggtggtaaccaaataatatcgtcaacgtatagtgacggttagcttttatgaagaatttggcgataaacttagcgggataaggtgatattgccaatttcaatacggtcctcggtgataatttttgggtcattttagactgaaggggtagaacgaatatattgcgtggtaatatagtaaaaaaatagagacgtttaaggtgctgctattactttgatatacttggattttatctgattatttaaaactacaatgctttatatgaccgcgacagtaatctgcatattatttaataatattaaaatgaaaatataaataagatttcataattgtgctacacccattttttgtcttcctggcttttgctgtgatgaaaacgatgccaaaaaggcatcaacataattcagtaactgccacataaattgacaacaatgatttcgcgttattgtctcatggagcgattgccataaccgttctattttatttagccacggtgaatagaccggtaaaaacaacagggtaaattttggatgtcgtgccagccagtcctttaccttctgacttttatgaatacagtagttatctaagattaatgtgagggtttccgcatggggatattgatgattcagttcatctaacattttgataaataaatcagaattcttttttattcctttaacataggtgatttgctctgtttgggcattaaggcagcccgcaaggtaatgtttttcgttttttcccggggtgataacccgtttttgttgtcctttgaagcaccagtccgcgccgattttcgggtttagatcaatatccacctcatcttcataaaaaacgggatgtttttctgaaatgttcgctttggcttccgcgatctttgccattttctcatcgtattcgggatcaggttgtttcactgtgggtgccgctctacgccagacaatccccacctgagcaaagtaacgataaaggacattttgcgtcagagagaggttgagtaattcattgagggtatgagtcatgagttcaaggctccagcgagagcggagatagcctaacttttggggggattgctgtaataagaaaagtaagaggttatagagtggggagagatcccagacaacaggtcggccaacgggtaaactttcgagtccttccagcccatataatgtaaaccactgaacccaacgattgacggaagagcgtgcggcatgaagggtcttggcgacataagtcactgtcaatccttcattgagcatcaataacgcggttaatcgacgggaatagttcttatcacgggttttatggataagttttctcattttctggcattcatcttgaggtataggtgctatgataggcatcactcagtccgtgttggggtttgggatttttcgcaattgatcagatcgcaaaaatcggactgagttccctccaagtgatctattattttgaaaagttatttataccctatggatttcaagatgcatcgcgacggcaaaggagtgaatccctgggagcatagataacgatgtgaccggggtgagcgagtgcagccaacaaagaggcaacttgaaagatgacgggtatattatcaataataaaacatcagtatattattaatgaatttattattgctgttctagttgagcatagatggaattttttcattatttaattcatcaaaaataaaatttaatgattaatcatgatagttagtaaggataatatttttatcatgtaaatcaaaatattatttttttgtttttgtggtgattataactctatgtcaggtgaatacgtttgggttttttattttttgtggatttagcatttgtgaaattaaataaatcaatgatcttcattgttattttgttgccatttttcactttatatttttcataattatattcgttttgcatttattgaattttattacaattacagacttgagtgaatgaattttctctcccactattattagtgtatcgatctgataataagtgtcgaactaatattccagaataaaaaaaggaagataataattatgagcgaattatgcccaagcggcactattgatagccaaaaaatgacagaaaattgggtggagtttcaattagttgatgaacaaggtaatccattagtgaatatgccttatcgtctgataagcagcgggaggttgcgagatgagcgcaaaggtgtgactaataatcaaggattgcttcgggaagaaaacttgtcatctgatgcggtaacgttatatatcagtgctcaaccattagctgatgaaatggaacagcgtccattacgggaaaaacgcagtattagggcgtcagttgtcaaaccaaaagcagaaacggaaggtcatcaacaccgttatgtgacaattggacagataagtgatggcttgcctgtcattgataaatggatagaggagaaaccgccacgttatcatttcccagacccagtaccgaaaggttttcgtgttctctcaacaaactgccgatatattttggaagtgtgcccgtttcgtgcatgggtactattgttacatcatcagaaagattattccctggtgaatgcttataatttggcattaatgggattgctgtcatattttgatgataatgttgatatagccggttctattactcatttttttaaccgacaaatgctggatatatcccaattaccgagtaaggtggaaaaaatatcacgtacgcccattgtttatgatgtgccatttagtgaacgttatactgatgttgtatttattgattcaaaagcgggtgaaagtgggataggagatacggagttattttatgtcgctaatcaacaggaaattattgttagctggcggggaacggcgagtgtcaatgacgccctcactgacattatgtatcaaccattgaaattgggttgtgagccagacggtgtatgcagtggttttattaataatggtaaggttcatcggggtttttgggaggcatttaatcttattggtcagttaaaagctcccggttctgatgaaaatgtgtttgataaagttattgatttagctagaagtcgaaacttatttatttgtggacacagtttggggggcgctttagggttattacatagtgcccaactgaaaaaatatcatccttgcttatatagttatgggatgccgcggacattaacccgtagtgcagtacaagaattagaagaaattacacattaccgtcatgtgaatgaaaatgatctagtcccctctatgcccccggaaaaagacttagataattggctttataattattgggggcctttgggttatctatttagtactattgaattgttaggtttaacaaacggtcaggaagttttcttgcatcatggggaaatcgttcacttttataaagctgatctcattattgaaactttaaaaaagagtgattcaaacgatcttatacggctcacagaaatattacctgtcatggcaaaattgtatttgattccgtcattgaataatgaaacgaaagataatatgaaggtggcattggagattcagaaagaattttttaaacagataagcgacgctgataagaacaaatggtttccacgtaatgcaaacccgactttgaaatatgccttgggggtgcctgatcatcgtatgcttaaatatattcattacattggcgatcgaattgcagagttgtttgcgccagacaaatattatttttatcaagatcagaagcaattatttgaaaatacaatgaatgaaaggagtgatattattcctgatattcggcaacgtaatacactatttttgaatatggataaccagttagaacaagcacttattgatactttacaagataaacagagtattttggccttaacgcgttataccaatattgccacacggattgagaaagagttatgatgaaataaaggtgaataaattaaatattaagattagtgaattgatatttataccctatggatttcaagatgcatcgcgacggcaagggagcgaatccccgggagcatagaaaactatgtgaccggggtgagtgagtgcagccaacaaagaggcaacttgaaagatgacgggtatataaccgaataatagaacgctaggaaataatgccgccataatgaggaatatgggcggatgatggttgagattctcttttctaatttgcagggttgataaaatgaagctatcaaccctgttatcattaccagtaaaaatcttatcgggctacagtttcgttgctgttctatttcaagtttagcgaaaaggttgcatgagccgtccgaaacgaataacttcgtagagcctctatcgatttggttgttttgagtaaaataaacgtcttgtagatttgcaattttttgctaataaaaaaggttttttgaagatggaacaagagaatgtagtgaatattgagtggattgatatcgttaatgaaaataatgaagtcatcgctcaggctacgcgtcggcaaatgcgtgcccaacgtttacgacaccgtgcgacttatattgtcgttcacaacggcatgggaaagattttggttcaacatcgtacagtgactaaagatttttatccgggaaatctggacgcgaccgcaggtggtgtggtgctgacgggtgaaaatatgctggattctgcccggcgcgaagcggaagaggagttaggtattgccggtgtgccttttgcagaacatggtagtttttattatgaagcagaggactgccgtatttgtggcgcactattcagttgtatcagtcacggtccgtttgctttacaggaagcggaaattgatgatgtatgctggttgacaccggaggagataaccgctcgctgtgatgaattcacccctgattcgctgaaagcactttctctgtggctgacacgtaataacgattttgatgaaattattgtttataaaaaaaatgagaatagtccaaaaagagttatctaaagtaatctgagtagaaattaatgaggttttacattcttattgattattgatgaagagctggaggggggctgttagccatcctccaatacgacagtaccgttctttcgaggttttgagcaaactgttaataacgtgccgtaaaatatgtgcctgcgacacaagcgccactctatttaagcggtaagtaaatatccgtcagtaattcgtgtgtagcgacttcatgcacaaaattaaggtaatgaaggtaggaagcacgctttaatcgcattaattggatatagcgccctaccggtataccgcagtaattggcaaactgcctgtgaaagtgataacgcgaaaaattcgctacctcactcagttgttccaatgtgagcggttcatccaaatgacgctcaatataattaaatacctgattgaatcgtttgacgtaggcgtcagttttatcattgtgcattgtatcctccaattgagaacactatgcctgagcataagagacattgcctgactgatattgctgattttggcattaagccgatgtggaaaatgttatttcaaatgaaactctaatcgtgtaaggaagaaaataatagcatatagcagggaatggttaggtttgaataatagatagcgtttagagaaaaattaggtttgaataatggttagtgtttaggaaatagaatatccggggaaaaaagactgtttgttgttctattgttgtgatttaatgggtttggtttgatagaagtcgtaaagatattgtatggcccagataatctgggtattcgctatggaaaagtatttctcgatattggagtgccttaataggtattgtcaggaattaggatcatgtgggaccaaatcatagctatctgattcagccgtggatgaggacctttttatataacggttatccattggaatttacaatcagcattctaaggttaagggcttacaatgttcttttggacaggatcatggaatggttatcacattgtttggggatcgcatgagtcaaaattaacgagttatagaggtttaacatggtattttcatcaagacagagttggcattatttagagcccaaaatccaagaattacatgagatatcatccaagcttaattttagatatctttctgatgttagaagcggaagtcgtttcctttttgaaataaatgaactcatcagaacggttaatcatgagataggtacaaattgcttatctgctgatggtggtattgcaatcctgcaagatgaaatagataacctaaagagacaggaatttgacctgttaatgaatgatagccagatatatatgattgttcaaaaagaagaagaggatgaaaaaaccaatttaactttgaaacgaattggttttgttagcggtggttctcagatttttgccggtcttggcgtatgtgtggcctctcttggcgccgcttgtgccggttttggtgtacctctactgatacagggaggaaataatgtttatgagaatgggtattacctgttattaaggaaagaggtttcaggtccggtaagagatgtttatcgtgatgcagctaaaacgcttggttatagtgaaactgatggtgatagagtttacggttatgtagatctggcgttgtctgggtacggaatggcaagatctgttgtgaggcccggaacttttcgtttatttcggtatataaaaactgattacattaggggatggcaggtgatggggaggatacctttgattgctgaacttattggtgatatggtgacaggtctcagtatttattcgatttctgaaggtgagaaacatgaatgatgatgtgacattatcctattacaatgtcttttttgtaattatttattacgtaatgtctattttggtgcttattgtactgtttaagctgagtgaatatgtcaggggctatattagagaggtgatttttactgttattattgtggttattggtgctattcaatatggtatttttgtaaatggtggtgtgctggtatatatattcccacattattttagcattgacgattatgattcaattagatatggtgcgaattttcttttatttttatatccttgtcttcttattatggatagaccctatagtaaagaaaaggaaagcagagataatggtgaaaaagatgagtgatgatgtgacattatcctattacaatgtcttttttgtaattatttattacgcaatgtctattttggtgcttattgtactgtttaagttgagggaatatgtaaggggtcatattcgaacggtgctttttactgttatctttgtgattgttaatactgtacagcataacattgctgtaaatggcggtgtactggtatatatatttccacattattttagtatttatgattatagatcaatccggtttggtgctttgttttttgcaattgcatattcttgtcttcttactatgaataaatctgatagtgaagaaaaagaaaaagaaaaagaaaaagaaaaagaaaaagaaaataattgatatttatttaatggattatagagtgaaatttattttgaagtttgttttgaagtttgttttgaggtttatctaaatacctcccgtttgggaggtggtattttattgagagttaatataccgtatcttcccatatactataaccgccggtccctgcgataatatggttccacgttatacttttatatattaacgatagcgtttcttgaggttgctggtcattattttctaaagagttaggatggagtacactgtattccaatatttgagctccgattagctttaaattaaaatataattctaatcctccatttaaacttgtccgataatggttaataaaacaatccattacttcattattggaaattgcaacacctaacagaggtgttgatttatcaatgggttttctaattatcaccggttgatgtttaacgtttttcttacgtaacattgagtggctcaaaccgtaaaccagaatttcatcttgatggttaacttggtatttattaccaatcgagtcaattgatgaacaacccgcagagatgagtccctgattttttccttttatcgtcagatagattaagtcagccaaaatatatttactcctatgttattggtatgaatgatgtagataagaaagtagttttgttttcagactcatctctctttcttctaactttcgtcatgctgccaagaaggtaaaacataagtatgcttgcctgtttggagagcattttgaaatatcctaagttagtatcaaagaggagaatgctaatcaaggctctttccattcctcaaaaatagcgaaatttgattaaaagtcaatctttttggttggttttaaagcaattgtttattgacgatatcggtgttattaacacgacattcagtaatgcagattttgactttgagagattctgttgggaattattgttggttgattttattaatagacaggaagaatgcagcgttattcttggaagataaagtttgttgtaagcattctgtaagtcaataaattcattttgcaaacggcaatatatagctgctttataatgattcatcaggactaataactgcactataggcgagtgtttaattaatatgtatgtatattcagagtaaacggtaactaaaaagtgtaggagcggattgctcgctagacgctgataggttgttgtctacaaccaacaaaatgttggttgtctccaaatatagatctatacttagagctgaatttggaactatatatggcagtgtaaagtggaggtattctatatgttacagaaggttatgtgtggttacaccataccgataagcaagtttaaatccaatcctagcgcggccttggcggaagcccaaggagatgctattgctgtctcatcaaacaatcagatccagttttatgctgtgcctgcacatatgtatgaagagattattaattttgttgagtttgctcaacgggggacaactgagttaaaaaacattcctgctaattttactggtgaaggtttggatatgaatcagattgctactgagatggcaacgaagcttaaacacggctccactggagattacgaagaatggtcataaaaaacatacaaatttcttcaaagaaggggcaaggcaagccattagtgatttgcgagtttgatgaacaaggagtgctttcagctaccggcaattttcaccttaatgaaagtgagatgaaaaaagttgcagataaaatggcggaattgctgatcaagaaaaagggaaattaacggtggtaagaatattcacatacagcaatttgaaagatgctttgggtgaacaaaaaaccaaagccttggttgatgacttcaaagcctacaaagaaggaaaaggtttgcccattacctttggtcgggatgttccctataagttcacgaataaccgttcttaccttgagttgcaacacttgcattacagagaaagtggtttttcactcaagctggtgcaatttagacgaacgagcggttatgttctagtttactgttctgggttctttgaccgaagtacctatttgttaattgcgattattaagcactggaatcacaatgaatctaatgacatagtgggaactgacagagacattggattaatggacgagcttgaaaagattgccgaacgcttcagggaaaaattttaattttgttgatcttcaatctttatatgaatttattgttgattgattttactgatatacctaatggacgcaatgttgttcttggttgtgaaatattaagagtgatacgagaacaaaacccccgggcagaatattctgtcccgggtaatttagtgatttaagcgaagttgtattttctcgttatattgaagcgttttataccctatggatttcaagatgcatcgcgacggcaagggagcgaatccccggcagcataggtaactatgttaccggggtgagtgcagccaacaaagaggcagcttgaaaggtgacgggtatatttattcttccaaatgaaaggttaaaaccaccggctttagccggtcagctttagctgcgatactgtgttgtaccggaggtgcaacatggattacagatatggcagccacacggtatttcagattgaataccattttgtgtgggtaacgaaatacagatacaaagtgctgacaggagaagtggcaagtcgagtgcgagaattaatccgtcagacatgcggctcctttgaaatcagaatattaaagggagttgtgagtcaagatcacgtgcatatactcgtcagcagtcccccaacattagcgccaagtgaaatcatgagaaggctgaaggggagaacggccagtaagctgtttgaagaattttcgcatttgaaaaagcggtactggggccaacatttttgggggcgaggctatttttgtgcaacggtggggcagttaacggaggaaatgatcaaaagctatttagaacatcattttgaacccaatccgaatgataatttcaggatggataattgacgcgtcgtttagccgacgcgtatccggactttcagtccgttaatcactaacccacctactttagtaggtggttgtttattttatttctggcatcacaccaataaacgatctctttttcctgggctcagatatcagagattcaagttgttcaacacatttcagataatgagaggtttgcttgtgtgtgttagccgcgttttcatcaacataggcttcataaatataaaagcgggtagggatattttcatcccgtaatacatcaaaacgtaaattgcctgcttctttaattgatcccagatgattgaggcgaaaaacttcaataaattcgtctaatttgtcttgcttaacattaatttcaaccaaagttacgtgcatctcgattctccttattgtttttcacttaaaaataactcgtaagctttgctggcattctcattctggtgtacgactgcttgaaccgcttttaacatggcaaccggtgcttcggattggaaaatattacgtcccatatcaacaccggcagccccttgatcaatagcctggtaacacatctccagagcttctttttctggtaactttttaccaccggcaatcacaataggaaccggacatccgctggcaatacgctcaaagccagtatcgacataataagttttaatgatttgtgcgcccatctcggccgcaatgcgcgtcgccagagaaaaatagcgctgatcccgaaccatatctttcccaacgccggtgactgccattgttggcataccgtaacgcattccctgatcgactaatttgataatattcttaattgattgatgctcatattcagagccgatatagacctgagcggctactgcacagacattcaggcgcaaagcatcttccatcgcaaccgcgaccgcctcattggacagctccgtcagaattgagttggcaccggaagcccgcaagaccaccggtttgttggtcgcgggtggaacctgactacgcagaataccgcgggtacacatcaagacatcggtatggggaaacagcggagcaatattgatatcgatgcgttcaagcccggttgttggcccctgaaaataaccgtggtcgaaagccaacatcaccgttcgattggttttgggattaaaaatgcgtgaaagtcgtgattgcattccccaatccagcgcgccgcagcctttcagttcaaacaggctgttcttctgcgggatatcaataccaaaatctttaccatctttaatatcatctaaatctgccattttttttctcctaactcacttacattggtccagcaaccctgcatggtagagattgctggacagtcgtattagaaatcgtattgattgatattgtctttggtgaaaatgacccgttcaggcagaacaacaataccgtttcccttagcttcatagcggtaaccctgaacgcggtttggtacaacttcaaccatgccaatatcgggaatatctagtttatcaccgacatttaaatcacctttcttgagtaattcattggcgacatggattgaaattttgccttgattaaccacatcccatagcccgaattgcttgacggttccgcgttcaacataagggcgcatgacattgggggtgctgaaacccacgattgcaacattttgtcgtttcagattttctgctgcttgtgccgcggctggcagggcattggcatccggggcaataatggcgtccagatcactccaggcttttaagatcccttctgcggtttgtaaggatttggttgcatcgttgtaaccaaactgggtggtaacaatctcccaacctggatgttccgcggcaattttatctttagcttcttttacccattggttctggtcagtgaccgttgggctggagtagaaaaacgcgaccttggcttgctttttttgcacctgattggcagccatatccaccagcattccgcccagttggtttggcgttccttggttaatataaattgaacggcattccggtgaagtgtctgaatcccaagtcaggattttcactccccgttgcatggcgcgtttcaacgcggggcacaggccatccggtgaaaccgcagagaccacaatagcgttatagccttggttcacaaagttgttgataagctgaacttgcccggcaacactgggttcagttggcccatcataggtcacattgacacccaaggctttcccggcggctaccgcaccttggccgccactggtaaaaaagccgacaccgaccagtttagggatgaaagcgattctttcggcggcgtgtacccaagaggcgcaagccagacttaacaggctaattagagccagttttttcaggattagggttttcattactctctccatattgttgggtttcagagggactgtaatgtcataaaattcaatctgtaggtttatgaagacaatctctgatttcgccatcgttgtatccagtcacggatttggtggtggtgcaagctgatggaacgtcctaccacggcaataattaacagggcaccggcaagggcactggatacctgactggggacgccggccatttgtaacccctgttgtaaataaccaattaataatatagccagcgcggtaccgataattgaacctgaaccaccataaatattggctccgcccaatactaccgcggtgatggctggcatcagaaatgacgcgccaaggtcggagcgcgctgatccaaaataagaaactaatacaatggcggcaatagcagaagctatgccggtcagggaatagagaagatatagggttcgggcaacaggaattgccgcgtaacgggcaactttactgctttgcccaatcagaaaaatattgcgtccactgtgggtacgatgcatgaacagccagcaaataaggacacagagtagaaatagcatcaatggcataggtaggccaaacaaagtcaaattggcaaaatcagtcaatgcgggtggaaagccaccaataccttcgtaaccggttgcaccggagatgccggaaagcagcagggcactgccaccgaacagatataaggtaccgagtgtgataaccaacgggttaatgccggtatataaaatgagtgctgcattgattattccacatattgcaccgaccagtagtgtcaaaggaatagcggcggccattggaataccagtctgattcatcactccgagtgatatcgcgcacagaccaatagttgaaccgaatgaaatatcgataccgccactgacaataaccatagtcagtggcaaggccacaatcccgatacagataaaatcactggtactcagcaacaatatattgatatccagcatgcgcgggtttgctatgccaaacagcagaatttcaataatcagtaatgcggctaaggcgaattcccagccataacgttgaccgatattcattatgtcacctgattacttttgtcatttttgaggaaacgggcatatttctgttggcggatatttttttcgatggcacaacgaaggcgtccatcaaaaatcaataccgccagcagaacaaatccggcaataaaatcattccaccaggcagggagttttagcagtactaatccgctgtttatctgcgtcaggaaaaatgcgcctaaaatagcaccgatcactgtaccggtgccgccaagcagactgataccgcctagcacgcaagctgcgatagctctcatttccagcccactgccggtctgattcgggataaaaccgatctgggaggcaaaaacaattccggccagcgcggccatgacaccattcacggaaaaggcgataatttgaatgctatctgtacgaacgcccagttgacgagcgccttgcaggttgtctccggtggcgtaaaagctccggccaaatggggtttttgctagtatccacgccattgctaatatcaggatcattaacaaccaaccgatcggtgagatattgagccataaaggtgcggaaaggcgttttaattcgtctggtaagccttcaatccatttaccgtcagtaagcaataacatcagcccgcggtaaagccccaacgtgccgagggtggtaacgatcgcaggaattttcaaccaggtgaccagtgcgccattgaaaaatccggcacacatgccgagcagaagagtcaacaggcaggaaacggacaggctaaagccggcattcagtgacattcccataatgaccgcgcataagccagcaatcgagccgacagagacatcaatattgcgagtcagcatgaccagtgttgcccccattgcaagcaagataaggatctgcgcactgctaaaaacgagggtgacagtttgtaagctaaagtactggtggtcgataacactgagtaagccaaacaggcagagaatggcaatcaatgcggtaatttcgcggttattctggataagtttcaacatgatgccgcctgttgtggtttatgttcgccgaaagcgatatgcataatggtgtcaacatccatctgttgcttagttaactcgccattgatttctccctgatgcatgactaatacccgatcagcgattcgaaccacttcatccagatccgatgaaataaaaataatggccacttgctgttgggcgatatgacgaatcagttggtaaatatcattgcgtgccgcgacatccacaccacgtgtaggttcatcaataatcaggacggcggggtgagcttccagacatttagcaatcagaattttttgttgattaccaccggacagcgttttgattggttggttgatatggctgaatttgatatttaggatttggcaatagcgttcaagtaccgctgtatcataggcagggcgtatccagaatgtattgcggttgtgggttagtgagcagatattccagccgagtgatgaatccagaaataatcctgatgactgtcgatcttccggcaaataaaccaaaccttgggccagacgttgagcagtttttagcccattaacagtatgttgttttaacttaatttcgccggataccgcagggcgcaggccataaagtgtttcagccagttctgtacggccagcaccaacaaccccggccaaaccaagaatttcacccggtttcactgagaatgagatattgctgaaaccctcaccgctcagcttggtgactgtcagtattggtcgatcaggtactgtctggtgctggttattgctaagatccagacccaattttggggtgccatttaatggctgatcttttgcggccggtgtaatagcctgaataatgtcatccgttgtgtaatcgcggattttgccacttaaggcaatagtgccgtcacgcatgacactgacctgatctgctagttggtaaatttcagggattttgtgggaaataaaaatgatgccgacaccttgctgttgtagctcacggagctgggcaaataagcgttcggtttctactggtgtcagggaggcggtaggttcatcaaggattaagattttcgaattacgcatcaggccacgcataatttcgaccagttgttgatcggcaacattaaggctgccagcactgacatgtagatctaattgacagccaagtaatgccagtagctgtttcattttagacttatctacctgatgctttggcaaacgaaacaggatgttttcctgtacagacaaattcggaaataacagtggttcttgtggtatcagataaataccgaattggtgggctttagtgggattaagatggctaacatgatgaccgctaatcttgagcgtgcctttatccggctgttcgagaccagcaataatcttcatcagtgttgatttgcccgcaccattaccccctaacagagcctgtatctgccctggaaacagagtaaaatcaatatgtttcagtaccattacgccggaaaattgcttactgatgccactgacttctaatagcggtggtactgcggtgttgttatgtaacatcgcggcatcctcttacatgcaggtgcggaggcaaacaaaatgaacatttatctatttaaaaaacaattgttcagcatggtagctgttaaattgtgatcttggcaatatttaaatcatactttgtgaaaaatttatatattcattgaattgtgttcaaatttttgcggtaaaattctggcgtgttatacgttttaatggttatctgttgagtgcggataaaagaaagtggttatgtcgataaaatcagtgaaagaaaaatcagctaaagagaaaaatataccgtctgaggacgccagtccgggtaatagcatgagtgaagaagagctacttgcgcgtattgcatggttttactatcacgatggcctgacacaaggtgacatcggcgatttgcttggtttgagccggttaaaagtctccagattactggagaaagggcggcaatcaggcgtcattcgggtacaaattaactctcgttacgaggggtgtttggcgctggaagataccctgcaaaaacatttctctttgaaacaggtgcgcgttttgcctgcactggcgaatatgaatcttagtgccagattaggggttggtgcggcacatttgctgatggcattgattgaaccgcagcaattattggccgtgggatttggtgaaaccaccatgtgcgcattgcaacatttaagtggttttatctcatcacaacaaattaggttagtcacactatctggaggtgtcggtccttatatgaccggtattggtcaactggatgccgcctgttcaatcaatattatccctgccccattacgtgcttccactgctcaggttgctgaaacatttcgtcaggagagcagcgtccgagatgttttgctagcggcttgtgcggctgatattgctatcgttggtattggtgcagttaatcagcaacagcaggcgacaattatgcgttctggttatatcagtggtggtgaacagctaatgtttggtcggaaaggcgctgtgggcgatatccttggttattttatgcgcgctgatggtgaactggtggaggatatgcagattcatcaggagctgattggtatctccatgccagaactgaaaaccatcccgacagtgattggtgttgcgggaggggaagagaaagcggaagccattattgctgcgctgaatggtcaatatatcaatgggctggtgacggaagaacagactgccagagtcatgctgaatttgctgcgttaaaccctatatttattctatccgtgaaagtaagcagaaaaaatttgaggtaaagctatacccaatggatttcaagatggatcgcggcggcaagggagcgaatccccgggagcataggtaacgatgtgaccggggtgagtgagtgcagccaacaaagaggcaacttgaaagatgacgggtatataaattcaaaaagtaattgaactgaggatagcatcatgaatcaacgccgtagtgctaatccatcgggaaaatatctgatggcgcttgatgcaggaacagggagtgttcgtgcagtgatatttgatcttgaaggaaatcagattgccgcagggcaggctgaatggatacatcagcctgtacctgatgtaccgggttcaatggagtttgatttagcgacgaactggcagcttgtttgccaatgtatccgtcaggcgctgaaaaccgcacaattgcctgccagtgctattcagggagtggcttcttgctctatgcgggaaggtatcgtgctttataaccgcaatggtgagccgatctgggcttgtgctaatgtggatgcgcgttccagccaagaagtgagtgaattgaaggcgttgtatgacagcacttttgaatatgatgtgtatcggtgttcagggcaaacattagcgttgggtgcaatgcctcgtctgttatggttagctcatcatcgcccggatatctatcatcaggcgacggccttaaccatgatcagcgactggctggcaaatatgctcagtggtgagttggcagtcgatccctccaatgccggtacgacaggcatgctggatctggtaagccgtgattggcgtcccgatctactggaaatggcaggattgcgttctgatattctttcgccggtaaaagagacgggaaccttgttaggttacgtcacggagaaagccgctgttcaatgtggactgaatattggcacaccggtcattatgggcggtggtgatgtacagctcggctgtcttggtttaggtgtggtcaaacctgcccagaccgccgttattggtggcacattttggcagcaggttgttaatctgcctgaaccggtcactgacccaaatatgaatacacggataaatcctcatgttattcccggcatggttcaggcggagtcgattagtttctttactggcttaaccatgcgttggtttagggatgcattttgcgcggaagaaaagctgttggcggagcgtcttggcgttgatacttatagcttactggaagatatggcggccagagttccggcgggcgcttacggtgtcatacccattttctctgatgtgatgcggtttaaagcttggtatcacgcagcaccttcctttattaacctttccattgatcctgagaaatgcaataaagcgactctatttcgtgcattggaagagaatgccgcgattgtctcggcctgtaacttggatctgatttctgctttttccgcagtgaaaccggattcactggtattcgcgggtggtggttcaaaaggaaaattatggagtcagattttatctgatgtgacagggttgccggttcgggtgccgatggttaaagaatcgaccgctttggggtgtgccattgctgccggagtgggggttgggctttatgatgcaatgggggcgacgggggaaaaattggtgcgttggcaacatgaatatcagccaaatcctgaacattgtgaagtgtatcagaaggctaaacaggactggcaggcgatatacgccgatcaattaacgttggtcgatcatggtttgacaacttcattatggaaggcgccgggattatagcttgcaatgagttaatctgccgtattgctgggtgcgctcgtgctgataggcgacttgtgcaccaagtattcccttaatgcctgaaattgtgtgatgtcgtggtagtggtttgtgataacagtgaatttaccagtattcatggtctggctgcttcaataatactgtgatgtggatctagaattgaaaggtaccgattgtatttcttaatatgggaacaaattcaaaaagaagaacttccgaaagtcttggaacaggcatatcttcttaatgaaccgtttttaattgagatccctgttgcttacgactataacctattaaagcatgtagcttgattcgatgcatgatttatggatttgatatacttatagagtaaatttatatggacgcaagaactgactattttattcagtccgcattagaagtttttggagagaatctccttggtattgtggaaactgattcatatctccgtcaacccgattattcttctcggtgtgtgaggcatttctacgtgattttacctgataatttcgtcacaggttgcattacatcgctaagataccttcaggcggagttttttgagtttaccctaaattatcttacgattaatgagttgtcatattatccgcctcattgtatgtggcaatttactaagaatccttggctcttacggtcggaaaaaataagtgatgtggtactccctaatatcaaaggaaatcttgatatacccgtaatcattgaagatgcttgattttatccgaaatggagatcattatcctcgctatgaaaatattcattaccgatgaacaaaaagccgaacttgaacatctccatcacacctgccgtgataagagggagtgtgatcgcatcaaagcggtcctgctggcctctgaaggctggagttcagtgatgatcgctcaggccctgcgtcttcatgaaatgaccgttaaccgtcatatcagcgattaccttaatcaaggtaaacttaaatctgataatggggggtctgatagtttgctttctcaagaacaaactgattttttaatcaatcacttatctcaacatcttttccatcacacccatgaaatcgtggcctatgttgctcagctctggaatattacctttagcattcccggcatgaataaatggctacaccgtcagggtttttcttataaaaaaccttgtggcgtccctcataaattcgacgcagaaaaacagcgacaatttattgaatattatgagaatcttaaagtcacagcgaaagacgaacccatcctttttcttgatgctgttcacccgactcaaggcaccaaactcggttatggctggatgcgaaaaggcgagaaaaaaacagtaaaaacaacaggaagccggactcgcctgaatatattgggcgcgctcaacctgaatgccattggtcgtacggtgttccaggaatatcaaaccatcaatgactacaacatttgctgttttttcaatgaaataagaaagtcttatcctgactatcatcaaaaaattcatcttattgtggatggggcgggttacaacaaagctcatcttgttaaggagtgggcttatgttagcaatattgagttacattaccttcctccctatagcccaaatttaaacccaatagagcgattatggaaggtcatgaatgaacaggttcgaaataaccgttattttgcggataaacatgaatttcgagacaacgtcttcaaatttttcaccacaacgctaccggatatagcggactcgctgatgtctagaattaacgaccattttcaggtgctaaaaactgcatcttgaagtttcttgggtatatatatagacaagcagtttttagcgttgctcatattgcacgtctttactacctcagaaacttgacgccaaagactcacgtttggggagtacgccagcttggttgggcaatgcgttacgccgaattggggctatatcgtttgctcgaatcgaaggaactatcttgtattcacaaaaatagtgcatatgttttgaaaataccaacagaagatcttaattggctggtcacttgcaatacatcttggcaaaagtttgaaaaagaacttttatccaatattaatatttttcgtgatgcagcggcacggttaagtggaatcgcggagtactattcgacgttgttgcagcacttttacccggagacacgtattgtttcagcacagggtaaagtagacgatcttctttcattacaaccgattattgatcaagtgattattcttttaaggcagtttattggagatagattattagccttttatctccacggtagtgctgcccgaggtgatatgagaagtggttcagatatagactctattgttatcgtggataaggtcgatacagttatccttgaagcaattcgctcaacacaatctaggttcaaggatttatccatctctgtatatagtgaatcgaatgttcaccagtatcctagtttcagagcatatgcgctcattaatggaactaagcgtgtctatggggatcttgctttagaaatgaaaccgtcattgaaaagcgatatatatggcattattaataatttatttactataaggcaaatagctcgttcttatctgatttctggtacatatggacatcgagcacattatatgcttgggctgatgatgaaacttaccgatcacggttgcttacgccctttgcaaatcctaaaaagtggtttctatccaacaaagaaaactcaggttttggaatattacagagacaacgaaattttcaccgacattattaaatatacgcaaaacctaaaagaaagtgagaatacgctgaagcaaaaattgcttattggaagtcgagcggaattagaaaatttattctattcattacttgacgcatgtgaaatagtggcagagaaattacatatggtacaggtcgagaagtcaattttatagacggaatgatgttagttcttttagctaaacatattacgatgagtaagatattgattcgtatccaaacatcgtcattagctagtgtaataatttgattattgtaatcctatttaaatcaatgtgtcagtttaatgaacatatattatgaagaggaatagagcatgacatcgaaaattttggcaagatcaattaacgaattttttgaagtacaacaattgtcagaccaaactattctcaagccaaatcgaaaaataaagatgaagatactcgatgaaggtttaatgcaaacagccatctgtagaagtaatataggtcgaatcgatgaaaaagagttgaagcttgagtaccgaggccataatgtccgagacctagcaaataactattcttttagtgatgttgtgtatcttctgattacaggaaaactaaattcagaaggaagtgaagagtttttagatatgctccataacaattacctatcagcactcaagcatattgaaaagttaacaccagtaatattcgatactactcccactgatttcctcacaattgcagttttatcttcgcagggtaaatggctttctgactgttctgtaaaaacaaaggacgaacgtttgataattactgcatctattttggcagcaatagctgccgcaattgctatatatgctcagaaatatgctatatccgaacctgtatttaaaacttttttcggtactaagcatcgattctttgcaagctttttagcaacatgttttggccaacagtgtgacgatgtagcagaagaaatgttaaacaagtttttaattcttcatgcagaacatgggctgaactgctcaactgcaaccgttagagctgtagcgagttccggtgcagatccatttaatgctgtagctgcgggtatttgcgcattcagcggtcctcttcatggcggagcgagtggggcagttggtttaatgatcgatgatatacacgacaattctaaaaatattagtacttttattgatgaactagtagaaagaaagcaacgtcttatgggatttggtcatcgaatttacaaacaaccagacccacgagcttcttacatgagcgatattcttatcaaacagaaggcaaaattcgatgttatttcttcctatgtaaatatttcacaggaacttgcatcggaagtatcgaaaaggccgtatttttcgcaacggggattatacccaaatccggatctatttaatgggttgctacttcgtagagctggtttcaagtcgcacatgaatactgctctcctttgctttagtcgtgctgctggttggttggctcattactatgacagtattgacagtaaagcgccaattctgcgaccacaggagctatatttatgaaaaaaaagcataaaccagtacggaaactaatcgtatttggatgtggtcctcactttttaaatagatatttagatgttctattggagtaccgcgataccattgaggttatgcttatagttgacttgaaatgccgagaaatgaaaattcgctgtgcattaaatgagaagggattaaagcccagagcatacttatttcttgatgaaaaatacagaaattatccagattcagacgaaatttacaggttactttctgcaattccagaagtctatcaggctgatgctgttatagtgagcactgaaccaaaagctcataaagtatatgctctatgggcagccgaaaatggactgaacgtgttcatggataaaccaataaccgccccttattcgtcaaacgcggaaaatttaatggtagattttgcagaactattgactgcttcgagaaaaaccaacagtagatttgtaatcagttgtgaacgtcgaatgcaatttggatatagatatgtggaaaagtttctaactgaattcatgagctcattccaaatacctatcacatcaatgcatgttcattttggtggcgggtggtgggtaattccatcggaaatgctcaatttggaaaaccatccacttaaatacggttatggagtattattttattctgggtatcattatttagatctggtcgctcgctttgcactctacaataaaaaaatacaggatatagacctcctgaaaccacatgtcaaaacaatggtagtccgcccaaatgcgctagcggaagctctaccatttacgacttattcacatgcccttaaggaagaggataaaaatcaagatcaaattgcacatcaattgtcggactatggtgagttagacttctcagtaataggaaattattccaaaggtattcaacatcgaatgtttttcagcatggatctgatagaaacaaccttaactggcaggataatgccgaatagtattccaagcgatggacgaatacgacaggaaatcgtaaatattcatctagggcatttctgctcaattagcatcgtatcgaattcttttcggaaactgacagaaggtgacacgataccggaagattttaatataactattgctacccatccaatgtttacccggaggggagaacaaactgtgttacgaatcaaccgcaaagatctatcacagttaaacccaagcctccctctatgcgcgggcttgaatgtccacgcaagaaaagagcagcttcgcgattttttaagtggtggagatgcgaactcagagttatcaactcacgaaaattcagttgcattgcttgctgcggtttatgaacaggtctctaagacaaacacagttcctcaatagttcaagtagagtagaggccgagttatgaacggaaaattagatctgctaccttttactacatttgttcgaggtttccttttttgggccgcagctactgcggccgtgggttatatacctttgtttgtagaaacaacggatttttccacaacacaagcagccgtcttcctatcgggaactgctattggaagaatggtattccagcctattatggggcaatttatctcacctaaaaattgtttacagatatataccggtgcattaattggacttatgtcttgtagcatctgtttattcctttttagcaaccctgttagtttactattgtgttccagactgctggaaggggcttttttttcaggattcattatctcttggcgaacgcagcttaatagattttcccaatctccgaattttgagtcggtgaatgatagctatgttatttcccaaaatgctgggcgtttagcgggtccaatggcaggtgggattatcgttgcgaagtttgacctttatagtgttttcttattctcagcaattctgtattccttgtgtctgataatattgccccaaaaaactgctattacatctactgacaatcatagtcgtgaacatattcggataacgttagctcaactccttagtcgtaattggaggttacttctggttcaccatctggaatttatgtgtcttggtttatggttagcctcatggcctatctttgctgtatacgctagtggattcaatccaatagaggttggctattcgtttgctgttgcggctgcgggaggtttttttgttttaccactgcgtaagctgttacgaaaaatagctttaaaggcacgattcgtcatctctcttatacttttgtttttgcaaccgagcggtgctcttttgatatcagctcacttaggcttttgggtaatgttactattgggtggtcttggcagtaccatttatttcactgcctttcatcagtttatatcgaagacttatcctgttgaacaaatacctgcaatttatggattcttaggaacaagtactttcttagctcaagcagtcggccaagctgtaacaccatatgctcagcaatttggtggagttgatgcaccaattattatcgacgctatattgcttcttatcatgatatcaatcgcttttagcatatataaaaaagggagtgagaaatatgactgattctaattttttcttaagtgaatatgatggtgtcgcgctttcgcctatttcatttctaagacgagcaatactgagtaatggagatgatattgctgtcatagatggagaatgtcattggacttggagccaatatgcatctcggtgtgaaaggcttgcaatagctttgaaaaaaatgggcgtttgtaaagaaacagttgtgtccgcgcttctacccaatatacacgagcttcttgaattacattttgcggttccaatggcaggcggtatcttgaatgcgctcagtacccgaacggactcaaatactttaaattttatatttaaaaaacttaatcctaaggtattgtttattgatagaacctttatttcactgttggatgatgtttctctagacaaacaagtaaagatcatcgttattgatgtggatggcgcagtcatttcagaatcaatttctgaccgggaatttattcaatatgaatcgctgataactacgcataaatcgggagagttgtctttttctctacgagatgaacaagaggcgatcagcataaatgtaacttcaggaacaagtggacaacctaaacttattgtctattctcaccgtggcgtgtttcttaattctatttctaatgttctggattgggatataccaaaacgaccgacgttcttatggacgttaccaatgtttcactgtaatgggtggtgttttccgtgggctatcactgctcggggaggtacacacatctgtatgcgcaagtttgacgcagaagaagcgatattgctaatgcagaagcataaggtaacacactattgtggagcgcctattgtccattgcgcattaggtactattgcgcggaaacaagggctgcattttaaggagaaaattcatggattagtcgcaggtgcgccgcctacagagatgatgttttctctattagattccattggaatagcagtaacgcaagtctatggtatgactgagacatatggcccggtcgttgtgtgtgaagagaagagcgattgggagaagctctctaaatccgtaagaatatccaagaggatgcgtcaaggcattgtctcaaatttacaaggtcaagtttgtgttattgaggaaaatacgggattacaggtgccttttgatggaaagactgttggtgagcttgtaattcgtggaaatatggttgcatcttatgatccagatcggcatgtgactcttgatgcagcaagtcaatggcttttcacaggggatctggctgtcgttgaaaatgatggctatgtcagaattgtagatagaaagagagatattattatttctggtggtgagaatatttctagtctggaattggaaaatatactgtcaaactatcccggtgttttagctgccgccgttgtagcaaagccagattcacattggggtgaagtaccgtatgcatttatagagctcgaagaaacttcatcagttacagagtatgaattggacaattatatttgtacggtaatggcgcgctataagcgccctaaaggttatacttttttaactttacccagaaacgcaagtggaaaaatcataaaagggcaattgagacaattgattaggaattcctgagatctcaagagtgggataggtttttagaatcacatgtctttcattgttattaatgcagatttttatctgtgaattcagagaacagagattttaaattaaagagatgattattagtcaatggaaatatttcagggaaatgttctaaagtgaaaataataacgtcaattatgtttttcatgatgataatatggatattaataaaattaacgcaggaaacattgaaaataaattttctttacatctattattaaactgataatttatctttatagttaagaggagtgaattttatgacattggtgattcaagatgaatagcactaaaacagtcagtatccaacatgttattaataatcaaaaattctcgaaagttcaatggcaagtattaattttatgtttcttaattgttgtgattgatggttttgacacggtattaatggggtatattgcaccagccgtggttaatgattttaaagtagaaggtgctattcttgggccggctatgagcgccgctcttgttgggttatcattgggttcgatttttgccggtccacttgcggatcggttcggtcgaaagtcagtgttgacaatatctgtcactgtttttggcctgcttagtcttgctaccgctattgccgattcaatacagacattaactattttgcgttttttgactgggttaggtcttggtgcggcaatgtcaaatgcaataactttaatatctgaatatgctccagagaatcggcgatctttgttaataaatatcgttttttgtggttttcctcttggtgcagcggtgggtgggataatttctgcatggattattccacattttggttggcaaggggttttgattttagggggtattctgccgttatttctatcgctatttctcttttctctattacctgaatcacttaggtatttggtttcgaaagggggggcagaaggtaatataagacgaattttgtctaaaatgaccggtaatactttaaatgatataaataagtttacctttgatggagaagaaattatacataagtcgtcaattaaaacggttttatctaatcgattcttaattgggacggcaatgttatggataacctattgcatgggagcattggttttttatgttctgacaagttggatgccgtttttaatgaacgatgttggtttcagtgttagcatggcggcaacattgacagcattatttcctttaggaggcgtaataagcacggttttttccggttggttaatggatcgaattaatcctcataaagtagttgcaactaattatgccctggctggtattttggtcttttttattggtcaggaagaaaatgtattattattgagtattcttatatttcttgccgggataacgatgaatggcgctcaggcgtcgatgggatcaatctctgcacaattttatccgactcattgtagggctacgggagttgcctggatgttaggatttggaagatttggtgggattttcggtactttatttggcgcagaattgatcaggcttgaattaagttatagcactatttttgccattttatccattccagctattatagccgctttatctttaacatttaaggatgtgagttatagaaggcataaatagatgattttataagaataataggtggttaatatattctaaatgattaatcttgaataattgaaatatgaggggatactttgctgttaattaattggtaaagaatgtttgatactatgttggattgtaaattttaatatctatgttgtttttaaaataatatcaatcataaattttaaattaatttcgctattggtttttatgattttaataaataattgaatataggtatttagttataaatatatatagtgaaaaagttatattttatattttaaatttgaattaaatatagtatgtcttaaaattaaattatttaaattggagggtgtttataccctatggattttaagatgcatcgtgacggcaagggagtgaatccctgggagcataggtaactatgtgaccggggtgagcgagtacagccaacaaagaggcaacttgaaggataacgggtataaataggatttcataataccgatacagttagtctatttgattgatatctgaatagtgcaaatttgatgcttgatagaccgtactaactcataactctgctatgtatgcccttgctacacaaggagttgtacgaagtggagtactattttggaatagttatttatttacaacaactattcaatgaatgccattcatttaaatgagtttttaacttgtattcgcataataataaccactttatcaaaatatcgattaccgccagataatattttcagaatgaagtcaaatgacttacccatcaccaaattgaaattatcaatagctcatcatccaatatatagcttttctggtcaaccctcagcccattccatttctgaatgggatctgggtcaacagcagggtattcggcaagctctcatcaataaaataaccgccgatctcatcaataaagggtgtcatgaattctgttcagatgccaaaatcagtaataaacggtcacatcaggcgcatgaacattgaagtttcgaatcatttgtttctgcaaacaactcacctaaccgcgttccccatattcttagggtgtcatttcgccccctataaagttgcttcagtctgaccggtttcagcttcgccgggcaaacgtaaaagtaaccatcatcctgaataagaacaaaaatgccgatcttaaatatcggcattttgctgtacaaagagaagattaatttaatgctttaacgtttcaattttatcccggctcagtccggtactggtgacaataatatccaaactcacgccatgccgtaataaggcacgagccgtttccagtttaccttccgctcggccttcctctcggccttgcacaataccctgctcaataccttgttcaataccttgttcaataccttgcttgatacctcgctcaagccctttttgttcaagctgttctgcaatagtcatcaacatcgtttcatgctccggagattgctgtttcagtctgaccggtttcagcttcgccgggcaaacgtaaaagtaaccatcatcctgaataagaacaaaaatgccgatcttaaatatcggcattttactgtaaaagagaagatgaatttaatgctttaacatttcaattttatcccggctcagcccggtactggtgacaataatatccaaactcacgccatgccgtaataaggcacgagccgtttccagtttaccttccgctcggccttcctctcggccttgcacaataccctgctcaataccttgttcaataccttgttcaataccttgctcaataccttgcttgatacctcgctcaagccctttttgttcaagctgttctgcaatagtcatcaacatcgtttcatgctccggagattgttcaatcagttgatggacaaattgtgagagatccggcgtatgtccattcagtaaaatatagcgtaacaccacattgcgctgctcagttgtattataccccgcattcaagagttccaccaattggaggagccattcctgcatatcccgacagcgaatatgtttttgcaccagctccatcagggcaacccctttatgcgtcaggatctcttcatcgctgagcacactgacgtccaccaacggaaacgcctgacggtataagcgagccgcctgttcggggagcgtgaaacaatccagccaccggtttgagtaaggatacggccgaatctcaccatgataaaacagcagaggtgccaccaacgggagttcagtatggccttttttcaggtgagccgccatggctaacatggcataatacatcagccgccaggccattaacgggtcaggggtggactgatgttcaatcaggcaatagatatagccctgtccccgggccgtttcgaccgagtacaacacatcactgtgcagttgacgtaaatgctcatccacaaaactgccgggctccagtttcaatgtggctaagtcacacaacgactggatttcttcgggcaaataaagggatagaaactctctggccgtttcaggctgcgttaaaaaatatttgaataatccgtcatggtgaggccgtttttctttctttgccacaatctgtttctctgtcttattagttagtcattaccatttatagtatttctaccaagttacaaaaaacattgtctcagatttcctcaggcaaatctttaccgaatgcattaatagaagagcctaaagaatcaaatatcagaaaaggaaaaacaagaaaatattatatttacaacaattactttatgaaaaccattcatttcaatcattttttaacttgcatttgcataatgataatccctttatcaaaatatcgattacttatatttccgttaatcttggatttacataataattgtcattctcattaagagaaaaatttacaatggattttgctaaaaccctacgtcttaaaacacgctaaaaaagtatccttacaagtgaaaacaaaccttgacttataattttaattgtatatttttagttcataacactattttaagctaaattccaaacaacaggttactcattatggatgctttagatgaattttacgaaagaaacccttccgccagaggatacttggataacagtaccaaacataccgtccaatacttcattttctgacatcgctgcccccaaaagcggtgacgatttatcaacaagttttttaaatgttatgggatggtgcttggcattctgatcctaagttaaagagtgattaagattataaatggctttcccataataccgatacacctatacccgtcatctttcaagttgcttctttgttggctgcactcactcaccccggtcacatagttatctatgctcccggggattcgttcccttgccgccgcgatgcatcttgaaatcaatagggtatatacccgttatctttcaagttgcctctttgttggctgcactctttcaccccggtcacatagttttctatgctcccggggatttgctcccttgccgtcgcgatctatcttgaaatccattgggtatatgccttttgttttctttttgaacaatattggttctgtagcctatctcattgattctacggaccgcttggatggaaaggttgtatgtcttggtacacaagggctggttggaagtggaacataattatggaaacttatttaatttgggcgatagtcaatattattgagtaatatatagattacgttgtgtattattataaggcaatgaaaaattaagttattttaattttaaattgtttctttgtggttattgatataataacgtttgtatttttttatgttctaattattacaggatatatgtaattaagttaaatataatttgtatttgttcatttgtggcatattcattagcggtattgtcttattgttgaaaaataattttttatgaattatttttagcttgacgttatattttgatatgattgaatgtgcaggattattttatgcctattgaataactgtctttgaaattagtatgtccttttattattgtaatgaagactattttataggtgattgtcaaagtagtattttgataattaaatgtaaattggtctattttatttttaaaatacttaatttgtttttgaaatcattttaattaggtattaattgaaaacagataaagttaaaggttatttggtcattatgaataataaatgcagtaaatggttaagtttttaattatgaaatttaggatcagtcaacaaaagttgcagtaaattaattgagcttatctgaaaaataggaataaaaatggaatatttcattctgttatcaggataattggcattgaagataggcagtaagtagccgctattaatcgggcagtggcatccggtatctaagtctcttggatggatagcagatgtgtctatttttatttttgggcaagaagtaggagagaaacattagtgatgactgtcgggagtgacggttctcaaatttctaacagattcgttgaggtagtagtagatgaaaaataatattgctaaagtgggaagtgcatttaaaactcagacgtcagaaaatataaccgatgcaaatgatgtttcacaacaaactcgaaatacaaagaatacccttcaaagactcacatccagtgaattattctggtatgagcgtcttgctgcttttcaacccctccagttacctttcgaaaccgccggagaccaaacagaacctatatgggcaatgagcgcttggcagccccctctgccaaaaaatggtgaagaggagccattgcgaacgttgttgcagacttttgtcatttaccttgcgcgtttgactcagcagaccgtattccaaatcggttggagcgtggataaggtaaaagatgaatcggcaaatctggcaccggtggtgcctatggccgttgaggtagcgtttgataagccttggcgtgaggtagctggctgggttgatgacgagttgtcccgtttggtgcagtacggcacatttagttgtgatctcttctcttgctctccttcattgcatgctatcccggcgttggcgacaagtcggccgtggcgaatcgctgtctcgttgatcaagggtgataggccacgcgatcaaaaggtatccggcgaattgttgaccttccagataaatgcacagggagggtttcgttggatctacgatgaaaaccgcctgtgcacggaagtcgttttacggatgagcgagcacttacaggtgctggcagcctcgaaaaggatgggggatgaaattcccattgggcagcttaatttgttgccagaggccgagcgaacattgttactggaaacttggaacgcgactgaaaccccctatcctgatccgttatgtattcatcagctatttgagcaacaggtagagcaaactccggaggccacggcgttagagtatcaagggcagcgcctcagttatgccgagttaaatgctgacgctaaccggctggcgcaccagttgattgcactgggtgtcgtaccggaccagcgggtagcgatttgtgtggcacgctccccggcgatggtggtggcgctgctggcggtgctgaaagcgggtggggcttatgtgccgctggattcaacctacccggcggaacgtctggcgtatatcctaaatgatactgtcccgtcagtggtattggctgatgcgaccgggcgggccgcgttgggtgatgtcgcgctagccgggttgaccgtgcttgacccgaatatcctacctgatcaaccggacagcaatcccttagtgacggcattgacaccacagcatctggcctatgtgatttacacctccggttcaaccgggcagccgaaaggggtgatgatagaacatcaggcgatttatcaacgtcatctgggctttaacgacacttatgccgtcactgagcaagatcgggtgttgcaatttgccgcttttgcgtttgatgtttcagtcgaggaatttttctcggtattgtgtaacggggccacactggttatccgggatgatagctggctagcttcggtacgggaatttattgctttaacccggcaacatcgtatcacgatcgtttctctgccgaccttattctggtctgaactggcggccagagatcccgagctaccgctgccggattgcctccgactcgtcatgattggtggtgaggcggtaaaaaagaacgccgttcaggactggtttatgcaggaaggctaccggccccggttgttgaatggttatggcccgacggaaaataccgtgacagtgacttataaggagatattatccccggaagatgcccgttctatcggccggccggttaaaaattcccgcatctatctgttggacagagaggggcaaccggttccattgggtggcattggcgaaatgtacattggtggcgtgggtgtggcgcggggttatctgaaccgacctgcattgagcgcggaacgttttttaccggacccctttagtctggaacccgatgcgcggatgtatcgctccggggatttggcccgttttctgccggacggtgagctggaattcctgggccgtaacgatgagcaagttaagatccgtggcttccgggttgagttgggggaaattgaaacccgtttggtggaacacccggcggtacacgaggcggcggtgctggtactggatgacgggcagcacaaacggctggtcgcctatgtggcggcacaagcgcacgagagattggccgctgatttgcgtgaatatttgagtgcgattttacctgactatatgatcccggtcgcttttgtgtgtctggataccttcccgcagatgccgagcggtaagctagatcgccgggcattaccggcactgcgggaagaagattttgcccatcagatttatgaagcaccgcaaggggaggctgagatcgctctggcggctatctggcgtgaattattgggcattgagcagataagccggcatgacagtttctttgcattgggcggccattcgttgcttgcggtacgtatgattgaacgcctgcgtcacttggggttgacattaacagcgcgtgatctattccagtcgccggtgctgtcagcgctggctcaagcattgggacagcaccaagctgtgataataccgcctaacatgatcactcccaccaccacggcgttaacgccggagatgttgccgctgattgatctgactcagactgatattgatcgcatcgtggagcgggtgccgggtgggatgagcaatattcaggatatctatgcgttgtcgccgttgcaggacggtattctgttccaccacctgttggaacaggaaggcgacccgtatctgttacactatccggtggtctttgctaaccgatctttgctggaccgttatctggcggcggtgcaacaggcgattgatcgccatgacaccttacggacggcttttatttggcaaggattatcagctccggcacaagtggtcttgcgccgggcacagttgcccgtgacggaactgacgctagacccggctgacggcccagtcattgaccagttaacccggcgttttgatccgagtcagtatcgtcttgatctggggcaggttccgttattgcattttgttgtcgctcaggaaacggacggtcgttggtttttactggaagtgcagcatcacctgattggcgaccatgaaacaatggaagtgatgcatcgtgaagtgcgggcctattttgccgggcaggaagagcacctgcctacgccagcccctttccgcaatctagtggctcagtcccggctgggggtgagtcaggaagcacatacccgcttctttaccgacatgttggcggaggtggatgagccaacgttgccattcgggctggcggaggtgcatcgtgacggatctcgcatgacggaatcccaccggatgttgaccaccacgttaaatgatcgcctgcgcagtcaggcccggcgtttgggtgtcagtttggcagcgttgtgtcatctggcttgggcgcaggtgctgtcgcataccagcgggcaagagaaagtggtgtttggcaccgtcctgtttgggcgtatggcggcgggggaaggggcagacaatggcatggggttgtttatgaataccttgccgttgcgactggatattgacgagaccccggtagaggatagcgtacgggcggtacatctgcgattggctgaattgctggagcatgagcatgcttcactggcgttggcccagcggtgcagtgggatacagggtgaaaccccactctttagcgccctgttcaactatcgccacaatgagcaaccggcggcgttggatgagacgatggccgggattgaattcttgggtgaacaggaacggactaactatccatttgggttgtcagtggaggatgggggggcttcgttggggctgaccgctcaggtggtacaaccgtttgaacccgatcggctatgcggttatatgcaacaggcgctggaaagtctggtggaagcgcttgaacagaccccggagacgccagtacgtgtgctgaacgtcctgcctgaaacggagcgcacactgttactggaaaccttaaatgccacggaaaccccctatcctgacccattatgtattcaccaactgtttgaacaacaggtagagaaaaccccggaagcgactgcgttagtctatgaagggcaaacgctcagttatgccgaattaaatgcgcgtgccaaccgctttgcccaccaactgatggcattgggcgtcacaccggatcagcaggtggcgatttgcatggcacgttcaccggcggtagtggtggctttgttggcggtgctgaaagctggcggggcttatgtgccgctggatccgacttatccgggagaacgtctggcgtatatcctgaatgataccgctccgtcagtggtattggttgatgaagctggtcgggcggcgctgggtgaacaggcactggctgggctgacggtacttgactcgaatatcctaccagaccagccggacagtaacccgcaggtagccgaactgacaccacaacatctggcttatgttatctatacctccggttcaaccgggcagccgaaaggggtgatgatagaacatcaggcgctgtatcaacgtcatctgggttttaatgagacctatgcagtcaccgcgcaagaccggctgttacaatttgcctcttttgcgtttgatgtttcagtcgaggaatgttgtttgtcattgtgtaatggtgccacgttagtgatgcgtgatgagcgttggttaacctctatgcaggaatttattgccttagccgggcaaaaccgtatcacagtgatgtctctgccggcgttattttggtccgaactggttgccagagacaatggattaccgttaccagattgcctcagactcatcatcattgggggtgaggcagtgaaaaagagcgctgttcaggattggtttacgcgggagctccaccgacctcgactgctgaacgcttatggcccgacggaaaataccgtgacggcgacttgtaaggagatattattcctgacagatgatcgttctatcgggcggccggttaaaaatacctgtatttacctgctggacaaatacggtcaacccgttccattaggctgcgttggtgaaatgtatattggcggcgtgggtgtggcacggaattatcttaaccagccggaattgagtgctgaacgttttatagccgatccctttagtccgatagccggtgcgcgcatgtatcgcacgggagatttggcccgctacttgccggatggtgagctggaattcttgggccgtaacgacgaacaggtaaaaattcgaggcttccggatcgaactgggggagattgaaactcggttgatggaacaccctgcggtacaagaggcggcggtgctggcattggatgacgggcagcacaaacggctggtcgcctatgtggcagcgcaagcgcatgagagattggctgctgatttacgtgaatacttgagtacgattttacctgactatatggtaccggttgcctttgtacgtctggataccttcccgcagaccccgaacggcaagctagatcgccgggcattaccagcaccgcgggaggaagattttgcccgtcaagtctatgaagcgccgcaaggggaagctgagatagctttagcggccatctggagtgagttattgggtattgagcagattagccggcatgacagcttctttgtgttgggcggccattcactgctcgcggtacgcatgattgaacgcttgcgtcgcttggggttaacactggcggcgcgagatctgttccaatttccggtgctgtcagacttggctcaaacagtgggacagcatcaggttgtagtggtgccgcctaacgtcatcacgtcagccactacggcgctgacgccggaaatgttgccgctgattgatctgactcagactgatattgatcgcattgtcgggcaggtgccgggtggagtcgctaatattcaggatatctatgccttgtctccgttgcaggacggtatcctgttccatcacctgttggaacaagaaggcgatccgtatctgttgctctatccggtgatctttgagaatcgctctttattggaccgttatctggcggcggtgcaacaggcgattgatcgccatgacatcttacgtacggcttttatctgggaaggattatccgttccggcgcaggtggtctggcgtcaggcgcggttgcctgtgacggaattgacgctagacccgacggacggtccagtcattgaccagttaactcggcgttttgatccggggcattatcgtcttaatttaagtcaggcaccgctactgcattttgtcatcactcaggaaaccgatggacgctggttcttactggaattgcagcatcacttgattggtgaccatgaaacgctggaagtgatgcaccgtgaagtgcaggcctattttaccgggcagggggatagcctgccggcaccggtgcctttccgcaatctggtggctcagacccggttgaagggggatcaggcggcacatacccgtttctttaccgacatgttggcggcggtggatgagccaacattcccattcggactgacggaggtgcatcgtgacggctctcaaatgagggagtttcaccggatgttggcacctgagctgaatgatcggctgcgtagtcaggctcggcatttgggtgtcagtttggcggcgttgtgtcatctggcttgggcacaagtgttgtcgcataccagtggtcaggagaaagtggtgtttggcaccgtcctatttgggcgcatggaagcgggagaaggggcggacaatggtatggggttgtttatgaataccttgccgttgcgactggatatcgatgagaccccggtagaggatagcgtgcgtgcggtacatctgcgactggccgggttgctggagcatgagcatgcctcactggcgctggcccagcggtgcagtggtattgccagcggtacgccactctttagcgctctgttcaactatcgacacaatgctttatcggccacatcggatgacgtcatcagtggtattgaatttctggatggacaggaacgaacgaactacccatttgggctgtcgatagaggatgggggttccacgttggggctgaccgctctggtggtgcagccgtttgagccagagagactatgcgattatatgcagcaggcgctggaaagtctggtggaagcgcttgaacaggccccggagacgccggtacgtatgctgaacgtcctgcctgaaacggaacggacattgctactggaaacctttaatgctactgagaccccgtatcctgatccattatgtattcaccaactgtttgagcagcaggtaaagaaaaccccggaagcgaccgcattagtctatgaagagcagactctcagttatgccgaattaaatgctcgcgccaaccgccttgcccatcaattgatcgcattgggcgtcataccggatcagcgggtggcgatttgcatggcacgctcaccggcgatagtggtggctttgttggcggtgctaaaagccggtggcgcttatgtgccgctggatccgacttatccgggagaacgtttggcgtatattctggatgatacggctccgtcagtggtattggttgatgaagctggccgggcggcgcttggcgaagaagcgctcaccggattgaccgtacttacgctgaataccctgccagatcaaccggacagcaatcctttggtggctgcattgacaccacagcatctggcctatgtgatttacacttccggttcaaccgggcagccgaaaggggtgatgatagaacatcaggcgctgtatcaacgtcatctgggttttaatgagacctatgcggtgactgcgcaagaccggctgttacaatttgcctcttttgcgtttgatgtttcagtagaagagtgctgcttgtcattgtgtaatggtgccacattggtcatgcgtgatgatcgctggctgacttctatgcaggaatttattgccttagcttggcagaaccgtatcacagtgatgtctctgccggcgttattttggtctgaactgattgccagagacaatacattaccgctgccggattgcctcaggttcatcattattgggggtgaagcggttaaaaagagcgctattcaggattggtttgcgcgggaaacccaccgacctagactgttgaacgcctatggtccgacggaaaataccgtgacggcgacctgtcaggagatattatccccggctgatgatagttctatcggccagccgcttaaaaatacctgcgtctacctactgaacagagacggtcaacctgtcccattaggctgtgttggcgaaatgtatattggtggcgtcggggttgctcggggctatcttaaccagccggaattgagcgcggaacgttttatagccgatccctttagtccggtatccggtgcgcggatgtatcgcaccggggatttggcccgttacttgccagatggcaatctggaattcctggggcgtaacgacgaacaggttaaaattcggggcttccggattgaactgggggagattgaaatccgattgttggaacacccggtggtacaagaggcggcggtgttggtgtgggaggatggacgggacaagcatttggtcgcctatgtggtagcggaagcgaacgaaggtctgacggccagtttgcgtgcacatctgagtgctattttgccggattatatggtgccgtcagcttttgtgcgtctggataccttcccgcaaaccccgaacggcaagctagatcgccgggcattagccgcgccgagggaggaagatttttctcgtcaggtctatgaagcgccgcaaggcgagacagaaaccacattggcggcgatttggtgtgagctattgggtgttgagcaggtcagtcgccatgacaacttcttcgtattaggcggccattcactgctcgctatgcgaatgacgaatattgccgcgggtcgagggatggtttgtacattgaataccttgttccaattcccggtgctggctgaactggccgcaaaaattacctcggatttactgtctcaaccgcaaaacagcgccatatcggtacgatctgatggaacagagctgccgctgttctttgttcccagtggcatgggtgattactcctatgctttcgggctggctcagcatattgcgtcgggctacccgatttatgcgctgccttggccgtccatcaatgaagaaccgatgtcaacgatggaagagcaggctgccagaatgatcactttgatgaaagccgttcaaccggcaggcccatatcggataagtggttactcttctggtggaatattggcttacgctattgctcaacagcttttgggggctggcgaacaggttaatttcctggggttgattgacacgctcgctcctcattgttttgatggacagagctttggtcagcagatagcgcaacccaaacatcaattttttgctgaactggtcaggcaattaggggaagaacattctgaagagattgcggcattgtatcaacgaatcgatgaattgaatttagtgcaatttattgccgcggcgcaggagctggcgttatatcccgtcaatctgagtgctgacttaatggcaaagcgttgggaacagatagagcattatgatcaaatcgtcagagattatgagccaccagccttagcggtaacgttgcatcagttttatgcgatagaaccttacccgcctatttcttttgtggcggatgaagggtcggagcctttaaatatcgatccatccttaggttgggagcaaataatagctgatacttcgcttaaactcattgctattccgggagaccactttagtttattggaagataatgagaataaaattgctttatctcaggctttaaatatggcgctggcaatcagtgatgaaggggaggtggtgtaatattgatatataccctatggatttcaagatgcatcgcggcggcaaaggagcgaatccccgggagcatagataactatgtgaccggggtgagtgagtgcagccaacaaagaagcaacttgaaagatgacgggtatattaatgatttaaccttgatatgataatccggtatatattgtttatatcggattatttttattcacatctgacgtggttccgtataataattgcaacgtaatgtactcaatatattgagtacattaaatattatatgaattcagtaaatagcgttctgaaaggcagttgaaataggttaataaggaaaattaggaaatatcattattcatgataaaagcaaaaacccctttattttcaatggggtttgtcagagttatgaaaaaacctctaatgaggattttcagtagagtttatcttgctctacgttccttcgtagtaagcggagtaagctttacgtccattatataaacaaggtttaacaacccctttaagatgccatgtaatatttataccgttatgcatttgtgtaaatacgctagcaaaattgttatcaggattaacaacatatctagtatacgccaagccattatagcctatattctgatttgggcagggagaaagatgtgcgtttgcagtcccaatgcctccgattaatgctgttgctaatgctccaactaccaatgatttcttgaacataaaagttttcctttaatattttaataactgtagtcattttattaatttcacattaagtgtatcgcttttataaagtttgtcaaaattttaaagttagaaaacatttattttaatcttgttaatattgagattttattttatgaaataggaaaaatatttgctggggaatataaaatcacatgtaataatgcatgttaaatcatcacatggattatatttcagttttaaaatctgcttatatttttcattttagattagaaatctaacttattatttacaaaaacttctcccataatattaaggctccctgccgattagactgtctccaaaaggcacaattaaatggacagaaggagcatttcgccccttctgttatttctcttgttacattaggagggcagtgatggtgccaacatagtctgcgaagcctgacggattcgcgacaggtgttcgcgggcagcgccggtatcaggaaacgaagccatagccccgctcagtttggctaggttcggtctttccgcccccggtactgcgtcaacggcatgggttgtgatgacagattgcttgctggcccaagacagttccaccagacctttcttggtgtaacctcgctgggtaaagccttcgaccaggtgatccacgttgatcaccgacgaggaaccttccagctcgatttgtaaatgccgatgggccatagcctgactgccaaatacctgacgtaccatcagggctgttccgttgctggaatcggttaacatcaagtcgtcatcgcggcgattcaccaagatgctttccggatcagctaatggtaggatcaggcggtccaaggcttggctccggtcgtcgttgtcgatgactatcgtatggtaatgggaccacatcgccttgctgaggcggtagatatcgttatcggctccgccatgcagtaccacgctgtcgacaccatcaatgagcggtggcgtcagatcgtctttgctgccgtcaacgcctccaccttgaagcagaagggacgaaccgatacgctccacacccgtaaacttgttgagcatctgcgcgttgccatccttgatctgatacagggcctgagtcatcgggctgtacacatacgccgccttttcgccagcggcgatccccacgaagcgcagattatgtgaaacagggatgccattactccaaaatacctgaccgctgccgatatcgaaccagcctagctccttattgtcctgcaaggtcaatacccctttggcctgccactggtcggcgagtttggcgagtgcctgtggcaggtgggtcaggttgttctgccgccagcctttgtcaacgccaactagctgcaattcgccgttgttggttcgcagcaagatctcgcccttgaccgtaatcaggcgcatgccggtatcgacttgttgcgctgccttaagatgtaactcgggtgtcaactcactggcagagggaagttgtgccgaggcgctaagtatctggccggtgccaccaaaagccgcggctaacgcattcgcggtcatggctggttggcgatatagcttgccgctttcgggttcgaagagccgcgcggaggcaccatctgtttcgaatcccagaaattgcaacgatttgccctgtagtgccgctgaagccaccactacttggccgttgtggtaccacaccggcagcaggctattgccgtcggtacccttgactccaaacaccgccagagtggtggtgctgtcggtgatgttagccagatcctgccaccagtgggtacgccccttgagccaatgctcgttaaccgcttcatagttaagctgcccctgcgcgtcgagccgggccacacgcccatcttcggtgatggcgagcaggcttccgttcagattgaccagattagccaacgctggcgtgttgatgcgtaatgcgctgggatggttggcgtcgagaaccatctgtccggggccttcctgacggaacagaactttttgttccttgctgtaaaagaagaacacttccacttccttgccgccgggctgaggcatacttcccgctagcactaagtcggccgggatcggccaggcactgtgggcctgttcgtgtgcttcgaagtgcaaggtccgatccgccggtggtgccagattcggtttgatcagcgtaccatcgccggtgcgtatccagtagcgatgtgccacgccagccgcatccacgccgaacaccgtgaccagcgccgcactggtcggctggatcaaccgtgcgcccagcgtatacatcggagtttcacgttgaatgctattgttctcgtagccttggagtatagttttgagctcatcactatgcaggccggtacgggccgaaagctggagtagcgcatcatcacccaccgcactgaccaactccattcggtcaccgaggagccgatagctcagttcagcttccttcccttttagctgataacggcgcgccagatagaccgcattcccctcttgccatagccgacagatctggcctgcactctggttgaaccaaggctcaaactgagcgtcgacctgtcccgtggcgatgtctacccgccatgccgccgcattatcggcgtcgtagaaataggcatggtcgcccatcactgcacccagttgtgcatgcctggcttgtttgtggggggtgtcggtgaacagcatgcggtctttggctacgtcgtagaacgcccggccgacatttcgctcgttgtatctgtagttctccaccaccgcgtactgcccgtgcaactgatgcgccttggctagatcgctcagatgctgctcgatgctatagcccggcacctgccacttgctcgcatcttcgcttaccacctgagttgtcaagttggagaagtcaacttcgcgcacctcgcccttgcagttgactaccagcacttgctctttccgatctgaatcgagttcgaccaccactccaccaacgaccagccggttcttcgacacactgatactgtcactggcgagctggctgctgtcgatgatccagcgtgacggcgcactgccgaccagattatgtgggacatcgctcgtgagcttcacgctggcgctttcgttcagcccgatcaggtactcgccaccggcacccttgatctcgtaatgcaggtagccatgcaattccttgggtagctcgggcactatcagttgccggttgcgctggtcgagcaccacttcgattggtgtcgccatatattcctgatgaatcctacgaatcgtcacctcccccggaaagatgtagaagtcgtagtcgaatcgtttatcctcttcaagcctgcggatcacatcaaaaccggcatcgtgacgcgtagttgcgctagggagctgtatgtattcgtaactgatgaaggactttggggtaccgggcaggatcagcacattgctgtcactgtggtcgagtttgtgggaaacgtccttgtaaccgatcccgctgcgtacctcgattgcttggctgcggtcacggaccatctttggaaaatcgccgatccagaagaaataattgattcttcctgaaccggtagagcctgaatgggtgcggtaaatgtactgactgtcgaagtcgatctgatgctttcgcaaatccagcgttttgatcacagccccggccagaggcaccagcactttcttctcattatcatatcgatagccattacctttgtacgccttgtcgattgtatcaaagtaacggcctaccgccttggcatcctcggcgaccacaccaaaggcttgcgccagtgccgtaaagcctacagcgagcccgccaaggatcactcctccagaaccgagcacagcacccgctgttgaggcaccgactaaaccagcccccactccggctgtacctgtgacgaagctagccgagtcaaacgcaagctgggtaccgaacaccgccttctgtacatcgttctcagcgtgagccagctcataagcatccagaccgaccattgcgccgccaaatagcacgcctgcgccttcgttgacggtgtgccccagaatggaggtaaagtccttgagtgaggtttcggcggccaccacttcgccgcgcaacgccgtacgcaccagttcggtgaccttagtcacgtcctgcacgccaccgtgagccatctggacaagattgagatagctgtggaccttgagcgcggtggccagatcaggcgaagcgatcccacgtgccgcatcattgcggttcttgtcggtaaaccattggatcaatgactgtatcgcaaacccggcgtttagcccatcaactggagctgcttcgccgataccgcctttgggctgtatctggccgtgttcgaaggtgaaatgttggcctagggtgagcacatgttcatcgacaaagcggcggaattcgataaaagtggcatcgccgctgctcacccaacgggtctcctcgggttggtcgcgattgatgaactggattcgatagtggcctttgccttggtcctcggtattgccaatcactggcatccagcgctgatcaaggttgttttcttgggcgatccgtgtactggcctcggcgaaccttgatccccactgttcggcatcgagggtcgctaatgcagtgtgcaaccgggtgtccttggcaatccgtacttgggtgttaaccgcttgctcaacctgccgccgttgctctatgaccgtagtgagttcatcggggcgagtcaggtcggccacgttcagatcgttacccaccggcacttttgccatcttactggcatcgatctccaccaagttgaagataggggtcaacttgtcgccaagcgaaccgtagtgagctgctagcttgcgtcccaccaagtggtgcttcatggcttcgaggaagcggcttgtattgttgaaggcaaaaattccgacattcggatcatagaaatagtaacgacgtccttcgagtccgaccatacttcctaccatcatcgagtgatttggggtattgagcgcgaacgtcgaggtcttggtcgcctttttcagcagggaaaccacttcggacaatgtaacctgtcctcttgttgttgacgcctgtacggcctcaaggttatcggagtgcaatttgatcagactgtttttcagcagcgtggaactacctgcgtggggatcggcggctgccagaaacagtttttccaccagattgttgatacccgcttcgccgctgttagccagcgccaccgccatcgcccggaccaagggatagcaacggccgccggacttgtcgccgaccagcgacaggtaaaagtcctgtggcaccagacggtcgaagctactaccagcgcggtgaaaatcctcgctgtacaccgccgtccacttcaataccttatcgatgtattctgcttgactggtttcagtgatgtgagcactcaaggcactttgttgcttgggagtgagctggcctttgagaaacaggatcttcatttccaaggctgacatcctgtcgtacattccagggatgctaatatcgcggaagttacgctgaccatcggtaaacgcggtgccatgcacacgatgttggtaagcatcggcgatcacataacgctcgccgatgctactggtgtgctccagtccactgttctggatgggcgtattgtcgatccgcaccacggcagccatgccgtccttggacttgatctgctgccataaccagctttgttcgacgaagcctgcttcacgcagaaccgtattgtattgcgccttgtaatactccagagtgatattgatctgttttatctgttggtcgatcagattgtgctgagaggtattgcgttgctcctcatagagtttgcttcgtttgtctactagctgcttgatatctgcgttgatcttgtcgtcaacttcggcatgtaacttagtccacgcggcaattgctggatgatcaggagaaaattcaccctctgtgtatacaccgtcggcgatcccttcgactgataccccgaattgggtagcgactttctttagttgttggtgaacttgctcacggtaagtggcgaattgagcttggttgcgttcagtcacttgactgtctgcgatctggatagagagtggctcctcgtcgccacgtaactttagccgaagcctctggccgtcttgctgatactcttggcgctggaacaccaattgccattcgtcattgacgtactgcatgtacgccacggcgaggctgtcggtggtggcagctacccggtaatctttgtcgtccactgccatcaccacgttatcgtatagcagtgaactgttgactcggccatcgtggtagacccggtaggtattggcatcgaggctggtcactaccaccgagccacccgatagcgtcccggtaaatagaaaactctccgcgatcgcatgcttaggaatatctacgtaggctggtgacgcattggcctgatcggcgctgtcgtagtcgagaaaatacgcgggtatgctgttagcgcctgctgctacatcatcattagcgcttcgatcagtgtattcgagctcgtacaagcctgattcgattttcactagctgggcgttcccttctgctgggaaactccccgacctgattaatgtctcggtattgatagtgttggatttggcgaacaacacaggatcggcggcgaactgatggatattggcactgacctgacgaggctcagaatcgccactcattggtgccagcgtccccttgagctcgctatcccgtagtgcttgtgagagcaacgccgggttgtgtacatcgtacccgcgtgtctgcaaggtatgcgtcagggtcttctcgattggaatatcggtcagcaaggactgtgtacctgctgccgcaatcagttgtgcccgggactgaccgtgactgctcgatccgcccgcggccgtttcagagtaggaaatgcccttgcccacgcgatacatacctgtcggggtgtgttcgacaaaggctgtcgccggtaacagttcgctaagcttttcgctgatggtttgagcatgctcgatcccggctttggaaaggtagatcacagcttggtcggtacggctgcccagatttttcggccccatgatcttggcctgttccagccagccgcgattgttatcattgaacaattggggcaatgcccgggcaagcaagttgaaatgcgccttgttaacgttgatggtcagtcgtgcaccaagcttgccgcgggtgccataacgttgcgcaaaatcctttggcagcatccggaaagcttcggcattgtttagggcgtcatccgtttgcaaagatagcgctgttttctcattgccttgcaccaaaatgtcgattgttgtgatgcgtgttgccagtgtcttgatataactgacaaatgcctgttgctcgcttttgtcgaggcgactgatgccgaccggtctgtcattactgtagcgccaataagcgttgctctccagcgcacgttccagcattttctgttgctggaacaattcgggactccactcgcgaccattttcacggaaccccttcttgatctcttggaccagcgtttggattttcggtttgctcctcatctctctaaaggtcgcttgtgcagacgcgagcagtgattgatagttgttactgggaataatggttctccttaggaaaatcctactttgatatttacggattacaacgcttcaagaatggctggctatggcggacacggctagccgtctgtgatctaagaatctttcatctgcaaggtccacagtcgggcataaagcccgttcaaggcgagtagttgctcgtggctgccctgttcgaccacctgaccttggtcgattaccagaattcgatgggcatggcgcagggtattaaggcgatgggcgacgctgatcactgtgcggccctgtgcaatgcgttgtaggttggtcatgactgccgcttccgactcgtagtccaaggcactagtggcttcatccagtagcaatattcccggattggtcagtagtgctcgggctagggcgatgcgttggcgttgccccccggagagttggccgccacgctcgccgacttgggtctcatagcctcggtccagcgccttgatgaaaccatcggcaccggccaaagtcgccgcttcatacacttccgcatcgctggcctgaggccgacacaaacgaatgttctcggcgatgctgccggcaaacagcacgctttcttgcagcacgacgctcatgttgcggcgcagcgccaccggatctgcgattgccaaatctatcccatccaccaacacctggccgtgctgaggtacatagaggcgctgcaacaaccgagccagggtggatttgcccgaaccggatggccctgtgataccgatgaattcgccgggatgaatctcgatgttgaggttgcgtaacacctcctgaccatcctcgttgtaacgaaaacgcacgcctctgaaacttactcctccctgtagcttgggtacggaggccagaccgccattgccgctttccccctcctcatcaagaatgtcgccgatcctgcgcattgagatcagggtatgctggaaatcctgacagacttgggccagacgcagaattggctgggtcacgtgttccgagagcatgttgaaagcgaccagctcccctgggctgagtttgccctccattactagagtaacaccccacagcagtagcagggcggaggttagcttctggattaggtcgattccctgaccagccaagatccccaccactttggcgcggaatgaggcgcggacgaaggcagatagctgccgctcccagcggtgtaggaagccggcttcggtggcgttggttttgatggtttcaatgccggtgactgactcggtaaggaaggcggtgttgtcggcccctagctcgtactctcgcaatactcgggcacgcagtataggcccgacacctagccagaacaggaaatagagcacgagagaaccgagcaccaaccaggttagctcggtggcgtaggagaacatcacagcgacaaacaggccgatgaaggccaaatccagcaccatagtcagcgctgaaccggtgagaaattggcggatctggttcatctcgcgcactcgggcgatgatctcaccggtctgacgctgttggaaatagcccatgggcaaggtcattaggtgctggtaaaggcggccggagagctccgagttgaccttactggcgaggttggtgaatagccaggaacgaaggaaaccatagatgggctcgaacaaagccagagtcaacatggcgattcctagcacttgcaggctcgataggctgcggctaaccagtacccgatcgatcacgttctcgaacagtatgggggttactagggcgatcacctgtagcatcagagacactaggattacgttcctaaactggctgacatgtttgcggatggaaggcacgaaccagccgaagccaaaccgctgccgtttcggctgctcggtcgcctccgctagcagtacggcgctgccttgccaatggctcgcgaagagggttcggggatagcgacatatcttacccgtacttggctgatacaagataatgagctcgccttcgactctctctagcacctgccagccctgttccgtatccagcaggataggaaggggcacggtatcgagacggctcatatctgtggagatgtggcgtgccctcaggccgatccactgggcgcagcggcatagatcttggctgttcgagactccttgggtgcgtccgagacggtggattagttgttctggttccaccgccaagttgaaatggcgggcggcatgggtcagggccagcaggccgccatccgctaccgccttggacgtgtcgacggtgatcggttccgacagaatagattcgatggttgacattatcgttccctcaatgcttcggactggtactgttgtagtgggctgagtaggtagtcgatcacccgccgatcaccggtgcggatttccgcggtgatactcatgcccgcctgtagcggtacctcatgctggtccactgcaatagaggagcgctccatctgtatctgtgccggaaataccaaaccgagctgttcatccttgaccgcatccttggagatgtgggcgaccttaccccgtatagtgccatagcgggtatagggaaaggcgtcgaccttaatttccaccggctgaccggcgtgcacgaaccccacatctttgttcaacaccatcacttcggcttccagaggggtatcatcgggcacgatcaccatgagttgctgggccgattgcactacgcctcccaaggtatggatcgctagctgctgcactacgccgtcgaccggtgtccgcaggctttgcagccgccgcctctcaccggcctttatcaactgttgtgtcatgaccgcgatagcggtctgagtttcgtttagctggtcgtaatattcccggcgggtcttggctaggtagcgctcccgactctctttcagtacctgatattgctccttgaggacggccagctcggcatgctgttgagaaagggtgcgttcgatctccagcttctccttctcttgctccagtagctcgactttgggtaatagcttgctggcggccaaggtacgacgggcttcaaggcgcactttgatattggtcatcagcttttccagcgcggtgatatcggcgttacgtgcactctggctcgcttggttgacgctcatctcgctgtccaggctttctaaattggcgactacctctttccagatgctgaccagatgctctctggccagctcgacctgtgcctgtggcataccttcctgtacggagaaatgttcaatgggggtatcggttagcagagcctgtagtctagccatctccagccgcttgaagttaagttgctcctgtagctccttcaactcggcttcgacgcctatggggttgagtttgatcagcacatccccggtcttcaccctttgtccgtcacgcacgtgaatcgccacaatctcgccggcttcaagggactgaatcactttagagtgactggataccagcagcctgcctgtcgcgttggcatggatgtctaggtgaccgatgatggaccagagtagaaccaccaacagaaacagggtcagtgccattgccgtgcaccttgcccaaggcgcgggaggtcgttcaacgatctccagatagccgggctgaaactcgtactcgtcgcgggtgcgcttcgtcgctttgggcgcgttacgctcctgccgccaagcccggaggacggtttttaggtgtttcttgaatgacattattccgcttcctttcgtaattcctgttgcatctgccacagcttggcgtagcagccgcccttgaccagtagttggtggtggttgcctgattcggtgataaggccctgctccaaagtgatgatgcgatcgcagtgacgcaccgtggacaggcggtgggcaataatgatgacggtgcgccctagtgcgatctcggccatgttggtttggatcagcgcttgggattcgtcatcgagggcactggtcgcttcgtcgaagatcaagatcttggggttagccatcagcgcacgggcgatggcaatgcgctggcgctgccctcccgatagggaactgccggcttcggccagtaccgtgtcatagcccagaggtaattgcaggataaagtcatgcgcgcctgccagcttggcgacggccatcactttctccagcgaggcggaggggtccttaaatgctatgttgtggcgcacgctacggttgaacaggtagttctcctgtagtaccaccccaatctggctacgcaggtagccggggtccagtcggtgtaggggagtgccgtcgatcaagatctccccctcatccggagcgtagagcttctgtaataagcgggtcagcgtactcttacctgaaccggagggaccgactatgcccagcttctcgccggacctgatatgcaaggtaaccccctgtaatactggggcttgatggggctggtagcggaacaccaagttgcgtatttgcagatcaccggagagtggttgctgaggccggatgttcccctgttcctgctcgacaggcaggttgagtatgtcaccgagcttatcgacggcgactcgggtttgaataaactgttgccacaggtcgattagcttggcgatgggttggttgacgtgggacaccatcatattgaaagcgatcagttggcctatggtgagctccagagcgatcaccatgttggcacccagccagatgatcccgacgccggtcgtcttctgtagcagcataaccccgtggctgatgaagctgttgagggtttgagtgcggaaaccagcttcgaccatgtttgcggtttgggattcccagcgccgttgcatcttgggttctaccgccaggctcttaatggtttcagcgccgctgacggactcgttcaggaatgaggtattgagggccgccgtttggaactgttgttcgatgcgctgttgcagtggtttggagctcagccaagctaacagaaaatagaggggcaataccgccagtactacacaggttagggacggcgacagccaggccatgacgccgaagaagacaaaggtggaggcgaggtccacgctcagggttagcatggagccggtcaggaagtcacgaatgctatcgagctcctgcactcgggtgatgatagcgcccacctgacggtgcttgaagtaaagcaggggcaggccgagtaggtgccggaacagcttgatccctagggtgatatcgatgcggttggcggtgtgggcaaaaaggtattcgcgtagcccccggagcaccacctcgaacagcccaaccaccaccagtactatcaccaatacctctagggtcgacaacgccttgtgcaccaacactttgtccattaccacttggaaaaacagaggggtgactagggcaagtagttgaagcatcagggaaaaaagcagcacctcgccgaggaggtggcgatggcggataaacgcgggtataaaccaagaaacatcgaacctgagggaagcttcccctaaccggatcacctccccgctccatctggcttctagctcgttgatggaaagtacttcgggtgaaacggcataaggagactggatcagggcctgatcagtggaaaggcgcgctaatacaataaatcctccctgtttgtcgcgaaaggccagaggcagtagcttgggagtcagtttggggaattttaaacggcataatgccagatcaacatcatgtgccttgccgtactcttttatcgcaggtttcagtttgttatgggagagcagaggctgtggttcctgagcttcacctttagctaattgcaacaataatcgacaacagttaagcgcagatgacaatgtatctgcatcggcggatatattttccctattcattgtaattttcccttacgtgattccgttctcacgttgttaacataaaaaagcctttccgcaacaaaatgatgtattgcagagtcaattaataataatctgtattaagagcataggctttaattcgaatatatgtcattttcataggtgggtgcaagctaaagataataaaatggcagtcaattaatcaatattatcctaaaaatgttaattggtcattgctaattggttattgctaattggttgttgctaatttttcgttattaatcggggcgtggtattcagtatctgaatatattggattgaagtcaggtatatccatttttattttttttgtggcggatgaaaagccagagttcataagcatagcaccgtcgttgggctgggaacgggtcatgcccaatacttatcttgagctgattgcgataccgggtaaccattttagtttattggaggataatgagaataaaaccgctttggctcaggcgttgaatagagtgctggcaattagttttgaaagggcggtggcgtgatactaataagtaaggaatattggatagtttaaataacagaattgatgatttccatatatacccgttattcttcaagttgcctctttgttggctgcgctcgctcaccccggtcacatcgttatctatgctcccggggattcactcccttgccgtcgcgatgcatcttgaaatccattgggtataggttatttagtcaagtttttgctattgttattggaatttaatctaatctggctttatttttttatgaattttcgttgctatatataaaaatatgtttcattgttattctcatgaatggttaagaataattaatgtaaattttgaagatagccatatactttccattgttaatattgaccaatataatgtctatatatttctctgctgtctggaaatcaaacaaaataaaactataaattaataaatgtctcagggcattacgtaaattactttgtagaacgatttacttgggtgatattgacttgtaattaatgatttatttcatatgttattgttttataacaataatgtttattatgagatagtgtgtaataaagccatttctagttttaaattgtttctttatggtattaaacataatcacatttatatcggcttgataatcttattattataaaaaaatataatggatttaatttgaatttgtattgattcgtttacggtatttacattaacgatattatttatttgttgaaaaatagtgtgttatgaattacttttaacccaggcttatattttcaaataattgaatatatagagtggcttgtaaatgttgaataagttataccctatggatttcaagatggatcgcgacggcaagggagtgaatccccgggagcatagataactatgtgaccggggtgagtgagtgcagccaacaaagaggcaacttgaaagatgacgggtatacatttgtaattgaactattagttgattattaagataaagaatttattttataaataattatcaaagtaaacttttttataattgaggggtgatttattcgttttatctttgtaaatgtctaatttttttgaaataatttcaattagatattaataggaaatagataaaatacagtggtgatttggtatttatgcataattaaatgcagttaacggttccattttaaatgatggaattcaatattagccaattaaaattgcagtcaattaatcgaacttatctaaaaaatggaatgtcttattccgcagcataaaataaattatttattccgttgtcaggagaattaatgtcaggaaattgttaattgactgttattgacggggctatagcatcccgtgcctgaatatcttgcattgatatcagatctgtccgtttttatttcttgggggcaagaagtgagaaagaaatattggtgatggttgtcagaaatgacagttttcaaatttctaacagattcgttgaggtagtaaatgaaagatagcatcgctcaagcaggaagtgattttaaagctgaactcctctctcagacgtcagaaaatataaccaacgtaaatgacattttaccatcgactcagaatgtaaagaatattccccagacgttgacatccagtgaatcattttggtacgaacgtcttgctgctttgcaacccctccaattaccttttgaaaccgctggagagcaagcggaacctagttgggtaataagcgactggcagctcccattgccaaaaaacggtgaagaggaaccattacaaacattgttgcaggcgttcgttatctaccttgcgcgtttgactcagcagactacatttcaaattggttggtgtgtggatggagtaaacgataagtcggcagatttggcaccggtggtgccaatggtcgttgagctggagtttgataagccctggcatgtggtagcgaactggctggatggcgagctgtctcggttgacccggcactgcacatttagtcgaaatctcctcgcgcacgctcctgcattgtgggctattccggcgttgacaacccaccagccgtggcgaattgccgttgctgtcatagcggaggatagaccgtgtgatcagacggcaccgggcgaattgctgacgctccaactcaatgcgcagggcggttttcgctggatttacgatgaaaatcgcttgagcacggaagtgattctgcgcatgagtgaacatttacagatgctggcagcgtcaaaaaagcagggagaggaaattcctatctggcagcttaatgtgttatctgaggctgaacgaaccttactactggaaacgtggaacgccacggaaaccccttatcctgacccgttatgtattcatcaattgtttgaacaacaggcagaacaagccccgcacgccacggcgttggaatatcaagaacagaccctcagttatgcggaattgaatactcgtgctaaccggttggctcatcaattgattgcgctgggcgtcataccagaccggcgggtagcgatttgtgtagaacgctccccgatgatggtggtgtcattgctggcggtgctgaaagccggtggggcttatgtgccgttggattcaacttatccgcgggaacgtctgacatatatcctgagcgatagtgcgccgtcagtggtgctggttgatgaggctggccgggcggcgctgggtgaacaggcgctggtaggcgtgacggtacttgatccgaatatccaacttgaccagcccgacagcaatccgcaaattccggcgttaacgccacagcatctggcctatgtaatttacacctccggctcaaccgggcagccgaaaggggtgatggtggaacatcaggcgatttatcaacgttatctgggttttaatgacacctatgctgtcacctcacaagaccggctattgcaatttgccgcgtttgcgtttgatgtttcagtggaggatttcttttcgtcattatgcaatggtgccacactggttatccgggatgatagctggctggcttcgataccagaatttgttgccttaacccggcaatatcgtattacggtgatgtcactgccgaccttattctggtctgaactggcggctagagataatggattaccgctgccggattgtctccggctcatcatcattgggggtgaggcggtgaaaaagagcgccattcaggactggtttagacaggcaggtcaccggccccggctgttgaatggttatggcccgacggaaaacaccgtgacggtgacctataaggatgtgttatccccggaggatgcccgttctatcggcagaccggctaaaaatgcccgtatctacctgttggacaaatatggcgaattggtccccgcaggctgcgtgggagagatgtatattggtggcgtgggggtggcacgaggttatctgaaccggccggcgttgagcgtggaacgttttatgctggatacttttagtccggtatccggcgaacggatgtatcgctctggggatttggcccgttatttgccggacggtgatctcgaattcttgggccgtaacgatgagcaagtgaaaatccgtggttttcggattgaactgggggaaattgaaacccgactgacggaacacccggcggtacaagaggcggcggtgttggcactggatggcgatcagggcaaacggctggtggcttatgtggaggcgaaggcgaatgagggattggctgttgatttgcgtgaatacctgagtgccattttgcctgactatatggtaccggcggcctttgtgcgtctggataccttcccgcagaccccaagtggtaagttagatcgtcgggcgttgcctgcgcccggggaaaacgattttgcccgtcagatttatgaagccccacaagggaaggctgagatcactctggcggacatctggcgtgagttattgggcattgaacaaatcagccgacatgacagtttctttgcgttgggtggtcattccctactcggcgtgcagatgattgagcgtttgcgccacctaggtttaacactgacggcgcgtgatctgttccagtcgccggtgctgtcagcattggcgcaaacgttgggacagcatcaggctgtgatagtcccgcctaacgccatcacgccgacaaccacggcactgacgccggagatgttgccgctgattgatgtgagtcaaactgatattgaccgcatcgtcgagcaagtaccgggtgggataaccaatattcaggatatttatgcgttgtcgccgttgcaggacggtatcctgttccaccacctgttggaacaggaaggcgacccctatctggtgctctatccggtggcttttgctaaccgctctttactggatcgttatctggcggcggtacaacaggcggttgatcgccatgacattttgcggacggcgtttatttggcaaggattatccgttccggcgcaggtggtctggcgtcaggcacggttgcctgtgacagaactgacgctagacccggcggacggtccagtcattgaccagttaacccggcgttttgatcccgctcagtatcgtcttgacttgagtcaggcgccgctattgcattttgttattgctcaggaaaccgatggccgctggtttttactggaattgcagcatcacttgattggcgaccatgaaacgatggaagtgatgcaccgtgaagtgcaggcctatttttccgggcaaggggatcgcctgcctgcgccagtgccgttccgtcatctggtggctgaagctcggcttggggtgagccaggaagcgcatacccgtttcttcactgatatgttggcggcagtggatgagccaacgttgccgttcgggctgacgggcgtgcatcgtgatggatctcagaagaccgaatctcaccggatgttggttcctgagctaaataaccgtctgcgtagtcaggcccggcgtttgggcgtcagtctggcggcgttgtgtcatctggcttgggcgcaggtattatcgcgcaccagcgggcaggagaaagtggtgtttggtaccgtcctgtttgggcgcatggccgtaggggaagggatggggttgtttatcaataccctgccgctgcggctggatatcgatgagaccccagtacgagacagtgtgcgggaggtgcatctgcgactggctgagttgctggagcatgagcatgctccgttggcgctggctcaacgatgcagtggggttgacagcggtacgccactctttagtgccctgttgaactatcgccataatgagcagccagattctttggatgaaacgatggccgggattgaattcttgggcgaacaggagcgaactaactatccgtttgtgctgtcggtggaggacggtggttctacgctgggtctgactgctcaagtcgtgcagccgtttgatccggacagcctctgcggttatatgcaacaggcattggagagtctggtggaagcgctggagcaagccccagaaatgcccgttcgggtattggacatcctgccggaagcggagcgtaccttgttgctggaaacttggaacgcgacggaaaccgtctatcctgatcagttatgtctccatcagttgtttgaacaacaggtggagaaaactccagcggcgacggcgctgatagcaggcgataaaatgttaagctatacggaactgaatacccgtgctaactggctggctcatcagttaatcgaacaaggagtttgttccggtgatcatattgcgctcctgttagagcgctcgatagcactggtggtggctcagttggccattcttaaagtcggtgccgtttacgtgccggttgatcccagtatgccggatgagcggaaaaactggctgataagtgattgttccgcccggttgctgctcaccgatacacaggctgatattccggctaacctgacggttccgctgttgcgtctctcggatcaatcagacacggacggaagagaggaagagtgcttcaaccctgatttgccgcgttccagcgccgagttagcatatatcatgtacacctccggttctaccggtacacctaaaggggtcttggtaccgcatcgtgcggtggtccggctggtcatcaataatgattatgctgaagtcggaccggatgaccgggtggcctttacggctaatccggcttttgatgccagtacatttgaagtgtgggcaccgttgctcagcggtggggcgttagtggttattgaccgcgccacgttattaacaccacaggagttagtactggttttacaggctcaccacatcacagtgctgtggctaactatcgggttatttaaccgactggcaccagagttatctccggttctgccgcagataaagatcctgattttcgggggagatatacccgacttacaggtgattgctcaggttctaaataatcgcccgccccaacaactcttgcaggcttatggccccagtgagggaaccacgtttaccaccatgtatcctatcgtggcattaacgcagggagtgacgcggatccccattggccgaccgatagccaatacacgtatttatctgttgaatgcttacggccagccagtaccgttgggggtgaccggagagatttatgtgggcggagacggggtggcttgtggttatcttaatcgccctgaccagactgctgaacgtttcctgacagatccatttagtgatcaaccggatgcgcgtatgtaccggaccggggatttggcccgttatctgccggatggcaatctggaatttctgggccgtaatgaccaacaggttaaaattcgcggtttccgcattgaaccgggggaaattgaggcgcgtctggtggaacatccggcggtgcgtgaggcggctgtgttggcgctgggtgatgggtcggacaaacggctggtggcctatgtggcggcggaagcccatgaggggttggcgatgactctgcgtgatcacctgagtgccattttacctgattatatggtgccgtcagcttttgtgcgtctggaggctttcccgttaaccccgaacggtaagctggatcgccgggcgttaccggcaccggacgaagaggcgtttgcccgtcaggtttatgttgcgccacaaggcgagatggaaattgcgctggcgacgatttggcgtgaattactggggattgaacaggtcagtcggtatgacagcttttttgcgttgggcggccactcgttgctggctgtgcggatggttgaacatctgcgtcacttggggttgacgctggctgtgcgtgatttgttccagtcgccagtgttacttgaattggcgcaaacattggggcagcacccggttatggtggtgccacccaatgtgattacgtcagcgacgacgaaaatcaccccagaaatgttgccgctgattgatctgactcaagctgagattgaccgtatcgtcgggcaggtgccgggtgggataactaatattcaagatatctatgccctgtcaccgttgcaggacggcattttgttccaccatttattggcaaacgaaggtgatccgtatctggtggtcagtcaaatggcttttgctgaccggtctctgctagatcgttatttggcggcagtgcaacaggtgattgatcgccacgatattctgcgcactgcctttatctggcaagggttgtcagtaccggcacaggtagtctggcgtcaggcatccttgtcggtgactgagctggcgctgaacccggttgatggcccggttagcgatcaactggctcgacgttttaatccccgccattatcgtctcgatttgggtcaagcaccgctgttacgttttgtggtggcgcaggagaccgatggccgctggttcttactggaattgcaacatcacctgattggtgaccataccacaatgaaagtgatgaaccgtgaagtgcaggcataccttgccggacaagggaatagcctgcctgacccagctcctttccgcaatctggtggcgcaggcccggttaggaggggatcaggaagcgcatacccgtttctttaccgagatgttggcggaagtggatgagccaacgctgccgtttgggctgacggatgtgcatcgtgatggttctcaggagatagcatcccatcggctgctgacggccagcttgaatcaccgtctgcgtagtcaggcccggcgtttgggagtcagtctggcggcgttgtgtcatctggcttgggcacaggtattgtcgtgtaccagtggtcaggagaaagtggtgtttggcacagtactatttgggcgtatggcggcgggagaaggggctgacaatggtatggggctgtttatcaataccttgccgttacggttggatatggatgatacgccagtacgcgatagtgtacaggccgtacatacccggctggcgggattgttggaacatgagcatgcttcactggcgttggctcagcgatgcagtggagttgccagcggtacgccactttttagtgctttaatgaactatcgacataatgatcagcgtgatcctttggatgaaacgatagacgggattgaattcctgggcgaacaggagagcactaactatccctttggcatgtcggtggaggacgatggtgccacgttggggctgatcgctcatgtggtgcaaccgtttgatccggaaagcttgtgcagttatatgcagcaggcgctggagagtttggtagaggcccttgagcaggctccagagacaccggtacgaacactgaatatcttgcctgaaacggaacgcaccttgttactggaaacatggaatgccacggagagcccgtatcctgaggcgttatgtattcatcaattgtttgagcaacaggtggagaaaacccctgatgcgacggcgctggtgtatcaagagcagacgctgagttatgccgaattaaatgcctgcgccaatcgccttgctcatcaactgattgcgtttggcgtaacaccggatcagccggtagccatttgcgtggctcgctccccgactatggtggtggcattgttggcggtgctgaaagccggtggggcctatgtgccgctggacccaacttacccgggggagcgtctgacgtatatcctgaatgataccgccccatcagtggtattggctgatgcgaccggacaggctgcactgggcgacgaggcgctggtcgggttgacggtactcgacccgaatatccagcctgacctgccggatagtaacccgcaggtcccggcgttgacgccacagcacttggcttacgtcatttatacctccggttcaaccgggcagccgaaaggggtgatggtagaacatcaggcggtctatcaacgttatctgggtgttaatgaacgctatgccgtcaccgagcaagaccgggtgttgcaatttgccgcttttgcgtttgatgtttcagtggaagagtgcttctcgtcattatgtaacggagccgcgctagttattcgcgacgatagctggctggcttcaatggcggaatttattgccttagcccggcaaaaccgtatcacggtgatgtttttgccgactctgttctggtctgaactggcggccagagataacgggttgccgctgccggatggtctcaggctgatcatcattggcagtgaggcggtcaaaaagaacgccattcaggattggtttaggcaggaaacctaccaactccggctattgaacgcgtatggcccgacggaaaataccgtgacggcgacctgtaaagaaatattatccccggcagatgatcgttctatcggtcggccgattaggaatactcgcgtctacttactggatagaaacaggcaacccgtgccattgggctgcgttggtgaaatgtatattggtggcgtgggggtggcacggggttatctgaaccggctggcattgagtgaggaacgttttataccggacgtctttaatccggtgcccgacgctcggatgtatcgcaccggagatttagctcgctatctgctggacggtgaattggaattcctgggtcgtaacgaccaacaggttaaaattcgcggcttccgggttgagctaggggaaattgaaacccggctggtggaatatccagcagtacaagaggcggcggtactggcgctggatgacgggcaggacaaacggctggtcgcctatgtggtggcggaagcgaatgagggtttggctgcccgtttgcgtgaatacctgagtgcagttttacctgactatatgataccggtggcctttgtacgtctggatagctttccgcagacgccgaatggcaagctagatcgccgagcgttgccggcaccgggggaagcggcgtttgcccgtcaggtttatgaagccccgcaagggaagatagaaacgatgttagcggctgtctggtgtgaattactgggcgttgagcagattagtcgatatgacagcttctttgcgttgggcggccattcactgcttgccgtgcgcatgattgaacgattgcggcgtatcggtctggggatagcggtacaaacactgttccaacatccaacactctgtgttctggcgcagtctctggttcagcatgatgaaatccgggtgcctgacaaccgtattacaccggatacgacggtactgacaccggcgatgttgccgctgatcgatttaactcagcctgacattgatcgtatcgtcggacaagtcccgggcgggatggcgaatattcaggatatctacgcgctgtcaccgttgcaggatggcattttgttccaccatctgctggagaatgaaggtgatacctatctgttaattagccagatggtttttgctgaccgggtgctgttggatcgttatttggcggcgattcaacggataattgatcgacacgatattctgcgtaccgcctttatttggcaaggattgtcagtgccgacgcaggtggtctggcgtcaggccccattgtcagtgacggaactgacactgaacccggctgatggctcagtcagtgaccagttaacccggcgttttgatccgcgttattatcgtcttgacctgagtcaagccccgttactgcgttttgttatcgcgcaggaaacggatggtcgttggttgttactggaactgcatcatcacttgatcggtgaccatgaaacgatggaagtgatgcaccgcgaagttcaggcgtatctgatgggtgaggaagagagcttgccggtgccggttcctttccgcaatttggtggcgcaggcccggctgggtatcagtcaggaagagcatacccgcttctttaccgagatgctggcggaggtggatgaacccacgttgccgtttggattgacggaggtacatcgtgacggttcgcaggtgacggagttccaccggatgctgacgagcacgttgaatgaccgtttgcgtagtcaggctcgacgtttgggtgtcagtctggcggcgctgtgtcatctggcttgggcacaggtattgtcttgtaccagtggtcagcagagtgtcgtgtttgggacggtgctgtttgggcgtatgcaggcgggggagggtgttgacaatggcatggggttgtttatcaataccttgccgttgcggctggatatcgatgagactccggtacgggacagcgtacaggccgcccatacccgactcgccggattattggcgcatgagcatgcgtcattggcactggctcagcgttgcagtagggttgccagcggtacgccactctttagtgcgctgttgaattatcggcataatactttgtcggcaacgtcagatgaactgatcagcggtattgaatttcttggtggacaggagcgaaccaactacccattcgtgctgtcggtggaggattttggcgaatctctggggctgacggctcaggtcgtgcaaccgtttgatccggaaagcctatgcgcttatatgcaacaggcgctggagagtctggtagaagctttggagcaaacgccggagacaccgatacgggccttgaatatcctacccgaaacggaacgcacgctgttactggaaacctggaacgccacggaaaccgtctatcctgatgcgctatgtattcatcaattgtttgagcagcaagtggagagaaccccagaggcgacggcgttgatagcgggcgataaaaccctaagttatatggaactgaatacgtgtgctaaccggttggcttatcagctaatcgaacaggggattcgtccggatgaccatgttgcgctcctgttagaacgatcgatagaactggtggtggcccaattggctattctcaaagctggcgctgtttacgtgccggttgatcccagtatgccggatgagcggaaacattggctgataagtgattgttccgctcggttgctgctcactgatacacgggctgatattccggctaacttgactattccgctgttgcgtctctcggataagaaaagtgcgaacagagagcaagatcatgtcaaccctaatttgccgcgttccagcgccgaattagcgtatatcatgtacacctccggctctaccggcacacccaaaggggttttggtacaacatcgtgcgatggtccggctggtcatcaataatggctatgccaacatcggaccggaggatcgggttgcctttaccgctaatccggctttcgatgccagcacgtttgaagtttgggcaccattgcttaatggtggtgctttagtcgttatcgaccgcgccaccttattgacaccgcaggagttagtgctgactttacaggagcaccgcatcacagtgctgtggctgacgatcgggttgtttaaccggctggcagcagagttatctcccattcttccgcaaattaagattctgattttcgggggagatatacccgatttaaaggtgattgctcaggttctggataatcgtccgccacaacaactcttgcaagcctatggtccgagtgaaggaaccacctttaccaccatgtatcctatcgaggcgttaccgcaaggagtgagccggatacctattggccgcccaatagcgaatacgcgtgtttatctgctggatgtttatggtcagccggtaccgccaggggtgatcggggagatttatgtcggtggtgatggggtcgcccaaggttatcttaatcgccctgagttaaccgccgaacgtttcctcgtcgatccattcagtgatgacccggatgcccgcatgtaccgaaccggggatttggctcgctatttaccggacggtaatctggagttcatggggcgtaatgaccagcaggttaaaatccggggcttccggattgaaccgggggaaattgaggcgcgtctggtagagcacccggcggtgcgtgaagcggcggtgttggcgttaggtgatgggccagacaaacggctggtggcttatgtggtggcactcgcggatgacgggctggtgaatagtttgcgtgcttacctgagtaaaattctgcctgattatatggtgccgtcagcttttgtgcgtctggatgcgtttccgttgacgccgaacggtaagctagatcgtcgggcgctaccggctccggacagtgaagcgtttgcccgtcaggtttacgtggcgccacaaggcgaaacggaaatgacgctagcggcgatttggtgtgaattactggggattgaacaggttagtcgatatgacagcttctttgcgttaggcggccattcactgctcgctgtacgcatgattgaacgcttgcgtcatttgggattgacattggcggcgcgtgatctgttccagtcgccggtgctgtcagatttggcccaaacgttggggcagcatcaggccgtcatcgtgccgactaacgtcatcaccccggcaaccacggcattgacaccggaaatgttgccgctgattgatctaactcagccagagattgaccgcatcgttgggcaaatgctgggcggtgttgccaatattcaggatatctatgccttgtcgccattgcaggacggtattttgttccatcacctattggcaaacaaaggggacccctatctattaaccggtcagatggtcttcactgagcggactttgctgggccgttatctggcggcggtgcaacaggtggtaaatagacacgatatcctgcgtactgcctttatctggcaagggctgtcagtgcccgcccaagtagtttggcgtcaggcatccttgtcggtgactgaattgacactgaacccagccgatggaccggttagcggacaattggctgagcgttttgatccccgtcaccatcgtctagacttgggcgaagcaccgttattgcgctttatagtggcacaggagactgatggccgttggattgtattgcaattgttgcatcatctgattggcgaccataccacgttggacgtgatgaaccgtgaagtacaggcttatctagacggacaggaggagagcctgccaacaccgacacctttccgcaatttggtcgcgcaggcccggctgggggtgagtcaggatgcacatatccgcttctttaccgaaatgctggcggaggtggatgaacctacattgccgttcggattgacggaggtgcatcgtgatggctcccaagtgacggaatcgcagcgaatgttggcacctgagttgaatgaccgtctacgcagtcaagcccggcgtttgggggtcagtttggcggctttatgtcatttggcttgggcgcaggtgttgtcgcgtaccagcggacaggaacaggtggtgttcggtaccgtaatatttgggcgcatggcggtagggaaaggggttgacagcggcatggggctgtttatcaataccttgccgttgcggctggatatggatgatacgccggtgcgagatagtgtacaggcagtacatcgtcagttagcgggattgttggaacatgagcatgcctcactggcgctggcccaacgttgtagtggtgtgcaggatggcattccactgtttagtgccctgttgaactaccgacataatgatcagccagatcctttggatgaaacgatggacggcattgaattccttggtgcgcaggagtttaccaactatccgtttgccttgtcggtggaggattttagtgacgcactggggctaactgctcaagttatccaaccgtttgagccggaacgggtatgcggctatatgcaacaggcattggagagcttggtggaggcattggaacagaccccggaaacgccggtacggacattgaacatcctacctgaaattgaaagtacgttgatgctgaaaacgtggaatgcgacggaaacctcgtatcttgaaccgtcgttatgtattcatcaattgtttgaacaacaggtggagcaaaccccggacgcaacagcgttagtgtatgaggagcaaacttttagttatgccgaattaaatgcccgcgctaaccggctggcccatcagctcattgcgctaggtgtagaaccggaccagcgggtggcgatttgcgtggcacgttcaccggcgatggtggtgggattgttggcggtgctgaaagctggcgcggcttatgtgccgttagatccggattatccgggcgaacgtctaacgcatattttggctgatgtttcaccggttattttattggctgatgctgtcgggcgtacagtgttgggcgagaatgtacttaccgggctgacagtgtttgatccgaatacattgtttgaccagccagacagcaatcttcagatacctgaactgacctcacggcatctggcgtatgtgatttacacctccggttcgactggcacaccaaagggcgtaatggttgaacatagacaattggtcagtcaaattacttcgctgaacacgaagtggtcgcttaacgcatctgaccgtctattgcaattttgcaacccttcttttgacgtttgtgcatcagaaatattttgcgcaataacacagggggcacaattagtcttaaggacaaatcagtggctcttgagtgcgcaggcgttttggcgtctgtgcgagtcttataaaattacctacattgcgataccggcccaattctggcggataatatcaaatgttgataaaggcgatatctatcagggcctaaggattatttgcattggtggggaagcgatacctgatcatgagttacaacgttggctagcgactcacggtgaataccctgttctggcgaattgctacggtcctacagaagccacgattaccacgacgacatcctgcctaaacgaggggatggggcaggccaatatcataggccgtccgctaccgaatacacgcgtttacctgctcgacgttcaggggcagccagtaccgttaggagtcgagggggaattgtatattgggggcgttggtgtcgcacggggttatttcaatcgtgctgaactgacagcggaatacttcctgactgatccatttagcgataatccaaatgcacggatgtatcgaaccggggatttggttcgctacttgccggatggcaatctggaattcttggggcgtaatgatcatcaggtgaaaattcggggtttccgggttgaaccgggtgaaattgaggcccggttggtggaacatcctgcggtaagtcaatctgtggtgctggcgttgggtgaagggcaggacaaacgcttggtggcttatgtggtggcgcaagcggatgagaggttggcgaatagcctgcgtacccacctgagtgccattttacctgactatatggtgccgtcagcctttgtgcgtctggatgcctttccattgacaccgaacggtaagttggatcgtcgtgcgttaccggagccggacaatgaagcgtttgctcgtcaggcttatgaagcgccacaaggcgaaacggaaatcgtattagccgcgatttggtgtgaattgctagggattgagcaggttagccggcatgacaatttcttcgcgttgggcggccactcactgcttgccatgcgaatgatgaatcttgccgccggtcggggtttgatttttacattgaatgctttgttccaattcccggtgttgtccgaattggcctctaaaatcacctcggatttattgtctcagccgcgaagcagcgctatatcggtgcgacctggcggaacagggctgccattgttctttgttcccagtggcatgggtgactattcttatgtcttcgggctggctcaacatatcccgtcgggctatccgatttatgcgctgccttggccatccatcagtgaagaactgatgttaacgatggaagagcaggcagccagaatgatcaccttgatgaaagcggtacaaccggttggtccgtatcggataagtggctactcttccggcgggatattggcttatgccattgtccagcggcttttgagtgccggtgaaatggttaatttcttggggttaattgatacgcctgcaccgcattattttggcaaagaggccatgcagtctaaacatcatttctttactgagttggctcggcagtcggggaaggcgtgcaaagaagagattgcggcgttgtaccggcgaattgatgagttgaatttggtgcagtttattgaagcagcacaagaattggcgttatatcccgcaaatctgcgtgctgatgtgatcgcaaagcattggcggcagatcgaacgttacacgcaaatagttgcggattatgaaccgtcagcattagcaataacgttgcatcagttctatgcggtagaaccttctcctgctgattcttttgtgacggatgaaaagccggaatccgtaaatatagagccgtcgttaggttgggaacgggtcatgcctaatacttcacttaagttgattgctactccgggtaaccattttagtttattggaggataatgagaataaaatcgctttagcacaggctttgaatagagcgctggcgatcagtggtaatgaggagatgtaatactaatatagttaaggaatattgaataatttaaccttgatatgataatccggtgtgtttcttataccggattatctttcttgtttatcctttttccccaaggtgaaagccgattttcatttttcactgatagatttatgctgggcaggttttaacctgtttttaaaaacattgctttaacctctgattttaatcgttatcaggttttaaccgttgtttttatcacttttaatacctgatttttattcagtttaatcatcatggcatatcgtattttacatttaacaaacattaatcatacccgctttttatctttgctgaggctatttagcctgataatattaaagatacccccttatatttttttcggataatcaacgcactgtttaaaacttaaatcctgccacattaaccgctttatcccttattgcgttatgtttatagcttgctgagtaaaataacagtgagaaaacacattaacaggctgggtaatattattttacctgctgatttattttcaattctctgctaatagttaatggatttttaatacaaacaattaaccgcctttataaaaaaggtctctattgagttaaatccatattttccttttatataagtctttaatctctctgtatactcacttttaaatcatcatagcagggaataaaccttttttattcccgctgagctttttaaaaatcgggcattaatggggtacctactttttaaatcctcagatggattaattaccgataaaaaagcgcttgcaatcgctaaaaacgggaaatacaagtaaaaagagaaagttagccatgttaaaagagtgggatcggtaaaacaattatcactcctggaattttcctgtttttttaaagcaaaagcgggttttcattaagcagtttttatcaacctaatgttttttcgtttcctgatacgtagttaacttccccgtttccattaaactaatgtttaggttttctgttttccataaacgtctttcaatccatgcaacatcgtttattgaagcacattaacttaattgagttaatccggttaaatattttcactcttattattggattaacgcggtcacttggttaatcaactcaggaccggttttgcctgatgctttctcttacaatatcaatatagcagtgaattttttacccgtttttaaaaaaccttaatcatttattttcaactttaatgattaaagtttttacctgttttttcatcatacgctgactattttgtccagatgttaaaacgacactgacagaccataaacggttttttaacgacggttttatcatatgcagataaagcgtctctcacttttacctgaatgagtgaaaatctctgtcacgccttgttttcaaacaagatgaaaaatgacagcccacaatgatttaatctgaacgaatcttaacgttactaagtcaataaaaagcattaaaacgcaatgttaaagacagtaaaaacagcgttaaaaccctgccggtggtagtaaaatgcgataaaaaagagtttaatgtccatgaaaacggtcagtccacattttttcgttttatgattaatgaaaacgcaacagtgataatcgaagcgctaaaagcagatacagcataatgcggtgtttgttgctgccatttaataaaattcggatgttgggtgaacgtagcggagtaaaaaaatttgggatttatgtcacatttattaagttaatcaaatactcatcacccaaacaggcgggacaacataagttttttgttatatgttcttgattagatattaaacacataaaacgactgattagctatcttcacgatactcttaagccgcaatggaatattcccgacgttgcctgttcatacaggttatcaataagactatcagcgacaaactgctggtgcctttatagctttatagatagttctgacgagacttgcaaatgataagggaagcaagatgccattccaaaaaaaaccatgcaggcgatttagcaccggacaaatcgctgaccgcctgaatgctcagcgtgtcggcaggctaacgtgcaacatgcccccatcccagctaaaacagatactcaccatgatgacctcatttcatcctcgtctgagtaatgagccataatgtccgggaggggtcatgagcgtattaatgatggcctggctgggggccggcgctgcgctgcgcacaaccagaacagagacgacctcagcagggaatgctccgccgccgaccgaaatcagctcttctgccgatacggtgctaaattatctggaaagtgagcgttttcagtatcattcgctggcggcagcaatgacgtataccgttgcgatgggcggtgcccccgccgtcctcccgctggtcgcaggagtagccgccgggaagttgggagttcagataggcaatgatatcggcgaaagccttacgcatggcgtgatggttttttttggccggcgtacggtcgccaccgaaggccaggccccggcccggctcggggatgcgattgcccaccagaacaaaagcgccggcttatggggagcgctgggcggcgtgttgctcggcgcgctggcggcggtggccgtcggcgggttaattgtggcaaccggcggtctggcgatggccgtagtcgccggggcggcggccggcctggcgggcggttttgtcggcggactggtctcatccgtgggcgcggcactcgggcagtacggggcgaataagggccagattgtcgaagggtcgccagatgtcttctttgaaggccagccggtggcccgtcagggggacaaaattgtgtgcagcgaccaccccggcccggtggtgattgccgaaggcgcgaaaacggtgtttgccaacggcaaaccgattgcccggctgggccaccgcaccacctgtgacgccaatatcaacagtgccgccgcctcgattgccctcaccccgcaaaccggtgacgccctgactatcctgaccgccagcaaccaggacctgcgctggctggtcgccattgccggcctgctcccgctaccgcttggccggaaaagcaacggcggcaaagccaaatccggggcggaacccaccccgtcggtgaaaaaaaccggcggtgacagccagctctgtagcaaagccggcgagccggtggatgtggcgaccggcgacttcttacaggtctggccggtgctggccctgccgggagtcttgccgctgaccctgaaccggacttaccgctccaccgccgccctgtccgggctgttcggccccaaatgggccgatgactggtcgcagcacctgcgccgcgacggcgaggaaacccatttcaccgatggcgaaggggtgatttacaccttccataccccgaaggaaaacgtcttctcggtcaacctccatgccggtcattacctgctgtacggccggcgcgacggcgaactgcgcctgttcaaccgccgcacccggcagatactgagttttgccgcggtccagggcgataaacgccgcctgtccacgatagaggaccgcaacggcaatcagaccgtctttcgttacgatgaacaccaccgcctgacccgcctcgtccatgccgacatgacgaccctggcgctgcattacgagcaccagcagctcacggccattgactggctgcacgccggacagcgccagcggctggtgacctgccgctatgataatccggggtatctggcggaatgtgacacctttcagtttcaccacctgtggcatgaatacacgccgcaggggaacatgacccgctggcatgacaccgataaaaccgatgtcactgtgcactacgataacgcgggccgggtgacggccaccaccaccccgcagggatactggcaggaccgttttgaatacgatgacgaacgccgcgtcaccacctatttcgatgccgaaggcggctgtacccgctatcactataacgccgacggcctggtgacccgccaggttgacccgctcggccatgacacccggactgaatgggatttcagtcacaaagtcgccgaaaccgacccgctgggccggaccacggcgtatgagtacagcccttacggcgagctgaccggcgtcatgtcatccaccggggacctcactgcttacgattacgacgaatacggccagcttacccgggtcactcaaccggatggtgcccgctggcaactgcattacagcgaacagggcaacctggcctcggttatcgacccccaggggcgggttgaagagacccgttacggcccgcgcggggaaatcctgcgccgggtcttgcccgatggccgcacctggcgctacggctatgaacggcaacagctcagtgaaattcaggccccggacggtgccctgacccggtttgacaccgacggcctgggccggctgctgcgggtcaccgacgcgttacatcagcagacccactaccaccccagcccgtttcatgccaacccggcgggcagtatcagcgagattggcttaccggacggcatccggcagacgattgactacgacagcgaacgccgggtctcggcggtgactgacggggaaggccggaccacccgctatacctatgacgcctttgaccggctcagccgcctcacccgcccggacggcaccgccctgacctttggctacgaccggctgacccgcctgaaaaccgtgaccagcgaaaccggcgacacctaccactacacccgtgacccggccggccgggtgattagcgaaaccgattttaccggccggaccattcattatcagtatgacgccgccgggcgtcgcctcaccgcccgttatcccaatcaccagctgctgcgctggtgttacaccgacgacgaccgcctgacccgccaggaagcgtggcaggaagaggccgaacagtgcacgttatgctcggtcaccacctacgaccatgacgcgcagggacggctgatacgggccaccaacccggacgcggtggtgacgtttgcatatgatgaatccggccgcctgaccaaagagacaattaacggacgcgccgtcagccatcagtgggacccgcgaagcggcctgcccgccggccgccagatggacaccctgcccgcggtcagctggtactacggcctcaacggccggctgatgcagtggcagctggacggccatgccccgttgcagatgcagcatgacgggctgggccgggaaatcgcgcgggaaagcgctgccggctttatccagtcacaggcctacaccccggtcgggctgctggcccatcagaccgccgggcgcagctccgactggttcaaacagaccctgtacgaggccgacccgcatttcccgccgcgcggcagcgcggtgacccgccactggcattacaccccggcctacaacgtggcctgcattgaagacacccgctgggacgagacgcgctacggctacaatgtcaacgaccaggtggtgaccacccagtttggcgggccgcgggcctgtgacgaacagtttgtatacgatgccggccagcacctgcattaccaaaaacgggtaccggaacggctcagtgaagacctgcgccagagctaccacacccagcaggcggggagggtgattcagcacggtgcctgcacgtatcgctacgatgaaaacgggcgacggacagagaaaaccgaacggcggtggggctaccggccgcggacctggcgctaccgctgggatgcgcacgaccggctgaccggctttatcagcccggaaggggtgcgctggcgttattgctatgatgccttcgggcgacggattggcaaacgacaggaggtggacgccgccggaccgccggtgaaaccaaccgcgataatcggctatgattacctgtggagcggcgagcaactgatcgaagaaacgccggtgtatgcggatggcaccgttgactatgaacagagcattcactggctgtatgagccgggtgccctgacgcctttggcccggtttgaaaaaggccagctgtactatgtggtgagtgatcatcaagggaccgtacgggaaatcctgaccgaagccggggagctgatatgggcaggacgactgctcacctggggcgagccggaatgctggccggtgctgacggtcaatgacccgcgcaacctgacgtgtaatttccggtttgctggtcagtatgaagacagggaaagcggtttattttataatcggcaccgttattacgagagtgatacgggccagtacttatcgcctgatcctctgaatcttagtggtggcgttaacccgtacgggtatgtccatgatccggtcaattggatagacccgttcgggttggcagcttgtccaacacaaaaatatgaagttagtacattcgatgatttacagagacgttctaaggtgggtgataaattagatatccaccatacggctcaaaaacatcctgcggggcaagtaattactggttatgatcctaaagtagctccatcaatagctctccctagaggagaacataaactgattcctacaatgaaaggaccttatacgggatcggctagagatttattggcaaaagatattagagacttgcgcaattatactaatgctcctccttcagcaataaaagatttgcacaatttaaataaagaaatgtatccagaagccttcactaaaataaggtaataagatgaattctcaactatttgtagatatattaaagcttgtagtaagagatgctgctatcgaagacactatctcaatacttgaatctcccccaggtagaaaaccacaaagagaactaattgaactatctgatttttataatgaaaaatcgaaggaagagaaagagataatcaataaaataataagaatagtagctgataatacattgttcggtattctttgtgttattgatggtgtacgtgcaatagaaaatgatgaaaataaaggtgagctaatattgacctataaaaaggaaagtatagttaacttaaataaaaatagtaatctgcacgatatatataatgctagttaattaataaagccggaagatccccgagatcttccggctttattatgatctaccttggtgcatatccacagtaaaccaacgcagattggagcttagagatcgcatctttgatctgatacgcttcctcgtcattcacggcacaggcacgtatctccgccccgtccgcccccgcgggcgggggctccccgctgaaaagtttcacctgcgggcctggcccgcccgcacccggccaacccgcgtcagcggcgcaggcaagctgcaccgccgccacgggttcctgataaaacccggttctggcagaaaaagcggggcgaaacccggcactgacatcggggaaaaagtgagctaaaatcggcaaagtgcacatcggggttttgggttcgcggcggtgagggcagagggacgaagtggctctttaacaggttgttattaaagaaaaaatcccggtcaaaaagtagggtcgtgtcggggcagtccctaagacccgctcgggttagccggatgtccagggactaagaacaagaaaacgacctatgaagggaaaagtcgtcgtggtgcgctacggcaggccaagagagatgcgggaatccttaatagccagcatccatttgagatatccaaagctaaattgaaagatggttatggtgattttattcgtgattccaaaggcgttgcgattgaagcacggcaatatcattttaaagataaaaatggttctacggtaattattcaagaacacagcttagggcacgcaaaagcaacacctttacatggagcagagcctcattttaacgtcaggccacccgataacttgaatacaggtgatgttccgggaactcatggtcactataacttttagggaaataacatgaacattattgaagtcataaataacaaattcttaatttcactttttcctgaaggattaaaagatgacattcttcttggacaagttggactcgatatagcagatcaggtatcactaaatatccatgtaacacaaagaccagaaaaagaagtcgctaaatggggagtatgggggaaagattataatgtcattgttattaaaatcattggtcagtttttgagaaaagttgaaatagttaactggcaaaagatcacttcatccgaattaatttttttagaaaaaggtgatttttactctttcaatctcaaaggagacgagtggagtgtttctttggagttggaagccttaacgttccaacgatgtgatatatatagtaaataatgtttaagccggaaagatctccgtgatcttccggctcttttatctagttcccattcagcacattaaacattccgtctttatagttacgttcataatccgacgggttggatcgatcctttcgggctatcaactgtaatgttccggtgaactcaccttgcgtggtcagataaccacaaaatgggatgttaacggaagggattctcaggccagggcaacagctcattcaaccgattgttcggccagacaggcagccggctgaggacatcacgtaaccagacccagggctcatgtccgttggctttggccgtttccagcaggctcattatcatggccgcccgttgccccgcggccagtgaacccgcaaaaagccagttctttcggccgagcgccacaccccggaccgcattctccgcccggttgttgtctatcggcacccccccgtcatccagataacacaccagcgccgaccagcgcttcagcgtgtaatctatcgctttgcgtaaccccgagttgggggccgtttgggtctgcatcgtttgcaaccaggaccggaactcattcagccacggccgggcataacgctgccgccactgacgccgtttatccggcggccggtgtttgatttttcgctccagcttgtacaggtcacgaatgccatccagcgcctgtttcgccaccggactttggctcgctttgtattggtcaaagaatttgcggcgggcgtgagcccagcaacccgcttcggtgatatccgcccgggcatgcagtgcgttgtaaccggcatagtcatccgtcaccaacgtgccgcccgaccagtctttcagcaggctctgggcataacggccgctgcggccgggatgcagctcatagtataccactgccggcgaggtatcggggccggtgacagacgtccacaggtaagctcgctgggtctggccttttcccggggccagtatcggcaacggggtctcatcggcatgcagcaccggggacgtcagcagcgtctgcttcagggcatcggctaacggttgcaacgccaccgccacctgccccacccagtccgacagggtgctgcgggccagggtgacaccgctgcgggcatagatttgctgctgacggtagagcggcaggtggtcacgatatttagcgaccaccacctgagccagcaaccccggctctggaaggcccttttcaataagatgggcgggctgggctttagcatgcacacactgacagcgcgcgcagctgtactgcgggctgatatagcgccggacgataaacgtggccggacggtattccagtcgctcactgatttcatcacgcaaaaagcgcagggcatgaccgcaatccgggcagctctccgtctccggcgccagccggatatcttcacggggtaaagtcgccggcaaaggctgacgtttaggctgggccggggtcgcgttttccttgatatgcaggcgtgacagccgggtttccagcaccgcgatatcggtatcggcatcttcctcaaactgactgcgtttgggaccggcaggcagggtttcgctgtgcgcgccaaaacgccagcgttgcgcctgtttcagggcctcttccagctggcgaatataatcaccttgttgctgaagcagcgccagtgcccgcaggcggaactggccggggtcatccagcgcgattaagtcattgagcgtcatgccgacagtgtaccggataattccccgtcgttatccggtaaaagtgtgaccggggtagcggaattagtttcgccagccggacaggtcatctccctcgacctgttgccagtgaatgccgcggatgagccagtcaaactgggcgggcgtcatcacccagctgcgctcgccctgcttcggccagacaaaatgggcccggtgcagacggcgggtacacagccagacgccgtgtcggtcccagcgcaacaccttgagacgggagcgggccttgttgcagaaaataaaagcggcttcgtcctgccagcgcaaattcagcccctccaggtgctgggtcagggcatcaatgccccggcgcatgtcgacgggctctcgcaccagaaagagctgttgcggtttcagcatcgggtcagtacccgcatcacgtcaggcaacagcgtcaatggacaggcgatggcatagccgtctggggtatgcagggtgacggtgcgcgcgtcgtcaggctggagtgaaaccggtaagagggcgggcagtgtctggctgagaggttgggggatgttgttactgtcggcaatccagtcgcggaaagcggaaaaactcagctgatgctgttcgcaatactgttttcgggtcaggtcactgtggcgccattgggtcacatggtgttgtttttgttccggggtatatcggctacggctcatggtgtcagtctccaggtgaagataaggaagcggtagcgtgcatgggccggagaggaagaacaaggtgagatgaccggacgtttactatcaactgtcacggttggtcgttggatgagtcccgaagaacttcaaaaaatgcgtgatactggcaaagtagttcaaagtactacgggaacaacacatgttggttatccagcaaatatagatgcctttggtaaacaagctaaaccgggaacagtgtatattgaatttgatgtccctgaaaaatcattgataaaaacaaatgatgaatgggcaaaaatagtaggtccagattctttagaagggcgtttagcaaaacgtaaaggattgcccgtaccagaaatgccagaagtagccaatatagaaattaaggcacagaaaacaacagaggggataatgacagtatgcaaaaaataagactatggattatatctaattacaattatcccgtgattgtaaataatgaaagtttagtagttgatattgatactgataaaagtattgctcggtttactgtatgggatgatttgtcatgcatgttagaaattcttgatgtagatactgaaaaatatatcatcaatgaaagaagagaactggcctctgacaatgaagtaattgaagcattcaaagaatttcatagcctgctaaattaaacttaagccggaaagatccgtgtgatcttccggctttcttgtgatttatcttggcgaatatccacagtaagcaagggcagattgaagcttagagatcgcatctttgatatgatacgcttcctcatcattcacggcacaggcccgtatctcagtaaacgtccggtcatctcaccttgttcttcctccctggcccatgcacgctaccgcttccttatcttcacctggaaactgacaccatgagccgtagccgatataccccggagcaaaaacacaacatgtgacccaatggtgccacagtgacctgactcgaaaacagtattgcgaacagcatcagctgagtttttcctttttacgtgatgaaatcagtgagtgactggaataccgtccggccacgtttatcgtccggcgctatatcagcccgcagtacagctgcgcgcgctgtcagtgtgtgcatgctaaagcccagcccgcccggctgattgaataggttgcattttggattaaataacgtttcgtaattatgctacacatagccttcttcaacccattgttatacatagaattatgagtggtataagatgtagcactattttgaaatcttatttaatatcatgtctattatttaagggaatacgaacatgtttacttccagattaacgatgttgcacttattatgtgaatccaaggtttttaataatttcaattttacattaatataaagaaaataaaatatggcgtgatttaacatttatacataataaatacaaataacgatttcacttttaacaatgaagctcagcgtttgccaatgaaaattgcagaaaattaaatgagatcattaaataaataggagaaaatgaaatttattatttagagtgataaattgatgataaagattatatctgttttttcaatcgcaatcgtaaagcagtactgtatatcaattctttatcaagtcagtaaagtaattagtttaagcttttgaataaggcgttggtaatcggttatgataataatgttttgcaatgctaatatattaataaataattaattgtttagcgatggtgtgatcattcggtatgaattggttatcgggtttttcctatctaaaagcaagattgaggaaagtgataatcgctattgaatcgttttcacttgaaaaggctttacctgtttatctaatctaagtaaatcattgagataggggacaatatggtcaatttgttacaaataatcttatatccgtcatctttcaagttgcctctttgttggctgcattcactcaccccggtcacattgttatctatgctcccggggattcgctcccttgccgtcgcgctccatcttgaaatctataaggtataataagtagggatatcgttgtctgaaatttaagagcatttagatgatagttaattttatattaagttatcatcagattgttcactctttttgttgttttggttatcggtttactcgggtttttgaaagttaaatttggtcaaattttattttacatttgaatagataaatttcaggcgttattaatgaataattatttatctattcgtttcatctatatgtagtagatttaatttattcactgtttatgccctatttattcactaaaatcgcataaattgtgcataaaaatactttttggaattttgaacgggatcaaaaagtattttttttgtgtacaacttgtgttgactttgttaagcgtgggcaacagtatctgtctaatggctgagcaactataccttatggatttcaagatggagcgcgacggcaagggagcgaatccccgggagcatagataacaatgtgaccggggtgagtgagtgcagccaacaaagaggcaacttgaaagatgacgggtatatgttttaggaaatagtcatgggattaataagaataatattaaatagatcctgtaatcttattatttttaaggttttttaggtttcagtttggtaaaccttttactcggcatacattaaataagttgtgtcagtgtgagacgaaagatgatgcggagcatattactttctctcatccgtgtactctctattttaaggggaaatgatctatgttagaaaatattcagagaagttggtttgaacactatatggtgccctgtttctctcctgctaagttcatacctgttcgggccaaaggttcgaaagtatgggatcaagatggcaaggaatatatcgattttgctggtggaattgccgttaattcattagggcatgcacatcctgaattaaaggatgagttaatttatcagattgataaaatatggcatataggtaatggttacactaatgaacctgtcctgaaattagcaaaaagactggtggaaaatacgtttgctgataaagcatttttctgtaattcaggggcggaggctaacgaggcagcattaaagttagccagaaaatatgccgctgataaatatgggaaaaataagaatgagattatttcatttaaagattcttttcatggtagaacattatttaccgttacagtaggagggcagccaaaatattcacaagattatgcccctcttccgcaagaaattacgcatcttccttataataatttatctgcaatcagagaacacatttctgaaaatacctgtgcggttattgtcgaacctattatcggtgagggcggtgttattcccgcagatcctgcattcttgcaggaattacgtaccttatgtgatcgttttcaagcgctgcttatttttgatgaaattcaaactggggtgggccgtacaggatacctttatgcttatcaggaatatggtgttgagcctgatattcttaccagtgctaaaggtctcggtggcggttttcctatcggcgctatgttaacaaaacagcatatcgcagcggtttttcaacctggaacgcatggtaccacgtttggcggtaatcctctggcgacggcagttgccaataaggtgctttctattgttaatcaggcggaactgctcaccggcgttttgcaacgtcatgattacttcatggataaactatcgaaactgaatcagcgttaccaaatattcagttgcttgcgaggtaaagggctgcttttaggtgctgaattggataaagcttggcagggtaaggcgaagcaattaactaacttggcagcagaggaggggttaattgccttgatcgcgggtccagatgtgttgcgctttgcgccagcattaaatattgaatttgctgatattgatgaaggtttggttcgtcttgaaagcgccatcatgcggtttgtcggttaatagtaaattgaaggtgacgttatgatgcttttccgagctgtccggcatagtgacttaaatggggttcagtctttatctcaacgcgctggtataggtttgacatcttttcccaataatctggatcaattacgttcacgcattgcacgtagtgttgatacttttgatggaaaactggccagggctcagcagggattcctttttgtgctggaagataccagcgcgaatcgtgtggcgggtgtcagtgccatcgaagtggcggttggactggaggagccgttttataattttcgggtacaaaaaaccattcgttcatcacgtgaattggggatttataaatctattgaagcgttgactttggagcaagatcagaccggtaacagtgaattgtgtaccttgttccttgatccggaatatcagaagggaagaaatgggacatttctctccaaagcacgttttctttttatcgccgcatttagggatattttttctaaaactatattcgctgaaatgcgaggggtggcagatgagcaaggaaattcccctttctggaattcattgggacaacatttttttggcattcctttttcccaggcagattacttaaccggtattggatcgaaaacctttattgccgaactcatgccccttcatcctatttatatctccttattatctgctgaggcgcagaaggtgattgggcaggttcatgagaaaacagtacccgcgcgggcaattcttgaaaaagaagggcttatctatcaaggccatatcgatatttttgatggcggcgctttattacaggctgagattgatcggatacgtgcggtaaaagagagtcgtctcgtttctgttagtaaagccgaatcagtgaccagagacgatggtgttccttgcatcgttgccaatcagcagtttagtgaatttcgggcgcttttattgaatgtggtgtgtgacagtaatgaactttttttaacagccgcagagatgggtgcacttcaagtcagcgatggggatcaggtgcgactagttagtctctttccaaaggaaaattaagcatgaattataaagcacattacattgggggaagatggattgaagggcagggtgagtcgataactaaattttccccgatagatcaacaggttctgtggcaagctaacagcgccgatgcttcgcaagtcagggccgcttgtcatgctgcgcgcgaggcgttttatgcttggtcacatttgcccgccagtgagcggattaaggtcattcagacatttgcggctttgctgaatgaggagaaagaaacgcttgctcgtgttatcagtcaggaaaccagtaaaccgttatgggaaactcggactgaaatacaatccatgataggtaaggcggctatttctatcgaagcgtgggaacagcgtactggtgagtcagaaacgattatgcctgatggccgtgccttactgcgtcaccgtcctcacggtgtgatggcggtttttggtccgtataactttcccggacatttgcctaatggtcatattattcccgcgcttattgcgggtaatacgctggtgtttaaaccgagtgaattgacaccgatgaccgcagaagagacggtgaaattatgggaaaaagccggtttgcccgctggtgtgctcaatctggttcagggagcacgcagtaccgggacagcattgctggaggataagcagattgatggtgtgctgtttaccgggagtgccaatacgggctttcactttcaccgcatgctcggcggtcagccagagaagatgttggcgcttgaaatggggggaaacaatgcattgatcgtcgatgcttacgacgatattgatgccgctgtttacaccattgtgcaatccgcgtttatctccgctggtcaacgttgcacttgtgcccgcagattgttggtcaaaaatggcgcccatggagatgcggtgattaagcgtttggtggaggtgacagagcggatcgtaccatcccattgggatgcccaaccccaaccgttcattggtggagtcatttctctacaggctgtgcagaatctattggaagctcaagatcgactacaaaaactgggtggtatctctttggtttcgctggagcaatgccagccgcaatcaacgttgttgacccctgggattattgatgttagccaagtcgctgatgttcctgatgaagagtatttcgggccgctgctcatgcttatgcgttatgacacatttgatgaggcgctggcaatcgccaataacacccgattcggattggctaccggtttaatttcgccggatgctgctctgttccaacgtctgtcggaagatgccagagcgggcattgtgaactggaataaaccgttgaccggggcttccagtaaagcgccttttggtggcattggtgcgtcaggaaactaccgacctagtgcttattatgctgctgattactgtgcctggccgatggcatctctggttgctgacgaactcactttacctgaaacgcttgcgccagggcttcatttccctgattaaccgtttaacgggagaggttttcaacttatataatttttccaaggggatttatggctggttttgaagcaaattttgatgggttggtcggcatgacccatcattatgcggggctttctgtgggtaataaggcttcgattaataataaagacagcgtatctaacccgcgtaaggccgcgctgcaagggttgatgaaaatgaaagcgttggctgatgaagggtttattcaaggagtgcttccgccgcaacaacgccctcatattccggccttgcgtaatttaggttttgtcggcagtgatgagcagatattgcataaagcagccaaatattctccggtgttattatcaaaactgagttctgcttcatcaatgtggaccgcaaatgcggcaaccgtgtcaccttcggcggatagcgctgatcagcgagttcatttcacggtagctaatttaaacaataaattgcaccgttcgctggaaatagcaacgacgactgccgcgttaaaagccacttttgctgatcaaaactattttgttcatcatcaggctcttccacaacatgaagattttggtgatgaaggggcggcaaaccataatcgcctcggtggtgattatgattcgccgggcgtacaggtgtttgtctatggccgtagcgtatttcgcggcggcccggtgcctaaacgttatccggcacggcaaacattggaagccagtgaagcgatcgcacggttgcatcggcttaatccggcacaaaccgtttttgtacagcaaaacccggtcgccattgacagtggggttttccataacgatgtgattgcggtcagcaaccgaaatgtcctttttcaccatcaatatgcttatcttaatcagtctcaggttctgaccgaaattagacagaaaatggcggtgttgggacagaattttgtctcgattgaggtgcctgctgagcagatcagcatcaaagatgcggttgattcttatctctttaatagtcagttactgagtaaaattgatgggaaaatggtgctcgttgttcctgaagagtgccgccaacattccgctgtctgggattatttgcagtcgctgagtgcacaaacctctgcacctatcaatgaagttcgtgtttttgatttgcgggaaagtatgcgtaatggcggcggcccggcctgtttgcgtctgagggtggtacttaacgacgctgaatttcgtgcggttaatcccgcaacattgatgaatacgcaactttaccagcgcctgaccaaatggatagagcaccattatcgtgatgaattatgcgccagtgatctggccgatccccaattactttgtgaagtttataccgcgctggatgagcttacgcagatcttgaatttaggatcgatctatgaatttcagcgctaaattggagcagatatggatctgttaacgttattgcttgaaaaaaaacttgccgaccacctgacatttccagaaacaataaatgcgcattggttggctgaaggtgtactgcaattgattccccatgaagagggaaatcggtctctggtgatttctgccggtattcatggtaatgaaaccgcgcctattgaaatattgattcagttacttgcacagttggcggagggcacgttagcactaaaaaataacgtgttgatcatcttcggtaatttgcctgcgatgcgtacgaatcgacgttatttacatgatgatttgaatcggatgtttggtggccgttatctgaattttccgttaggaaatgagcgatcacgtgcggctgaacttgaaaacgttgtgaatcgcttttttgctgaaccttcggtgtcgtcgaccaatattcgctggcatattgatctgcataccgctatacgcgcttctcaccatgagcaatttgcgttgttacctgctcagaatcgccccttttctgctgaatttatgcaatggttgcatgacagcgatattgatgcgctcgtttatcatcgtgagaaagccgggactttcagccattttctgagtgaaaagtttggcgcggatagctgtacgatggagatgggtaaagcaatgccttttggggaaaatgatttaacaagatttcaaaaaattaccgatgcgctttatggtttaatttctttatcgcaaataaccgcacgtattaaatttgagctgaaacattaccaggtaattaattccattattaagagtcacgacagttttcaacttcatattcccgcagataccttgaactttactgaattgccagaaggatttgaaatcgccagccaacatgatcaccattggaaaattaaatttccagcgaaatttattttatttcctaatgctgaggttgctaatggattacgagcaggattgttacttgctttaaataaaaaataattaaataaataaggcattattccattttcttcctgaagccgtgagaatttttttcagaaagatttagcagtcaactgcttctttaatgacggacgggtactatcatgataaaaaataataaaactcaacaaaacctttcggcagagaaatttgctgatacacaaacgcttcatcgagggctgagtgcacgtcatattcaattgatttccattggtggtgctattggcacaggtttatttatggggtcaggaaaaactattgccgtatcgggtacatcgatcattattacctatgcgattgttggtttttttgtctatatggtgatgcgggcaatgggagaattgctgctgactaaactgaattatcgctcttttgctgatttcgtatcggattatttaggtaccaaagccagtttttttctcggctggacttattggatgagttggattgtctcttgtattgctgatgttgttgtatgtggcggctacattcaatattggtttcccggcgtctctctttgggtgcccgcatttataacgctaggtttactggggacttgtaatcttctttctgtccgcttatttggcgaagctgaattctggttcgccatgattaaggtcattgcgattttagcgttgattattattggcgttggtatggtgatggtaggttggcaatcaccggatggtacgatcgcctctgtgaataatttgactgatccatcggtatttctgccaaatggtatttttggtttttttgctggttttcaaatcgcgattttttcttttactggtgttgaattagttggcacgatgacggcagaaacaaaagatccggaaaagatattgccgaaagcaattaattatatcccgatgagaattatgattttctatattttctccatgttgagcatcattgctgtcacttcttggggacggatctcagctgaaaccagcccttttgtgacactatttgccctggcgggtctgcctgctgctgccgcagtggttaattttgttgcattaacgtcggcaatgtcctctgctaatagtggattatatgcttgtacacgtatgctttatggcttatcaacggaaaagaatgcacatcggaaatttaaaattctttcccgcaatacggcgattcctgtacatagtctgatattttcttgtttctgtatggtggtgggtacgtcacttttatttatcgtaccgaatgtcatgcagttatttactattgtatcaaccgttgcttcggttatggtgatttatagctggtgtgtgattttgattgcctatttggtttatcgtaagaattatcctgatgtgcataaacgttcaatatttaagatgcctttaggggtgttaatgacttggctgaccctgatttttttcatctttaccatagtggtaatggtttttgatccggataccctgatcgcactctgtggcacgcctttatggtttattatgttaagtattttatggcgcgtaaaaaagaaaaatgaggcacagaaagaacagcgttatcagatagcgaaagagagttttcgttcataggcagctaattgagaaataataaattgaagcagatagaaaaatggcttcaatgacgatctcatattagccaaagttgcgtttatttcttctgattttactcccgattgagtcatttgttagggaatggctcgcacctgcaaaatgtttataccctatggatttcaagatggatcgcgacggcaagggagagaatccccgggagatgattagtcgaatccagcattgaatattcgtaacttcggtgctttcattaaaatttaatcacaattgttaatgatttattttatttatcatcacattttttaattaattatgagctgttcactgacaatgttcaatagacaggctgaacgtctgttataaaaaacgtcacgccaaattggctaaataatgtcaataactagcgtgaggtaacgacattacgtgacttgaatatgggcacaataatatgtttgtgaaatgtgattatgggaatgaaaaagcccgttaagcttggtatttatcggatgtgtagccttgttgtctggaatccacttggtgggaatcatgatatcggtaacgttgatatgcggacgttcaataaccattttagtcaacgcctttggtctctctacagtaagagcatacagcatcaatctttgctattaatgtatctcaaatagtacgggatatagattaaatattaatattactaattgtttgataattaattgtatgtaaatatatatgtattatcaattgtctactgatgattgataactgttgtgaaggtggatgttcatagtgagtgaaatttagcgatccacgaggaaagtcgaaatgggtcataaagtttccatagctatgacactgcctttaaattgctaataaaatcaataatattaatataggcgtatatgcaacaagttaacatctcaaacagccaccgtctggttcaatctgaggctgaattactcgaccttattctcaccgaagtgactaatgcaccacatccggatctcgttattatggcagggcatttcatgctcttccttgacgaagaccgaggatgccttgtcccgggagtcatcgaagaaaatacggctcctatgcgagaaaaaattgagcgacgcgtaggaatctttcctggatacacttgggaacttggtgtgcgaatcgcagaacagcttgaacatcaattcgaagcgataaaattcctgctgctcatcaacgattggcaatatgtttcgcgcgacagcgggccagcatctgagctaagacgtgccttctatgagcaattctccgcgcttccggcttcgtacaaatctatcttagagcgcagtgggcaattttctgagcaaaacatgctcgcaagccggaaacatcctgttgcctatccagagacttggctgaaatatcgcttccagaaaagtgccgataagttggtcaaagcagggctgttaaatcgccgcgttctcgacaatggccccgatgccggaaccgaaatttcgcttgtggacgaaaacggcgattataaacctctcattacctgcggcgttaccggatgtgcgggagagattactgagatgatctccgaggtctacaaggcgcaacatcgccttctggtgatctttgcccccggcgaatgcttccaaccagtcaaaacaggggtaagcacggcgctctctctgtatgggctttcgggcatgaaggtgattgttgcggatcccggtggaagcggagagatgcagacacaagagatctactcgaagctcgttaacgttgccgtcttcacttcctgatgggagtcgctatgaatgtcaatgaaaacccgactggcgtaatctatctggatcattgtgctacgacaccatgctttcctgaggtcgtcgacatcatgcgattctacatggagcatgaattcggtaattcttcctccgcccatgtgatgggacgtcgtgcccggcatgcgatagagaacgccgcccaacaagttgcgtctctcatcggtgctcgcccagaggagattgcctttacatcgggggccacagaagccaacaatattgcgcttttctcaagttttgctcataacgaatgcgctcctgcgggagcgctgctttgccctatcgaccacaaatctgtgttgcttgtcggcaaagagttgagtcgtcgggggcttgctgttgaatacctgccggttgccgccaatggccgggtacaaccggaagatgtcatcaccaaattgaccgccgacacccgtatcgtcagcgttgctcatgtgaattccgaattaggtacagttcagccggtggatgaaattgccgcgatcacacgtcggtcaggcgcttggctacatgtggatgctgtccagtctatcggcaaaattcccgtgaacgtcaaagagactggaattgatatgctttcattttccgcccacaaaatgcggggaccgaaaggagttggggcgctcttcgtcgatgcgcgtgttgcggggcatttgaggcccttcatctatggtggcggccagaatcatttgcgcagcggcaccttgccaacgccgctgattgttgggtttggccttgcgtgtcagatgattcagtcaacccttattcaacgtcaagcaaaagtcactgcattgagagactattttattactcgccttcatcaaagggtgccgaacgccgtgttgaataccgatatctcttgcagttccccatacatcgtgaacgttcagttcgaaggtatcgcttcggaggcgctaatatccgggttgcatcaggtggctatatcgtcaggttcagcctgcaattccgcggaactacagccttcgcacgtgcttacaggcatcggcttgagctcggctcaggctaatgcgtcggttcggttctgttttgatccggatctcgataatgcgatattggacaccgcaattgaacaccttgtcttccgattaaattctattcgctaggagcattatctatgactatgcaaacttcctcctcaagcgcaggcactggtttttacgaacgggctttcggtagtttctctgcggaagcggtatccgaggtacgcaaagagacctatggcgaagacttggggcagaacaactggtcctctgctgatgagtttagaaagttctcccaatggcttcaattatctgacagctctcatgtgctggatgtatgcagtgggtccggagggccggctctgtttttggcaaggaccagtggctgtagcgtgacgggggttgacattcatcctcacggcctccttactgcccggcaacttgcggcagatttcggactggaagatcgaagcaacttcgtcgacagtgatgttcgtcagcctctgccatttcctgatggcacttttgatgcattatggtgtatcgactcggtaattcatattccggatcgattggccttgctgcgcgaatggtgtcgactactgaaaccgggcggccggttcttgtataccgatcctactttagtaaccggcatgctgagtaaagacgaaatcatgatacgtggcatgccgggttatttcctctatagcccgcttgggttaaacgagcgtttaatcagcgaggcgggcctttgcctcgaaaggcaggtggatcttacccaaagtgttgttgaacttagtgagcgctggcgtgccgggcgtgagaagcgcagggagcaatttattgcaatagagggtgaagaagcgttcgagcggatgcagaatttcttgtccaccacacagctagtctcaattgaacggaggctgtcgcgcgtggcctttattggttatcgtccgtaatatctcttacctctttgccctattgggcaaggaggtatcttacctattagatgtgaataatgatgttaacctaccgcagtgcattcaacttcactatcttgggttggatgtctggtttgaccgcttgctaaaaattcaatgaatgattgaatctgtttactcgtgaagtaattatgttgtattgactatgctaaaccgaatttaaattaatttaaagtaaatgtagcgattgttcagaaatatatttttaatgttatggaggtgtgtattttatttaattatattttagatttttggaattaatctaaataattatttttgttttattatcagcatgatgttcttattgcgattataatatatttttaaccattgtagtataaatggttatatagtcattttattatttttatgttgccttgatatataaagtaaatattttttattttaatcatattggaatttgtttttgttttttatgatctaataacatatcgttatctacgtcatttggtagcaatagagaatgatttaattggttaatttattatctgtcatctgtaatgatatgttttaaaataagtatattaataacaacaatgaaatttatttttattccactaaacgttaaacttcttaattaaataaagcaaggagataagtatgattttaaataaaaaagttttcctgatttccccttttttactcgcaatgagtagttttagtatggcatgtaagacagatccaaagatagaaaaaataatcaataaaaatggactggaaaataccaaagtgatgtctatgtataaaaattgcacactttcagtttcagcagatacaccgaataaagtgacattagtaaataataaagcggcaaatcgtgatactaaagcagaaaaggcgatgtactggtatagagggatgggaataaaggaatataaagcatttcaccagaataagtataaaagccttccttgtgttaaaggagaaaatttttgtggaattgctcccgaatatacttattctcaaggttatctgacaaataaaaaccctggcgttgttgttgagtttagtacaatagaaccgggatggttatataatgaatttacaactaaacataagtgtcaaattaaagcagagggaggaggaacatacgggcttggtgtgatagggacatcagcgagttgtgataataaatataagaaacttgtaatagggaatgtatttaataaatggttggaaaagccagccaaaatagatcccatcatttcttatgtattattagcaaaatagatttcagctataaataatttttgttgaaatatattgcaccgaatgtttataacttcggtgctttttattggtaatggattttaagtgaacttatacttatccgtgttacttgtaaataaaatagacatttataatattttttatgtaaaaatatactttacaggcaagatattatcatgtggtaaaagaaaattataattagtagatattctacaataagtatgaataaagattttatctttttgaactgttttgatgactataccctatggatttcaagatgcatcgcgacggcaagggagtaaatccccgggagcatagataacgatgtgaccggggtgagtgagtgcagccaacaaagaagcaacttgaaagatgacgggtatataattgcaattagataatgtcatttatattgattttgaatggtaaataggtatttattttatttacatgatattgtaataaataaaaaagtatctatttcaaatgttattgaaatgatctttttttgtgtttatccggttttttatttaattattatagggcttgttttttttgatttcataatctacctttatttaataaggctaataacaagagaaactgattaaatgatatgatttatattgcaaagttattttgttgttggtttcttatttgtagtggagttttatttatagtggcattgtacgttaggtcattatgtgtcggtaaagatgatgactggatttattaataacggctatgaaatatatcttcgttcttttgggtatcaataccatcgataaagtaaggagagaagtatgagttttaataaaaaagcctttctgattgccactttattagttgtgagccactttagtatggcatgtaatactgatccaatggtggaacatataataaaaagttatggcctacaagagactaaagtgatgtctatgtataaaaattgtgaattggatgtggtgaataccggaaatagaattatattaactaataacaaatctaaaaataggaatgaacgtgcagagatagcgatgtactggtatcgaggaatgggaatagaagaatttaagttatttgatagtaataagtttaagagtattccttgtgttaacgtgccaaatcgcttttgcggaatttctcctgaatatacttacgccaagagctacccgatgagagaagataaaaaattcgttatagagtttagtaccgtagaacctggctggctatataatgaatttaccactaaacataactgcgaaattgatgttgaatcaagaggagaatcatatgggttgggtggaataggtgcattgaaaaaagataagtcaaattgtcagcctaaaggttataaggtaggagatgagtttaataagtggctatcggaaaagccagttaaaatagaggcgataattgcttatatacaattacccatatcagattaatccttaatatctgttataaataacttttcaaaatagtagaacacttggagggaactcagtccaatttttgcaatctgatcaattgtagataatcccaaaccactaaacggactgagttatgcctatcatagcacctataccccgcaatgaacgacgccagatgaaaaaaattatccagaacacccgagataaagattatgctcgcaggctcatggccatattgatgctgcatcgaggcgagtctgtctctctggtcgccaaaaccctttgcgccagtcgttcttctgtctatcgctggataaactggttgactttatatggtctggaaggactcaaaagcctgcctgtgggcagacccgctgtctggaatttaatcccgctttatcctttactgtcttttttattgcaatattctccccagcaattgggctgcctgcgttctcgctggagtcttgagttttttataattaaaatcaatgaattattaaacataaaattatccatcagtaccttctatcgttacttacataaaatgggtatcgtgtggcgaagggcagccccgacgcttaaattacccgatcccgagtaccatgaaaaaatggcgaaaattaccgaggcattgtcaacgtgttcagaaaaacatcccgttttttatgaagatgaagtcgacatcgagctgaatccaaaaatcggggctgactggtatttaaaagggcaacagaaacgtatagtgacaccaggaaaaaaccaaaaacattattttgcaggttgcctgaatgttcaaacgggaaaagtgacttatgctgacgggttaaataagaattctcagttatttatcaatgtattggaagaacttgaacgccagtattgtcatgctgaaaccctcactttgattttggataattacagtatccataaaagccgacgggtcagagattggctggcttgtcatcctaaatttaatctgttgtttttacctgtttattcaccctggctgaataaaattgagcgtctgtggcaatccttacatgaaacggtgacacgaaatcatggctgtcagtatatgtggcaattgcttgagaaagtgaaaacgtttttaaattcatgtccctacaggaatagcagagaataaaaagagtgagtgtattataattatgaaaagttatttataatcgtgtcattatcagctttaaactttcttttttagcgccgaatgtcttatcgctttggtgctttttcttggttaaagctaattgtctttgctggaggatataatgggtagaactcgatagaatgttaaaggaataaatgtaaattacagtctcgaaagaattctattagataacaaagaaaattttcattgagaaatatttttcaaaagaaatattttcatatcactattggtttttttcttatataccgttactatattgttttgtagatattctaatgacatattttttaatttaattatattggaatttgtttttgttttttatagttaaataatctaccttatttcagtcagataataataatgaagattaatggcatgggttaatttattgtgtgttgtctgtaatagtgttttttaaatcaacatataacgatgaaatctattttcatttaatcaggtatcaaaaccataaataaagcaaggagagacacatgagtttgaataaaaaagttttcctgatttccccgtttttattagcaatgagtagtttcagtatggcatgtatgcaagatccagaaaatattagaaatcaggtaaaagacgcaatagattataatggattgagtaagactaaagtgatgtccatgtatggaaattgcaaacttagagcgaatgtgaaaaattttgaaaagagaaatgacattgagttaaataatacttctacttctactcataatcaggatgatgaggctgcgacagcaaaatattggtatagagggatgggaaaagatgaatatatattattagaccgcaatggatataatgcaatcccttgtgttacagaggcgagttattgtggaattacacctcaatatacttatgcaaaaacatatccgacaagtgaaaagcctaaaattactatagagttcagtacagaaggatttggttggttatataacgaatttacaactcaacatcagtgtcaaattaaagcggaaggtggaggttcatatgggcttggtagaacaggaacatcgggtgatagagtgagtagctgtaagcctgctgaatatagggtaggggttgaatttaaccgatggttatcaggacataaaatacaagctcaagtttcttatgtattgctaccgaaaaaaccaaaaaaataggatttaacatctattctgttaccatgcaattattaatcttgaattaactctaaaggtgaggtgccgcagatatgcggcacgattaaattgttttttgtatttaattgtgttcagttagatagcagaaaaattttcattgaaaaatattttacaatagtgataaataattatttgatttttatgtattttataatcaagcataattgcaatcttgtgaaggttatttagattgttatgatataaaaaatcattagttattatgttatatatagaacagtgaatgttgataagttgcttattttatatattgttgaaatttttctatatttgttcttatgtgtttaaataagatattatttagtttaatgattctgtaatttgtgttttttgatttagtaatctactcttagttaagaaagtaaataataaccaatttaattcaatgagttatattgtaatgttctattgttattaatttattatttacgactgaattgtgatttgaattattatttatgccgtaaattaaatattaacttaataataacgaaattcatttttgttccatttcgtgctaaaaccataaatcaagtaaggaaagaaatatgaatttgaataaaaaggttttctttatttctccgtttttattagctatgagtagtttcagtatggcatgtatgcaagatacggaggaaattaggaatcaggtaaaaaatgcaataactgcaaatggattggcaaagactaaagtcatgtctatgtatgaaaattgcaaacttagagcgaatgtgaaagattttgacaagagaaatgacgttgagttaaataatacttctactcataatcaggatgataagatagacaaagcaaaatattggtatagagggatgggaaaaagtcaatatatatcattagaccaaaatagatatactgcaatcccttgtgttacagaaggagaaaatgactattgtggaattgcacctgcatatacttatgcaaaaacatatccgaaaactgaaaagccaaaaattactatagaattcagtacagaaggattaggttggctatataatgaatttacaactaaacatgattgtgaatataaagtggaagctggaacattatcatatgggttaggtaaaaaaggatcgaagtgcaaggttcctcctcaatataatacaggagttgaatttaataaatggttatcaacgaatgaaatacaagctcaggttgcttatgtattattaccgaaaaatccctaaaaataggatttaacatctattctattaccctgtaattatcaatcttaaatttgtgcaaataactataaaggtaaggtgccgcatatatgcggcacgattaaatttctgatttattttgcgaaatgtacctcaatagcacttttagcatcttgccaggcttcttcaagtgtatcaccagcaaaataacagccgagtacatcagaaaaccagcatctttccgggaataaaaagaaaataaaaaggctgaatccagtgaagtacaggattcagcctttatcagtcattaatctgctacggataagaaacggttacgcttccccttgtgctgattgaattgcggtcagtgcaacggtgtaaacaatatcgtctaccaaagcgccacgggacaggtcgttcaccggtttacgcataccttgcagcattggcccgatggaaaccagatccgcagaacgttgtactgctttataggtagtgttaccggtattcagatcagggaagatgaacacggtagcttgaccggcaaccggtgagtttggtgctttggatttcgctacatctgccatgatcgcggcgtcatattgcagtgggccatcaatgatcagatctggacgtttttcctgtgctaaacgggttgcttcacgcactttctcaacatcactacctgcaccggagttgccggtagagtaggagatcatggcaacgcgcggttcgataccaaatgctttggctgaatccgccgattgaatagcgatttcagacagttgttcagcagtcggatctgggttgattgcgcagtcaccataaaccagaacctgttctggcagcagcataaagaatacggatgataccagcgagctacccggtgcagttttgattaattgcaatggtggacggatggtgtttgccgtggtgtgtaccgcaccggaaaccaaaccatcgacttcgccctgttccagcatcaacgtacccagaacaacgttgtcttccaattgttcacgcgcaacgacttcggtcatgcctttgtttttgcgtagctcaaccagacgtgggacataacgttcacgtacagcaatgggatcgacaatttcaatacctgcacccagttctacgccctgagccgcggcaacccgacggatctcttctggatcacccagcagaacacatcgcgcgataccgcgatcagcacagatagatgccgctttcacggtacgaggttcgtcaccttccggcagaacaacgcgtttgcctgctttgcgtgccagttcggttaattgataacggaatgcaggtggagagaggcggtgtgggcgctcagagttcgctgtcagggagtcgatccactctttgttgatgtggtgtgcgacgtagttttgcagtttttcgatgcgttcatggtcatctgccggaacttccaggctgaaactttgcaggttcagagaagtttgccaggtgttggtatcaaccataaagacaggtaggccagtgttgaaggcacgttcgcacaattgcttaatcggctcatcgatggcataaccgccagtcagcaggattgcaccgatttcaaccccattcatcgccgccagacaagctgaaaccagaacgtctggacgatcagccgaagtgaccagtagagaaccgggacggaagtgctctaacatgtgtggaatgctgcgggcacagaaagtcacagatttcacacggcgggttttgattgcaccttcgttgataatacgggcgttcaggtgttttgccatatcaattgcgcgggttgcaatcaggtcaaaactccacggaatgcaacccagaattggcaatgggctatttttgaacagcgtgttcggatcgatgttggatacgatggcttttgaggattcgtcaaagatttctgacagatccggacgggtacggccttgatcatcaactggcgcattcagtttattgataataacgccggtaatgttctggtttttgttaccgccaaattcagcacgagccagttcaactcgttctttcaactgttccggggaatcgttacctagcgccaatacgaatacgatttcagcgttcagggtcttggcaatttcatagttgagagattgggcgaatgaatgtttacgggttggaaccagaccttcaatcagaatgacttctgcgtctttggtattttcgtggtaaagggccacgatcttttccatcagcacatctttctgattggttgtcagcaaagattccacatgtgccatgtccagcggttcagcggtctttatgctggaattagcgcggatgatggtggtggtttgatcttgggcggcacggcaacgaggctgggcgataggtttgaaaacactcaggctgacgcctttttgttccattgagcggatgacacctaaactaacactggtcaagccgacgctggtgctagtagggattaacataattgtacgggacacggaaacctctttacggttgctcgttggtcaaaaatagtaccgccagcagtggctggcggttgataaaattattacgcggtcaggcgcgctgcatcttgagcgatcaccaattcttcattggttgggatcactaaagcaggacggctgttatcagtagtgatagcaccggatttaccgaagcgggccgctaggttacggtcgtgatcgtattcgaaacctaacagggccagttttttcatcacctgttcacgaaccagtgcggagttttcaccaatacccccggtaaagataatggcatccaagcggccttccattagtgcggaataagcaccaacgtatttagccagacggtggcagtagacatccatcgcgcgtttagcatcggctttggttgcatagttatcttctatataacggcaatcactggtgacttcggtcagaccgagtaagccagattctttggtcaacagtttgttgatttgttcaacgctcatgccgagtgaatcatgcagatggaaaatgattgctgggtcgatgtcaccactgcgggtacccattaccagaccttccagtggtgtcaatcccatagaggtgtcaacacattgaccattaacgatagccgagatagagccaccattacccaagtggcagacgataacattcagctcttcaaccggtttgttgagcgtttttgccgcttcacgggaaacgaagaagtggctggttccatgagcgccatagcgacgaatgccgtgctctttatacaggttgtatggcagggcatagaggtaagcctcttctggcatggtctgatggaaagcggtatcgaatacagcaacgtttttgtcagccaggtgtgggaacccttttttcgcttcttcaatgccaatcaggtgagcagggttgtgcaatggtgcgaatggaaccgcatctttgatcccttgaatcacttcatcattgatggtaacggatgccgtgaatttttcaccgccgtgaacaatgcggtggccgattgcggcaatttgatcagaaagttctggtttttcggccagaatcgtattaacaataaagttcaatgcttcactgtgggctgcaccagcacctaaagcggcttcatgttttgcgccatccattttccacttaatgcgggcttcaggcaggttaaaacattcagctagaccagaaagatattcttcaccgttagcaggatcgatgatagcaaatttcagagaagagctaccgcaattgaggaccagtaccagcttacttgacatggaagtacctatatcgtgtttgtcattgagtcttacagataagacatgtgattaataaaacgtcaattactcatcagcgtagagcatatagtgatgacattaaatgattaacatcatgctaagtgcaaagagcatgatgataaggtttaaattttcaaaaaaccttttttgcctgctctgatgttaaaagatagcgtgatttgttaacaaaatgagcctaagtgcagtaaaaagtaaaatatgctgctttactgctgtgtataacatacaagtgaatgtaggataccgatagcgagcagcaaagacaaaatatacctaatcctacaaaaaatattttatcagttacaatgtttttttaaaaaatgtgtttttaattgattgaggtcatgatgagcgcaatacctcccaccagtaatggatggctgagaaagatgcaactgggacaacaatacatgaaaacttggccgattgagaaacagttggcacccatgtttcctgaaaaccggattattaaggctacccgctttggtatccggtttatgccgccgttggctatttttactctgacgtggcaaatcgcactgggtggtcagcttggcccagcggtggcgacggcactgttcgcctgtagtttaccgatgcaagggttatggtggttggggaaacgggcatcaactccgttacccgcggcattgctgaaatggtttcatgaaatccgtgataaatttgccgcagcaggtatcacaatggcgccggtgcagcaaacgccaacttatcaatctctcgcagaactgctgaaacgcgcatttaaacaactcgatcgttcgtttcttgatgatatttgaaccaggagagagccgttgctagattattgcagtcaatgtactggaaaatcagagatgatggttcatgacgaaaagtggacacattgttgatcgcaactggagattttctcttaataaaatggtctactagccaagtttttgacactaatatcttcttttttgttgatagaggccattttgaatagcgaactcttgtgggtattgaccctgctgctgatagctattgttctttttacttccaataaactgcgcatggatattgttgcattattggtgattatcgcgtttgtcataagtggaacgttgacgcttggtgaagcgaccagcggttttagtgatcccaatgtgttgttgatagctgccctgtttgtgattggtgaaggattggtaagaactggcgttgcttatcaaatgggggattggctggtaagagttgccgggaacagcgaaactaaaatgttggcattactgatgatgactgttgcagggcttggtgcttttatgagctctacgggagtggtcgcgattttcattccagtggtgctcagtgtcgcggtaaggatgaaaatttcgccggggcggttgatgatgcccttgagttttgccgggcttatcagtggcatgatgacattggtagcgacgcctcccaatatggtggttaacagtgagttgatacgggaagggcttcccggtttcaaattcttctctattacacctattggtatcttgattctgtttgccggtatgggttatatgctgattgctcgccattggttggcaaatcatcaatcggataaaggccatgataaatggcatcgtcgtactttccgtgaccttatccgcgactataaattatccggtcgcgcgcgtcgcctggcgatccgctcaggttccccgctgataggtctttcgcttgatgagtcaaatttgcgtgctcgctacggggctaatgtcgttggtatcgagcgttggcggcgttttcggcgcgttatggtcagtgcgatgggcaatacagaattgagagaacgggatgtgttgctggttgatatgtcagacagtgaggtggatctgcgtcaattttgcagtgagcaattattagaaccgatggtgctgcgcggggagtatttctctgaacaatctcgtaacgtaggtatggctgaagtctctctgatcccggagtcggatttattgggtaagtcactgcgggaaataggttttcgtacctgctatggtttgaatgttgttggtattcgacgtgatggtgaatcgttgtcgggtaaactggttgatgcgccactgcaacttggcgatattttgctggttattggtgactggaaactgatacgtgtcctgcaaaccaaaatgcgcgattttattgtccttaatctgccggttgagatcgaagaggtggccccggcaacgtctcaagcgccacatgcgctttttagtttggcgctgatggtagccatgatgcttaccgatgaaatacccaatgtgattgccgcattgatagcttgcttgttgatgggaaaattccgttgtatcgatatggaaagtgcgtaccgctctattcattggcccagtattatcctgattgtcgggatgatgccatttgcactggcattacaaaaaacgggtgggattgagctgattgtccgtggcttgatggatattgcgggtgatatggggccgagggtgatgctggtctgtctgtttatactttgtgccgtaattggtttgtttatttctaatacggcaacggcagtattaatggcaccgatagctattgctgctgcacgtgaaatggcagtatctcccatgccatttgccatgattattggtgtggcagcgtccgccgcatttatgaccccggtttcgtccccagtgaatacgctggtgcttggccccggtggttataagttctccgattttgtccgtttgggcgtgccgttcactctgttggtgatggtgataagcgtgctggttatcccttggttgtttccattctaatggggaatatcaagactaatttcgtccaatgacaggctgaatcccggtacaaaaactttcataaagtaatccatctcctggctgtgacgatcagccagggttttttcaagtcgggctatcgccagattgaattcatggttacctgctgataactcttccagacatttgaggtaagcacacagggaatcggcctgtttaatgataaaagtttcttctgttgtatgctgactgtcatccaagattggacggaaatcctcttgcagctcagttggcagcatttccagtaattttttctgcgcgattttttctatttttttgtattcccgtgcgatatgtggattgtgatatttgaccggagtgggtaaatctccggtaataacttcgctggcatcgtgatacatagccagcaatgcaatgcgttcagcattcacattaccgccaaatttgcggtttttgataatggctaaggcgtgtgcgacaaaggccacttgtaagctatgttcagatacattttctgtacgtacattgcgcatcagaggccagcggttaatcagtttcaaacgggaaaggtgggcaaaaaagtggctcataatcatctcttacagtaaatattgtttttattgtgagcggtggatgggggtaaagtaaaccttaaaatcgtttcttatttttatctcttatttttttaaggattttcatagggaaatctgccatttatctatacccaatggatttcaagagggatcgcgacggcaagggagtgaatccccgggagcatagataactatgtgaccggggtgagcgagcgcagccaacaaagaggtaacttgaaagatgacgggtatccagactatatagcaagattgatattattaattttaatttattgttaaatataaatgttataaccgtaatagatatcctttttgcaggaagtttatgtttttactccattttgcatacaatttatatacgaaaattttatataatttacaatgacttattattcattcaggtgctctcttttattaagtttaataaatacaatgtttaattcttttatatcttgctaatgctttatataatcactgcaaaaatcgcctataaaaataaaaaaattagtctgtgttaccggtaaaaaatgaaaatttattgaccttgattttgcagagagtgattattgggtatcaataaagagagttatggaagtggttatcaaggatttctatctgacaggtgagattttcacccgtgaagaaaaagtgggtaggtgagacttatcagaatagaagaaataaacttttttctattctgatagaacgcatggtatgaataatgtccgttatcagtgatatttttctatacccgttatccttcaagttgcctctttgttggctgcactcacttatcccggtcacatcgttatctatgctcccggggatttactcccttgccgtcgcgatgcatcttgaaatccatagggtatataaacggctcttatttttactgatgatatttaccaataaatcgggcgaatttctgaattgccatctccagttcatcaagccttggtagggtcacaatgcggagatggtcaggttccggccagttaaatgcggttccctgcactaacaagaccttctcttgtaataaaaggtcaagcaccattttctggtcatcgtgaacattaaaacgttttgcatcaatttttggaaacatatataaagcgcctttaggtttcacgcaggaaacgccggggatttgattgattaattcccatgctcggttacgctgctcatacaaacggccaccaggtaaaatgaattcactgatactttggtaaccgcctaaagcagtttgaatagcgtgttgcattggcacattggcacataaacgcattgatgccagcatctccaaaccttcaatatagctcttagcgtgtttcttcgggccgtttaataccatccagccttgacgaaaacctgcaacccgatatgttttagataatccattaaatgttaccgttaacagatcaggcgcgagggcggcaattgaatgatgctcggcatcgtcatataagattttgtcgtaaatctcatcagcaaaaataatcaaattgtgttgccgggctatttcaacaacttccaataacagctctttactatatacagcacccgttggattattagggttaataatcacaatcccacgtgtgcggggcgtaattttgttgcggatatcatttaagtcaggaaaccaatctgacccttcatcacacatataatgcacggctttgccactggaaagtgaaactgccgcagtccagagaggataatcaggtgcaggaaccagcatttcatcaccagtattcagtaatgcttgcattgcctgaacgattaattcagaaacaccattgccgatataaatatcttcaacggttacgtccatcatattccgggcttgataatgttgcatgatagctttgcgtgcagaatacagacctttcgaatctgaataaccctgtgctgttggtaagttacggataacatctaccaagatttcatctggtgcttcaaaaccaaagggggctggattaccaatatttaatttgaggactttattgccttcttcttcaaggcgtttagcttccttgagtacggggccgcggatatcataacaaacattatccaatttgctggattttttaactgctagcatagagagtcttaccttatcttggtaaaaaaagtcgcctggcatatagcgtgtaacatttaatgtactcctccctctgaatgttttgaagatgcattgatatatttggttaaaatggttgttttagtaggggagtggttatttgagtatctttttatgtaaattatgttagcgttaagttcttaatttactgtaaatatcagatttataatctgaattgttgttgttttttagtgtggaaatggggtgtttttagtgtgataacggtatgatcgtgccattgtggagagaaagtgagcatagctcaatttgccaataaaaattgttgtgtttgtataatttattcttatgtataagatttggcttgagttggcaattcagaactatatattttagaaagatcaaacaatatttttgatcatttctggaaactagttgtaaatttatctgaataggattattaaacattagtgatattgtagatttttactttatatttagtttttctgatataacttatgttattctttgacgtgagtcagaaaacaaaataaccaaactagaaattacatatagggtgttgtaaatagggattgtcctcaatttatttaggaatccgagtaacttttgctaagaagaggagaaaataaaacccacaatgggttcaataggtaaaaaaacagcagtaaatctttgccctatttaatagagtagagtactgtctaagtgatgttaatttaatttgatagtgcttacgtaaaaacaccaggttagttagtaattaaaatcaaaaaaaagtgatgaataaacaatgataaatgcaaatcgtccgataatgaatctcgatctcgatctgctaagaacttttgttgctgttgctgatttaaatacttttgcagcagcagcagcagcagtatgcagaacgcaatcggctgtaagtcagcaaatgcaacgtttggagcagttggtgggcagagagttgtttgcccgtcatggccgcaataagcttcttacagagcatggtcttcaacttcttggttatgcaagacaaattctgcgcgctaacgatgatgccagcgcatcattaacctatagcgatgcagaaggtgaactaagaatcggtgcatccgatgatacggtggatacactgctcccttttttgctaaatcgcatcgcttccgtttatccacggatggcaatagacgtccgtataaagcgtactcagtttattgaaagtatgctggataaccatgagatcgatttggcactcacaaccgcaaaaattagtcatcatccaaggactgttctgcgttcaacaccggtattatggcattgtgctcctgatttccagctacaggtaaatgaacctgtgccactggttgtgatggatgaaaccaatccattccgtcagttggcgttggatacgctggatgaggtgggagtatcgtggcggattgcttatgaagcggcttctctgtcggcagttcgcacggcagtgaatgcagaagttggtattactgcccgtcctttggaaatgcaaaatgctgatctgcgtattttaggggagagtgaagggcttcctcgtttacctgaaacccagttctctctgtatagacatagtaatgagcaaaatgaatctgttctgacggtttttagtgcgatagagaataagaaaacgccatacacgataacgagtgtttctgaagaacttcctgatgatgacgatattattgatgagtaatatctgaaacacttctccttgctaatacctccattatggatggaaggaggtattagctcctcgaatatatttataagtaatcatcaactaaattcaccttattctgttgttatcgtcatcattaaatatacggtagcatttttcttaacaccccctgatttggttaacaaattgttatattgttaacaaggtaataatttgctgaattgatgaaataagaatttctgtagtgaacgggaacttttctcgttgctaatggataaaaaatataatttcttcagatttgaatgaattatcatcagcagtaaaatttttttctgtcaaattgtgtacttgatcaaagaaatactccctatgtagcagtggaaaggcaggtttttcctgagataatgatgtagtaaaagcgagttatcggttaaactagcttccgccactgtttgcgccagttaactgacacgttttagcagtgcggtagcacgatccgttaagactaagtttgttatttgtaaataaatgttagattaattttgtcaaaacagacaaaatattgttgagaggagtaaaaaccaagaagattcactccatcaatcattgattaacagtgtttcagatttggttgttaccccttcccttgaatcgatgtggtgcaacactgccagacaaaagagcagacacttttgacaccacttttgatgagtaagcaatgagtatgtcaacatccactgaactctttgcccatcactgggcattcgcggtatttcttttaggtgctttcggtctgtgtgctttgatgctgttaggggcatttttcttgggcgggagagcgaaagcccgggcaaaacatgtcccttatgaatctggtattgattctgtcggtagtgctcgtctccgtatgtcggccaagttctatctggtcgctatgttctttgtcatcttcgatgttgaagcgctgtttttatatgcatggtcagtctctatcaaagagagtggctggttaggctttatcgaagcaagcattttcattttggtgttactcgcaggcttgttttatctggtgcgtattggggcgctgaattggacgccatctcgttcaagccgccaggtaagtaaaccaagtgttgtgattaacattaataatagtcatccgcagtaatagcgaggcatttaaagatggattatacgctcacccgcatagatccgaacggtgagaatgaccgttatcccctgcaaaaacaggaaattgtcgcagacccactggagcagcatgttcaccgtagtgtttacatgggcaaactggagcatgctctgcatgatatggtgaattggggacgtaaaaactccctgtggccctacaactttggtctttcctgctgttatgtggaaatggccacatcatttaccgctgttcatgatgtcgctcgttttggcgctgaagttttacgtgcatcaccccgccaggcggattttatggtggtcgctggaacctgttttaccaaaatggcaccggttattcagcgcctgtatgaccagatgcttgagccgaaatgggttatctctatgggagcctgcgccaactctggtggtatgtacgatatttactcggtagttcaaggtgtcgataagtttatccctgttgatgtttatattcctggctgtcctccccgtcctgaagcttatatgcaagctttgttgttgttacaagagtcaattggcaaagagcgtcgtccgttgtcttgggtagtgggagatcaaggggtttaccgtgccaatatgcagtcagaaagagaacgtaagcacggggaacgtatcgcagtgaaaaatctgcgtacgccagacgaagtttaagaatctgtctttagacagtaggcgtgactcaaagtagcctaatgaatgtaaccagagcaatgtgttgcgatactaatcctgatcaaaacgaacactgatcaaagcgttgtggtgaagaatgatgatagatcagatagcgcaagaaagcgcccggcctgcgtggcaaactcatgaccatcttgatgatccggtcatgggtgagctgcgtaaccactttggcccggatgcctttactgttcagccaacccgtactggtatacccgttgtttgggtgaagcgtgaacaattactggaagtaatgactttcctgaagaagctgcctaaaccttatgtcatgctattcgatttgcatggcatggatgagcgtcagcgtactcatcgccagggtctgccagcagcagatttttctgtgttttatcacctgctttctattgagcgtaaccgcgatatcatgttgaaggttgccctcagtgaaaaagagctgaatctcccgacggcaactcctctgttcccaaatgccaattggtatgaacgtgaaacatgggaaatgtttggcgttgtctttaacggccatccaaacctgcgccgcattatgttgccaccgacttgggaagggcatccgttgcggaaggattatcctgctcgtgcgacagaatttgatcctttcgaactgaccagacagaaagaagatctggaaatggaagcgctgactttcaaaccagaagagtggggaatgaagcggggtaccgagaatgaggactttatgttccttaaccttggtcctaaccatccctcttctcatggggcattccgtatcattctgcaactggatggtgaagagattgtcgattgtgtcccggatattggttatcaccatcgtggcgcggagaagatgggagagcgccaatcttggcacagttatattccctatacagaccgtattgaatacttaggcggttgtgttaacgaaatgccttatgtgctggcggtggagaaactggcgggaattgaagtgcctgaccgggtaaaaaccattcgcgttatgttgtcggaattgttccgcatcaacagccacctactttacatctcgaccttcattcaggatgttggcgggatgaccccggtgttcttcgcctttactgaccgtcagaaagtgtatgatctggtggaggcgattaccggtttccgtatgcacccagcgtggttccgcattggtggcgttgctcatgatttgccgcgtggttgggatagattattgcgcgattttctcaactggatgcccaaacgtcttgattcctacgtgaaagcggcgctgaaaaatagcatcctgaaaggccgagctattggggttgctgcttataactccaaacaagctcttgaatggggcaccactggagcgggtttgcgggcaacgggtattgcgtttgatgtgcgtaaatggcgtccatactccggctatgaaaatttcgatttcgacgtgccgattggtaataacggcgactgttatgaccgcgtgatgttgaaagtggaagaagtgcgtcagagcttgcgaatcttgaaacagtgtctggacaatatgcctgaaggcccatttaaagcagatcatccactgacgacgccaccaccgaaagaacggactttgcagcatattgagaccatgattaaccactttttgcaagtgtcatgggggccggtaatgccagcaaatgaatctttccaaatgattgaggccactaagggcatcaacagctattacctcaccagcgacggcagtactgtgagttaccgtacccgtgtccgtacaccgagttatccgcatttgcagcagatcccatcggtaattcgcggtagcttagtttctgacctgatcgtgtatctgggcagtatcgattttgttatgtctgatgtggatcgctaactatgcaaagtgaaattaacgcgagtgctcaacaagcgcgccttgatgtggttaacgtaacagagtctcaggcaaaagcagattttgtgctgagtaccgaagagcacgatgctattgagcatgaaaaacaccactacgaagatccgcgcgccgcttcgatagaagcattgaaaattgtacagaagcatcgtggctgggtaccggatggtgccatttacgcgattgctgatgtgcttggtattcccgctagtgatgtggaaggtgtggcaacattctacagccagatttatcgtcaacctgtgggccgccatattattcgttattgtgacagcgtggtttgtcatattaccggttatcaagatgtccaggctgcaattgaaaaacatctaaatatctgtccgggacagacgacgaaagatgggcgttttacgctgttgccaacctgttgtctgggtaactgtgacaaaggcccgaccatgatgatcgatgacgatacgcacagttctgtcagacctgaagagattgagaagttactggagcagtatccatgacagcatattcaggaataaaagaaattattcttactgaggaaaaccatcctcttacttggcgattgcgtgatgacaaacaaccggtatggttggatgagtaccgtagcaaaagtggttatcgtggtgctgaaaaagcactgaaaagcatgtccccagatgaagtggtttctctggtaaaagacgccgggctgaaaggccgtggcggtgcaggtttctctactggtctgaagtggagcctgatgccaaaagatgaaagcatgaatatccgttatctgctatgtaacgcagatgaaatggagccgggtacctacaaagatcgcttgctgatggaacaacttcctcatttgctggtggaaggaatgttgatcagtgcatttgccctgaaagcttatcgtggctatatcttcctgcgtggtgaatatgtggaagcggctgtgcatctgcgtaaagccatcgaagaagctaaagcagcgggtttgttgggtaaaaacatcatgggcagcggctttgattttgagttgtttgttcataccggcgcggggcgttatatctgtggtgaagagaccgcactgattaactcactggaaggtcgccgagctaatcctcgttcaaaaccgccatttcctgccacttccggcgcatggggtaaacctacttgtgtcaacaatgttgaaaccttgtgcaacgttccttcaattctcgaatacggcaaagagtggtatatcggcctgagtgcaggcaagagtaaagatgccggcactaaactgatgggtttctctggtcgggtgaaaaatccgggcttgtgggagttgccatttggtacgactgcccgtgaaattcttgaagattatgctggtggtatgcgtgacggcttgaaattcaaagcatggcagcccggtggggcagggactgacttcctgactgctgaacatctggatctgccaatggatttcgaaaatattgctaaagcgggcagccgtttgggcacggccttggcaatggcagttgaccatgaaattaatatggtttcgttgacgcgtaatcttgaagaattctttgcccgtgaatcttgcggttggtgtactccatgtcgtgacgggttgccgtggagcgtaaaaatcctgcgcgcaatagagcgtggggaagggcaacccggggatattgaaacattggaacagctctgtcgtttccttgggccaggcaatacattctgtgctcatgcaccaggggccgtggaaccactacagagtgccatcaaatatttccgtgatgaattcgaagctggaattgtgaccaaagactatgggaacacccatttcattgcgggtatccagtcaaacctgttaaagcagcgttggtaatgggttcttcacgaaattagcagaatttttgattaacacttgctgaaaagcaggtcatttggaagcatgctgactatggctacgatacatgtagacggcaaaaaatatgatgtagacggggctgataacctgttacaagcttgcctctctttggggttagatattccttatttttgctggcatccagcgcttggaagcgttggcgcttgccgccagtgtgcggtgaagcaatatcaaaatgcggatgatacgcgcggtcgtctgatcatgtcctgtatgactccggcaacggatggcacttttatctctattgatgatgaagaggctaaacagttccgtgagagtgtggttgagtggttgatgactaaccatccgcacgattgcccggtatgtgaagaagggggcaactgtcacttacaggatatgaccgtgatgactggtcatacattccgtaaataccgtttcactaagcgtactcataacaatcaggaattggggccgtttatttctcatgaaatgaaccgctgtattgcctgttatcgttgtgtacgttactacaaagattatgccgacggcgctgattttggtgtttatggcgctcacgataacatttattttggtcgccctgaaagcggtacgttggaaagcgagttctccggtaacctggtagaaatctgtccaaccggggtatttactgataaaacccattctgaacgttataaccgtaaatgggatatgcagtttgcgccaagtatctgtcaacagtgtagcattggctgtaataccagcccgggggagcgttatggtgaattacgccgtatcgagaaccgttataacggtacggtaaaccactattttatgtgtgaccgtggtcgtttcggttacggttatgtcaaccgtaaagatcgccctcgtcagccacggcaattgcgtggtgatcattggatctcgcttaacgctgaacaggccatgcagggtggggcggatattttgcgtcaggccaaaaatgtcatcggtatcggttctccacgcgccagtctggaaagcaattttgcactacgtgaactggtgggcgcagaaaacttctatagtgggattgctgcggctgaacaacaacgccttgatataatgctggaaattctgcaacagggtggtgtttatacaccgtcgctacgtgaaattgaaagctatgatgcggtattgattttaggcgaagatttaacgcaaaccggtgctcggatggcactggcggttcgtcaggctgtgaaaggtaaagcccgcgaaatggctgctgctcagaaagttgctgattggcagattgccgctgtgatgaatattggtcagcgtgccaaatatcctctgtttgtaaccaacgtggatgatacgcatctggatgatatcgcagcgtggaattatcgtgcgccggttgatgatcaggctcgttttggttttgcagtcgctcatgcattggataacacggcgccagccgtcgagaatttgcctgacgaattgagagccaaagtggatatggtggcgcaagcattgattggcgctaagaaaccgttaattatcagcggcagtaacgtcggcagtgatgcgattattcaagcagctgctaatattgcctgggcactgaaagaccgaggttcagatgtcggtttgtcgtttgttgcaatctatgcgaatagtattggattggcaatgatggaggcccagccactggatgttgctctgcaacgtataagtagtggtaaatctgatacggctattgtgatggaaaatgatctctatcggcatgccgcagcagataaggtagacgatgcactgaacaatctgaaaaacctggttgtggttgaccatcaacgcactgctatcatggataaagcccatttgattctgccagcttccagctttgcagaaagtgacggcacgttggtgaatcaggagggtcgggcccagcgttatttccaagttttcgaaccctctttctatgacaaatcggtggtgatgctggagagttggcgttggttgcactccttgcatacaacgtatgctgaacgtcatttggattggacgcagcttgaccatgtgattgatgcctgcgctgaagcaatgccacagcttaaaggcattgttgatgccgcgcctgattcgacgttccgcatccgcggtcagagactggctcgttcaccgcaccgttacagtggtcgtactgctatgttggcgaatatcagcgtacatgagcaacgtcagccgcaggatgtcgattcgccatttgctttctcaatggaaggtaacaatagtcctaatgcccatcgtcagcaggtgccatttgcatgggcaccgggctggaactcaccacaggcttggaacaaattccaggcggaggtaggtggtcatctgcgctttggcgatcctggtgtgcgtctgattgaaaccactgacggcggtttgaactattttgatcagattccgacagcatttactgcacaaaataaccaatggacagtggctccttaccatcatttgtttggtagtgaagagttaactcaacgttccgatgtgattcaggaacgcatgccggagccttatgtgatgctcaatagcaaagatgcggatcaattaggtgtgaaaacgggttctgttctggagtttgattgttttggtcagcaactgcgtctggcagttcgtctgagtgaaaatcttgctcaagggcagatcggcttgccaatgggaatgccgggtattcctccggtattggccggtgtttccgtgaataatctgcgggaggttgcacaatgagttggttaacccccgaaattattgatgtgctgatcgctgttctgaaggcagtggtgatactggtagtggtggttgtctgtggggcattgatgagctttggtgaacgtcgtttgctagggctgtttcaaaaccgttatgggcctaatcgcgtaggttggggcggatcgttacagatcgtcgctgacatgatcaaaatgttcttcaaagaggactgggtaccccgttttgcggacagaatgatctttaccttggcaccggtgattggtttcgtttctctgttgctggcatttgccattgtgccgatcacgccgacttggatggccgctgatctgaacatcggcattttgttcttcatgatgatggcgggtctggctgtctatgcggtgctgtttgctggatggtcaagtaacaacaaatactcgttactgggggcaatgcgtgcttctgcgcagacactgagttacgaagtgtttattggtctctcttttatgggcgttgttgcgcaggcggactccttcaatatggtggatatcgtcaatgcacaagagcatatgtggaatgtcattcctcagttctttggtttcttgacttttgccatcgcgggtgtggcggtgtgtcaccgtcatccatttgaccagccggaagcagaacaggagctggctgatggctatcatattgaatattccggtatgaaattcggtctgttcttcgttggtgaatatatcggtattgtcacggtttctgccctgattgtgacaatgttctttggtggttggcatggtccgttcctgccgccgtttgtctggtttgcgttgaaaacggcattcttcatggtgatgttcatcctgatacgtgcctctttaccgcgtccgcgttatgaccaggtgatggcgtttggctggaaaatctgtctaccgctgaccttacttaacctgctggcgactgcggcagtgattttgtacaacgctcaataaggggggaatgaaccatgacattgaaagagttagtggttggttttgccacccaggtacgcagtatttggatgattggcttgcatgcctttcataagcgcgaaacccaaatgtatccagaggaaccggtttatctgccaccccgttaccgtggccgtattgtgttgacgcgcgatccggacggtgaagagcgttgtgttgcctgtaacctgtgtgcggctgtttgcccggtgggatgtatctcactgcaaaaggcggaacatgaagatggtcgttggtatccagaatttttccgcattaacttctcacgttgtattttctgtggcttatgtgaagaagcttgcccgactacagcgatccaattaacgcctgatttcgaaatgggggaatttaagcgtcaggatttggtatatgaaaaagaggagctgacgatttcaggtccgggtaaatatcctgattataacttttaccgtaagacaggtgtggcaattgacggcaaatcaaaaggtgaagccgacaatgaagcgaaacctatcgacgttaaaagcctgttgccgtaaggagcgatattcatggaatttacgttttataccgctgggctgattgccatattggcaactatcagggtaattacccataccaatccgatacatgcgcttttgtatctgatcgtttctctgctggcgctttcagcggtgtttttttcgctgggcgcttattttgccggtgcgctagagatcatcgtttacgccggggctattatggtgctgttcgttttcgtggtgatgatgcttaaccttggcaaatctgttgttgaacaggagcgtgtttggttgaaaccgcggacgtggattggtccgggaatactgtcaacaatgctgcttgttgtgctggtgtataccattatcaatgtttctcatggggatattgccgacaatatcacgggtgaagttgtcagtgccaaagaagtgggtatcagtttgtttggtccgtatgtattggccgttgaactggcttctttgctgttgcttgccggtatggtggtggcgtatcacattggccgtgaacacaaacagggtgaagtgctcagcaaccgaaatgcggaggaacaaccatgatacctcttcaacatggactgattttggcggcaattctatttgtgttgggcctgaccgggctcatcatccgccgtaatctgttgtttatgttaattgggctcgaagtgatgattaatgctgcggctctggcttttgttgtggtaggcagctattggggccagccagatggtcaagtgatgtttattttggctatcagcttggcggcggcagaggcgagtattggcttggcgctgttattgcagctctatcgtcgtcgccagaatctgaatattgatacagtcagtgagatgcgcggatgaacttactctatttaacaattctgctgccactgctgggatttttgctgttggcattttcccgtggccgctggtctgaaaatacatcggctaccatcgggattagttctgttggtttggctgcgttggttaccttatgggtagctatcgatttcaatagtcagaatggtgcgggtgatctggtttacagtcagaacctgtggaactggatggaagttgggaatttcagtattccgttcactctggttcttgatggtttatcgcttaccatgttgagtgtggtaacgggtgttggtttcctgatccatatgtatgcctcgtggtatatgcgtggtgaagagggctattcccgtttcttcgcttataccaacctgtttattgccagcatggtgatactggttctggcagataacatgatgctgatgtatctcggttgggaaggggtagggctgtgcagttatttgctgattggcttttactataccaatccggcgaatggtgccgcagcaatgaaagcctttgtcgttacccgtgtgggtgatgtcttcctggctatcggcatgttcattctgtatgacaatctgggaacgttgaacttccgcgagttggcgattttagcgccacagcatctggaagctggttcttcggtgattacctgggcgactctgatgttattggggggagcagtaggtaaatcagcccagttgccgttacaaacttggttggccgatgcgatggccggtccaacgccagtttctgcgctgattcatgctgcaacgatggtaaccgccggggtctacttagttgcacgtagtcacggcctattcttgatggcaccagaaatcctgcaactggttggcacgatcggtgcgatcacgctggtgttggcaggttttgccgcgttagtacaaaccgatattaagcgtgtattagcttactcaaccatgagccagattggttacatgttcctggcgttgggggttcaggcgtgggatgcagcaatcttccacctgatgacccatgctttctttaaggcgctgttgttcctggcatcgggttccgtcatcttggcctgtcatcacgagcagaatattttcaaaatgggaggattgcgtaaatccattccgttggtttatgcctgcttcttggtgggtggcgcggcattatccgcgttgccaattgtcactgcgggtttctacagtaaagatgaaattctgtggggagcaatgtcacatggtcatatcaaccttatgttggcggggctggcgggtgcatttatgacctctttgtataccttccgcatgattttcattgtattccacggtgaggcgaaaacaaaagcccatcctgttaaaggtattacccatcacctgccgttactggtattgctggtgctttccacctttgtgggcgcactgattgtgccacccttggcgggtgtgttgccgggaagccatataacggatcacacaggcaaaatgaccttggaagtggtttctggtgtgatcgctgtagcgggtattttgctggcaatggcgctgtatctgggtaaacgtcagttggtgaatggtgtggcacaaagtgctccggggcgtttcttctccgtatggtggtttaatgcttggggctttgatgttctctatgactgggtatttgttaagccattcaagaacattacacatgtattgcgaaacgatccgctaaattcactgatgaatattcctgcggtgttatcacgctggagtaacaaaggtcttagcctgagtgaaaatggacaggtccgttggtacgttgcctctatggggttgggtgcagtgctggttttagctctgctgctactggtttaatttaagggatacattgcgccatgctattaccttggctaattcttatgcccttcatcggtggcctgttgagttggcaggctgaacgcttcggtacccgtgtaccgcgttggatcgcgttaatttcgatggggttgactctggtgctctctctgcaactgtggttgcaggggggctacaccttggcgaatccgcaagggatccctcaatggcaagaagaatttgttatgccgtggatcccacgttttggcatcagtattcaccttgctctggatggcttatcgctgctgatggtggtgttgactgcactactggggctgatggctattctctgttcatggacggaaaatcagccatatcagggctttttccacttgaacctgctgtggatcttgggtggtgtgatgggggtgttcctcgctatcgacatgttcctgttcttcttcttctgggaaatgatgttggtgccgatgtacttcctgattgcactgtgggggcaccgaggctcaggcggtaagactcgtatcaccgcggcgaccaagtttttcatttacacccaggcgagtggcttggtgatgttaattgcgattatggcattggtattggttcactataacgggacaggcgagtggacattcagctatcaaaaactgctgaatacgccaatgtcacataccgttcaatacttgctgatgctcggtttcttcattgcttttgctgtaaaaatgccagttgtgcctttacatgggtggttgcctgatgcacacagtcaggcaccaacagcgggttctgttgacttggcggggatcttgctgaaaacggcgggttatggtctgttgcgtttcggtttgccactgttcccggaagcttctcatgagttcacaccgattgcgatgtggttcggtgtgctcgggatcttctatggcgcatggatggcattcagccagacagatatcaaacgcttgattgcttataccagtatctctcatatggggtttgtgttaatcgcgatctattctggcagccagcttgcttaccaaggggcaattattcagatgattgctcatggtctgtcagccgcaggtatgtttattctctgtgggcaactttacgagcgcttacatacccgtgatatgaatcttatgggcggcttgtggaagcgtgtgcagttcctgcctgcgttatcactctcttttgctgtggcgacactggggatgccggggaccggtaacttcgtcggtgaatttatgatcctgtttggtagtttcagtgaatttccgttaattataacgatttctgtgtttggtctggtcttcgcctctgtctatgccctgtatatgatgcagcgtgcttactacggtgaatcaaaatcagatgaaccactaagacgaatggatatgcgagaagtatccattgtaatggtgctgttgatattactggtggtgatgggtttctacccacaacctattcttgatacttcagcggcagcgatggataacatccagacctggtattcagcttcaatttcaactacaaggccgtaattcgccatgacaataactcctcaacaactgatcgcgctgttaccgctgttgatcgtcggattgacggtagtggttgtgatgctgtccattgcgtggcgacgcgatcactttattaacaccactctgaccgtgataggtttgaatctggctctgctgtctctctattttgtcggacagcaagaagcgatggatgtcactccactggttcatgtggatcgctatgctatgctctatatcggtctcgtactggttgcaagcctggcaacggcgactttcgcctattcctggctagaaaattatccagataacaaagaagagttctatttactggtgctgattgcgacagtgggcgggattcttctggcttgtgcaaaccacctggcatcattgtttatcggtattgagttattaactttgccgctgtttggtttgattggttatgcatatcgtcagaaacgctctctggaagcggctatcaagtacatgctgctgtctgcggcagcctcttctttcatgctgtttggtatcgcgttgttatatgcagaatcaggcgatctctcttttgccgcactggggcatcgtttgtctgacagctatatctatcaacctttgatactgtcaggcttgggtatgctggttgttggccttggcttcaaattatcactggtacctttccatctctggacaccggatgtttatcagggagcacctgctccggtctctacctttctggcaacagccagtaagatagcgatttttgcagtagtgatacgtctattcgttgaagcaccaatggcggatagtgaagcactgcgtacggtattaaccgttattgcaattgcttctatgctgttcggtaacttgatggcactgacccagacaaatatcaaacgtctgcttggttactcttctattgctcacttgggttatctgctggtggcgctggtggcggtacagaaccaccagctttcagaagaaacggtcggtatctatctggcaggttatctgtttagcagtatcggtgcatttggtgttgttagcctcatgtccagcccatataaagggccggatgcagattccctctactcataccgtggcctgttttggcataaacctattctgtctgcggtgatgacggtgatgatgttgtcactggcggggatcccaatgacgttcggttttattggtaagttctacgtcattgtgttgggtgtgaaagcggaactgtggtggctgacgggtgccgtagttgtgggtagtgctatcggcttgtattactatctacgggtcatggtcagtttgtatctgcctgcgccgaaagcgcttaatcgtgacacaccaaggaactgggcatcgactgccggcgggatggttgttctgatttccgcattattggtattggcgctaggtatctggcctcaaccgctgattgatgtaatacagcaagcgaaaattattctctaaatagccagtcggttgttacccattatttggaatataaaaacccggtaagattatccttaccgggttattgcaagttattgataacgatctcttttccctgaactgtacttcatacctgttttattcgctaatggtactaaatatcttgtattgcctgatgaagagttgggagccagccgtatttatttcagcagaatcccgctgtattgcgattccagattgtcaaggtagtttagctgatcgtgtatgagtttagtcaggttttgctgacgggcttgatcatctatggtctcctgtaattggttggcgaagatgctccatacttgctccagtttagttgcctggagtaatagagtggtacgttctttgtcgattttatgcacatcttctatactggcaatccgttgttctgcgccttttaattgggtttttaagtcgtcgctatctttagttaattgagcgatttgttgatctaatttgatcctggcatcagctagctcaacatattttagtcctgtggagatattgctcagaatctttttggtgatttcaattccttgtttgatcgcctgtttaataagttcttttttagggctagccagattcaatttgtccagttcactggcattgggaatatagtccttaaacatatcggccagattatattgacggataatgttttgactttcgatgagcttgtcgcgatctgggattaatttggccttatcctgccctttcttcgtgatatcagcttgcagttcttcttttctttcctgctcttctttcagacgctcttccagacgttctaaaataacgacattacgaacatcggcaattttgctggtcattatgttgctttcttcatgtaagctggaaatgacatttttaacatctttgttcagattgcgtacttgctctaaacgtgcttccaacagggtatttcgtgtctcgtcatccaattctgaattttccagagcagtatcaatttcgatgatggtctggaaatagtcttgaggcgggagttgtctcaggatagtttgtagttgaggtacagaggcacgagcggcttcgtcgatatctcgactgtataagcttatccgcagagttttttcctggatgatttcaatgcctgatttttgctggtgcgttaaactccagatgttttttactgcttgattcaaagtttttacactaatttctggataagtgatagttttctgagggaaagtaatgacttcagtcattttaagactcctttttttctataatcctatgtaatacggggaacgattagttatagcgatgtttgtattctttcaatgcttcatcgaaaaccctgactaattgtttagcggaaccttccacctctttccaagggtttatgacttgctggaatttagttataaaagaggtcaagttgagtgcatcgttaatttgggtgaatttatctttagaagcattaatctgggtcagcatggattgccacatgtaatccaaatggttcagagccacttctgcatccaataagcgggtatcaatgtcgctaaaatcaagggataaactagtaatagatttttgtaatgcgcgtttacctttgatgctctcttccaggctgcgtacttcttcgatcagcatgtttttacgttttcgtacttcttctgccttggaaccaaaaatgccgccagtaatagcgaggccgatcagtccccctacgataccggagaaagccaagcctacgaatttatcgtagtctttcttgagttggacaatttcctcttttttctccatgatcttatcgtccagatctccgatgctgaccgacatcttattgtctttcatcagctttcgcttattttcgacttgtggttgtaaacctagcgcaatgctgccgtttgacaatctgccgccaatcagctttagcttgaaatcggatacttcggttttgaccttttcagttttctcacgctgtttttcaatatcatttttcatggtgtcaaggatttcccctagagcagatgatacttctctgtcttcatgggtgtaggtgatccgggcgagttgtttctccgatatttctcctaatctcctttttatgcgtgtgataattggcatttcattaatgatgctaatgatattctcacctgtttcggtgatttgtttaccaataatttccaggtctatgctctgttgcagaatatcgttttccacatcgctccagctaaacgagtgagtgcggatttcttcaaacaaagtgtgaatatcttctggttctaatccggcgatatcgatcttttgataatccaagtaactcttcacttcctcaagattaaaagggagtgatagaccttttttaacatacagtttgatattaattaggtcttctttggtaaatattcctccggggcgtgcaacaccttcttgtttaccagtcagtaattgcaaggtagccgagggaatatctgtttcgttcagtgttttttccgctgaaagttgagctaataacatatatttctccattaatggttcttgctttattgaaaaattattaaatacatcaaggcacaaccgaacgtcataatactcatgttgttaaattaacgttgtgttttttattgaataatctgaattaaaaatacatatatttgcatggttaattgttgtaaaaatagtttaattcatgagttttattaaataattgtctgaatttttgtcaatcttaaattaaattatttatgattttggtatatctaatatatgaaattaaatagtatgaatttttattattttagtaattaaatgtaaaaacaatcgtttgcctttcttttttatatagtcttaaatttcattctttaattgatgctaagattataaatataaaatattttaatgttatttttgttaaaatcgttttaaaacaattggttgtgttgtttttgtgatgtgacgattatataatttctatattattaatttaaaagataggtaatatggtttttttatcaagaataagttagatgttttttgttttgtcatttatggtatgtttaaaaaatagatggaatagcatcctattttccttatgtcattgaataaagtttttgttatttttagatctatattttaattaaagtcttaattgtttatctgatggtttaaattaacaaataagaaggatttttttataattatatttggttattatagaagtgacatctgttttttatagggtgatttttttagaataataaatgtttattccgttgtttataataacggtatttatttagtaaattttccgtagtaagtaaaagagtcgtttttttataaattgcatcgtgaaaattgattatgctaatgaacttaatatttgttatcggaatggctgggtctctgatttagcctgtttcagtattgagataagagcatatcgctaacggaatcgaacaagcagccaacaaagaggcaacttgaaggataacgggtataactacataaataatcagggctttaattattattaatgccccgtataatcctactttctatcatgtcttttgaggcagaagtggtgaatcaaattgctaatgttgtcgctgatgtatgcaagactctgaataataaacaagttagcgaagttggtatccaacagatttcatttcctctgccagcaggttgcagcacttactggctggaatggctggcagcgcagtctcattatccgcagttctattggcatcacagagagggccatgaagaagtcgccgcttgtgggcaaattcatcttttcagtgatattgctttagccgaaaattttttgcagagaaaccgtcagtttccacggatacggatctgggggctgaatgcctgggatcggattcaaccagcccgtattacgcaatccgatgcaggggaagcaggttatctgtttttgccccgcatcgaattacgccgctaccgtgacgaaagctggctgtatttaaatatagctggccggcaggatatgaagaatgcacaggaatttctgcaacaattagttccgcatcaggaattctctgcattacaggcggtggtagtgaacgcggagaatgtgccggaacgcgcccgctggtgtgatttgattgagcaggctttggacactatcacccatcgtaagatggagaaggtggtgatggcgcgtaagacacaactcgaactgagtgaatctttagctgctgcacagtttatggcagcgagtcgccagataaatcactgttgttatcattttatgctagcttttaatcagcatgaggcatttttggcgtcttcaccagaacggctttacctccgtaagcagactcagctttatacagaggcgctggcggggacggttgacaattctgatgatgctcagcaagcccaaaaattggggcaatggttgctaggtgataaaaaaaatcagcatgaaaacctgctagttgttgatgatatttgccagcgtcttcaaggcgctgtggtttctgtcgatgttgctccgccagaggtgattcgtttgcgaaaggttcagcatttgcgccgccgaattcagggaaaactaaagagtgccagtgatagtgattgtttgcatcgtttacaaccaacggctgcggttgctggattacctcgtgaagcggcgcgtgattttattcgtgatagcgagttattcagtcgtgattggtatgcagggtccgcaggatatctttcctgtgaacagagtgagtttgcagtttcactacgttgcgcacaaattaacaacaatttactttcactgtatgccggtgcggggattgtgatggggtctgatccacaacaggagtggatagagatagagaataaagctgccgggctgcgcactttactgaaaggtgaatagttaaatctccgatttaatggcaattcattgaactaggataaagaaataattatttgcgccgttaggctaatagtcagcttttatagaaattctttgagtaaactatgtcaaacagcgcatttaaccgccgctgggcggaacttttattggaagctcttactcgccacggattacgtcatgtttgcattgcgcccggttcacgctccacgcctttgacaatcgctgccgcggcaaataacaaactgatttgtcatactcattttgacgaacgtggattagggcatctggcactgggattatccaaagcaagcagagagccggttgctgttatcgttacttctggaaccgcggtggcaaatctctatccttcattaattgaagccagtttaaccggtgaacgaatggttttccttacggctgatcggccaccagaattgatggattgtggtgcaaatcaggctattcgtcaaaatggtatttttgcttctcatccatgccaaacaatttctttgccaagaccgaccgtagatataccggcaagctggctggcttctgtcatagatcatagtatggcgaatttgcaacatggagccgtgcatattaattgcccatttgccgaaccattatatggtaatgaagagcctgcttatgatgagtggcagcagcagttaggtgattggtggaaaagtaaaacaccttggttgagccagccagtcgctaaggttgtggcagaagttccggattgggactgctggcaacagaaaaaaggcgttgtattggctggtcgaatgagtgccgaagagggagttaatgttgctaaatgggcaaaggcattgagctggccgctgattggcaatgcgctttcacaaactgggcagccactgccttgtgccgatttatggttggataatcctcatgtgcaggagattttagcgcaagcgcaactggtagtgcagtttggctccagcctgatagggaaatgcttgttacagtggcaagcgaaatgccagccgcaggagttttggattattgatccgatacccggtcggcttgatcctgccaatcatcgtggcaaaaaattgacctgtcatattgctgactggttactggctcatccggcacagccgtgcataccgtgggcacaatcgtgtacattgtgggcagaagagctcatcgtttggtcagaaaaagccgttaactgcgtcagaactgaattggctgggaaattcggtgaagcaacggtggcctatcgattgcgtgaattactgcctgaacgtgggcagttgtttgtcggtaacagcctgattattcgtttgattgatacactgggacaattaccggcggggtatccagtttacagtaaccggggcgctagcggcattgatgggttaatttctactgcggcaggtgtacaacgggcaacggcaaagcccactttggctgtgatcggggatttatcggcgctttatgatctcaatagcttggctctgttgcgtcatccttccgctccaatggtattaattgtggtaaataataacggcgggcagattttctctttactacccacacaggaagaagcaaggcagcgtttttactgtatgcctcaatacgttaattttgatcatgctgcggcgatgttcggcttgaaatatgccagcccacaaaattggatggaattgcaacaaagtattaaacaggcatggcaacaaaatgaaaccacactgattgagttaaaagtgccggatagagaaggggctgagtgtttgcaacaactgttaaaacaggtggctatgttgtgagtctggtttgtcgcaagttcaacggttacaacgaccgcccttggctggtttggttgcatggattattgggctgtggtgatgaatggttgccgttagtgaatctgtgtgctcaacatccctcattggtcatcgatctgcccggtcacggtgattccactgacgtgcgggtaaaagatcttctggaaatgagttgtcttttatctgaaacattagcagaacagagaattagtcaatactggctgattggctactccttgggtggacgcattgctatgcatcatgcttgttatggtgatattcggggattatgtgggttactgattgaaggaggaaatcctgggttattttcccaacaggagcggaataatcgtcttgaacacgatagaaattgggccggacgttttcgttctcagccgattgaacaagttttatctgattggtatcaacagccggttttttctgatctattacctgaacaacgtcagcaactgatcaaagtacgccgtcataataatggcgatggtgtggctaatatgctggaaaatacctcacttggacatcaaccctggttagtgccggtattgcaacaattgacgttaccttttgtttatctgtgtggcgaaaatgataagaaattccaacatttggcaaaacgttgcgctttgccgctgcaaaccattccacgtgttgggcataatgctcaccgggcgaacgcagtggcgtttgccgcggtagtaaaccattttttatcactctttaataaggaatacgaatatgatttacccgagcgaagaagaactttattccccaattgtatggcaggactgctctgaagggtttgaagatattttttatcacaaatccaccgatggtatggctaaaatcaccatcaatcgcccgcaagtacgtaacgcattccgtccattgacggttaaagagatgatgcaggcgttggataatgcccgttatgatgacaatatcggtgtgattatcctgacgggtatgggtgaaaaagctttttgtgctggtggtgatcaaaaagtccgtggtgatcatggtggttataaggatgacaacggcatgcatcatctgaatgtcttggatttccagcgccaaattcgcacttgtccaaaacccgttgttgctatggttgctggatatgcgattggtggtggtcatgtactgcatttggtatgtgatctgaccattgcggctgataatgctattttcggtcagactgggcctaaagtgggctcttttgacggtggttggggggcatcttacatggcgcggattgttggtcagaaaaaggcccgtgaaatctggtttttgtgtcgtcaatatgatgctaaacaagcgttggaaatggggctggttaatacagttgtgccatatgtggatctggaaaaagagaccgttcgctggtgtcgtgagatgctgaaaaatagcccaatggccttgcgttgcttaaaagccgctctaaatgcggattgtgatggtcaatctggcttgcaagagctggcaggtaacgccaccatgcttttctatatgacagaagaaggtcaggagggacgtaatgcatttgttgagaaacgccatcctgatttcagtaaatttaaacgtaacccataatgcgtactgcaactttataccggttcagattgccaatggaggccggtgttatcctgcgatatcagcggcttaaaactcgtgatggttttttggttcacttacaggaaaatggtcaacagggatggggtgaaattgcaccattgccggaattcagcaaagaaacagttgaacaggcaggtgaagccgcggtggcatggcttagactgtggcatcttggcgctgaacctgatgaaagtgaattaccttctgttgcatttgggattagctgtgcattagctgaattacagggtaacttaccggaagaggctgattaccggaaagcgcccctgtgcaatggtgatcctgatgaactgattgttcgtctcaataacatgagtggacaaaaagttgccaaagtgaaaatcgggctgtacgaagcggtacgtgacggcatggtcgttaatgttctgctggaagcggtaccggatctatctttgcggctggatgctaaccgtagttggagccgcgctaaagcggacagtttcgctaagtatgtcaatcctgattaccgcaaccgaattgcctttttggaagaaccttgtcaaacctcacaacaatcgctcgcttttgcccgtgataccgggattgccattgcatgggatgaaagcgttcgtgatgaaggttttaacgtagaggcacaagcaggggtgacggctattgtgatcaaacccactctgacaggaagccttgcccgttgttgtcagttgatttcagccgcgcacaatgtgggattggaggcggtgatcagctccagtattgaaaccagcttcggtttgactcagcttgcccgtattgctcattggctgacgccagcgactattcctggactggatacgctggaattgattcagtctcagttggtgcgccgttggccgggtagcacgatgccagtaacaagattggacgagttagcaatcgcatggcgcagttaaatccattttcccagtggccgtggcgctactgggcagcgtttagccctgaaaatattgctgtcaagttgcgtgatcggtccctaacttggcatcaattagttatctctttggataccatagcggccaattttcgccaacagggggtagttgaaggtagtggcgtaatgttgcgaggaaagaacagcgaagagatgttgttttgttatcttgcggctttacagtgtggtgcgcgagtattgccactaaatcctcaattgcctgaaatgctcttggctgaattactgccacatttgaatatcgattttgtggctgatttctgtagtgataatgtgtctgtcatagatgccaaatcgcttaattggcaaagtgaaccactaaattctgctgataattcggtggaatgggatgctatgcgcccagccagtatgatactgacctccggctcttctggattgcctaaagcggctgttcactcaattcatgctcatcttgccagcgcgcaagatctactttcagtaattgaatttcagcaacgagatagctggttgctctcattgccgttgtttcatgtatcgggtcaagggatcatttggcgctggctaatcaaaggagcttctttagtgctcagaaatactcatctgttagatcacgctttagccgattgcacccatgcgtcattggttccgactcagctttggcggttactggaacagtcacaaaatcagtccctgaatttgaaacaagtgctgttgggtggagcaatgatccccattgaattgactcaaagggcggagcagcaaggtatttgctgttggtgtagctatggtttgaccgaattggcttcaacagtatgcattaaacgggcagacgatcttcccggtgtcggtaatcctttaccgggcaaagaaattcggctgataaatgaggaaattcagattcgttctggcagccttgccaatggatattggctggatggtaaattacaaccgttagctgatcgtgatggctggtttcatacccgtgatcgaggtgtgatacaaaatgatgagttgcggatacttggccggatggataatcaatttttcagcggtggagaagggattcagccggaagagattgaacgggtgattaacacctacccgcaggttgcacaaaactttattgttcccgtacctgaccctgaatttggttatcgtcctgtcgcggtcatagatagtcactccactgaagttatcgacttattaccggaatggttgattgataaactggctgcttttcagcgcccggtcgcttactatttgttacctcaaaagtttaaaaatagcggcattaaaatttcccgtcagcaaatcaaaaaatgggtgttggatttgccaagtttatattgagttattttgatttgttttcgtactgcccattatcactaatggagtcatgggcagagatggttaaaagacagtgttgttagtcattaccctttgatttttttcagcgcattttcaacaccagcgccatattctggatgaacttttctaaatagctcaacctgacggcgttgagtatcttcatgtgcttgtgacagttcactggcaatacggtcaaacatacgttgatgctctttactgtttattagcataaacagtttacgaggttgactgaaataatcttcatcttgacgatggttccagtgatcggcatctccttctaaagacaatgatgggtgtttgaattcaggttgttcctggaacaatcctgcattgtttggttcataagtcacggtgtttccgctgttaccatcgacacgcattgccccatcacggtggtaattatggaacggacaacgaggtgtattgaccggaatttgatggtggttaacgccaagacggtaacgttgagcatcaccataagagaacagacggccttgtaacatcttatcaggggagaaactgatacctggcacgacattagcagggttgaaagcagcctgttcaacatctgagaaatagttatcaggattacggtttagctcgaaataaccgacatcaatcattgggtagtcgccgtgaggccagactttggtcaaatcaaacgggttgtacggtaacaagttagcttctttctctggcatgatttggacttttaatttccagcgtggataatctccttgctcaattgctgcaaacaagtcacgttgagaactttcacgatctttacccaccagcgcttctgcttcttcgtccatcaggtttttaatgccttgctgacaacggaaatggaatttcacccagaaacgttcattatctgcgttgataaagctgaaagtatggctaccaaaaccgtgcatatggcggaaagacttaggtacaccacggtcactgaaatcaatcgttaattggtgcagtgattcaggttgatgagagaaaaaatcccacttataggcaggattacgtaagttagtgtggggatcgcgtttaacaacatggttaagatccgggaacttcagtggatcacggagatagaatatcggggtattgttgccgactaaatcccagtttccttcttccgtatagaacttgagcgcaaaaccacgaatatcacgttcagcatctgctgcgccgcgttcaccggcgacagttgagaaacgggcaaacatctcggtttttttgcctatttcagaaaaaatcttagcgcgagtgtacttagtaatatcgtgagtaaccacaaagacaccatgagctccagaacctttggcatgcatacggcgctctgggatcacttcacgatcaaaatgggcaagcttttctaagaaccaaacatcttgtaacaacataggaccacgttgacccgcagtcatgacattattgttgtcaacgacaggggtaccagcattcgttgtaagccctctctttttcatcacacttctcctgttttacatgaaaaaaaacagcggaatcgctgattaagaaaaacattctggtcaaatggcgaaatgcaaatattgtgtttttttataatttatttattattttcttgtttattgtttagaataaaactatttacataatcaattattaagcaaatgaaatgaaaaattcacacatatttagtaagtatagatgattcatttctttttgttgtctatcggtttagttgtatttacgtaagatgtttaacattaagtaaataaagaggaaatataatgaaggtttatcttgccgtggtagcgaccagtttgttgttcattgctgagtcagcgaatgcaatttccgtgaatgttcaggcgggtcgccatttcacccatacttctgcggcaattggtgataacagtgccggattatccttgaatggcaactgggcacgcagtgatcataacgggcagttgggaagtttgggaacagcatttagcctgcctgttggtccattgacggccagcatagggggtaaggctctctatttatcccctaaagatgggaaaaatggtgaggcattagccgcaggtgtaggtttgagttggactattatgcccgctttagcgctgtacggtgaagcttacggtgcgccatccagattaacttcgggtattgattcttatgttgaggctgcgggtggcttacgttttaccgtatttaaaccgttgacggtggatgctggttatcgggttatgaacatgagagggaaagagggaaatagggataacaaactggctgatggattttatatcggtgctggtttgaatttctaatttacttttgcgttttgtccgcaccattgctgatgcggacagttaattaacctacttctggcagtaaaccactgacaatacctatctggatggtaatgaccgtaattccgcaaagaaataccagaatcagaacgggttttccgccttttacccgataggctttttgttcaatttgacgactgcgccaagccagcatggaaggcagtaacagggcgagaatggacagtgcaactgcggcgaaagttaacgccataacaaagtttggatagtacaaggagcaaagtagtggtggaacaaaagtcatgatgccggtttgcaggcggcctgtcgcattattacggcgtttgaacagatctgccatatagtcaaacaaacctaaggagaccccaagaaatgaggttgccagtgccaaatcagcaaacagacggacagcaagctctacacgaggcgtcgcgacaacttctctcaccgcttttaacagtccattcagccctgattgctccgctaagatgccgacaaaagtatgggaagagatggcacccagagtggctaattgccataagatataggcagtcagtgggatagcactgccgataacaaatattttgcgtaacttacgggtatcacctcccatataattgacgatacttggcacactgccgtgaaaaccaaaagaggtgaataccacgggaatagctgataataccaaaccttgttccaaaggcattgacatcaagttagtgcttttgatgtggggcatcatgacggtcagcataataaccagaaagatgatttttgccgtaaatagcaggcggttaatcatatcgacagattgagtactgatagtgacaacacaacccgcgacaagagtgaaaatcagcacaccgtatgaaacaggaataggtttatccagccatgaagagaggctgcctgacagcaactcacctgcaccactgatataagcggttgtcagagcatacatgaggaaaagcatactgaaaccggtgagccattggcctcctcgcccaagataacgttttgccagcgttcccaggcccgtatcggccgggctgtattgataaacttccaccaacaataaagcggtatagctcatcaaaacccaaagagtgattaacatcacgaaggttgttccaaaaccgacaccggctgctgccagcggcatcgccagcattcctgcgccaattgtcgtgcccgctacgataaaaatactgccaagagtacgattcttcacgctttcccctagtttttgaactgattgaaatcgttatgaaaaggcaggctaaaggattaacttattcatgtcaaactacagttacacttagtgtaaataaataattacaattgtgtttttgcatgatcgtaaatgatgtatttcattaaatataaaaagttacttattctattaagtatttaaaaaaccagactttattcacacttaaataagaaagttttttattttcatctagattgctaattaaaataagacgttattcattatcttaacaattaacgtatggtgaaataaaaattatcaatggaaagaatatctgtttgttttaggacattagttgtatctgttctattcgctatatcggggcaagcttatgcttcagcgtttattggcccggcggatcaagaggttatcactcaacaacagaaagcgttattgcagcaggctcaacagcagcgggaggcgttacgtaacaacatcactttgtctccagctttagagcacgaaactgatggtgctaaatctgtttgtcataccatccgctatattcaatttgaaggtgttgagagcctttcccaatcagtaagggaaaagttaatacagtcttatttatcccgttgcttaaccttgccagatattaatgaactggtgcgtaaagtatcgaatgcctatatcgagcgaggttatgtcacttctcgggctggactcagagcacaggatttatccaccggtacgctcattattaccgtgagtgagggcaaagttgaatcaatcactcttgatggtgagacatccctttcattgaaaatggcctttccgggaatggttggtaagacattgaatctacgggatattgaacaggggatggaacaactgaaccggcttccttcccaacagataaccattgatattcagccgggaaaacagcccggttattctgcggttatcttaaaacgaatatcgactcgtttgccggttggtgccagtttggggatagataatagtggtcaaaaaagtactggcaccgggcaaatcaacgccagtgtgaatgtagataacctattacatcttgcagaccaatggtcattatctgtcagtcgcaacaacgattttcgtaataaccaccgtagtcgaagtctctcttccaatgtgacgattccttatggtgactggttgttcaattatcaatatgcgtggaacgattcttttcaggatattccgattggcttacaaagttaccgttatgaaggtgacaaccagactcaccggctagcaataaaccggacgttgtatcgtgacggtgaacagaaactggctctgaatgcaggaataacacatcgtcagacggctaatttgtttgcaggaaagaaattatctatcagcagtccgatattaagtgttgctaatcttggtcttaattacagttcggtactggcgggtggctatatcactttcaaccctgcattgagttatgggttacccgtgttaggtgcaacaaaagatgacccgtatttcccagatgctccacgtagccaattccgtaaattcagcctgagtgttagctattttatcccgatttccgactctatttattacctttcatctgtttacggtcaaaccacaccgtacaacctttatgccagtgaacgtctctcattaggcgggcaatactctgttcggggatttaaagaacaatacctgaccggaaatcgcggtgggtattggcgtaatgaactgaattggcaaatttcagagttgcctgtgctgggtgaactggccttaacgggggcgctggatacgggttggttacagggaaaaaccagacaaatcgatggcggtaatgttaccggtactgcgcttggcatatcactgacgcacagtaagttcaatcaaacaatgacattgggaacacctctgatttatccagaccacctgaaaccggataactgggtagtttactggtctgtatcactgattttttagcgatgtaatacaggtatttatatcaataactttgtacttaaattaagaaaggacagaataatggaaagacgtaacggccctatggcaaggggagcttgttatcttttaatttatcttactgccgtatatccccttcatcctgctattgcagccgggatcacgccagataataaccgaacacaggtacaaaaccagggtaatgtgccgattgtaaatattgctacgcctaatggtgcaggaatatctcacaacacttataaagagtttaatgttgcgactcagggtgccgtattaaataacgccactcaggtggttaaatcacaattagccgggcaacttaacgctaaccctaacttgaatggtaaatcggctgaattgattattaatgaagtcaccggtagtggtcgatctgatctccaagggaaactagagatagttggtcataaagccaatatgatgattgccaaccctaatggcattacttgtgatggttgtggttttatcaataccggcagtgcgacattgaccaccggtaaacctcaatttgataaacagggtgcgttggaagcattggaggttaaaaaaggccagattactattggtggcaaagggctggatggtaagacaacggattatatcgatattatcagccgggcgactgaattaaatggaaaaattcaagctaataatttatccctgacgcagggagctaatcggattgattttaacgatggcacagtgaaaaaaatcactggagaaggtgttaaacctcaattagccgttgataccaaagcattaggcggcatgtatgccaataaaatccgtttggttgctacggaagatggtgtcggtgttaatcttaaggatttaatcagcaatcagcgtgatattaccttaaacgttaatggcaaaattgagctgggaaatgccaaagccaaaacggattttaatcttagcgctaaagagactcatattgcgcaaaatatcaaggtacaagcggaacgggatattactctggcaagtactaaattggataataaagggagtgtaactgcgggccgggatatgcggatatttggtgataccttgcgtaataccggtgataaagcacttttgcaagccaataataatatgtggttacagaaggatgctcaggggaataagagcgatctgattgaaaacaagtctgcaacgataaagactgtgaaaggggatttggttgttcgcactgataaactggataatataagagatcaaaccataactgaatggaaaaccattccggctgactccgtaggaattaataaatgggctggtagtttttatggtatcaggcaaggtgttgattccgtcattacattggctgtaaaattgaaagattttaatcgggataaatggtttggtattatcgatttattaaagaataactttgtcaatattaaacaggatagattttcaataaaggcgataagcccagcagggagcattgtttctggtggtaatgcttatattaatgcaactaatttgcgaaatgatgtttcatctatatatgcgaaaaaagatcttattctcaccggggaaaatattgatattatcagccgtcaattaggtaagaaaaatacattttggcattatactacatcaaaccctatggctggcagtgaattcaaagatgatgatgcaccaccgggtgattgggatttattttatgtttatgaagatgcagaatatactaagcaaggagagttatatacttggggggaagaaagttatatatcgtcttcaattagtgcggaaaaaaatctagtagcggattttaaaaacaatttaaatatcagtacgttgattcctgataatgcaaaaaatctgtcagaagtaactgtaactgcccgacctgacacattatcagcaaaaaacattttgcttcacgcaggtaaaatcaatatcactgataaactaaaggctattgatgggttaaatattatttccgagaatgatattaatcttaataatgcagcattgatttcgtcaaatagcttatctatgacagcaactaataatattaatgctttgcaaggtgaactaaaagccaaagatgtaactattatcagccgcaacgggaatgttcagtttcagagtagtagcaaaccagggtattttaatcctgataatacgcgtaaaataagtagcttagaagctacgggtgatttactcttacatgcaggtaagaacattcttcttcgcaatatcctcttaacgaaaagtcataatatttctttaactgcaaatcatgatattaccattgataataacagtgagttattgacacataaacgaatgggggatgtgagcgctgagagtaaggaacaaacgctgtttaatcagatgttatctacaataggtaagcttgatgcaaaaagctcggttgtcattaatgctggaggaaatttatttattaagggagttaatgtttcagcggtaaaagatatcaacttgaccgctgcaaaaaacattgatctcactcctcgtgaattatctccttcactgaataaactattttccacatcccgttctggtgaattaagtagccgattaaccgcaggaaataatatcaatattatcagtggtgccgatatcaatggcaaggcggctcaaattaacgcgaaaggtaatacattattatcagcaggtcggaatattaacttgttagctctgggctattccgctattgataataagaacgataataataaagatgatcgccatatcgttgctgtagttaatggtggaaaacagcttaccttagctgctaatggaacgctgattacccaaggcgctacattaagctcaggaggaaatacaacgatttcttccggcggcaatatgcgttttgaatcagtgcagaatcactcttaccgggaaaaaggcagggaattcactgaatcagtcacacagcaaggtactgcattgactagtggcggtatattaactgttatttcaaacggcagtattcttttccaagccactaaactgactgccaaaggtgcgatggacgtcgcggcgaaaggcggttatctgtacgctcaggcaatggaagaatctagccactatgagaaaacagaaaccaaacgtaagtggtatggcaaaaagaaaaccattaaacgtacccgtcatgatgtcactaataaagtcactgaatttactgcgggtggtgatattaacctgttaagccgggatgatagcacttacgaagccagtaaaattgcgactaataaaaacgccaaactgaccagcactcacggtaaagttaattttaaagcagtaaaaaataccgcttttgaacagactattacctattccaaaggcttttatattaagcaaagggataaaggttataccgaaacccaatgggtattaccgcagattttcactggtggaaaactgacagtggaagcagccaacggtgttagtgctgatattaaagctaaaaatggtcagtcattgcaaaatgtattagccgtattgggaaatacgccagaaacagcttggttgaaagggcttcgagaaaataaagatatccagtggaatgtggtcaaagacgcttatgacagttgggatcacaagagccagcatttgaatccagtggtttctgcggtaattgcgattgcagcggcggcggcaaccgcaggcagttctttagcggcatctgtcgcatcttatgcgggtaatagcgttgcgggtggggcgttaactgcgggaatgtcatcactggcggcacaggcggcggttgctattgtggataatcagggggacatatccaaagcgctaaaagtattaggtagcagtgatgcggttaaatcaacaattacctcaatggcgattggtggcgcattggccggatttgattcctacatgggatgggataaagcggctgatggtaccaaattagatcccacaaaagcgaaattaccccaaatcagcaatggtgattggaataaagtcgtccaacgggtagcgggtcaatccattattagttctagcttgaataccgccattaacggcggcagctttaaagataatttgactacggctctgttggctaatattggcagccagattaatgcggaaggtgccagattaattggtgacaacggcgaagtgcttggagtgccgggtaaaacgttaagccatgcagttgtcgcagggataagcgctgaaattggcagaggaaatgttaaaggcgcaatggcaggggctttggctgcggaattggctggttctattatggataatagcttgtttgagcctaaatttcgtgatgaatcagaacgtcagttaaataagctaataaaggctatgtctgataatgaatctaatgcccagctagcaaaagtttttggttcagtagcgggagcaatagtaacaggaacgccggatggtgcttacagtggtgcaaatgcatctgagatagtttttcgttataactatattgatcatcagcttactcagttagcgttagaaaaccaaaaagatatgttggctgcaatggaaggtgataaagaggctttaattcgtgtggaagctcgtcaacaagctgcgttagcagttatggattacatccctgtcattggcgcaacgaaaggattttatgatgcagagaaattggaagattatcttcttgctacgctcagtgttattcctagtgggaagttatcagtaaaaatcattgaaaaacttaaagttgcggttaaagctaaaaatgcccctgaaacaaggatattgttgaatgaaattaagcgtgatattagtaagtcaggaacagtatgggattctataaaagcaacacagcctgcaattcctggaacatcaataccaaaatcgtttgagatgacggtaaatggaaaagttgtatgggttaacccaaatgcaaccaagcatatggaggaatatctaacgcgtaatggattgtcacacagcacaacagaagggagccaagctatgttgtcaagtcttcaacatgcgatcaagaatgcatcatctcaaggtttgaagtttaatgaaaaaatgcaagtaggtcgttgggagttaatatttagtcagcgatctacagatccttatccagtattaaaacatgcgttgtataaataatgatgctgaaaataatcaagccagtaaatgatcaggaagtaatcattaatattgatggttacacacctattgatatccaattagttgataatataaacgaaactcctttatattggagagttggtgatgataagaagagtttattagagtttgctattttgcctagtaatggcagaattgcagcgattactttggttataattaatccagagtttattcaatatgcagatgattatcttattgaatcatatgaaagtaaatgtggttttcctatagttgatgtgaatatatggagatttactgaaaataatgattttaatcatcgttttatcgatgaattcaattgtgtgattaaagcattgatttatcaagaatctataatgttggtcataaaagagaaatgtatgttatccagttggattaaatgtagcaactctttgtggttgggattggacgatgatgaaaatattgtaagtgttctaataagaggattatcaaaagaagatatcaataatttctttaattctattagttagtgtatatcaagctaattttatcttggattgatatgcgatattgctatgtagtaaaaatgggtaacatcggtttccataccgatgttaccaaatatatatttttttattaccttagatagtctttgtgttgtattaggaaattttttactgcttactggatctatccaatggagtcttgcgattgaaatagtatgggtatccttttgaggattttgttgctacgcaaatgccagcaggttctcggttgcctgaaaggtttaagacttttgatttttatgatgaaaaaacaggtttggctaccagtgtaaaaacattggatacacgtactgcttcaaaaattaaaaatccaaaacaactgtatatttccataaaaggaaatattgatgataccattcgtttcattgatgaaacaaaagcaggtgtaaatgtcactgctaacatgatatctaagcgtgaagtgagaattgcaatacctaaaactaccactcctgaccaatgggagcaaatcaaccgagccattacttatggtgcagagaaaaatgtaagtgtcaaaattacggtggtgaaataatgagtgagatttttaaacgatggcggaatgccagatgtgtatttaatggtgatttttattcaataataagttattcgggttatcgttcactgaatttagaccttttagggggtaaccatatgttatctcctgatatttctgatgaggagctaggcattgtaattctggatgctctttctaaaagtcggctgattgatcccgatgataatttttttgacaatgaaaaaaaggctgagagatataaagaatgggttaaactcttaatggaaacttacaattattgttcaaaacgtcagctttttaaaaaaatgcataattgtggaatccaattgcttgatggccaaataacgataagaccatctagccatgaaaaattggaaggttggtctggagatggtatttctgtagctgattatgtcgtgattccggcagacagttctcctgaggaagttggagcagcattacggctagctttttcacgttgcagaagttatgtttgacgataaatgaacagttgtttttgcactaaattgatcatgatctttgatttatagagttaattaaggtggacacgtagtagttattatgtgtccactaattatctcgaaaagattcaaatagttattaaataagccttactgctaaaattacggtggtgaaataatgaatgcagattttaaacaagggttaaatgcaagcgctatgttcaacggggatttttattctgttaaaacttattcaggcaatggtttattgagagcggatcccttaggtagcaaacatttactacagccaattgtatctgatcaagaattaggaaaggctgcacttgatgctttatcaaaaagcagagtaatcccacttgatgaatgtgaggattattttgatcatgatgcaagtgatgagcagtataaaaattggataacggagatgatgaaatcttatggctatcgttcaaaacgccgattatttaagaaaatgttgagttgtagtatttgcatgcttgatggtgagataacgatacaaccatctagccatgaaaaattggaaggttggtctggagatggtatttctgaagctgattatgtcgtgattccggcagacagttcccctgaggaagttggtgcggcactacggctggctttttcacgttgcagaagttatgtttgacgataaggtaacagtttgtttttgcattgattattcatgatttttgatttagagagttaattaaggtggacacgtagtagttattatgtgtccactaattatctcgaaaagattcaaatagttattaaataagccttactgctaaaattacggtggtgaaataatgaatgcagattttaaacaagggttaaatgcaagagttaaatttaatggtgatttctattcagtacaaacctattcaggcaatggcttattgggagcagatccctcaggaagtaattatttattacagccaattgtatctgatcaagagttgggaaaggctgtgcttgatgctttatcaaaaagcagagtaatcccgctggataagtacggggattattttgatcatgatgtaaatgctgaacagtataaaaattggatcaccgagatgatgggatcttataattaccgttcaaaacggcagttatttaagaaaatgttaagctgtggtatctgtatgcttgatggtcaaataacgatccgaccatcctgccatgagaaattggagggttggtctgaagatggtatttctgaagctgattatgtcattattccggcagacagttctcctgcggaagttggtgcggcattacggctggctttttcgcgttgtagaagttatgtttgattaaagaacctaagttttatttcgtaactgatcatagcaatatctattatataaaatcatcaatagacagaatatatagtattatttggtcaagaataaatattatgaatagtaaaactgttttagttgataaaaatggtaataaaaagaagttaataaagtcttttagaccatttattaacttccgatatttttaatgaactcatatatatttggtttttattttcctctaaaaactaatttattcatttttatattgtaaataattattaattctatagtcttttaatacttggtctattacccaactggttcgtgagcctgattctcctgttgatgggcaaaatccttttccttgtaattcattaattattgtattaatcaatggcatttctatatgctttggattatcaatattaaattggtgtaatttattattttcgtcataatatgaaatggctgaatttccaaatgtagagaaagatatttttcctttagtaccaattatttcaacattatctcctctagagttcgacacaaaattccatatacccacaccttgaatattattttcaaacataaatgacattgatacacaatcttcagcgggataagcattcccttgtgaatttgcatgtcctttgacagaaataatctttcccaaaagaaagtctaatatatcaagagtatgacatgctaaatcaacaaataacccaccaccggaaatttttggattaacaacccaaggtaaatgatgaggatcttggtaacatttctctatctctctgtaaagtatacaacttacaattcttggtgttcctatcgcacctgactcaattaattctttgatctttaaaaatcttggtaatgctctcctataataagccacaaataagggaacattttgggatttacaaatcgcgatcatctcattacattcttcgaatgttaatgccataggtttttctacatatattgctttaccagctttagccgctaaaatggtatattctttatgtgtagagggaggtgttgcaatatatactgcatcaatgtctttgtcattaataagtgaattagcgtcagaataccatttagggacattatgtctcttagcaaaatcctctgctaaattagcgttgcgccgcattactgcaactaattcagaattatctaatttataaaaggcagggccactttttacttcagtaacatcaccgcaaccaataatgccccattttattgtttttttcattttattttcccaatatgtttatatcgaattctttcttaataaaatcttggtggagattataatagaattctgatttatcccatttttttcgttccaatatatgattatataacatgttttttacttctgaatcaaatgttaatgccataggtttttctacatatattgctttgccagctttacctgatttagccgctgatttctttccaactctttgctaatgggttttgattgaatgcaattagctctctttctatcccacatgcttgcagccatgattgcaataatatatattgattgcaatgcatgctaaatgaggaaatgaatctatgccatccattactgtcagaaatgtaccggacgaagtgcatcgtgccttgcgggtacgcgcagccacacatggccgtagtgctgaggccgaaatccggtttattctggaaaacgccgtacaaccggaggggcgcatcaagctgggttccttgctggcaaaaatcggccgcgaggcggagggcgtcgatcttgagatcgagcgtgataagacacctgctgagccgatgagttttgaatgatactgctagatacgaacgtggtttccgagccactgcggctcagcggccaccccgctgtggttgcctggatagatgaacagaatgtcgagacgctttacttggcagcgatcagcttggctgagcttcgctttggggttgcagcgctgtccaatggtaagcgcaaagataccctgcatagaaacctagagcggagtgttgttcctttatttaccggtcgtatcttgccattcgatgcggccgcttcggaagcttatgccgagatcatggcgcgagcgaagagcgaggggaaagccattgggaaggctgacgggtatattgcggctattgcagcggcgaatgggctgattgttgcaacccgcgacatatcaccttttgaagctgccgggcttactgttatcaacccttggaagggctaataacaactatacccgtcatctttcaagttgcttctttgttggctgcacttgctcaccccggtcacatagttatctatgctcccggggattcactcccttgccgccgcgatgcatcttgaaatcaatagggtatatatcaacattgaaggtggtaaggatatgaagaggcaagtgaaaacaatggctctcccagcgatgacagcggcgttattggcgtctctggctcctgttccggctaaaagtaccgttctaccgatgacggttgttgaaatacaaaaatcagcaggtttgatatctacattgacatttaacctgaaagatgaacaagtttttctgcctttgtcagaagcaactgcttacttgcaaagtctgaatgagtacacacgaaagtcgttatctgaagctatcgctcatcgtattgctaaggggagtggtggattgttttcaaattcagtacgtataagaaaattggccaatgacaacattgaatattgcatgaggataaaagaagcagtacgtatcgttctgtcacctgataatctgagtaagaattttccagatccgtctgagcgagaaatatttcgggtgaatattgtaaagtttggtcgagcaatagcgaactctgaatatactgcgtgtgatattctttcggctattgaacaaagcctgcctccgacaaagacgtatcatcctgataatttacctacttctagagaagttaaattgatgatattagcagaacataaaaaccttggtctgtcagagccggaatttttataatgggagtcagtgttactgttcataaagatgttgagtttcatgatgttgcaatagtttatgcaaagttgttagagcattggaaaaggacggcgttattaccttctgtatttggccgggatggtcaatgggaacataatagcagaaccttagattcaaatatctataaattgcatattagaatgccagatgaaataccgtgggaaaaatataagccacagattgatcgatgttcggataattatttagtgtatgtgcagcattggatggatagtaagagttttcaggtgataagtattatgagcccgaaggctcacgaattagcaaaaacgtcatttcttacagagcttgagcgtagggttgaggagttccattccatctaaattactatataacctgttgttaataaattaaaagcccttataaatttggggattctttgtccatgcgatcaaggtgtggatattcgtattcattattgagtgttagtttttaaaataaatactaaagctcaatctcaatatcactaagcggatgacagcagcagggtaaaatttcgccttcattaacaaaagccagaggtttgcgtcgatagccgactttgccttttatcaatttgacacgacaggaaccgcaataaccttcgcggcattggtattcagcttgaactctaccttgttccaatgcctctagcagactgttatgcagttcgggagagctgtagatatgataaccctgcataccatgcagggttactttatagcttgtcatcagagttcaaaatcactcaggtcgtcagggttaacttcagcatcaatctgaccaaccagataggaactgacttcaacttcttgcggcgcgacttgaacgttatcagacaccagccaggcgttaatccacggaatcgggttagaacgcgtttcaaatggcagtttcaacccgacagcttgcatacggatgttagtaatgtactcaacatattggcacagaatatctttgttcaagccaatcatcgagccttcgctgaacaggtaatctgcccactctttttcttgttccgccgcctgaacaaacaggtcgtagcactgttgttcacactctttggcgatttctgccatttctggatcgtcttgaccagagcgcagcagattcagcatatgttgtgtgccggtcagatgtagtgcttcgtcacgggcgatcaatttgatgatttttgcattaccttccatcaattcgcgttcagcaaaggcaaatgaacaggcaaaactgacgtaaaagcggatcgcttccagcgcgttaacgctcatcaggcacaggtacagttgctttttcagtccacgcaggctagccgtgatggttttaccggcaatctgatgtgtgccttcaccaaatagctgataatgattggtcatctcaatcagatcatcgtaataagcggaaatgtcttttgcccgtttcagaatctcttcattggtgacaatatcatcaaacacaaccgccggatcattaacgatattccgaatgatgtgagtgtaagaacgtgaatgaatcgtttcagaaaaagaccaagtttcaacccaggtttccagctcagggatggagatcaagggcagaaaagccacgttcgggctgcggccctgaatagagtccagcagcgtttgatattttaagttactgataaaaatatgcttttcatggtcaggcagcgcattgtagtcaatgcggtcgcgagacacgtcaacttcttccgggcgccagaagaaagagagctgtttttcgatcaatttctcgaaaatcggatacttttgttggtcataacgggctacatttactggctgaccaaaaaacatgggttcctgtaactgatcgtttttgacttgtgaaaaagtggtataggccataacttcctcaaattaaatcttacacgcgccgccttcacaatcggaatcagcagattccacgacttcttccaggtcatcctgaatgtcttccgcaccatcacgggtattgtggtaatacaacgtcttcacaccatatttgtaagcgagcaataaatctttcagtagctgattcatcggcacttttccacttgggaaatgtgtcggatcgtagttggtattggcagagatcgattgatcgataaatttctgcatgataccaaccaactgcaaatagccatcattaccaggcatttgccataagagttcataagcacctttcagacgctcatattccggtacaacctggcgtaaaatgccatcttttgatgctttgatgctgacataaccacgaggcggttcaatgccgttggtggcgttagagatctgggaagaggtctctgacggcatcaaagaagataatgttgaattgcgcagaccatattgtttgatctcgttgcgcaatgcttcccagtcatagtgcagcggttcattggtcaatgtgtccagcgcttttttataggtatcgatagggaggatacctttagaataggtggtttctttaaaccacgggcaagcgccttgttctttcgccagttcattagaggctttcaacaggtaatactggatagcttcaaatgttttgtgggtcaggttgttagcgctgccatcggagtaacgtacaccgtgtttcgccagatagtaagcatagttgatgacaccaatgcctaatgtacggcgacccattgccccttgtttggcggcaaggatagggtagtcctgataatcgagcagggcatcaagggcacggactgccagagtagccagttcttccagctcatcaagattttcaattgcccccagattgaatgcggataaggtacacagcgcgatttcaccatttttatcattgatatcattcaatggcttggttggcagtgcaatttccagacacagatttgattggcgcaccggggcgactaaaggatcaaatgggctgtgggtgttgcagtgatctacgttctgaatatagatacggccggtagaagcacgctcttgcatcatcagggagaagagatcaaccgctttcagacgttgctgacggatattgctgtcctgctcatatttggtgtacaagcgctcaaattcatcctgatcggcaaagaatgcctcatatagccctggaacgtcggatgggctgaacagggtaatctcttcacctttgatcaggcgttcgtacatcagtttgttaagttgtacgccatagtccatgtgacgaacacggtttccttcaacgccacggttgttttttagtaccagcaggctttcaacttccagatgccataatggatagaacagggtagcggcaccaccacgaacgcccccctgagagcaggatttgaccgcggtctggaaatgcttataaaaaggaatacagccggtatggaaggcttcaccattacggattgggcttcccagcgcacgaatgcggcctgcattgataccaatacccgcacgttgagaaacatattttacaatcgcgctggaagtcgcattaatggaatccaggctatcatcacattcaatcaatacgcatgagctaaattgacgcgtcggggtgcgtacacctgccatgatcggggtcggcagagagatcttaaatgtggaagccgcatcgtaaaaacggcgaatatagtccagacgtgtctctttcggataaccggagaacaggcaagctgcgaccagaatatagaggaattgggcactttcataaatttcaccggtaacgcgattctgaaccaggtatttaccttcaagctgtttgaccgccgcgtaagaaaagttcatatcacgccaatggtcaataaactcgttcatttgctcgaattcttctttcgagtagtctgcaagcaagtgcttgtcatatttgcccattttcaccatacgggatacatggtcatagagcgagggtggctcgaattgaccgtaagcttttttacgcaggttgaaaattgccaagcgggcggccagatactgatagtcaggtgcatcaccggagataagatcagcggaagctttgatcatcgtctcatgaatatctgaggttttgatgccatcgtaaaattggatttgggaacgcagttctacttgtgataccgagacatttttcagtccatcggctgcccagttaacaacccggtggattttatcaaggtcaattcgttctttgtggccatcacgctttgttactagcagactatggttcatggacaggcataccttacatttactttcagattcactcccacctgctttgtgtctttgacttagaccaaaacataaccccctcagtggcggaaaaaccaacgagagagtagtggtaatggaatgttaaggaacacaatatgtagggggtacactaaataatgacaacaagataatgttaaaagcagcttttatcaagtgtacaaaaatacggattcttgtggataacttgaggactaaaatttattaaaaagccggaagcctgcatcattactagcggttgctctgacaaaaacaccggcaaaaatgagtaaaaaaattcctgaaaatgtgatttatttgccgctttattagtctgtcagatgaatatgtcagacatactgactgtgtaacatataattgacgtctacattgtgaccaaggctaaatttatccgttagcgggttataatgtaggccgataatatgcttttcccgcaaggatgttctgtcaatccagcctatcaactctgatggccggataaatttcttcgcatcatgggttcccttcggtaccatttttaggatgtattccgcgccgattaccgccataagccaggcttttttgttgcggttaatggtagagaaaaagacgtgtccgccgggtttcaccaactgagcacaagcgtgaacgaccgattgtggatctgggacatgttccagcatttccatacaggtgacgatatcataagcttgtggatatttttcggcgtggctttctactgtttcctgtacataggtcacggggatacctgtttcaagggcgtgcagtctggcaacctgaagtggttccgtacccatatccagcccggtcacatcagccccttcacgggccatactttctgacaaaataccgccaccacagcctacatccaacacttttttaccgaaaataccgccagaacgctgcaaaatataattcaggcgtagtgggttaatccggtgcagtggctgaaattcaccttccaaatcccaccagcgagaagcgatcgcttcaaatttttctatttcctgttgatcaacattgtttggggtggaaggggttttgatgttcatcagtggttattgctccttaaactttctttaaacaggcggattcactcagttctgccaaggttcattcagttctgagtcagttttgaatcagttttgaatcagttttgaaatagtatacacggcttaatttttaaatacccgtatctgatttttataaaactgttgggttgtggtatagttctaaacctttgaattcggaatgtatgaggaatagtgggctccatgagcgacattgccagagaaatcaccccggtcaatatcgaagaagagctgaaaagctcgtatttggattatgcgatgtctgttattgttgggcgcgcactaccagatgttcgagacggactaaagccggtacaccgtcgcgtgctttatgccatgagtgtactgggaaatgattggaataaaccctacaaaaagtctgcccgtgttgtcggggacgtcatcggtaaataccacccacatggggatagtgcagtctacgacacgattgttcgtatggctcagccattttccctgcgctatatgttggttgatggtcagggtaactttgggtcagttgatggtgactcagccgccgctatgcgttacaccgaagtgcgtatggcgaaagttgcccatgagctgctagcggatctggaaaaagagactgtcgattttgtgccaaactatgatggtacagaacagatcccggaagtgatgccaacgaaagtaccaaacctgctgatcaacggttcttccggtatcgcagtgggtatggcaactaacattcctcctcataacttatccgaagttattgatggttgtctggcttatattgaagatgaaaacatcagcattgaagggttgatgcagtatattcctggcccggatttccctactgctgcgattattaatggtcgtcgcggtattcaggaggcttatcggactggtcgcggtaaaatttatatccgtgcccgtgcggaaattgaagtggatgagaagaatggtcgtgaaactattttagtgcacgagattccttatcaggtcaataaagcccgtctgattgaaaaaattgccgaattggtgaaagaaaaacgcatcgaaggggttagtgcacttcgtgacgaatctgataaagacggcatgcggattgtgattgaagtgaaacgggatgcggtgggagaagtggttctgaataacctctattctttgactcaactccaggtttcttttggtatcaacatggtggccctgcatcaagggcagccgaagctgctgaatctgaaagatattatttcggccttcgtatgccaccgccgtgaggtagtcacccgtcgtactatctttgaattacgtaaagcccgtgaacgagctcatattcttgaagcattggctgtggcattggcgaatatcgatccgattatcgaacttatccgttttgcatcgacgccagccgaggcaaaagctgcattagttgctcagccgtgggaattaggtagtgttgccaccatgttagaacgtgccggcgatgatgctgcccgccctgaatggctggaatcacaatatggcgtgcatgagggtaaatattatctgactgaacaacaggctcaggcgattctggatctgcgtttgcagaaactgactggtttggagcatgaaaaactgctggatgaatatcgtgaattgctgacattaatcggcgaattgctgttcattttggaaaatcctgagcgcttgatggaagtgatccgtgaagagttgttggcaattaaggcgcaatacagcgatgcccgccgtactgaaatcacggaaaatacggctgatatcaatattgaagatttgattaatcaggaagatgttgttgttacgctgtcacatcaagggtatgtcaaatatcagccgttatctgactatgaagcgcagcgccgtggtggtaaaggtaaatccgcagcgcgtattaaagaagaagattttattgacaagttgttggttgccaatacccacgatacgatcctctgcttctccagccgtggccgcttgtactggatgaaggtttatcaattaccggaggctagccgtggtgcccgtggtcgtccgattgttaacctgttgccgttagagcaaaatgagcgaattacggcgattctgccggtgcgtgaatatgaagaagggttatatgtctttatggctaccgccagtgggaccgtgaagaaaaccgcgttgcaagatttcagccgtccgcgcagtgcgggcattctcgccgttaatcttaatgatggtgatgagctgatcggcgttgacctgactgacggtagtaacgaagttatgttgttctccgcggaagggaaggttgttcgttttgcagaagaagcggttcgttcaatggggcgtaccgctaccggtgtacgtggtattaaactaaatggtgaagataaagttgtttctctgattatcccgcgtggagaaggagaaattctgacggtcactgaaaacggttatggcaaacgcaccgctgaaaacgaatatccgatcaaatcccgtgcaacgcagggggttatctcaattaaagtcagtgagcgtaatggtaacgtgatcggggcaattcaggttgaaccaaccgatcaaataatgatgattacggatgctggcacattagtacgtacaagggtgtcggaagtcagcgttgttggccggaatactcaaggcgtaacacttattcgtaccgctgaagatgagaaagttgtcggcttacagcgggttgctgagcccgaagatgatgaagacgatgaagatgggttggcagcagaaggggaagaggtgaaaagtgatagcaccgatttacctgatgctaacagcagcgagtcagttgatccggtttaagtgaagatattttttcacttaatttaagaaacaggtacttcggtgcctgtttttttacagggatttttattaatatcgaaatatgcaacagatgggcctttttaatcgttaaactctggataccctatggatttcaagatgcatcgcgacggcaagggagtgaatccccgggagcataggtaactatgtgaccggggtgagcgagtgcagccaacaaagaggcaacttgaaggataacgggtatatatcttgtcattaatgacattgaataatgctggtttttatcaggtaaccttttgagatatctttcttcttttcgtacatcgctgaaaatatcccgttatcttttccgggtgcttggcttaatgttgtgggcattgggcgctttattaacagctttttacctggttaatatctttaatgaagttaaatcagatattcggcaagaatacaatgctaattatgattccacgctctcttatgtgcgtcatacagcaagtgttctgcgggatatccaatatatgacagaaaagcatttactgaattctaatggaaaaaatgctatttttgattttccacataataacccggcgttttcttatcatccgttgaaccaaaacgctgattgtcatacttttcgcaacaacactcatagttatttaaattcattaaataatcttatcttctattggaaggataatcttgctgcgcctcaggggttgaatcaggtttttctggtgggtacgcaaagtatgtgtatggtaagtttttctatccgtaataccacgactgaacccgatacgttgaaaaaaatagtttatgaaaattcacgtaggcttatcagcctgaaagaacaaggtaaagaacgaaatgtttattgggttataccgggtgcaagatctgatagcggccatctctacgtgttggctccggtatatgtcaatggtcagatggttgccatgataggcattgaacaattcatcagattggactcttttattcagagacaagaccgcccaatttcaataacgttattgaatagcagtaatcacccggtgttgcattatccagcaaatgatgactataaacttcattatgctgattatcagttggaagcgccttattttggctatgatgataattttactgatttactgctaaaacgtcggttaatgccatcttcattcagtatcatttatgccctgtcactgaaaactatttttgaaggttttaagctacagattattagcagtattgtgcttaatgcattatctgcctttgtcatcattatcttggtgtatctgtttgagcggaaaatgtttgttccggcagaagagaatgccatccgcctggaagagcatgagcaatttaatcataaaattgtggcttcagcgccggttgggatcagtatattgcgggtcagtgatgggagtaatattctgagtaatgagttggcacataattatttgagaatgctaacgcacgaagatcgggaacggattattcatattatttgtgacagaaccagtagttatgttgatgttgtcaccagtaatcatcatcatttgcaaatcagttttgttcattcccgctacaggaatgaagaggtggcaatttgtgtcttggttgatattagtgtccgtgtgcggatggaaaaatcattacaggaaatggcgttagcatcagagcaggctaactattctaaatctatgtttttagctaccgtcagccacgagttgagaacgccgctttacggtattattggcaacctggagttattacaagcacattcattgcctgctgaatctgtccgtttgttatcaacgatgaataactcctcagcgctgttgctaaaaattatcagtgatattctcgacttttcaaagatcgaatctaaacagcttaaaattgaatctagagaattttcctgtcaggaagttatctctcatgttatttctaactatctaccgttagtagtgaaaaagccattgaccttgtattgctatattgaaccgggtgttccagattatatctgcaatgatccggttcgattacaacaagttatatctaatctgttaaataatgcgattaaattcactgataccggatgtgtgattatccatgtgacagttgataaagattacttatacgtcagaataaaggacacgggtgtcggtatctctgataaagcgcttattcagttgtttgatccctttttccagatcatgccaaatacggaaagctcatctcagggaaccgggcttggtctggcgatttgtgaaaaacttatcaatctgatggatggtgatattgaagtcatttcccaaccacagatagggagtatgttttctattcggttacctttatatggtgcgaaatataggccaaaaactcagctaataaatgagtctcagcggaaaatcatcttggctatacgcaatctttatctggaagaatttttacagcgttttctggttcatcatggcttacacacggttttatacagtgagcagaacacagagggtagtgaaattattatcagcgattttcctgatgcggttatttcccctgtatatgcttatattgaattatcgacggactatattggctcaccggaacaaatcagagaaaactattggttacataacacttaccatttacatgatttgtcggtaatgattgagcggctgatttcaccgaatcatcatgtggtattgaatacagccccacctgtttttcaggcaaacactcggtttaatactattgtggttctggtggtagatgatcatcctatcaaccgccgtttattggccgatcagttgaaatccattggttttcaaacagcgatggcaaatgatggattagatgcgttggaatatttgaagagcggggggattgatatcattctgacggatgtcaatatgcccaatatggatggttatgcgttaacaatgtatttacggaatgatgggtgtaagctgccgattattggtattacggcaaatgcactggcagaagaaaaacaacgctgtattgatgcaggaatggatgattgtttgtcgaaaccggtttctctggtgacgctcaggcagacactgacgcaaatgatttgaaaccccggtacaaaaaaatgcccggtacaaacaaatggttaccgggcatcaggacgactttcatattaaaataacgaacggtatttactgaacgtgattgctcgtattgattgtgacagaagcaagataattgagtaatgcaatatcgttatttacccccagttttaccatagccgattttttctggctgctgatagtcttgacactgcgtttaagttttttggcaatgtctgttaccaaaaagccttgggcaaatagacgtataacttcactctctttttgtgataacggtttatcgccatagggggttttcgtcacttttttcaacagttcagaaacgctgtctggcataaatttttccccttgattcagggccgtcaatacatcaggtaaatctgttggtgctccttgttttaagacaatgccttcaatatcaagttcgagtacagcacttaaaattgctggattattgttcatggttagaacaatgatggatagcttgggataatggcgtttgatgtatttaatcaaattgatcccatcgccgtatatgtccccaggcatggacagatctgtgatcagtacgtttgctttaatacaggacagattgttgatcaatgtggtcgagtcttcagactcagcgacgacgttgatccattcaagccgctcaagtgatttgcggatgccaaacaggacaatcggatggtcatcagcaataatgacgttaaggttattcatcttattagttaccctgctgcaatagccttttggtgaaggattcaagacggctaatgctattcttaatctctatttcgttactgtctgttatgtgttgttccagtgtttcgcaagaaagtttgaggagttctaggtctaacatagcaaagacgcctttcaggcgatgtgctgtttgcgaaagcgatatcagatcatattgttctatatcagtatacagcttattaatatctatcggtactgtctcgacaaataattgtcggtaatcgctatcagttagctgtttttgataactatttataacattgtcaaaatcgtaatcgctgctttcatcgttaaatgctgacatttctaaatttgccgtgaattcgttaaaactgaaacttctctcaattaataacgaaatggcattgataaccgcttcacccagattgtagttacatcgaatatagtcaggttttatctgctcaaagccggccagattatcaaccagtaatatagccgattttgccgaatcgtagggtttatccgtcaacatgatatcgtattctcgattcatattttctggctttttatcgaagtaaaccgcgccataatgatgcagatgattttgtacaatcttacggatcttcgtattgctgatatccaacaaggcagtaatgtcttccagtagcggcgggcattggtcttggccgattattaagggcagactgatagcatagtgcgtacccaggttgggtttgctgtttatagtaaaatgaccatttaattttctacataattggttacacagataaaaggtcagccctgaattggattgatatttatcgcctgtggctttgcttaaaaatggataattcaagtttgttaaatctgttgaattaagtccggcgcctgtatctataatgtcgatttgaatgtgttctttgtattcctgagaatagttaacgatgagagatattttgccataagatgtaagcgtgattgcataattgactaacatcaggacgatcttactgatggcagtactatcgccaataaatagtgattcaggattaatattacaatgataataataattcaatcctttgttattcattttaggaaacacttttttaataatatcctctaaaatgactgataatgaaaacgattcattttttgcttgccattcacctgattctaattcattgagtaatgaaatattctcaatccagtcggagatatattcagatttagtcaataaattatcgacgatacgaacactattttcttctataagaatttgtttcagttggtaagcgagatgatctaattcttttattggttgttttaattcagaacgaatgttggtcaacataaaacgccgagcttgtacactcttatcgtgttccaaatgggcaagttgtagacgccggctaattaatgcttcctgatctttatcttgcagtaaaaacagataagtttctggcaacaggcgaaggttgtacatgttaatttcatagactgaatcctcaattgaggtttggatgacaccatgatgttgcttggccatcatcttaattttatttaaatcgacattcggcaacagatggtcggcgatgttattgcacataattatctgattgactgagaaatcataaatcaataagccaatggggatattgggagataatatcgtgacttaacgcatccttgacttgtagttcgtggctcatcagggcatttggcgcgatatattttctacgaatgtaaataagcccacctaaggacaggataataaagactgaatcagccagtaacaaccagatgtttctgtataacaaatcgattagcaaatctttgagtgatatccgatacaacagtttgtattgcgtacctttaagtgattgagaaaattcgagccagaaaccattttgtgaaatattgactttattgatttcattagggggttgctcgtcatccgacaatagactgaagttggccgctgccatatccataggaagaaggtgacaaataggcaaatcaaaagcgataactgttgccaattgacccggtgaattgaacgtcgcccgataagtataaaaatagatattttcgccatttaacttatggattgaagaaatattttcccgttcatctaacgcggtggattgcatcagcatttctgaacgttttgattcggcagtcagtgttagataactttctttaaatctcaattctggtttaagaatagagtgagtggttatcagaaacagattgttatctttaccattcagatagtacatggagttgtattcattgcgggtgccccacaaaatctccatataattggaaaggcgttgtgccaactctacacttgcagtgctgtggtgaccaaaaataatcgtgtcgatagtttgataacgattctcaagccagtaaacatcaggccgtagcttcattggtgtgatgagttctggtggtttaaaagatgcgctattggcttgtttaaagatagaattagcgtggtaacgataatcttctatctgtaatactactttggttgcaacgctatttagcgcatattttttccccattagccaggcattgaagtagttatagctgtataaaaacagggaaacaaaaagcagaataatgaacagaccgtagtaacggtttatggttgatgaattaatagaaaattgtttgttatacattcgttgagtaaaagccttaataattgcttggctgtttagcgagctcgttaaattggtgaatcttatgattcaatgtatttaggctaattttagcaggatcagggctgaaaaggatattgtagattgaggattgagcgaatagtaaaaaaatcacagaatttttacgatagagactagacatattatcatgttaagagcataatcccgcgtcatggaaggatggccgagcggtcgaaggcagcggtcttgaaaaccgccgatgggaaaccatcctagagttcgaatctctatccttccgccaaatagtgaccctacgcattttctgtgcgtagggtttttttatttccatatgccattcagataataattaatccattttcataacgataagatggttatcgtctattgagcggtaaatgatgggaatgaaagctcgcagcccggttgacctgaaatctatcaatttccaatgagtaaaagtgtgtgtagtcgtttccgggcgcgagttgtgtctgtaatttatggtgtgtccacgatttattgacaagaatggtttttcaggacagattcttgttcaataaaaccgtggaaggtgagaaattaaacttttttaattggatttgaacagcatagttacagcggttacgaacataataatagccgcgcctttaaataaaatccgttgtgcccgttggcttgataacagatgtcgaatactgagagcgccgagaataaataccgctcctacgctgaataagacaaaaaccgtcagtggtactaacatgagcccccagttttgcaacgagatagattccatgttaatcaccaaaggtaatagtgcgagatagaaggcgatcgttttagggttacttaatgttagagtgagaccagataaccaagccgcagccaactcttttttcttaatgggttggtcttcaccaatggattgatgatcggcaaaccagaactgccacgccagataacccaaatataatgcggcaccccatctcaccacaacaaataaggtgtcaaaactgctcgcgataatggacaagccaaaaaccgcaaaggataaataagtgagatcaccaataatcaggccaaacaacacactaaatcccgctaacgcgccattactcacacttctggcaaccaatgctgccattcccgggcctggtatcgccgcagcaacagtcaatgccgctgtataggttactatttgggacacttctagcatatctttcctctcaaaataacaccttgaagtaacagaacatagaaatgtcacttgcgaatgcaagtgacaaataacggctctttatagacaataacgacatttttctaatgttgaacgtcttaagtttggcctattttcatccaaaacagttaagacatttttattagttgtcgaatgacttcccgagaaaataccatatcttgaacggccaaaccaacggattgaaagatagtcacaccctgatcgcacaaattggaatgagattgagaaacagtaccaatttctaccccaatgtctgacccgttaataatacctttctcccttgccttaataacagattgagaggcggcaagtaccgattcattggaatcagtaaatagggttgtattgctatacatatcttcgctgagttcctgaaatcccagtgccgaagcgccaatggcattgacatgacatttaaccggtagcgcttttctattgagtatcgggtcacgcgatgccgtggttgtgcaaatgatgtcactattgagtaccgcctcagcaggtgaggctttgatcgaaatgggaagattgagcgttttatcacaccttgcagcaaattctcggcatctttctgcattacggccccataaagtgatttctttaatcgggcgtacagataacatggcttgcaaatgtgcttttgcttgtaagcccgtaccaagtatcgctaaccggctagcatcctttgcggcgagaagatgggttgcataagcagaggcggcggcggtgcggatttctgtaatagcgccggcatccaccgcggcaatcccggaaacacctggctcgtcgtaaactaacacactaccgatgtgtgaaggtttatcgctattgctttgaaatctcactaccaccgactttaacccaaaccctttgtatggcccttccttaatataaatcggcatggtgcccattaagccgtcttcacctttaacgatattgcgcaaaggttgctctacttttctttccgattgcaatttaaatgctatttcacttagcttaagactaagttccatcgtcaaataacgcgcaacggtttctttatcgacataaagcatattgatgcctttcaagatcagttaaaggtcgtccagtttgaatttatcatcaatctcggttccggcaatactattgagaattgtcgacatattcttttgagaaacccctaacacaacatccagcatattctgtttgctgaaaccacgacttaggaatagatcaatagcacttcttttcaattgtccccggcaataaataacctcgatggtaaattcacgtagtgccaataatcgtggggagagatcgtcggttttttcaatcaatgccttaactgtttttttgtccacaccattatgaattgcaatatagccgtgtgcctgaatcgtgtagttacaaccattttctactccggttgtaatccacaccaccgctttttcctcttcattcagtgaactatcaataaataggtcgtgtgctcgttgataagcggctaatagtgaaggagattctgacatataaccactttggttaggtatccagccgaaatcattaatagaactttgaagtaattttttacttttttcaggtgtggtagtaatggtgtgtagcgtaagtaaagacataataacctctgtatattgaaattttaaaaagatctatatatttgcctattttaaagcaacattagcttttatgcggctgtaaatactgaccaaagcatttgaattggtcgaatatgagaaataaattttaaattgtgtaattttgctgccacttcggtcgtgagtgcggcatctacctctgaattggcgactgcttttgccgctgaactggttgagtctttaaaaatgatatctgcaattcttagattatcgggcaacaactctgggattaaagcctttggtgccggatgagttgcaatgacgatattatctgtagttaattcatcacgaatagcgataccgtaattaggcgtgtagtttaaaaatgcggatgacaagttaaacctgttatccatataaaactcactgatattgtaataagcattggctaccaccaatgcctgacagttatttaaaataatttgattacttgcttcttcgtaagtattacataaaacaacttggtaacttttggcgacattatttttaatggcaaattcaccaaaacgaatagcggattgctcgctacttgtgcctgacgggcctaaggtagcaatatttagaacatcaaatgtatctttgtagaaactaaaaaaaacacattccatgatgtctctcctggaattacactaataaaccggatttaaccaatgtgagaacttatctactctgcctctgattatttcttggtaatcttgggcaataacattggctatagaatcttctttttgtctatatgacacatcgtctatttgtgaaacgattgatatttcaaggccagtgcctgttaaaaaacagccatctgcttcatagagatccttttgttgaatttctgactcaatacaaggaatattgcggaattgacaaatatcgaaaacagattgtctggttattccattaagaatgccagcgctaagcgatggtgtaataacgcaattatcttttacaataaaaacatttgatgtacttgcttctgcgcacatgccttgttcattcaacatgatagcatcatcaaatccgttttctttggcatcttcatgagcaagtgcggaattaacataagtgccggtaattttggcagatgatggaattgccgcatttgatacacgtcgccattttgaaataagacatgtaaactctgcttttttggcataagcgcccataggtaaagcgttaatacagagggttgaatttacaccacttagcttaacgccaaatttctcacccggcattaacgactttttaagcactaatggcctgatataaatatcttgcttgaaaccatttttaataatgatgtttttagtaatatcggttaactcctgactggtatagggtaattcaatttttaatgttttagctgattgaattaaccgttcatagtgctcatgcactctaaatagattaagttggttattgtcttgatcccaataagcccggatcccctcaaatgtaccggtgccataatttaaagcttgtgtattggcaagaaaggtcgcattgctaaaattgagatattccccgtctagaaatacgatccaatctttattaactgggctaacgatattgtttgtcatttattggccctcttgttcatgatttctaaagccgaatttcgctcaatattgttggtatcatctctcagatcatggatgcgtgctgctttccaacttaccattgccgcggttccaatcagtccaccgacatctccgacatggatgtcgacattcatattgaatttagattccattttttgctttattttactcatgagtgacgcatcatttaattcgtcactcggttctaaagtgatcttgagcttatctgtaccggctgtgttgttgatttcaataaagtattcaaaacaatattcgagttcttcaaagatggcattttcaatatcaaaagcatacacattggcattgtttaatactaatacatcttttacccggccgatgggttctatttcccattgatttaagcctattgctttgcatcgaaccatatcccctgttttgtatcgaatcagaggtttgttccctttatataaatgggtaatcactaattcgcccgcaacgtgattatcgccaacattgagtttttgctgggtaaaagggcaaatgagttcgtaataattgttatatggaatagtaataagcttattggtattgttacaagccgccagaattgatgtttcttgtgaggcatacatacagttgtaaattttagcgccccaattccgagataagtttcttaatctatttggcgtaataagttcgccaagcactaaaatgatctcgatacctaattcttttgcatcacatgcattgttccggcaatattttaacaactcagcggcgaccgcaggtgtgcaaactaaagcggttattttgaggtcttgtatcagcctgagtactctgtgcatgccaacaacgggcgaacgaggccacattttgataacggtatgccctaaactgcgaaatacatcttcaaatgtatcgccagtggagtgcaattccgttggacccatcacgccaataatgtgttgtttgccttcttgattgaaaatagactcatattgcagagtcagaaaactattattgactaaagagtctatttcattgcgaggacaaggcgttgatggcccagtcgtccctgtggtttcataatatatccaagcgttacttaggctatctgaagatatcgtgtttcccgccttacttagatctgattttgtagtaaagggaagtttttcaatcaatgaggataaactttcatcatcatttgggtttattgcatctagacgatcttgatagaaagctgacccatttttcgtataatttataacttcttttaatttttcgtattgtattttttccaatgtggagatatttatctcgccagacagatatttttttagctcggtaaggtatttcatacctaattcatgaagttcatttctaaaaatggaatacatatatattacctggttatttataaagtggtaagttgccagtgagtttattgatatctttctttggtccaactatgccaattccagataacttcaattcatccgaatgctcagcagataattttccttcgtattcctcatatgttctgcatgattgcgccaaacaggagaaagggctcaatttaaaattatcgttagattttaattcactatgaatagcatccagtacatcatgacttgctttcaaaacaggcaaaggcgttttaatgacaccgggataacaaatgctatctttactaaagacatcgtgtcctacaatcccgtcgatatttctacctattgaaacactaatgacgctcagtgcattcatggctaacccaagcggcagactatcagcgataacgacgacacttttatgtaggttttcgtcaaactccatacgactttcctattaactgagtgaaatttatcaacttatttagatcaataataatatccgagactgtccatgtacttatttctttccatagcaccacgccttttatatgatcgggatgatgcatgtatatgtccaggtcttcgtaactttcaaagtaaccaattaaactaaagtcaactgattgctttctgtctaccgtactgcggccacaaaaccatccttttatttcacttatctcatttatatgatttaaagtcaccttctcggctaatatagccttttcactatcccagcttattccatccttgaaggtaaataagacttgatgtgcaattaagttatttttgcccagcataatttgcctcataattaataattttgagttataataacctatagaaacgatctgatttatacctaatattagcgcatgcctgatttagtttttttgatttgcatctaatttaaatagcacattgcatttatagcagtcaactatttccctgtggtaataatttaaggaagagtggcaatattgtgattctggcaatgataagaaagctgttatggcttgcctttggcttataaaaaacaagctcaatttgattgcgcttacgccttgaaaatatgttttgtcgccttgtgttctaccatattttgagtatttgctttttaacatgttaaccgatcctcatattgtttggagacaggttattttggatattttatcttccactgtcgccagacaaacaggctagtttacgaccagtggctattttttatataggtagcaaagataataaagcatttcgttgttatttctgatttgtcagtaaatagcccgctcatcggctgtattttgataagaaactccagcaatttagaagattagaggcagtagtcttgcgttggtgggatttcaaggtggatcgcggcggcaagggagcgaatccccgggagcatagataacgatgtgaccggggtgagtgagtgcagccaacaaagaggcaacttgaaagatgacgggtaattatttctgcttgattgtttgcaatgggttgtaatatactgcgcacgctttcgggggctagccctgaaacacgccggcttagctcagttggtagagcaactgacttgtaatcagtaggtcaccagttcgactccggtagccggcaccaaatcaaataagaagccgttatcttttcagaaggtaacggctttttcttgcttgatagtagataatactatttatatatccagttaattctgctattttccagtacaatttcccgctaaaacgagtttctgaattcattcataacatggttaaatttacggttaagctgatcgaaataaaaccacgtaactagaaatatagggtagcaaatttttagataacacgaatttattttcgctgggaaaaactaacagagaaaaatattagcgtttgggatatctgttttccagacatgaaaaagtatttgctataggtgtgtatccatccattcgtctggcgagagctgaaaataagatgggatagggtgagtaggaaatagcataggtttaaaaatctcattgttcagcagagggtatatctgacagtgttaaaacttttcacgtagatatttacctgataattggtaatttatcgttagcaacattaattctgtggatatcttaaatgttctgcctgatctgctggcgatattgcgaatagggctgttgcgatctcacatttgcacccgtttcgttgtccatcatccagtaaacagaccgatttctgtgtcttcggcacaggtgtggacaccattcttaatcggcattttatgacagatttcaaagttgattaaaaatattttttacactcaaatatccatgagataaaaaatctgtgctattttttatttaatgcatttttcatctcataataaaaagggggtgttatgttgcttgaaaaaatttgataaataataaagagcatgcatgttgctttaggtgctaagcgttttaaaggaaggtacattagaggattaaatgaagattataaatttgtataataaatacgtagatgaggaagagaaacacgttgtggtcatccgtattaataacgatatttatgtgttttcctctgaaactaagcttggtcaagaataggggttatttactacttgtatttaatagactaagtaaataggtgtatttaaatgatatagttacgtaacagagaaacacaaaaatagagaatgaaaaatttgttataatgccgaatgcatggatgcatgagaccatcatgaaaataatttttactactatttgttactaaaagttaaggtcaaaatatatgcgcaatattcaacaagttttagagtgttggggcggttgggttgatgatgccactggtgttaattggccaccgatcgctgctggatttaaaggtctgattgcgtcaactcgttcattacgtccttcctgctgtgataacgatggcttgatcattgatgcttgtatcgcaaagttgcagacggtggataagtctgaagaaattgaagttttatttatgtactacgctttaaggctttccaaacggtccatcgcgcgtttaattaaagtacctgatattgaagtacgttcccggttgcaaaagggagaaagttttgttcagggatgtctggctatgctcgatattaaattagaaatggatgatgaaatacaaaaacacaaaaagcttgcgcgtacgcaaaaagctatggtagtgtactaattagttaaagttgcgaataagccccgatagaaatgaaatatataccttatagatttcaagatgcatcgcgacggcaagggagcgaatccccgggagcatagataactatgtgaccggggtgagtgagtgcagccaacaaagaggcaacttgaaagatgacgggtatggaaatatcggggcttttttcatttgaatatttgcaggtaatggggagaatagggcttaacccacatcaaattcagtttaaaaaattcatgctatccaatgaactctgtttggtacgaatgaatctcaagtttcttctattgtactctgataaataagtgaaaatttaaatcataattgtcgaaggtcgcactgtgttgcggcctttttcgtatttgccgtcgcgaatcgcttacgcatattttttacctttttcgcgattggtatcccgattaaatcaatcataactcggtgttgggagctaagccttcagcaaagcttggtttacccaagcacagggtgagttattgctgtttgatggaggtatttttgatgagcaacggtagtgataaagcgggttggttaacacctgtcacgcttgggcctgaatacgatgatgagctggagcacatactgagtcgttggctaggcggtgtttctggtttgcctgacgataaagtgcattctcaatggacatcagcacaactgccccagttaccggcagatgatgacgggtgtgattttgttatcacggattttatttcagatgcctcgccggcttttgagaaccagactgacgaaggaaccaagttatggcgtcatgaggaaattgtgtgcttgatctccttttatggcccgaacagccagcggtacggtgcctgttttcgtgatggcgtggcggtcagtcagaacaatgatgaattggaacgtttcggtctttcagtcgacaaactcagccggctgacttctttaccggaacttatcaataaccagagggggcgtcgttatgacatgacgatcaccttgcggcgaaaagtggtgcgtgaatacggtgttaaatcactggtggaagcgcctgtcaaattcttaggagattaaattatgcagggtttacctgtttcaaacattatcaatgtcacgttgaatatggctcctcatgcggctcaatcccggaactttggggcgttactgatcatcggtgcaagtaacgtgatcaaccctcatgaacgtttacgccggtattcggatatcgatggtgtcggtgctgattttggattgagttcaccagagtatcaggccgcggcgctttattattcccagtcaccccgtccggttgatttatatattggtcggtgggctaaggacaatgtggtctcctctttacaaggggcggtattgactaaacagcagcaaatgatgagcaaatttattgctgtcactgatggctcttttaaattgacgattaacggtaaagaaacggtatacagcggcgtcgatttgagtaaagaagccaatcttaatggtgtggcccaacggatagcagataagttaaaagattgttcagtcgcatatgatagttcttcctcgcgtttcgctattatgccgaattctgtcgatgcggttggctatgtttcaccggcaacgacgggaacttatattggtgatttattaaagctggacgaaatatcgggtgctaccgctatcgaatctaccaaagcagaaaccattgctgaggcggtggcggcactgggatcggtatccagtggctggtatgggttggttatcgctgatgactctctgacggataaagatattctctctgttgctgattacattgaatccgcatctgttccccgcatctatggacatacagcgcaaaaagcagatgtcttggatgctgatgttaaaactgatatcggctcaaaattaaaagagagaaactatcaacgcacactttggcaatattcaaccggtaaatcctacacggttgcttctctgctgggccgtatgtttaccgtcaatttcaacggcaataacaccaccatcaccttgaaatttaaacaggaacccgcggtaaccgcagaaaacctcaccgcaacgcaagccaatgtgttgaaaaggatgaatggcaacgtttttgttaaatacagcaatgatacggccattattcaggagggtgtcatggtgaatggggactttattgatgagcgccacggtctggattggttgcagaactacgttcagaacaatctttataacctgctttacaccagtaccagcaagatcccacagactgatgaaggtgtcacacgattaatcaccaatgttgaacagtcactggcgcaagcggcgacaaatggattaatcgctcatggtgtatggggtggcgatccgattggtgcgttggatacgggggcaacattaactaaaggttactacgtttacgcaccgccaattgcgacacaggcacaggctgatagagaagcacgaaaagcaccggttattcagtgtgcaatcaaattagccggtgctgtccactacgctgatgtcattattaatgtaaacagataagggttgaaaatggctacatattcttttcttgatgtttccgcttctattaccggagttggcggctcttttgatcttggtaacggtgccgcgctctctgatgagggaattaccgtcaccatgtcggagagtaaaaacaccatgaccaccggtgcagacggagaagtcatgcattcattgcatgcaaccaagtctggaactatcaccgttaatttacttaagacgagcccggtaaacgctaaattgaacgcgatgctcagcacacaatcgctttcatcggcggcatggggtaataacgtgattgttattcgcaataaacaaagtaatgacattgctgttgctcgctctgtcgcctttcagaaacaaccggatttgcagaataacaaagcaggcggtaccgtttcttgggtatttgattgcggaaaaatcgacatcatgttaggcacattctaaccagcttacttcacaaccatttaaatcacctttaaatttgccgcagcatttgcctctatttttacgtcggacttatgctgcggtagtttgagcgagcttgaggataagtgatcatggaatttgaaattgatggcaaaaaatatcgcagtggtaaattgaacgcttttcagcaacaagatttagcggtggctttggctccggctattccggcacttggaccgctgatgaaaaagattgtgacaactaaaagtgatgatggagtgacgggctttgaagaagtgctcccttatttggtggaatccatcaatgcattaggaaaatccaaccgacatgaaattaatgatatttgcttatcagtggtttctcgtgaacagaatggtatctggaaccggatttatgaacctgatggacaggtattgatgttcgatgacatcaacggcttcgaactgttgaaaattgtcggatttattattcgagacgcattgggaaatttttttcccgccccattagagagtgcagtgtaatctcaggacaagccaatttaaattttgaaaccctcccgaaagggcgtgattatctgttacgcccggtcattgcgggcatgtgccgttatgaatcattgaaaaacagcgttcttgatctggctgatattgcattgatgaatgatgcccttgatgttaaatcggaaaatgaggccatgatagagaggtggcgaaatgagcaatgacgttgaaacaactaaagatttcctgatatcgctgaggtttgatgttgatgaagtggaacagcgtaaatttatggctgttatcaccgaagtcacgtctggcattctcaaaatgagggcggaaattgaaaacgcaacatcagttgtggccagttttatcacccaaatagctgacggattggataagttatacgggaagttgcaagaaacagacgcagtggttgaaaaagttaaatctatcaatgaggaaagcgtccgtcgagcggtgggaggtgtagagagatttctgccgagcattaatgctcaatcccatgatacaaatggtcgccattttaatactgcctccttggtcgcatcaatgaatgagcagttattaaaagcaacaacggattgtgctaatcaaaataccagcatacttgatagtgatgacatatttaatgccattgaggaattagttaaatggttagataaaggagaaatttctgcgaaaggtttattggcgacattgaatgaattatggaaatttacaggaagaaaaattgttctgggtgtattatttgattttaatagtcggttaaatgcattacaggaagaagcaaagaaaaatcacgaaacagtggctgaaacgttgtcacggcggaaaagagagtatgataaaaataaaaaaccacttataacatatgatcaactcgataattggatgtcaacacatgggatttatcttgcttctgacttgactccatttttcagtaaagataaatatgaaaaataccaagaacaaattgatggtaagaaaacgataatccacaaacaatatagccaaaaagttgctgatatttccagtaaagtatcagaacgatcaagtaaaacgaaaaagaagcgcaagactaagcgattaaataaagatcatcttaagactggtattgttgaacatcacgatgcgcctaaggaattaaatactccagttaatcaaccaacgaatatttttaatagtgagcttacagcagcaaagctaaaaaaattaaaatcttcgcgaggagtgcggaataacaatccattaaatatgaactttgtacatcagaccggggcggtgcttgaagataacccaaagcccagatttgctcagtatccagatgcttatagtggattaagagctactgctcatcagttgacgcgttattttcgtggtaaaactacaggaaaaaagctacagactattgcaagtattgtcccgacatgggcaccaaagaaagatcataataaaaccaaacagtatattgccaacgtgtctaaaatgatgggagtttctaaggatacgttccttgatctcactgatcctgatgtgatgcaacggctgattgatagcatgatgatagaggaaagtggtggtaatccctattcaccagaatttatcaggaaggcgattatggcagagctacagccagcgaataaagcgccaaagcaggctggacatttaaatcatgtagctcactctttgcagaatatttccattgatcaccgaatgatcaacggcgcggtaaccaatatcaacggtatgatgaatcatcagggattgactccctttttattacatcgtgcgccaatatctgccggcaataatataccgggaataggagaggtcaattatcatattgaagtcaacggtgttgaatcccccagagaagcagcaagactgactggagaaacggtagaacgtactcacagtatgctgcttcgaaatatgcaaacacaggtgaaataacaatggatatattatcagtcatgttttctcagcaaaagagaaaaataggtgttattgtaccgagtgtcgttatttcagaaacccataccgatgtatcgaatatcaccgatcatccggtccagcagggggtgacattcagtgatcatgcttatgacagcccatcggaagtaagaatggatttaggttttgccggtggaggttcgctgcttgatgttattgatacgacaaaagtatttgatatttctaccgggctgagccttggaaccagtccgcgtgatatatatcaacagttacttgacctgagggcatcacataaaccgtttgatgtcgtaacgggaaagcgcttatataaaaatatgttgattaaagatatcagtgtcacaacagatagaaccagtgaaaatgttttatcggtggctttaaacctgcgtgaaattgttattgttgaaacatcaccgaataaggccgcgccggcggaaaatatgaaaaatcctgaagatacagcacctgtagttaatatgggagctaaagtcacggtgaagccatcaatgccaaaaattattcttgattttattatagagcgaggtaagaaatggctagggttgtagaaattcctttatcacctcaaaatcagcaattcgatattcagctcaatggcattaactataaaatgagattaatgtggcgtgatatcgcgggttggattttggatattatgacgccggacagtgaatttatcgttacaggtttgccgttggtttttgggattgacttactggaacaatatcgtcatcttggttttaacggctcattaattttttatggtgatataaatcaggagaaacctttcaggaataatcttggtaaagaggacaggttatactttgtaataagttaacttgatgggggtaagggaaagatatttttaataatttattacatacgccgcttaattgcggttcttttatttctattaattaggtgaattatgtcaaaacaatggataagagaatgccaccttatcgttgtagacaaagatggcgaaaaagtaaatttatcagacctgaaaatcacatttaacattagcagaacggaatcttccaatcctgctagcggtatttttactctatataacctgaataacgaaaccagtaataaattacgtaaaaatgaatttaaaaagattaaatttgtggcgggttacaaggagaactcaggacaaatattctcaggccaaattcagtacacgtatgtaaaaagagacaacgcaacggatacttgtgttgtgattcatgcagcggacggggatgaagcacacaattacgcgaccgttaataccaccattgcggctggatattcgcaagcagatttagatcatttgctaatgcgtgatattgccaaatatggcattaccgccggtctacgccctgaattcagtaaatcagcatcacccaggggaaaagtactttttggcatgcaccgcaatgaagtttctaatttggcaaaacaatgtgatgctaattggcgctatgaagataacaaactacacattgtacccaaaaataaatacttaactgaagccattgtccttacatcaaaaacaggccttattggtatgcctgaacaaactattggctccggtattaacgttacatgcttaattaatccgaatatccgccccgggacattaatccgactggataaccgctcaatcaaaccagttgatccggcgactaaacaagctgctcagtctggcgatcataaggatgcaaaagcacaaccggcaacgttggacgctgatggtgattacattgtcttcaatgtggagtactccggcgatacccgcgaaacggagtggtacatggcaataatgtgtatcgccaagagcgatcatactttgctgaatcaatcaactcacaataaggataaggcagagagcgaatgataaatactgacgaacgactcaatagacccgaagcggtcttttttgctatgcaagaagtcattagcgccggattgtatgtctccttgccttgcattattcaatcatttaatgctgatgcggtaaccatcaccgcgcaaccggccatcagatggaaaatcaggcaaagagacggggaactggaatcggtatccttgccactattagtggatgtgccggttatattcccaaggggaggtggcgtgacattaaccttcccggtaagagccggtgatgaatgcttagtcgtatttgctgatcgttgcatcgattattggtggcaatctggcggtgtacaagagccggtggaccccaggcagcataacctgtctgatggatttgcgcttattggcccgcaatctcagcaacaaaaaatagcgaatatcagcactcacaccgcgcaactgagaagtgatgatggcgcggcgtatattgaacttgatcccagcagccataacgtcacgattatcacaccggcaaaacttatcgcgacagccaatggcggtactgaaatcacgtcacctgacatcatcctgaatggcaacgtcaccattaacggcaacttatcacagggcatgggcgctggtggtggcaccgcaaccctgcaaggcccggtcacggtgagtcatgatgtgacagcggcagggattagccttaaaaaccatgtacatagtggtgtgcaatcaggtggcggtaagacggggaaacctcaatgagatacagaagagaaattgacaacgactatgtatttggtcgtggagaggcgggttttcttatcaactcaccggaagccgtcgcacaagcggtgaaaacgcgcctgatgttgcgcagtggcgaatggtttcttgataaccgagagggaacagattacgacgacgtgttgggtaaaggcacatcgagtttttatgacctgattattagacagcgaatactgcaaacgccgggtgtagagaacattacccaataccgtagtgaaagaaacccagaaacaagaaaaatcaccattacagccacgatagacacgatttatggacagacaggagtaactgctgatgtatgaaagtattatcaacaccatgttacctgctattgataaaaacgggatcaatgctcctgattatcaaaccatcttgaatagctggaagacgatattcagggatatttatggggacgatatttacattgaatctgacagtaaagacggtgtttttttatcgctgatagcatacgttattcacggttgtaacaacgcaaccattgcttcctataactcatttagcccgacaacggcggtgggcgaagggctttcccgtaatgtcaaaatcaacggcatcaccagaaaaagctccagtaactcaacggtggatgttttggtcactggtcgagcgggcacagttatccgcaacgcttccgtccgggatgatgcgggaaacgcttggtcactaccggatgaagtgattatagatacacacgggcaggctattgtgaccgcgatttgtcaaaaagcgggcgcgatcggcgcattgccccacacggttaatcaaattgctacgccaacattgggctggcaaaccgtgacgaacccggttgcggctacacttggtcggggaattgaaaccgatgtagaactgcgaatacggcaagaggtttccgttgcgctgccttcgagaaccattatagatggactgatgggggccattgccaacctgcatggagtttcacgttaccggggatatgacaacgactcggacaaaacggatgagaatggcatacctgcccacagcatatcgcttgtcattgatggtggagactcgaaagagattgcccggactatcctggtgaagaaaacgccgggcataccgacatttggcaccacctctgaaacgattaccgatgattatggcaataaaaaaacgataaacttctatcgccctacactggtgccaatttacgttgaaatacacataaaaccctttatcggatatacatcagatattggcaataatattcgtaatgaaatatctaactatataaaatccctttatattggagatggagtatatgtgactcgtttatttgtaccggcaaacttatgcaataaaaacggtggacagacatatgaagtattatctgtgatagtgggaaaatcagcatcgacaaccggaacggcgaacattgacatagcatttaatgaagcgccgacgtgctcacctgaaaatattaaaatagtaacggtgcttgaatgaacagatatatgaaactaattcctgcatatcacatggaaggtaaaaaatatgtcaggatgcttgaagctgtgactgatattttcaaccagaatgcgctgacaacagatttactgattagccgttttgaccttgataaagcggtgggcaaacagcttgacattattggagaatgggtaggaagaaatcgaatgatccaaactccaattgaatcctattacttctcctttgatattactgacttaggatttgatagtggtcaatggaaagggcggtttgacagtgataaaagttatatcaaactggatgatgataattatcgggttgtcattaaagctaaaataggcgcaaataactgggatggaacggctgagtcatttaataacatcctgagttttattcattcaaataatggcctatcggtatcttttgaagataacttggatatgtcattcacagtaacgattaaaggaaaatcaatcagtacaattactaaagaaatcatccatcagggttatctctcgcttaaacctatggggataacggttaattaccatatagtggagggttagaaatggctaaaaatgattttaaagcatttgccattggtgaaaacgcgaatactttgtcacaagaagaatatgaaagttcagattttattggggagggttttaaatcgggaatagcgaggagtgagcgattaaataaagtttggcgccaatcttcggttattgctgcggtgatagggaaatatattgcagaaaaaaccggtgaagacgttatggatgatggtgatctggagaaactcgtagcgcaattggatttagcattaaaacataaaattactacagaaatccctgctgcttcactgacacaaaaggggatatcgcaactcaacagtgcgacaaattctgacagagaagaccaagctgcgacgccgaaagcggttcacgatgttagaaaaatcgctgagagcaaattgagtggtgtttctgatgcctcattgactcagaaagggattgtacaactgagtagtgcgacaaatagcacaaatgaaaccttagctgcgacgccaaaggcggttaagggggcatacgattttgcaaatacagcaaatgtagcggctaaaaatgctcatgatgaagcgaacagggctacagataatgctaacagcagattggcgaaaaaccaaaatggcgcagatatccctaataaaagtgagtttataaaaaaccttggtttaacagaaaccgtcaatctggcgaaaaattcagcgcaacaaagctttgttgatgctaattttgcacgtggaaatgttgaaattgttaatactaagagcatatatccgcgaatcaatttcttcccaccattgggtaaagaatctcgtggattctttgcgattgaagcagatctgacaaatgataatacgcaatctatttatttatataagaggaatgtcgcgggtaataatatttatctcattaattttcctaataaaagcggtatattagcgacaattgatgatataactgcgccagtcggcgtcccacttccgtatccatcccgttatacacccgcaggctatcttacgtgtaatggtcaagcatttgataaatctagatacccccaactagccatagcttatccgtcaggaatactgccaganttacgcggtgaattta

SEQ ID NO: 5835 - DNA, 135 bp, Photorhabdus luminescens
ttgtggttagcggttgtggcaggttgccgcctgctccatccgcgtaaaaaaatcctttctcttagctgtctgtcttttactgttgtgcctgtgcaattaccgcatccagcatctctgaaaccagcttctgcttag

SEQ ID NO: 5836 - DNA, 243 bp, Photorhabdus luminescens
atggctaaccgcgattgtaatgcagatttagcgatttcaaaagcccggcgcagctataaggtggggtatgcccgcacccgccacgaagaccgcagcaccggtatgacccgctattacagccagcaccccagtttgcatcttaaaggcaactggctggaagaagcgggctttgccaccggacagccagtacaggtcagtgttgagcacgggcagttgattatccggctcgttgagtacaactga

SEQ ID NO: 5837 - DNA, 1056 bp, Photorhabdus luminescens
ttggcggtcaacgtcgcaatggaatgggttgttgtggagaataatgcgctggcctcgcgaaatctgggtgattgccgcacgctgtcaccggaagcgtgcggcaaggctaaggagctgagccagcgcattctggataaaggcttgccgtcagtggaggacatgcgcggtaaactggcatcatgtcaggatgacagctgccgtaaaggagtctggacagagtaccggcaggccagtgatgcgaccatcaacagcctgaaacagatggcgttgaatggtgagttgagtcgtgaagaactggcattcatcaaccatgaactgggcaaggagctggccgtctcaggttaccgtgccaatgacaagatagggcgttcagagcagagcagctggttaaatggcggcagcggacccctctccgggttttttaacacggaactgcgtcaaaaagagctggaaaaatcgggcttgtccaaagcggatgcggcgcagtacgtgaaggaagagcagcgcaacctgttgttgctggagactgcggtcggggctattgggggagcagccagtaataagatacaggcgaagccatcatctgtatcatcaaaaaataatgttgataaaagcgttccggcggaagctactcaagtacagcctaaccaaacggctaataaatcaagtacaacaacacagacagatgtcgcaaaatactttggccaggacagaaaatattggtcggctgagccagttccctttaagggaaataaggtttatcaacgaaatgacttgtttgatccaagccgtattgatcctaaatcaggtaagacaaacgtagagcttatgagagctggtagagcacctatcggtaatgatggaaaacctgtcaatttacatcatatgttacaaaagcaggatggacctatagctgaggtaacgcagagttttcataaggataatcataaggtcatacatataaatgataacagtatcccctcaggtattaaccgctcggagtttaataagtggcgttctgattattggaaccaccgagctaacgattttaaatag

SEQ ID NO: 5838 - DNA, 93 bp, Photorhabdus luminescens
ttggaaaaaacgggtggtaactggctgagggcattgggaaaatcggtgtttggcggtcaacgtcgcaatggaatgggttgttgtggagaataa

SEQ ID NO: 5839 - DNA, 300 bp, Photorhabdus luminescens
gtggccggggtaaagcaaaaagcagttattaagacagaaaaaaaaccggcttcaatccccctgcccgaagaaacagaaatgacgaatgacgctgttgcgggcaaggcgttccggtcggggtcagagggtgttcagtcgggtacaggtcggccccaggtcggtacacagccggacagacaaaatccgggcggggccggaaagaaaacggttaacagacataaaacgcaaaaggccccaccgcccgctgcctcagccgcccatccccaatccgaaacggaggttaatcatggcaaaccgtaa

SEQ ID NO: 5840 - DNA, 423 bp, Photorhabdus luminescens
gtggagttggcgaaaagtgcttacccaaaatccggtggtgttttgggtgggtacttggatgcaacagggtctatttccggcagaggtgtgtatgaatacccaagtattcgtgtttatagtgctgtaaacaaaccgtcaccgggcgagctaggcgcatataccacaggtgaatgtgatgggcgatatggcagcaaaaatatggccttaaagtctacaaatggttggtggaaatgtggcgatactggagtgatttatcagtggggagtaactcgagttctagagcctctagagattatcacagttcagctaccagttaggttctctaatgcatgtgtgaatgtaatgttaacagtgaatcgactaggagccagtggtggtatagctaatggttacgccgctgttctaagtccatcttcattcaat

SEQ ID NO: 5841 - DNA, 429 bp, Photorhabdus luminescens
atgtttttttcagtaggtgttgagttatcgaaaaatgaaaatacagcgtatggtttggtcattcctgcgctgtgtgccgaagattatggctgtttttctgccgcggataataaagaagacattgcgataatggcacgtgaggctatcttgttaacagtaaaagatatggtcgcgaataatagcgcagttgaacatattcaggatgctggctatctggtttatgcaaaaaacgcagaatatcaatacattgataactggtttgttatcaacgttgatttatctgagttttccggaaaacaacagcgtattaatatctcattacccgatacactcattcagcgtattgataatcgcgtcaaagaaagtccgacacaatatcgagatagaagtcactttttagctgaagcagcaaaacatgaacttaggtaa

SEQ ID NO: 5842 - DNA, 771 bp, Photorhabdus luminescens
atgttattttctgattcaagtgatgttaccctggtcattacaagttgtggccggtttgatttattaaagcaaactattgagtcgtttgataagtataattcttatcctataaaagaggttgttgtaacggaggattctggagataagtctattcattctgtcatacctgagcactggctaccatactgtgaaattattttaaacaatcctaaactagggcaaattaagtcaattgatctggcatatagtaaagtaaaaactgactatatcttccattgtgaagacgattggcttttctatagagatagatttattgaggattcttttgttgctttgaagtctgataaaaacatactccaagtctggctcagagatttaaaagaggatgtgatgcttcattatccattccattaccctagtaattttagagaattagaaggtgtttgtttttctactctggaaagcaatgatttcagatggaggggattcagttttaatccagggcttagaagaaaatcagattatgaattattcatgccctataatctagcaggtgatacagagatgacactatcaaagaagtatgcagaaatagataaatatgcagttattttagataaaagcgcagttaggcatatcggttgggatgatcatataaaaacagatgaagagataagacagaggaaacgcgaaaatagaaggaaaataaagtattttacttttggtgtaattacaggatgctttttaatgtattttattaaaggattttaa

SEQ ID NO: 5843 - DNA, 756 bp, Photorhabdus luminescens
atgaaaatttttataattaacttagaatcagatgtcgaaagaaagtattcgatgttacagcaagcatcatctttgagattggatgttgaaataatcaaagcggtaaatggcaaacagctttccaaagatgaagtaatgaaacttagtcgcgacttttataataacgggatgactcttggagagctaggatgctcgttaagccatctattagtctaccagagaattgtcgacgaaaacattcctttagctcttatcatggaagacgatgcagaaatcaataaaaatatctctgatgtactgagtgcattagataaattcaacaccaaaaatcctaacaaacccaatatcattttacttaataaaactaacgaatatattgacactttcaagaaaaatataacgggtcagtattatttagttaatgtgattgaagcagcttgtacttatggttatgtaattaataattacgctgcacaatgtttacttgattttctacagcccgtttggcttgaagctgataagtggcgttttctcaatgaaagacggatcataaaagtgaaagcagtggtacctccggtcatctctacaacgccgctatatcttcaatcaaacttggcgctagaaagaaaaaaacaaaagcaaagtaggcaagaattcttcagaattcaaagaaaaagaaggtcattatacgtaaaattatatacaatgttttggcggatatttatccgcttattggtgaaacggataaagccataa

SEQ ID NO: 5844 - DNA, 957 bp, Photorhabdus luminescens
atgataatgcaaggttcatatttacattctaacaaaaagttatcaattatagttgcagcacataacttagaggatttaataggaaaatgcttagagagcgtaaaaaaatgcctatataaagtctcttctgatgattatgaggttttgctgatagatgacagttcttttgattcaaccccatcaattttaaaaaaattctctgaagaaaatgagtcttttatttatataagaaaggagtttaggaacttaggtaaagtaaaaaaatatgcagtagagataagtagtggagagtatataactttcgttgatggtgatgattttttatctgatttttctatgagagaaattttagacttcttagaatatagacagccggatatatttatcagtaagttaaatgaagtaagaaaagatgcggatataatagaaaggtcgaggttatcatctcccataaaacttcacagaaacacggcaataaaagaatttttaattcataagaaatttcaggcgcattcaatagggaagttttttaggaaggagttattttgtggaagtaattttcctgaagttccttgttatgaagatgcgttatcatttccttcttttttagttaagtgtaatagtatttattatactaatatgaaatactataattatataaagagagaaggtagtctttctaattctattaatgacgtaaaagtaaatataatggcagaagtgatcttaataatggataaaactttcggtaaaaattttaggaatctcacagcctgccatgctatagaactcatctataaatatgaggataaattatcaaaaaaatattctgactccatctatcagatagtgaaaaacctttcgatattaggattcatgctagatagtaatattcgatttagttttaaaagaaaatttatgaaaataagaaaaaatatgatttcaacgaatggataa

SEQ ID NO: 5845 - DNA, 771 bp, Photorhabdus luminescens
atgaaacttacaaaaaaccacctaatcaagctattacccgttgttgcattcttcatcttttgccttttagctcatatggctttaggctatcgcttaaaaatagcgtatgtattcgctatattctttatttttctattgctaaacaaagtcactgtggtttacagacccctgcttatcgttcttggtgtagtaactctcgtttatgcccctatcgggcttacatatggctcaccaaacttcaactcaattctttcgttattctatacaaacgaacaagaagccagtgaatttatctcttctattccagttgaatattatctctttagtacgtttatcctgatctcttgtttgttctctctgaaagtaaaaattaatttacatagaaatattaacattgttctattctcttttgcattaattacggtaatacaccaccctttaaaggcttttatacagggtaaggaattcaatatccttgactctggacttcctgaaattagagcagtcaaagatgtcactatcaactttataagggtaaaaagtgaatataaaaaaatgcaacaaatactaagtgagaaggatacgtggggaacggtatcggcaaagccaaaatatatcacctacattgttgttcaaggtatatattatataagttctaattgtaaaactgggcccgctgatatcataaccaatgaagtaaattgcgagctatatcctgttgataaaccctctgaattaataagtaaattacagaatacagaatatagttaa

SEQ ID NO: 5846 - DNA, 969 bp, Photorhabdus luminescens
atggcctatacacaactgaccgaaacagaaagataccagatttccagtttaaaagaagcgggtttttcacagctttttattgcggagtcacttaaacgaagcccatcgaccatcagcagagaattgaagagaaatcaagaagtccagacatactgccctgaacaggctcatttgaaggtattggcgcgtcgtcattttgctaagaaagccgtgaaaataacgccggaagtaaaaagatggataaaacggttaatttggaaagatttaagccctgaacaggtggctgattatttgaagcaacataaagggatatctttgcatcatgagacgatttatagactgatttatcaagataaaagagaggggggtgatttatggcaacatctgcgaatagccagaaaaccctatcgcaaacgctatggtcgctatgaaagaagaggtaaaattaaaaatcgggtcagtattgatgaacgcccggaaattgttgataaaaaagaacgtattggggactgggaaggagatacgataatagggaaagataaaaaaagtgtcttattaacattggttgaccgcaagacgctgtatacaataatcgttaaacttgatagcaagcaggcatcagaagtcgcgaaagcggcagtgaaagtattatacccgttaaaacaaagggttaagaccatcacgttcgataacggtttggagttcgcagatcatgaaatcatcggtgaagaattagaaacccaaatttactttgctcacccttactcgccttgggaaagagggatcaatgagaatatcaatggactcatcagacaatactttccaaagggaacggattttaatgaagtctctgatcaggaaataaattttgtggtaaaccgattaaataatcgccctcgaaaaacacggggtgggaaaaccccgaatgaattatttaaaggaatacgaacatgtttacttccagattaa

SEQ ID NO: 5847 - DNA, 978 bp, Photorhabdus luminescens
atgaataatgatgtattagtttcaattatcatcccggcctttaatgtcgaagatattatagaaaatgctattaatagtgttcttaatcagacatataaaaacactgagatcatcattgtcaacgatggatcaactgatggcacaatggatgttcttaaccggctgtctgaacaatacttcaatattgaggtgttttctcaagaaaacagagggatttccgcagcaagaaacgttggcttaagtaaagctaaaggggattatgtcactttcctagatagtgatgactcttttgagccttcgtttattgaatcagtgttgcgaaaaaatggtgagacaaagagtgatattactttttgtttgttcaagaatgtttatacagacaaagagatttgttctaaagattatcgagatttaaataatctggcattcaattttttgaattttgattattttggcatttgttgtatgttaataaaacgtaattttttgttagaaaataaaatttggtttgatgaaaacctaattgtaggagaagatatttcatttattttgttatgtatctgtaaagcgaagttttcttacatcccagaatatctttataattatatttaccgaagtgattccatcatgaataagaggtgggatgtaaagaattatatagatgaaatccaagcttgggacaagatttatcaagatatggacacgcaataccataacgaagatcgtgaaacctttatgagaaaagttaaatcaaaagctttaagcctaaaaggccagctaatgtggaaaatgctagcatccaaaagatttgatgagctttcttcttttttatccgatttttcttatcaaagacaagatgctgaatttattcggaagagaaataagtttttatttaggctgaaaataattaagtctaaaaataaaataatttggttgttggctaatttattactgactaaaagaaaagacagaatttaa

SEQ ID NO: 5848 - DNA, 354 bp, Photorhabdus luminescens
atgtttttttcagtaggtgttgagttatcgaaaaatgaaaatacagcgtatggtttggtcattcctgcgctgtgtgccgaagattatggctgtttttctgccgcggataataaagaagacattgcgataatggcacgtgaggctatcttgttaacagtagaagatatggtcgcgaataatagcgcagttgaacatattcaggatgctggctatctggtttatgcaaaaaacgcagaatatcaatacattgataactggtttgttatcaacgttgatttatctgagttttccggaaagcagaggcatattaataatcgtgacaaagaaagtttggcacaatacgatgttgaataa

SEQ ID NO: 5849 - DNA, 804 bp, Photorhabdus luminescens
actacagaaagccttggtttaacagaaaccgtcaatctggcgaaaagtgccgtgccgaatagccggaaagttaatggcaaggtgctgagtggggatgtcaatattacctctcaagatatctttaatgggcaagcaatatcgatccctgacaaagccgatttaaatgattatcaaacgccagggctttattatcagggtttaaatgtacaagcgacagccggtaaaaactaccccgaagcatccgctggttctcttgttgttttacaggctgctggcactattcaacgttattttgtctataatagcagtcggatatatacacgggctttatacccgtggagcggtccgggatggacaccttgggcacaagaatataacacacagaataaacctattgccggggatgtgggggcgtatccaaaatctggtggtattgtaaacgggaatgtggatgcaaccggatatatttccggtaaaggagtgtatgaggctccaggtgttcgggtatatagttcaatgaataaaccttctccgggagaactcggtgcatataccacaggtgaatgcgataatcgctacgctttgaagaacgatgttggggtgattaatttacgacttggaagttgggtaacagagggtgggtggacagacgagacaaaagattggtctgctccttctgggcatgtccttgttggcttgggtacagtaatgtggagttcaggaagacagcaccttgccagtgtacattatcgtcctgtacaagcatacataaatggtatttgggtaacaatctcctcgatctag

SEQ ID NO: 5850 - DNA, 513 bp, Photorhabdus luminescens
atgaaaactggtatttttacgccttatattccgaaagatgccatatcttgtgttcaatacttaagagatgatgaaggtaatgactggtatcagattcaagaaaaatttttagaagaaactatcaaattcacatttaataaagatggcgttatcacttcaatatcaaaggatatatctagtctattccctatccatttatccgttgctgaacttgcaccagaagatgtaccaactgagataattatcacagatgggtggttttttgacggtgagaaaatcatcaagcgcatttatacattggaagaacaacgacaacaggaaaagaaccagaagtcagaaaaaatgattgctgcaaatgaggtaattcagcctttgcaggatgctattgatttaggaatagcaactaataaggaaaaagccttattactcgaatggaaaaggtatcgagtgtcactgaatcgcattgatacttcattagcatcagaaattatctggcctgaacaaccaaaataa

SEQ ID NO: 5851 - DNA, 1098 bp, Photorhabdus luminescens
atgaatattatgataacaaatttccatacagggaatggcggcggtcataccacatatatcatgaatatagttaaatattttgattataataaaggaaagctgctgattgcttgtccacctgaaagcagattatacaaagaacttaccaattccggatttaataatgttattcctctttactttttctgcaagcttaataagctaaaacaactcgtaataacctgtaagattttatcacaaattgccagaagacaaaaaatagacataattcatactaatggaacttctgacaacaaaatcgctatcctcgcaaaaatacttttcgggatgaaatgcaaaataatctatacaaaacataatcattatcctgtatcttggttatccaaaatcaggctgaaaaaattcaatgaaagaattattttcgtaagtgattccactagaaatcaatgctcctcttttatctctgataaacaagttgttactataaaaaatggtattgatactgataaatggaaaactgaacatccagttatagaaaaaggaaaaataacacttatttcttctgctggaaccgctgaacacaaagggtggcattttttgataagatgcttggcaaaaaataaagagctatctgataaatttcgtataaaaattattggacgcattcctcgccaagaagatataaataaattagtgggtgctcctttctctcacgtcgatattgaatttactggttatattaatgatgataaagaaattattaattatatggaaaatgcttctatagggtttgttttatccactgattgtgaaactatcagttttgcttgcagagaaatgatggcttgcagtttacctgttattgtcagtgatttcgggggattaccagaaaatgttgatcatggtgtcaatggctggatcacaaaagcaagggatgaaacatcaatacataacgttttaaatttgattgctagtttatcatctcaggaattaaaagaattgtctgaaaaagctagagaaaaagcggttaatgagtttgatgtgagaaaaatggtttcagaaacgataagtacctatagttctgttcgtaattcttaa

SEQ ID NO: 5852 - DNA, 1551 bp, Photorhabdus luminescens
  misc_feature (346)..(346): n is a, c, g, or t
atgaaacttacaaaaaaccacctaatcaagctactacccgttgttgcactcttcatcttttgccttttagctcatatggctttaggttatcgcttaaaaatagcgtatgtattcgctatattctttatttttctattgctaaacaaggccacagtggtttataggcccctgcttatcattcttggtatagcaactctcgtttatgcccctatcgggcttacatacggatcaccaaacttaaattcaattctttcgttattctatacaaataaacaagaagctagtgagtttatctcttctattccagttgaatattatctctttagtgcgcttatcctgatctttngtttattatctctaaaagtaaatgttaatttacatagaaatattagtgtttttctattttcttttgcattaattacagtaatacaccatcctttaaaatcttttatacagggtgaagagttcaatattctcgactctggacttcctgaaattagggctgtcaaagatgtcactatcaactttataagggtaaaaagcgaatatgaaaaaatgcaacaaatactcagtgaacatgatacgtggggaacggtgtcggcaaaatcaaaatatagcacttatattgttgtgattggagaaagtgtacgtagagattttatgaatgtgtatggatttccgatacataatacaccttttatgagcactgccaatgggacactttttacaaattatatctcagtaggtccatcaacccagatatcattggcaaactcactagcaatggtcaaagatggtaaaaatattttaagcaacaatattgttacattagcaaaaaaagcgggcttttatacctactggatatcaaatcaaggttctatggggatatttgatactccggttgccagcatgggagcaagggctgattctccattatttatcaaaaaaggtgaatctagttctggtcttaacagaaatattcctgacacagatataataccaattgtgaaaaaagccttagaggataagagagaaaagaagctaattgttatccatttaatgggttctcactccccctcttgtaccagaacaaattatgaatacaaggtattctttaagtcagaacaggtttcttgctatatacagagtattgaaaataccgatgacttgttatcaataattactgatgaagcacagaaaaatgagaagaattggtctttgatgtattttgctgatcacggagtttctttctttgagaaagatagtaagaagatgaggcttgctcataatgataaatataagcaagattatcaggttcctatgtttattacatcttacgatgatacgtcacgtaatattattaatgttcaacgcaattcaatgaatttcttaacactattttcagattggacaggtattaaagagtctacaatacctgagaattgtaaaatgttgtctaatgaaatatgtgaaaatcaagatgatgttctgaactttagtaataaggtcatgaaatatagctcattaccggaagataaaattcctgaatga

SEQ ID NO: 5853 - DNA, 570 bp, Photorhabdus luminescens
ttggcagaaaaagcgggctggctgacaatctaccatgcagcacctcattcaagggaatttatcggcgtgacaccagaatatctgatgaagggagttggcataccggccagttcctatacaaatgctccgacacttcctgactccgattctctggctgtcaggcgcacggcagacggagagcactgggaaattgtccccgattaccgtggaaaaacagcttacaacacacaaactcgcttaccgcaagaaattactgatctgggtgaactacccaaaaccctgacattcgaacaaccggctactcattttgatcgatgggatggctcaaagtgggtgactgacaaagtggcaataaaggatagtgagattgagcaggcagaacaactgcgcgacacgctgtgtacacaatctaatgaaaccattacgttgctacaatatgccgttgatactgaattggcttcggaagaggaacagacactgttacttgaatggaaaaagtatctggtattgctgaaccgtgttgatacttcattggcccctgatattaagtggcctgagatgccagaatga

SEQ ID NO: 5854 - DNA, 729 bp, Photorhabdus luminescens
aaccttggtttaacagaaaccgtcaatctggcgaaaaattcagcgcaacaaagctttgttgatgctaattttgcacgtggaaatgttgaaattgttaatactaagagcatatatccgcgaatcaatttcttcccaccattgggtaaagaatctcgtggattctttgcgattgaagcagatctgacaaatgataatacgcaatctatttatttatataagaggaatgtcgcgggtaataatatttatctcattaattttcctaataaaagcggtatattagcgacaattgatgatataactgcgccagtcggcgtcccacttccgtatccatcccgttatacacccgcaggctatcttacgtgtaatggtcaagcatttgataaatctagatacccccaactagccatagcttatccgtcaggaatactgccagatttacgcggtgaatttatccgtggttgggatgacagccgaggggtagatatgggacgcggaatgttgtcttggcagccagcagggattcaagatcatatgcactataaggtgatttcaaaacaagtcgttgaagaccttgtacttgcgggaaatcaatcgtggggaaccgagaaaaacagtacatatacacgttcactagatcaaaacatatcgactggcggagtaatcggaacaactgtaaatgaaacccgcccccgcaatattgcatttaactacatagtgagagcagcataa

SEQ ID NO: 5855 - DNA, 120 bp, Photorhabdus luminescens
ttgattaaagggtgtcctgatatagttgaaaatgctatttgcggaggacagatttgttataacagccaagcttattgggtaagaaatcgaagtgtaaatatagagctttccgttaaataa

SEQ ID NO: 5856 - DNA, 189 bp, Photorhabdus luminescens
atgttttcaaccagcgccgaacaatgggcaaatgacacgtttcaacatgcggaattaggtgataaacgccgtaccaaccgcctggtgaaagtggcctgttcgttggctaaccatataggacaatcgctcgtgcaatctcttgactctcctgccgatgttgaagcggcctaccgactgacccgaaattcc

SEQ ID NO: 5857 - DNA, 267 bp, Photorhabdus luminescens
gtggtcatgcaaggtcatacgcaaaccgaagccacagtgcctcagagcgtcgcaggggcgccgcttgcgggctctgtgccgcccgcgcccgcagaacgggcacccgccgcccaagcgagttgggcgacgttcgcccgttgccgaaaaaggcgctacactgaccagagcgcggcgggaaaaaccggccttcgggggcgaaaagcgcgtcagggggttttggggccggcggtgaacgcccattggaaaaaacgggtggtaactggctga

SEQ ID NO: 5858 - DNA, 789 bp, Photorhabdus luminescens
gtgatcaaggatatggtagacactaatatccgcaatcagcaggaaatgatggatttctgcaacagcaacccgacccagtgtgcacagaagtatggttatctggttgatcagtggccggtgtttgaacgtaccctcaaaaatatggaccgggatggcacattgccggttgagttcagaaattacctgtcggcggtgaatacgttaggtcaggcggccacaggcaaggtaggcgaactcggctggacaaaacgctttgaggcgatgggcatgagtcaggagactgccgctgcaatggcgatgacgctgcctattgtgatggagggagccaaagggccgaagtcgtcaccaaaatcatcgcaaaataatgccggcaaagatgctcagcctgagttagcagggaaaaacacaagtggtgcggaaaatgcggcaacttatccgaagttaaaagaagacttggtgcaacgaaacctcagtcatattgcttcgcaagatccaaggttggcggctgtagttaaaggtgataatggtaagctcaattatggcattggcactggaactcgaacagaagcggatagattaggcaaaatctgggtaggagatggagccaagaagactaccggaaatggctgggttagtgcggatggtacgagaggttataggccgccatcagagaaacctaatagtgcccatgccactactggtgtgcaagccaactttgaaacttattccattgattctaaaggaaaaataaataagactggaaacggtcatttaaatattctggattaa

SEQ ID NO: 5859 - DNA, 348 bp, Photorhabdus luminescens
gtgaaagcagtactaaaaggcatagattgtatgcataaagatccagttatgtactccggtgaagatgacggaactattaatataaccttatccctattaatcgggccagagttggaaagtgggagtgaatattttgatctttttatctgtacacctgaatggctgtgtaatcatcattggcagccggaattgatacgtcatacgcttctggtacgtgagtataatttggatgaaattaaaaagaccattacaaactatatcgatcagtgcgaggggcaagattggatggagatagcgcaaaagctatctcgtgtctttgcctgggaatatgaggattatcaaccttaa

SEQ ID NO: 5860 - DNA, 231 bp, Photorhabdus luminescens
ctgcccggcttcgctggtaatagtgatcggcttccctgtggtaaagcccaacgcagccaaccagcgccccttaatggtgagctgcgggtacggattgggcttgccccggttaggccggtagcccacggtgtaatgccgtggctttacagcctgcactttagttgtaatggtttttgctttagaatcgcatttagccatgatgaactacctctgatagttggtgatggttag

SEQ ID NO: 5861 - DNA, 363 bp, Photorhabdus luminescens
atgcagttccctgaacggcttaccacattacgcaaggaacgcgggctcactcagcaggcgctggctgatatggctggtgtggcagttttacagatccggcgttatgagggaggctcagcacaacctaccttagaggtaatacgtcgcttggctatttcgctcggtgtcagtgcggatatgctggtttttgatgaacaggagcgcggtcctagtgagcggctgcgctatcaatttgaggcaatttctcgtatgccgcagtatgagcaggaggttattaaggagttgctggatgcaatgatcatcaaaactcagattgccggcacaatggcctgtatttcaacaacagcgaaggaagagagttaa

SEQ ID NO: 5862 - DNA, 2463 bp, Photorhabdus luminescens
atgacccgcgttcccgacaccgatttagtccacttaaagcaaaccgtctcgttactggggctggcgcgtaagcaaggccgtccgatgaaaaaacgcggtgaggattatgtgctgcgctgtccgttccataacgagaaaacgccctcaatggtgatatcgccggctaagaacctgtatcactgctttggctgtggcgcagcggggtcggtgctggactgggtgatacaaacggaaggggtgacgctgaaaatcgctatccgccggctgcgggagctggccgggttgccggatatggacaatgcagttgtggctgcttcttctttagccgccctgccggagtcacaggcggcccccctgccgcgcccgaaactggccgacctggacgatgacgggcaggcgctgttgcatcaggtgattgatttttatcatcagcacttactggcgtcaccggaagccaaagcctggctggcacgacgcgggctgaatcaccctgaactggtcaatcactttaagctggggtacgcgggccatcacgggatcggcggttcagcgggcttattaccgtccaagagcagtcaggaaggccagcacctgcgcgacaagctgtcggggctgggcgtgttgcgtactaccacccggcaggaccacttccggggctgcgtcgtggtgccggtgatcggctgggccgaatcggccagtgtggccagccgcgggcgggtgctgcaactgtatggccgccgaacccagccggattacaaagtgctgaaagacagcccgaagcatctgtatctgccgtcaccgctagccggggtctggaatgaggcagcgatgaaagccgctgcggaaattatcctgtgcgaagcgttgatcgatgccatgacgttctggtgtgccgggttccgtaacgtgattgccgcgttcggggtgaacgggtttaaccgtgaacatctcgacgcgttgcagtatcacggcgtgaaacgggtgctgattgcctttgaccgggacgaggccggagaccgtggcgtggctaatgtggcggctgatttactggaagccggtatcgaggcatggcgggtgcagttcccgccgggtatggatgccaatgactatgccgtcaaaagcggcaacgccgaacatgcactggggctggcgttgcaacaggcggtctggctgggacagggaaccgcgccgggcgcggtgttcagccatgagcggcccgtctcgccgggtgtgacggaaaagcctcacaatgccgatgtggctaaaccggctgccttagccgccccaccagagctgactgttgcccccgtgccctgtgagcgcacggcctgcggtgaactgctgatgaaaagcgggccacgtatctggcggatacgggggatgaaaaaatcgccggtgcctgatgtgatgaaagtcaatgtgcaggtgcgggatgaaacgtccggcctgttccatgtggatacgctggacatgtatcacgcgcggcatcgtcagaactacatcagcacggcggcgcaagagctggaatgcgagctgtcggtcatcaaacgcgaagccgggcgggtcttgctgatgctggagcagcaacaggacgcgcaacagcaagccgacgccgaagcctcagggacaacggcggtgacggtcagcgcggaagacgaagccgccgcgctggcgttgctaacatcgccgaacctgacagaacagattatcaacgacatggccgcctgtggggtggtcggcgaatccaccaatctgctgaccgggtatctggcggcagtctcgcgcaaactcgataaaccgctggccgtgttaatccagagcagcagcgcggcaggcaagagcagcctgatggatgccgtgctgaacctgatgccggaagaggagcgtatccagtactcggcgatgaccggacagagcctgtattacctcggcgaaaccagcctgcaacacaaaatactggcgatagccgaagaagaaggggtgcggcaggcggcctatgccctgaaactgttgcagtccgacggcgagctgaaaatcgccagcaccggcaagaacgagcagagcggcgaactggtgacgcgggaatacagggtacagggaccggtgatgctgatgttaacgacgacggccattgatgtggatgaagagctgctgaaccgctgtctggtgctgacggtcaacgaatcgcgtgagcagacgcaggctatccacgccatgcagcggcaccgccagacgctggccgggttgctggctgactcggagaaaggctatctgacgcagttacaccagaacgcccagcgcctgttaaggccgctgaaagtggtcaatccttacgcccatcaactgacgttcctgtcagacaaaacccggatgcggcgcgaccacatgaaatacctgacgctgatacaggccattgccctgctgcaccagtatcaacgtgaagtgaagaaaaccacccaccgc

SEQ ID NO: 5863 - DNA, 579 bp, Photorhabdus luminescens
atgctaacagcagattggcgaaaaaccaaaaatggcgcagatatccctaataaaagtgagtttataaaaaaccttggtttaacagaaaccgtggagttggcgaaaagtgcttacccaaaatccggtggtgttttgggtgggtacttggatgcaacagggtctatttccggcagaggtgtgtatgaatacccaagtattcgtgtttatagtgctgtaaacaaaccgtcaccgggcgagctaggcgcatataccacaggtgaatgtgatgggcgatatggcagcaaaaatatggccttaaagtctacaaatggttggtggaaatgtggcgatactggagtgatttatcagtggggagtaactcgagttctagagcctctagagattatcacagttcagctaccagttaggttctctaatgcatgtgtgaatgtaatgttaacagtgaatcgactaggagccagtggtggtatagctaatggttacgccgctgttctaagtccatcttcattcaaattgactaatgactatgctaatactggtattagtgtaggttattattggttagcagtggggtattaa

SEQ ID NO: 5864 - DNA, 423 bp, Photorhabdus luminescens
atgtattattacagtgcaacaactaacgcattttatccagccgaatggaaacaagactatatcaatgcaggttcatttccaaatgatgcagtggaagttaatgaggctattttcattgagtttgctggcagtattccaccagagggtaaataccgaatagcgggtaaaaatggtttaccagaatgggcagatattcctccccccacaaaagaagaattacagcaacaggctaaatttcaaaaacagcaattaatagctgaagcaacaaaccaaatcgcaccattacaagatgctattgatctaaatatggcaaatgatgaggaaaaagcacaattagtagcttggaaaaaataccaaatatcactaagtcgtattgatgtcacattagcaccggacattaactggcctaaaaaaccatactga

SEQ ID NO: 5865 - DNA, 627 bp, Photorhabdus luminescens
atgaatacacaaaaatactctttagaatatgagattgccacattaggtaaagatggattagcagaaaaagcgggctggctgacaatctaccatgcagcgcctaattcaagggaatttatcggcacgacaccagaatatctaatgaagggagtaggcataccggcgagctcctatacagataccccgacacttcctgaatccgattttatggctgtcaggcgcacggcagacggaaatcactgggaaattgtacccgattaccgtggaaaaacagcttacaacacacaaactcgcttaccgcaagaaattactgatctgggtgaactacccaaaaccctgacattcgaacaacctgctactcattttgataaatgggatggctcaaagtgggtggctgacaaagcggcaataaagaacagtgagattgagcaggcagaacaactacgcggcacactgtgtacacaagctaatgaaaccattacgttactccaatatgccgttgatacggaattggcttcggaagaggaacaggcattgttacttgaatggaaaaagtatctggtattgctgaaccgtgttgacacttcattggtccctgatattaaatggcctgagatgccagaatga

SEQ ID NO: 5866 - DNA, 759 bp, Photorhabdus luminescens
gtggaattggcgaaaagtgctgtgccgaacagccggaaaattaatggcaaggcgttgagtggggatgtcagtttgaatgccggagatgtgggggctttaccgatttcgagtacattaagcgctcaaacaggcaccttaagaataaacaatggatcgaattggccgaatatcgaattcagagcagcaaacaagcattttatcggtattgaaggaacagctggcaatcgtttgacgatatacgctaatgatgaaaacagcaatcgcaaatatactttagcaacaccagaaaaatccggcacgttagcaacacttgatgatatcaacatatctgtcggctcacccatcccatggccgttaccaaatgtgcctgctggttatctcgcatgcaacggtcaatcatttaataaatcactatatccacaattagctatagcttatccatcaggtgtgctgcctgatttgcgcggtgaatttattcgtggctgggatgatgggcgcggtgtggatcgtggtcgtggggttttaactcatcagggggatgcaattcgtaatattactggttataccccaggtacaattttacgtggaaataatagttatggaggatgtttttctctttcaggtgaaaaggctccaggaaatgaatatacagatgtctggcaaaaacaagttctctttgatgcttcacgagttgtccctgttgcttcagagaacagacctcgcaacattgcatttaactacatagtgagagcagcataa

SEQ ID NO: 5867 - DNA, 573 bp, Photorhabdus luminescens
atgatcactttgaaaacgttaattggtacaactattgtgattctagcttcgtcaacacaattagctttagctgctgagacaaaagaaaacattaccgataaggaggcaacattagaagtttcagaaagtagaatttctaatttatcagccacatatgcactacaaattaaaaactcatcagcgacaaagagtattactcttgttacgcaatcatctaattgcatgtacgatagtggagatgaaaaaatacgcttagaggcaggtaaaacctatctgggaaatttacaggataataataactggatagatggatgtacaaatgaaactaaaactgtcgattggagtgttagttatattaatgttgccaataccgacacagaaaattatacactaacatttcggcatggtcgtggtcatgcaaattcagatggatctggccctgaatggtatacattgattaaagggtgtcctgatatagttgaaaatgctatttgcggaggacagatttgttataacagccaagcttattgggtaagaaatcgaagtgtaaatatagagctttccgttaaataa

SEQ ID NO: 5868 - DNA, 213 bp, Photorhabdus luminescens
atgtttgaaatcagagtaaaaaaacttaaagatgatctaaacctcatcaaaaccgatctcgcagttatgaaagctaactatgcaacaaaggaagatatcgcatctgtgagaattgaggttcaccaatctattgcaactcaaaccaaatggattgccgccacaatgttaggaataactggtctggcaattggtattgcaaagcttatcttctaa

SEQ ID NO: 5869 - DNA, 117 bp, Photorhabdus luminescens
atgagagttctgctctatctgcattcggtgactgtaatgatgatagatacatcacaagttcttgagtgggtaaaacagaaataccctgctatcatggggaaagatagcaatcaataa

SEQ ID NO: 5870 - DNA, 291 bp, Photorhabdus luminescens
atgactaaacgtatgccaccccatccggggcgctatatctctgacgagatagagcacttaaatattagtcttagagcgcttgctcgtgcactggatgtctcaccgtcaactattgggcgtgttgttgaaggtagcgcggcagtaacgccaggaatggccgttcgtttagccaacgtgatcggcagtacgccggaaatgtggctgagactccaggaagcgtatagcttggcacaagttaaacaggaaatagatttaactcgtctcactcccctgtttacgccaataccttaa

SEQ ID NO: 5871 - DNA, 279 bp, Photorhabdus luminescens
atgattaaaagttggaagcataaagggctacgaaagtattatgagaagggaaccacggcgggaattgttgcacaccacgctaacaggctagacctactgttaaacgcattagatttagcaagcggcctgaatgatttaagtttaccgagttttcaacttcacccacttacaggagatcgaaagagtatttgggcggtaagcgtatcgggtaactggaggttaactttcgaatttaacgatggtgatgtttatatactgaactacgaggactatcattaa

SEQ ID NO: 5872 - DNA, 1527 bp, Photorhabdus luminescens
atgaagaaaatttttttagctacacttattacagggattgtatcagcaagtttttttgcacaagcacttcccgaaaataacagcgagcatattgctgatctgcaagacaataccagcaacgaagctccactattaaaatctaccgatccgggcgctgagcgatttaagcatgtcggaaaactgagcggtcgcggccaatgtaccgcgacacttattgccggttcagaaacccctgatgccaatcaacaagcacttattctttccgcgggccattgttttgattcttcattagataccaatgaagtcatcattgatcaacctgtaggcccaggttggacatacacgccaaactacttcattgacttaattaatgaacaccaacctgttgatgttgatagagttttatacgcaacaatgaaaggcggcgaccttgcggttttcagacttaaagcaacgtatggtgagttggcaaagcgcggaatactgccggtaaccttacaaaaagatcatgaaccatcggcattagaattaaccagccagcagattgaacttgctcatattccggtcaatggcatagagagtgataaacgttacctgcgctattcggcttgcaacattactggaaaagcttcgcttgtatatgaaggcatatgggcttggtctccggccgctgcggttaattgcgccggtgttgcaggaggaacttcgggttcaccggttatgttaaaagatcaatccaagataattggtgtattaaataccaccgtcgatcgaagttactggggttgcggtcttaaccggccttgtgaatttattatcgatcacagtttctcacgtacaggtgccagctattatatgcctattgataaaattgcacgtgcatttacttctgatggaaaactggatttaagtaaatttgatgatggcaaagggatcactattaacaccagcggcccattaattacaaagggtaccgttaacaacaaacctgtcacctggaatttacgccttgaagagaaaggttttgataatattcgctataaaagaggacttgcgagtaatgttgattgtaccgatcctaaaggatacagcaaacctgttccagtcacgacacaaccgctggaaaaacttaccgttccttccaaagaagggatatataccatgtgtgtcattgggcaacattctgcaaataaacgctggcagagtacatctaacgcatcaataaaactacgtgaaattgataacacccttccgggaataagaccggattcaacattactttttcaaacagatgatagctgggttatcgacctcagatttagaccttgggaagttgttgatatacgttataaagcaggcccaagaaaatcgacaaaatgcgatgattataaaaattactctacttatagaagagtaccgattacgattaaaaagaaagactctccaatacgcttttgtatgtatggcttagatcaagcaggcaacataggtgcaatattttttgaggactttggagaacaaaaataa

SEQ ID NO: 5873 - DNA, 405 bp, Photorhabdus luminescens
cgactctatcttgttccaaggacaaggcgttatgccaacccaccttggggatcggtttatctggacagagaaaacgtgttatcaggtgcaagcacactggcttaccgggaatttctggcaaaacagaatattgtcatgtccagtgaacaacgggaacccgaagatcaattcagtctgatactgctggctttggtttacattttggaacaaggacataaacccgctgcacgtacattgttagaacagcacttactgccttgggcttaccattatctggaattgatgcagacaaccaaactagaaaatgatttttatcccattttagccactattgctattgactatttaaaaacactgcaaactgaattaaaactcattccggcaagactaaaattattttgctaa

SEQ ID NO: 5874 - DNA, 1383 bp, Photorhabdus luminescens
atgcaatggtcaggtaggaaggcatttgttatcgcgggtacgggtagtggttgtggtaagactacggttacccttggcattttgcgagcattgatgttgagagggttgactgtccagccgtttaaagtggggccggattatctggatagcggctggcacagctcggtgtgtggcgtagcatctcgtaatcttgatgcatttatgctgccaaccgcgacgcttaatggtctttataatcagcacatgcgtcatgctgatgtcgcggtcattgaaggtgtgatggggttgtatgatggttatggtaccaacccaaactattgcagtagcgctgcaatggctaagcagttgggatgcccggtgattttgttggtggacggcaaggcagtatcgacctctgttgccgccactgttctgggtttttgtcgttttgatccctctctaacgattgcgggcgtcattgttaaccgcgtcaattctgaaaatcatttcgaacttattcgtcatgcgattgaacattattgtggtgtgccggtgctggggcgtttgcccgtgatgaaggatgtgtcattaccgtctcgtcatcttggccttattcctgctcaagagcaggctgacaatgatgctcgttggcaacggttggctcagcaggtggaggcgcatatcaatcttgatcgtctgttggcgctttgtgattgtcctactttacccaagggtgaggcaccatcattgcctgatcccgcattggctgatggcttgacgctagcattggcagatgatgaagcctttaatttttattacccagataatctggagatgttggaacgggtgggggtccgtattcaccgttttagtccactgcatgatcgccgtttacccgattgtcagatgatttatctcggtgggggctacccggaaatatatgccgctaagttggccgccaatagtgccatgcgggaagctttacaggatgcgcattgtcgtcaagttcccatttatgctgaatgcggtggcctgatgtaccttgggaaatcgttgaccgatggagaaggggcgagtcaccagatggccggtattctgccgggggaaagccatatgggtacgcggttgatgcgctttggttactgtcaggcacaggcccgttttgacactttgctggccgcagaaggtgagattttacggggccacgagtttcattattctgattttatcagctcagtgccttcagtctttgactgtactaaatggcgtgacgggatggcaatacagcaatgggccggaggctatcaggtacagcagacactggctagttatcttcatatccattttgctcagcgtcctagtctgcttgatcgctggttgaggtctgcgaggaggttattgtga

SEQ ID NO: 5875 - DNA, 960 bp, Photorhabdus luminescens
gtgacacttgctgcctggtttgctgctttcttgctcgatagctggttaggtgatccgccgcattggcctcatccggtgcgttggattggtaagctgatctctttggtacagcgggcagttcggcgctgttgtcacagtgaacgagcattgaaagtcggtggagcagggctatggatagtggttgttgggctgacttggttggtgagttggggatgcttgtggctgatgaacgccattcatccttgggtcggctggctggtcgaagtgtggatgatttataccctgttggctggccgttgtctgagtgataccgcgctagaggtacatggcgtattacaacagggcttattggatgagagtcgccagcaattgtcatggattgtcgggcgcgatacttctcaactggatgcaccgcaaatcacgcgcgcagtcgtggagacggtggcggaaaacagcgttgatggggttatcgcgccactgtttttcctgatgattggtggtgcgccgttggcaatggcttataaagcgattaacacccttgattcaatggtggggtacaaaactcaggaatatcacgccattgggtatgtttctgctcgcatggatgatctggcgaattggttaccggcgcggctgagttggctgttgttaagtgcggcggcttggttcattcggcttgattttcgtcaggcactgcgtattggctggcgtgatcgttatcagcataccagtcctaactgtggctggtcggaagcgacggttgcgggagcgttgggtatccgccttggtggtccgagttgttattttggtgaacgagtagaaaaaccctggatgggtgatgaacgccgtaaaattgcgctgacggatatcccgctcagcatctatttgatgatgatagcttcgcaactggccttactgttgtttgcgctgttgcgcttactgttggtcggcatggcttaa

SEQ ID NO: 5876 - DNA, 633 bp, Photorhabdus luminescens
atgaattacctccagaaacctcagcaaattgaacagaatagcttcgcaatcattggcgatattattgccagtgagcgccccgattatcgttttgttgatgagatgcaagaagcggtgattaaacgggtgatccacaccaccgcagattttgactggttggatattttatggttctcgccgggtgtgctgtcccgcatgacagaggcattacgtcggggatgcaccttgtataccgatacgacgatggctcagtccggtatcaacaaagcactgttacatcagatggggtgtgaatgccgctgctatatcagtgatccgcgagtggttgcgatggcgaaagcgcagggtatcacgcgctctatggccgcggtagacgtcgcactggcggaagagggggacaaaatcttcgtgttcggtaacgcgccaaccgccctgttccgtctgctggaaaggaaggcttcaccgttggcggtggttggggtgcctgtcggttttgtcggtgcggcggaatcgaaagccgctttgatgcaaagtgaactgccttgtatcgccgccgcaggtcgtaaagggggaagtaatatcgcggcggcgattatcaatgccattctgtaccgattgcaggaggcacaatga

SEQ ID NO: 5877 - DNA, 1137 bp, Photorhabdus luminescens
atgagtgacaccatgcaactagacagcatctggcataacggtaagcagtatcgcaagggttataccacgggttcctgtgctaccgctgccgctaaggttgccgcattaatggtgctgcgtcagcaagttatcgatcacgtttctattgttaccccttcgggtgtgacattacgccttaacgttgaacagccgttgatcgaagggcagcaggcgaccgccgctatccgtaaagacggtggcgatgatgtagatgccactcatggcatgttgatttttgctcgtgtcaccttgtgcgatcacggtgagatccatctgcggggcggggaaggtgtcggcacggttacccgtaaaggtgtgggattaccggtaggcagctctgcgattaatcgtacaccgcgtcagaccattgaggccgcagtacgggaagctatcggtcctttacggggcgcggaggtggaaattttcgcgccggaaggtgaagagcgggcaaagaaaacttacaacgggcgattggggatactgggcggcatttccatcattggtactactggcatcgtcacgccaatgtcggaggagagttggaaacgttcgttggcgatagagctggaaatgaaacgttcggcgggtgcagaaaaggtcattctggtgccgggcaatcacggtgagcgttttgtgcgtgaacaattagggcttgatggtcagctagtggtcaccatgagtaacttcgtgggttacatgttgcaggaagcggtgcggcttgggttccgccatatcatgttggtgggacatcccggcaaactggtgaaagtggccgccggcattttccatacccacagtcatattgctgatggccgcatggaaacgttgattgcttatctggcactgatgggggcgtcgcaggaattactgttggaagtgagtcactgcgataccacggaagctgcaatggaactgattgcggaacacggcttgcaagcggtttatgaccgtattgctgaacgcatttgtgaacgaatgagtgaaatgttgcgttttgcggttaacccgccgcgctgtgatgccattatgttctcctttgataatcaaatacttggcaccagtcgcccattaaatgacattttggaggcaatgcgatga

SEQ ID NO: 5878 - DNA, 603 bp, Photorhabdus luminescens
atgatcaccgtagtgggaattggtcccggcgatactgcgtatctgataccgcaggcacagcactctatcactgaggcggaggtattggttggtggtagacgccatctggagatatttagcggcatcacccacgaaacccgcgtactggatgcggatcttgctggtttgcttgcttggctacagaacaacagtacacgtcggattgtggtattagcgtctggtgacccgctgttatatggcattggcaaattattgtctgaatattttaccgcagatgatctgcgcatcattccgggtatcagttcaattcagtatctgtgtgccaaagctgcgctggatatgaacgatatctatctgactagcagtcacgggcgtaccccagattttgactggcttttgcaacacgacaaagtaggcatggtaacggatgggcgcgtcggtccgcgggcaattgcgcaggccattattgaacgcggcctgaaccgtacattgattattggtgaaaacctctctttacctaatgagcgtattcaccgtctgcggccggaagcggtggcgattgactatgacatgaatgtggtggtgatcctaaatgagagatga

SEQ ID NO: 5879 - DNA, 570 bp, Photorhabdus luminescens
atgagagatgatgaatttttacgcggacagaaagtgccaatgaccaaagaacctgtacgtgcattggcgctggagcggctggaactcaatggtgctagccaattgattgatgtgggagcgggtacgggcagtgtggcattggaggcggcgttatgtttcccggcgctgaccgttactgccattgaacgcaacccggcggcactggccttgattgaggagaatcgtcaacgactcggttgtcataatgtggagattattgcaggagaagcgccgttagcgttggatgtgatggcggatgccgtatttattggtggcagtggtgggcaattgactgccttgatcgattgggcactggatcacatgtaccccggtggccgtttggtactgactttcattttgctgaataacctgaatgatgcactggaacatttgcggacctgccagatcagtcaattggagtgcatacagctacaagcatctactctggcgaccttgggtacgggtcactattttaaaccgaataatccgacttatctgatttcctgttacaaggagaagatcgatgtctga

SEQ ID NO: 5880 - DNA, 774 bp, Photorhabdus luminescens
atgtctgaatattttgatcctcgaaaagtgtggtttgtcggggccggaccgggtgacaaagagctaatcaccctgaaaggttaccgtttgctgcaacaggcgcaggtggtgatttatgccggttcactgattaataccgaactgctggattattgcccgccggaggctgagtgtcatgacagcgccggcctgacgttggaacagattgttgcactgatggttgatggtgtacgtgcgggtaagctggtggtgcggctgcaaaccggcgatctctcattgtacggttccatacgcgaacaaggcgaagttttgaccgaagcgggtatcagttttgtctcgataccgggtgtcagtgctttccttggggcggcagcgcaattaggggtggagtacaccgtaccggaagtggcgcaaagcttgatcattacccggattgaagggcgcacgccagtgccgccgctcgaacaactggaatccttcgctgctcatcaaacgtcaatggcgatttatctttctgtacagaaaatgagacatgtggctgcgcgtcttcaagctggtggttatccggcaacgacgccggtcgcggtgatctacaaagcgacttgggatgaaagcttaaccgtgcggggtactttggcggatatcgctgaaaaagtacagacagcgggtattcgtaaaaccgctttgattctggttggtgcttttttgggagaggagtaccactattccaagctttatgatgcggggtttagccatgaatatcgccgggcatga

SEQ ID NO: 5881 - DNA, 1062 bp, Photorhabdus luminescens
atgaatatcgccgggcatgaatcgattgcggtgttctgtctgacgccgggaggggtcagactggtacatcgattgaaaactcatcttcctctgacctgttttaccagcgaaaagttactggagccggggtttacgccttttaatggcagctttggcgacacgttgcgtgaggcatttaaacactattcggcgttggtggtggtggcggcgctgggcatcacggtacgcctgcttgcgccacttataaatgacaagatgcatgatcccgctgtggtggtgattgatgaagggggtcagcatgttattagcctgttatccggtcatgtgggtggcgctaatgcattgactcaccatttggcggcgttattgggggctgatccggtgatcacaaccgccaccgatgttaatggcatggcggcgctggacacccttgccacgcaattagatgccgatatgcaggattttcgccacgtggtgaaggtgataaatcaaatgctggtcagtggtcaaaaagtggggttgtggtgggatgaaccactgcttagtgaacgtgagcagtgtgatatccggggttttgtctcggtagcgtgtctggaagaattgccagaactggatgcgctggtgtgtatcacattgcgagatgcattgccggaattgcctctaccggtttacaaactggtgccgaagcgtgtggtggccgggatcggttgtcgccgggatacgccattgcaaacagtgattgagctattgcagcagcagatggcggaaaaccatttcgatctgatggcgttacgtgccatcggcagtgttgtgattaaaaaggatgaaccggcgctaaatcagctagcacaacgttggcgtgtaccgtttcagttgttcagtgttaatgaattaagtcttcatgagcaacgttttcctgcatccgattttgtccgccagacggtgggggttggcagtgtttcgcagcctgtcgcttggttgatgagtgaaggaaaattggttggtcggaccttgcgtcagcagggcgtcactatcactttgggggtatcacaatcatgttaa

SEQ ID NO: 5882 - DNA, 726 bp, Photorhabdus luminescens
atgttaacagtaatcggtattggaccaggcaatgaatccatgatgacgcaggacgcgattgcagcgatccaagaagcggaaattattgtcggctataaaacctacacccatttagttaaacatctaacgatggataaagaagtgattaagaccggtatgtgcaaagagattgaacgctgccagaaagcgatcgatctggcattgtccggccgtaaagtcgcgttgatcagcagtggtgatgcgggaatttatggcatggccggcttagtactggaattggtttgccagcaacagtgtgatcttgaagttaaattggtcgccgggatcaccgccagtattgctgcggcgtcgttattaggcgcgccgttgatgcacgatttttgtcatatcagtttaagtgatctgctaacgccgtggccgatgattgagaaacgtattattgccgccgcacaagccgattttgttatctgtttttataacccacgtagccgtggccgggaagggcatcttgccaaagcatttgaccttatgcgaccgtggaaagcagcgcagacaccggttggcgtagtaaaagccgcgggacgtaaaaaacaggataaatggattactacgtttggcgagatggatttctccccggtggatatgaccagtctggtgattgttggcaatcaaacaacttattgccgtgatggattgatgatcacgccacgggggtatgaattatga

SEQ ID NO: 5883 - DNA, 786 bp, Photorhabdus luminescens
atgagtcatccggctatccatgttttcggtggtaccagcgatgcccggttgctctgtcaggcactagatgcagcaggagcaggttatcgtctctctgttgcgactgatgcagggagacaactggccggtgatattcagggagaagtggtggtggggcgaatggatgctgaggcgatggtggattactttgatcagcataaagtacgttgggtgattgatgcttctcatccttatgcagatgcactaagccaaaatgtgctcacagcatgtcgtcgtttgtcactgaggcttactcgctatcagcgtcccagtgagattgacttactgagccatccactgttgcacaaagtaaatagtatcgaggcggcttgcgacgttgcccggacactaggacaacggatcttgctcaccaccggcagtaaacaactggagctatatcagcgtttactaccgggaaaaacattgttggtacgggtattgccgaccgccgaggtattgattcagtgtgaagcgttaggattgggggtcgatcatattatcgcgttgcgtgggccatttacggctgaattcaatcatgcagtgtatgagttttgtcaccctgacgtggtgattacaaaagagtccggggccgaggggggatatcaacagaaagtggcgccctgtctggcgcttaatattccctgtattgtggtgtgccgtcctacacagactttacagggagatgaaggagagcagattagttcgctggatgagtttgtccaacacctagccagttggcaggaataa

SEQ ID NO: 5884 - DNA, 795 bp, Photorhabdus luminescens
atgaaaaaagcactattaatcatcagctttggtaccagctatcatcaaacccgacaaaagaatattgatgtctgtgaacaacaattggccgcagcttaccgtgatcgcgatctgtatcgtgcattcacctcagagatgatcatccgtaaattaaaaaaacgtgatggtttacaggtggataacccacgtcaggcgttggagcgtttggtcaatgaggggtatcaggatgtggctattcaatccctccatgtcatcaacggtgacgaatatgaaaagattgtcagtgaagtgcgtacctttagtgatcatttccaacgtttagtggtgggtacgccgctgcttaacagttttgccgattatcaacaactgcttattgccctgaaaagtcagatgccgccgttagccgaggatgagcgggtggtgtttatgggacacggtgccagtcaccatgccttttctgcctacgcgtgtcttgatcacctgatgaattcacataatttcccggcattggttggcgcggtggagagctacccggaaatcgaccatatcatcatccgcttgcggcggcaggcgatacgtaaagtgcatttaatgccgctaatgctggtggccggtgatcatgcgattaacgatatggcatcggacgagccggattcgtggcgttctcaactggaagctgttgggataaaaacccaatcttggttacaggggctaggtgaaaatccgctgatccgcgaaatgttcgttcaacatctggcggacgcattacaggcagaacaacaggaggtggtgtga

SEQ ID NO: 5885 - DNA, 714 bp, Photorhabdus luminescens
atgaatggaaaactttatgcgataggtgtcggtccgggagccagtgatttagttaccgtacgtgcagcgcgaatacttgctcgccttgatgtgctttatgcacctgctgggcgtaaagggggggatagtctggcgctttccattgtgcgtgaatacctgttaccccacacggaaattcgtacctgccattttccgatgaacagtaatggcgacgagaaacaggtggtatgggatgaagtggcgcaacaactgcaagatgaagtagccaaagggcggcaagtgggttttatcacccttggtgatgccatgttattcagtacttgggtctttttgctggcgcgaattggtcggcaagagtggctggaaattgtcccgggtatcacctcttttgccgcgattgccgcgcgtagcgtattacctctggcgatggaacagcaatcaatggcgataatgtcttgtactgcaccagaagctgagctggagcaggcattgcaaacgcatgattgcgtggtgctgatgaaagtctatagccgttttgccgccgtgagtacattgttggcacgcctgaatctgtttgaacatgctttattgatggcggatgcgacattgccaagtgagcagtgctggtgccgtttggatcaggtggacgctgatcaaaaattaccttatttctccactattttagtgaataaacaatggcatactgagaaataa

SEQ ID NO: 5886 - DNA, 1539 bp, Photorhabdus luminescens
atgggcttgtctttaatgttgcagggtacggcatctgatgttggaaaaagtgtactggttgcgggattgtgccgtatctttgttcaagatggttatcgctgcgcaccgtttaaatcacagaatatggcgctgaattctggtatcactattaacggtgaagagatgggaagggcgcagatttttcaagcagaggcagcgggtattgaaccggatgtacggatgaatccagtattgcttaaacccaccagcgagcgtaaagcgcaagtggtgttaatgggaaaagtggcttgtagcatgaatgcggtggagtatcaccagtataagcccagtttacagcagcaaatttgcgaagtttttcacagtctggcgagtgaatatgacgtcattgtgctggaaggggctggcagtccggcggagatcaatctgcgagatcgagatattgtcaatatggggatggcggagatggttgatgcccctgtgctgttggtcgcggatattgatcgcggcggcgtatttgcggccatttatggcacattggcactgctacgcccggcggagaaagcgcgggtaaaaggggtgatcatcaataaattccgaggtgatatcagcctgctccagccgggtattgaacagattgaagctttaactggcgtgcctgtattgggcgtcatgccttggttggatattgatctggaagatgaagacggcgtagcgctacaaacgggcaaatatgatggcgcgacagaaaaggcgctggatattaccgtgattcgtttgcctcatattgctaattttactgactttaatgcgctggcggtgcaaccggatgttcgcttgcgttatgtgactcaaccatccgcgttgcagccgtcggatttgatcatcttgcccggtagcaaaaacacattgggagatttgcaatggctgagacagaacgggttagcggatgccttgttaacggcacatcaggctggtgttcctgttatcggtatctgcggtggttatcaaatgctggggaaacggatcattgatggggtggagtcgggtattgaacagatggatggtctcggattgttggatatggaaacccgctttgctcatgaaaaagtaacgactagggtaaacggtaactgcttgttagcattacccggtttgctgtcagagtgcgttgagcagcctattcgtggttatgaaattcatatgggcagctcattactgggagcggatgcaactccgtttatcgatattaccgagcgtaacggccaatctggtggttggtgtgatggtgcggttaatcgagaaggcagtgtgatgggcagttatattcatggcttatttgatagcgctaattttacccgagctctgcttaacgctttgcgtcagcgcaaaggattggcggcttatcaaggggaaatactggattatacccactacaaacagactcagtttgatctcctggcgaaagccatgcgcgaacatctggatatagaacggatttatcaatgtatgaaaactcatcgacaaggttcggttccgtga

SEQ ID NO: 5887 - DNA, 546 bp, Photorhabdus luminescens
gtgatcttaatcactggcggggttcgaagtggtaaaagtgtgctggcagagagactggtggcacaagcgagtgaacaggtgttatatattgcgactgccgtcgtgacagacagtgaaatggccgaacgtatacaactgcaccgcgaaaatcggccggctcattggcgtacatgggaaggttatcgcgatctcggtgcagttatcacgacgcaaacccgaccgggagaagcgattatcttggaatgtatcaccaccttaattaccaacctattatttgagcaagcgggagagacgccacctgaacaaatggactttgctgtattagaggtggggattcagcaacaaattagcgatctgttagcggcttgtgcccgcatgacttccccgatatatctggttactaacgaattgggaatgggtattgtgccggagaaccgtctggcccgccatttccgcgacattgccggcagggtcaaccagcggctggcggcggctgccagtgaagtatttttgatggtatcgggaattgaggtaaaaattaaatga

SEQ ID NO: 5888 - DNA, 747 bp, Photorhabdus luminescens
atgagcctgcgtttgtttcttgccaccttacaatttatgacccgcattccggtaccatcgcgctggacacagggagtggaaatcgatcagtacgtgcgaggtatagcgagtttcccactggttggattaatcgtcggtgtgctggcgtcggcggtttttaccttgctggctccctggagtggcgcgcccttggcggcactgggttacgtattagcgctggcgctgttaaccggggctcttcatcttgatggtttagcggatacctgtgatggtgtattttctgcccgtaagcgggaaagaatgctagagattatgcgtgatagccgtttgggaacaaatggtgggttggcgttgatcttgcttattttggcgaaagtgctggtggtgagcgaattatctctgcgtggcgcttctatgctaatggctttgactgcggcatctgttgccggcaggagtgcgattatcttattaatgtaccgccagcgttgtgctcgtgaagggagtggcttggggaatctctatatcggtcgggttaacggttatcaggcactgttgacattgttaggtggggcaatattgattgctctattgatacgctggtctggtgtgttggcattggcgattacgctgttggttatcgggttgctggcaatgtatctgcaccgccgtttaggcggtcagaccggtgatacccttggtgcatcagtggaagtcggggagttggtatttttactggcgctattgtga

SEQ ID NO: 5889 - DNA, 309 bp, Photorhabdus luminescens
atggataccagaacagcagaacctaccactgtaggtgaaatgttggctgaagagtttttgaaacccttgaaaataactcaacaacagttggcgaatgcgatgggtgtttctcgcaaggttatcggccaaattgtgaataattcccggcgcctatccgttgcagaagccacgcaattagccggtttatttgaaacggatgaggatttttggattaaccttcaagcagcgcatgatcgctgggaaagtcgccagatttccgcccgtaagcaatatgcacctattacagttattctttcagccagcacttag

SEQ ID NO: 5890 - DNA, 351 bp, Photorhabdus luminescens
atgaaagacaaaaacaaacttattaagaagttggaaacaataaatgctgatactttcttcaagttcttggacgcgaagaaagtaactcgaatatgcccgatgtgccacagtgttggtgagcaagttattgctgagacaagcaaagctgcggttgctgacttgcttcatgggcaatcggttagcaaaacatttgttacttttttcagacacgcaccagaacaacctaccgacagtgatgctaattattattataaactcagctgtgataattgtggctatattaccactcatgaagtcagatctgtgcttcattggttgagtcagcaagagaaggaatctcatgatgagtaa

SEQ ID NO: 5891 - DNA, 225 bp, Photorhabdus luminescens
ttgttcgcccgtaagggcaagcatattcgtaagtgcttcggcacaaagtccgaagcgcaacagtatgaacgttgggtaatcgctacccaaaacggtattaaatcaatgattcccaagctagcaaaaaggctggcgagatatgtactacgacacacattcgcaagtcattttatgatgaatgggggtaacatgctaaaagacgagtctgaatctacgtgtttttga

SEQ ID NO: 5892 - DNA, 618 bp, Photorhabdus luminescens
atgcgactatttttggttcggcacggtcagacggaagcgaatctgagtggtgttttctgtggtatgacggatgtggagctgactgaaacggggataaatcaggctcggcaagttgcccgttatctatcggcagtaacattttcgcaagcgataagcagcgcgttacggcgggcgcgtcatactgcggagattattctggccggtcattcgttatcagctaatattgatacacaactcaatgagatgcatttcggcgcatgggaaatgcgccatcaccgtgatttgcaacatgaagacgcagaagcttgggctgcttggttagccgattggcaacaggcatccccgactggcggtgaaactttctcagcatttgcggccaggatagagaacgtggttcagcaactgttgacaccagaaagtcaggataatctgttgctggttgctcatcagggagtattgggcttgttactggcgcgtctgttggctataccgcctgctgctatgtggcactttcattttgaacaaggaacatacagtgtcgtggaaatccaacatggatttactaccttgcgaacatttaataaccggactgactggcagcttgagacacggaaataa

SEQ ID NO: 5893 - DNA, 1050 bp, Photorhabdus luminescens
atgcaaacactttcatcgatcattaatgcgattgtgccgttggataacgttgcgatggcgcgtaccgctactcgattgaatgggctggttaaaccaacaggtagcttcgggcgtctggaacatctggcgattcagctagctggcatgcggggattatcgggtcatcatattgatcgtaagcagattattgtgatggtcgctgatcatggggtttatgacgaaggcgtgactatatcgcccaaatcagcaacggctattcatgcacagaatatgatgaaagggattaccggtgtttgcgtgttggcggaaaatgcgggtgctgatgtaaaagttgtggatgtgggcattgacagtgatcctgtgccgggattagtgaacatgaaggtggagcgtggcagtggcaacattgctcaagggccggcaatgagccgccagcaagccgaagatttgttattggcaagcgcatgtttaacgctggaacagattacaaatggcgtgcaactgtttggtgtgggcgaattgggtatggcgaataccacaccggcggcggctgtggtcagcgtctttacggacaacgatccacaacagattgtcggcattggggctaatttcccaagtgaacgcctgcatcataaagtggcggttgtgcgacaagcgattgaaattaatcggcctgatgccagagatagcattgatgtattggcaaaggttggtggttatgatttggtgggtatggcgggcgtaatgcttggtgctgcctctgtcgggctgccagtgattctggatggttttccttcttatgcggcggcgctggccgcttgtcgaattgcacccgatgtgcgtcattacctgatcccttcgcatttatcggcagagaaaggctcaattattgcgttgcaacacctgcaattagcgccttatttgcatttggacatgcgtttaggggaggggagtggcgctgcgttggctatgcatctggtggatgcggcttgtgcgatgtataacaatatggggctacttgctgaaagtaatattgtgttgccattttag

SEQ ID NO: 5894 - DNA, 480 bp, Photorhabdus luminescens
atggcgaatataatctatttggaaattaagggtgataagcaaggtttgatatcacaaggatgttcaacggttgattctattggtaacacatgtcagcttggtcatgaagaccatatatttgtttatgaattgacttccaatataaccagaggtcaacatgttaaccatcagccggttgagataagaaagccaatagataaatcttctcctctgctgggattggctataacgaataaagaatcgctacaatgtattttttatttttatagaacatccactaaaggtggtttagagctctattataaaataaaactcactggtgcatatatctgtgcattgaatggcttttatccaaactcatctacgcataatgaatgtcagccacaggagagtttatctttgatgtataaatcaataacgtgggaacatattatgtccggcaccagtgcatatagcatatgggaagacaacgtttactga

SEQ ID NO: 5895 - DNA, 831 bp, Photorhabdus luminescens
atgaaagggatatctcatctttcttatgatttaaataattacgcttcgtcattgaagcgtaaagcacacttggctgctagcttttttatagaagatagccaattgagaatgtcatatttaaaagaagttgatgactttgttaatataaaaacacgtgaatttaaaaatacatttgatgtaaatgaaaaaaagagattgatttatgcagtaaaagatgaatatgaaataacggaaaaagaatatcaggctttaaggcgtaaggattataccaaatatattgtaaccgatatatttgaagatcagggcgtagttaaatacgcaaaaataggcggtggggttgttgctggtattgctcaaacagctgctggtattgctgtaattaattcagggagaattgtaagatctaaaagggttcaattaatgggtgctgtgctagttgctcatggaggtagtaatttttatgaggctattagtccgatcctttatgagaatcaaaaaataggtttggttaggaaaggttatcgatatgcctctcatgctttaggttatggtgatgatgtagctgatgttgcttatagttcagttgatctcgtagcaagtttatatgggacttatggagtgctcaagcttaaaccggttaaatccaagaataatatatcaggaggctattctgtcaagccggggacagggaaattgttcagatatattaattcggatcttgccagaaaatggcagctaacaccaaagcctatgttaaccattcaagtattaagtagtggatataaagtcaaacttttgatagatgacataaataaacttcatgacgattga

SEQ ID NO: 5896 - DNA, 648 bp, Photorhabdus luminescens
atgtcattgaaaaaaactatctctatagctcctcttggaaccgttgagatttatagtaatagcgatattgtaataccaagtgttgccccaacggcaattataaaaaacaagagtatggtaccaattagggctatcaattactgggctggtttgattggagattatcagcagtatagtcatgttgatgtttatcctagcgaacttaaaatattcgtaggaccaagtgaccttttttaccgctataaagttgtagtctccaatcttagcaataccgaaaatgcagaaattgaatttgtaatggactctttgtggaaaaaatatggaatgccaacaaaaatggtatatatgaattctaacgagccatttgaattttatagtaagggtaatgcaatattccccactgatttctctgacgcaattataaaaaacaatagcgtggcatatattagggctgtaaatttttgggctggtccactagggaattataatatgtatagctatgttgatatttcccccggtaagactgaaatacttgcatcacctcctaatattgttaattactataaaattgtattcaccaacatgagtaactatgttcaaaatgtagaacttgaagttatatcgcatttattgtcgggctatgattaa

SEQ ID NO: 5897 - DNA, 855 bp, Photorhabdus luminescens
atgaaccaaaaaacaattgaaaagaatgtaagcgagcgggtatctaatctgaaaccccatgcatcccctgaaatcactaacgaaattgaaagctgtatgccggatttaggctccttagaagccaaacagtggatcggtgtccaaaacccgaaccggatagaagtcttacaggaattacgccgcagcacggtggcgagagtcggtaccggccgcagtggtccacgcccacgtactcaggcattactgcgttttcaggctgatcactcccgttctaaagatacggtgttaaaagaggtcccgactgaatggatagagaaacaaggattgctagaagtgcaatctcaagtcagcgacaaaaatctctatctgactcgcccggatttagggcgaaaactcagtgcgaatgcggtagaaactttactgacacagtgtaaaacagcgcccgatgtacaagttgttatctccgatggcctgtctactgatgccattaccaccaactacgaagatcttgtgccacctctgttaaaagggttggaacaagcaggaatgtgcatcggtacgccgttttttgtacgctatggtcgcgttaaaatcgaagatcaaattggcgagttactcaaagctaaggtagttgtcttattgattggagaacgccccggattagggcaatcggaaagtctttcctgctatgctgtttaccaaccaactgtagaaaaaacggttgaagctgaccgcacttgtatttctaatattcatcgtggcggcacgcccccaatcgaagccgcggcaattattgtcgatttagctaaaaacatgctggaacagcaagcttccggcattgctcttagtcgttga

SEQ ID NO: 5898 - DNA, 1362 bp, Photorhabdus luminescens
atgaaattgaaaacgcagctttttggtaagacctatcagtttaaagatgtcaaacaggtgctggcaatggcgaacgaattgcgttccggggatgtgctagccggggtagcggccgaaagttcccaacaacgcgtagcggctaaacatgtcctctcggaaatgacgattgcggatattcgcatgaatccgatcattccttatgaagaggattgcgtgactcgcattattcaggatgacattaacgaaattgcctacgccggtataaaaaactggagcattggtgaactacgcgaatacatactcagcgatgatacccgcgtggatgatatcgcctttctgcgtaaaggaatcagttccgaagtcgttgccgccgtggcaaaaatcagctccaatgcggatctgatctatggcgcgaaaaaaatgccggtgatcaaaaaagccaacaccaccattgggacgccgggaacattcagcgcccggctgcaacctaacgatacccgcgacgatgtacaaagcattttggcccaaatttacgaaggactatcgtttggcgtgggtgatgcagttatcggcgtcaacccggtaaccgacgatgtagaaaacctcacccgtgtactagataccctctatgaggtaatcgacaaattttccatcccaacacagggctgtgtcttagctcatgtcacgacccagatagaagccattaagcgtggtgcaccgggcggtttgattttccaaagtatttgcggtagtgaaaaagggctaaaagagtttggcgtagaattggctatgttagatgaagcacgtgccgttggcgcggaatattgccgtcttgctggcgataactgcctctatcttgaaaccggacaaggctctgctctctccgccggtgctcactttggcgctgatcaagtgacaatggaggcacgaaactacggtttagcacgccactatgacccatttctggtcaataccgttgtcggtttcatcgggccggaatacctctacaatgatcgccagattatccgtgccggattagaagatcactttatgggaaaactcagcggtgtctcaatgggatgtgactgctgctataccaaccacgcagattccgatcaaaaccagaatgaaaacctgatgatcctgctggcaaccgcaggatgtaatttcatcatgggcatgccgctcggtgatgacattatgctcaactaccagacatcggctttccatgataccgccactatccgccatctgctcaatctgcgcccatcacccgagtttgaacgctggctggaacagatggggctgatggcaaatggccgcttaacatcacgggcgggcgatgcatcgttctttttctga

SEQ ID NO: 5899 - DNA, 1428 bp, Photorhabdus luminescens
atggaagccaaggagttattcagtgtcggtattgacatcggcaccaccaccacacaagtgatcttttcgcgtctgtcactggtgaaccgtgcagcggtatcacaagtgccacgctacgagtttgttcgccgcgagatcatctggcaaagcccagtgttatttacccccgtagacttcgccggacaattgcgtgaagacgaactgttcagtctgatccaggcacaatatcaggccgcaaacatcgcgccggaaagtgtcgattccggcgcggttatcattaccggcgaaaccgcgaaaacatgcaatgcacgccctgcgattatgacgctggcacaaaaattaggggattttgttgtcgcaacagcagggccacatctggaatcaatgattgccggtttgggctccggcgctcaagctctttcacagcagaaaatggccagagtgctcaacattgacatcggcggcggcacagccaactacgcgctattcgatgccgggcgacttatcgcctccgcttgcttaaatgtcggcggccgtttattggaaaccgatcctcaagggaacgttttacgcgcacatccgcccggagtacgcatcgttgattcactgtttggcgaaaataccgatattcaacatctgacagccacgcaattacagcaaattgctatgcggatgtcgcaattgctgtgggaagtcgttaccggacaacttacgccactggctcaacaattattgatgaccgagccgctgccaaactgtgatgaactaaattgtgatgaactctacgcagtcaccctctccggcggggtaggagaatgttatcgtgaagcatcggagcatgacctattccgttttcacgatttagggccattgctggcacaagctatccatcgtgataatgatttcgccaaactgccgctgcaaatgccaaaacaaaccgtgcgcgctaccgtcattggcgccggcgctcatacattatcgttatccggcagcactatctggcttgatgcactatcgctacccctgcgcaatattcccgtcgtccatcccgacacagaagccactgaatcactggcagaagcctggcaacaagcactgacacaaatggacctgcatgctgagcaggatctatatgcattggccctgcccgatgccctgccagtgaattatgccgccgtgcagacatgcattaccgctttacagaactttgccgcacgctatccctcttctcacccgctgctcatcgttgcaggccaagactttggtaaggcattgggtatgctgttacatcctctgatgggagaacggccgctggcggttattgatgaagtgatcacccgcaccggggattatatcgacattggcacgccactatttaatggcactgtggttcccgtcactatcaaatcactggcttttccttcctga

SEQ ID NO: 5900 - DNA, 786 bp, Photorhabdus luminescens
atgatgaatagcggaaaagtttggttggtcggtgccggtcccggcgatgcggcgctaattactgtcagaggattacactgtatccgtcaggctgaggcgctggtgtatgatcgattagtcagcccggacctgttatccgaagcacctgatgattgcaaaatgattaatgtcggcaaaacgccgaactatcacccagtgccgcaacagcaaattaatcagatcttggtagagtgtgcgcaacaagggttaaatgtcgtccggctaaaaggaggcgatccttatgtgtttgggcgtggtggtgaagaagcggaagctttagcactggcgaagatcccttttgaagtggtaccgggcatcagttcatccattggtggtctggcttgtgccgggatcccggtcacccatcgtgattatgcctcaggttttcatgttgttaccggccatctgcgtcaggaaaatgaatcacaggattgggcgacactggcaaagttggaaggtacgttggtgatcttaatgggaatgactcaactggcgagcatctgtgagcaactgatcgcaggcggtaaagcgccgacaacgccggcggcggttgtgatgtatgctagccatcagcaacagcaggttgccagcgcaaccctgctaacgttggctcagcaggtagccgctcagggattgagtgcaccagcattgattgtgattggtgatgtggtgcgtttgcgggaaacactggcttttagtcgggatcatctattgttgtcttctgttccatcactgatggcactctga

SEQ ID NO: 5901 - DNA, 1077 bp, Photorhabdus luminescens
ttgatgagcgaacatggcggtaatgtgctggaaatggcgctgaaaatcggtgttacagtcgaagagatgattgatttcagcgcaaatatcaatccgttaggaatgccggaatccttgaaaacggccattatcgaccaattgcaatgtgccgagtactatcctgatacagaatatcgccggttacatgcagcgttagcgcaggctcatcattgccctgtcgaaaacctgatggcgggtaatggtgcgactgaattgatttatgcggtggtgaattatcttaagccgcgccgagccatgttgttgataccgggatttgctgaatatcggcgcgccttgcagcgcgtggattgccagattgatgagtatgtgatgagtgaagcggatagctatcaacctgatgaacgcttgttgatggcattagaacgccatcggcctgactgtttgtttcttgcgacaccgaacaatccgacggggttgatgccagatgctgtgctattgcaggcaatatttgaacgttgccgtcagcataatattgcgttgattgttgatgaggcgtttatcgattttctcccggatattgctggatttattcctcagatagcgcattttcctcgtctttatattctacgttcactgacgaaattttttgctattccggggttgcgccttggttatctggtcagtagtgatgtaatggggattcgggcgatgaagcgctggcgggagccgtggaccattaatgctttcgcggcgttggcgggtgaaatggtgcttaatgataacgcttacattcaagcaacacaccgctggttagctgagcaacaacgttggctttatcaggcattagctgcattaccggcattacgtgtttggcctccctcggcaaattatatcttcctgcgttgcctgcgcccagaaatcgatcttcaacacgcattgctgaaacagagaatattgattcgccattgtgctaattatccgggcttggatgcggctcattatcgggtcgccattaaaggcgagcatgataatcgccgtctggtatcggcgttacgtcaggtattcggttatggctga

SEQ ID NO: 5902 - DNA, 906 bp, Photorhabdus luminescens
atgataatcgccgtctggtatcggcgttacgtcaggtattcggttatggctgaagcgcgttgtcctgcatcgtgtggtgaacttatccaagggtggattcttggtggtgagaaattgatctcttgtccggtgaattggttcagtgaagtgtctgttacagatggcgtgccgggaaaagatgaacgtccccgtatgcgccaagtgatgaaaactgttctggcgtattttggtttgtcggtggagatggcgcgaggtttacggatcgccttgacttctacgatcccgatggcaaaagggctggcaagtagtaccgctgatattgccgctacagcgctggcgacggcgcgttatttggggaaaacacttgatgaaacgacactggctagcttttgcgtacagcttgagcctacggatagcacgttgttcagtcggcttaccttgttcgatcatcaaacaggtaccacgcaaattgcttgtgactggcagccatctatagacattttgttattggaaagcccggaaatcgtgatcacagctgattatcaccgtttagatcgccatccggcattactggaaaatgcctccgtgctagagcgtgcttggaaactattttgtcaggctgtgactactcggaattactggcggttgggcgaagccacgacgctcagtgcgcaggccagtcaaaagttgttggtcaaaccggcgtttgacagtttgttggaattggtagaacggagtgggatctacgggttgaatgttgctcatagtggcagtgtcgtcggattattgtgcgatcgtcaccatcatgatgttgaatatctatgctggtggctgaaacagaggggcataattcgtttttatccccgtcagcacttgctgaccatgattccgggtggtgtgcgttaa

SEQ ID NO: 5903 - DNA, 669 bp, Photorhabdus luminescens
atgttggattatttgccgatgttttgtcagatccgggataaaacctgtctgctagttggaggaggtcaggtagccgagcgtaaagcgcgtctgttattagatgctggcgcacatctattagttaacgcacgggaatttaccccgcaatttaaactatggggggataacggccaagtaacactcattcgcggtgagtttgagcctcactggcttgagcattgttggctggtgattgctgctactaatgatgcggcggtgaatagctatgtgtgtgattgtgcgacggagcgccgcattttttgtaatgtggtagatgagccacagcaagccagttttatcacaccgtcagtgattgatcgctcacccttggtgattgctatctcctccgggggaaacgcgccggtattggtcagattatggcgtgaaaaactcgaacggctgctgccgatgcatcttggtcgtctggccgcttacggtgggacacttcgccagcgggtaaaacgacattttcatcatttggcggcacgtcgtcacttttgggagcggtttttcactaatgagcgattaatgcaatcgttggtcagtcaagatcatcaacaagttgatcgggtggtagaaacattattctctgagtcatctcaagcgaatacaaacaaaacaaacagttga

SEQ ID NO: 5904 - DNA, 558 bp, Photorhabdus luminescens
atgagtgaggagcgatataaacagagaaaacagcggcaaaaagagagatttatggcacaagttgcagccgctcaagaaaaccgggggattgtcattatctataccggtaatggcagagggagaacccccgcagcaatgggaacggttacacgagcgttgggtcatggattaaaggctggcgttatccaatttattcgcgatgaatggtcagccggtgagcgtgttttgttgcagcagcatggagtagaatttcagctaatatcaatgaacttgactggagaaatgcaaaatcgtgctaaggatattgctgcttgctctgaggtttggcaccacgcgctgcgcatgatgcgtgatcctgaattatcattggtcgtgctgagtgaattggtttgcgtgataaataacggttatctattgctagacgaaattatcaaggcattaagcgaacggccaattaatcagacggtaatcattaccggacaagattaccctactgaattaattgaattggctgatacggttagtgaaatgcgtccgggaaaatatgttttcacttaa

SEQ ID NO: 5905 - DNA, 639 bp, Photorhabdus luminescens
atgtctattgaaaataccgatatagctgaacaaacaactggtaaagattcagttgtacttggacatgcagaagcgccggcaatacattctatcgcaattggtgcttcaccccgaaattctaaaaccatcagtgaagcggctattgccattgggcaaaatcaaattgcgggtaaacaaggtgatacgaaagtcatttggcctattgcgattggggctgattctgtatccaatggcttggcttctatcgctttgggacaaaaggtgacggcgagtgcggctcaggccgtggcgattggtcaacacgcttctgcaacagaaaaagggagcattgcattaggtgcagattctattgctaataaaccgaatgttgtttctgtaggaaaaaccggccatgaacgtaagattatacatgttgcggctggggagatttcaaatcacagtactgaggcggttaatggtcagcagttacatgctgaatcggcaaggattgatatattattagatgcaaagaataaggaattggaagagaaggttcaatctctggaaagtgatatagctaatcttactctgctggttcaaaatagtgtggatgatgttgcatcattgaagaaacgacttctcgatgcgttgaattattaa

SEQ ID NO: 5906 - DNA, 1485 bp, Photorhabdus luminescens
atgagtactaaaaatgattttaaggctttttctattagtaacaatgctaatgtagtgagtcaagagaagtatgaaaaagatcagagtttgcaggcggggtttccaccagataatattacgagtaatctgctaaacaaagtattacgtcaatcgtcaacaatcgcatctgtcgtggctaattttattgcgacacaatctggcggtgatgttctggatgatggagatgtagctaaacttaccgagcaattaagtaaggctttaaaacaaaaaattacaacagaagttcctaatgcttcattaacacaaaaaggcattgttcagcttactaatgtactgggcgatagtgacacattagcggttacgcaaaagcttgctcaggaaatagtaaactcattgcgtgaaagtattaatgctaaggtatccaatacccgaaaaattaatggaaaattactgtctgaagatatcaccattacttctcaggatattttgggtgggcaggcgattagtttaggtgataaggcagatttaaatagctacaaaataccgggaatttatcatcaagaatatgatgctcatgccaaaaatggccttaattatcctgaatttcttgccggcgctcttgttgtattgaaatcggctgggacggttcaacgctattttgtctataatagtagtcgagtatatacacgtagtcagtttcatgataatccgtggacaccttggacgagagagtataatacgctgaataaaccgacggctgatgagattggcgcatatacaaaaatagaatctgattctcgatatattgcgggaattcgcagggtgaatggaaaatctttagctacggatgtcactattacttctcaggatattttgaatgggcaggcaattagtttaggtgataatgtaaatttggatcactgtaaaacaccagggatttattatcaggattataatgctcatgctaaaaatggcgtcaattaccctgaaccgctttcgggttcgcttattgtgttgaaagcggctggaattattcaacgttattttgtctataatagtagtcgtgtatatacacgtagccaattccatgataatgcttggacaccttgggctcaagaatataacacattgaataaacctgctgacagggttattagcgggtatacaaaagcagaagtcgataacctcgttaatgctaaaggaaataaaaatacagcgttgaaatcagtgaatggttggtggaagtgtggggatacaggggtaatttatcagtgggggattgtaaattgggctgcacatgatacaccagttaattttcctattcagtttcctaatgcttgtgtaaatgtttcgttaacattaagtgataaatctaacctggaatcatcatataatgttgttgcaagacaattgtctgtaacaggatttagttattgggcatacgagactgaaagctctgcattctggtttgcaataggatattga

SEQ ID NO: 5907 - DNA, 1416 bp, Photorhabdus luminescens
atgagtgccaaaaatgattttaaggctttttctattagtgataacgctaatgtagtaagccaagtaaagtatgaagaaaaccagagcttacagattggatttccaccagataatattccggttaatctgttaaataaggtattacgtcaatcgtcaacaatatcatctgtggtagctaattttatcgcgacacaatctggtaatgatattttggatgatggtaatatagctaaacttaccgatcaactaaatagggccttagagcaaaaaattgcagcagaagttccaaatgcctcattaacacgaaaaggtattgttcagcttaccgatgtagtgggtaatagtgatacattagcggttacgcaaaagttggttcaggaaataataaattcattacgtgaaagtattaataccagaataccaaatacccgaaaagttaatgggaaagtattaactgaggatattaatattacttctcaggatatccttgccgggcaggcgcatagtttaggtgacaatgccaatttggataattataaaataccggggatttatcaccaagagtataatgctcatgccaaaaatggtaataattatcctgagtcgttcgctggttcgttggttgtattgaaagcggccggggttattcaacgttattttgtctataacagcagtcgggtatatacacgtagtcaatttcatgaaagcccgtggacgccttggacgcaagaatataacacactgaatagacctactgctggagaagtgggagcatatgcaaaagcagaatctgatgctcgatatatcacaggactccgaaaaattaatggaaaagcgttagctgcggatatcaatattacttctcaagatatcttcgccgggcagtcgattaatttaggtgataacgcggatttaaatagttataaaatacctgggatttattatcaagagtataatgctcatgccaaaaatggcgcgaattaccctgagccgtttgcgggttcgcttattgtgttgaaagcagcaggcgttattcaacgttattttgtttataacagcagtcgggtatatacgcgtagccaattccacgatagtccgtggacgccttgggcgcaagaatataactcattgaataaaccttctgacaaggctgttggggagaatatggaagcagaatctgataatatttatgctgcaaccaaagaggaattaatacagcaagcagaacatgagaagtctcagttattgactaaagttaataatcttgttgctccactacaagatgctgttgatttaggcgttgcttccgaagcagaaaaagccgctctactggaatggaagaaatataggataatattgagcaaagttgatatttcattggctcctgatgttgagtggccggagcagccgaaataa

SEQ ID NO: 5908 - DNA, 765 bp, Photorhabdus luminescens
atgagcgtaaaaaatgattttaaagctttttctactagtaataattctaatgtggtaagccagcaactatatgaagagactccggaattatcgactggatttccaccatatagtgttcccactcatgtgttaaataaagtattgcgtcaaacgtcaataatggcatctgtcttggctaattttattgcggaacaatctggcgaggatattttggatgatggtgatatagctaaactcactgcacaattaagtaaagtcttttatgttggagctaagcggccgggtgatatctatttatctgcacatccggcgtcagatttagctaaaggagagtatattgcgaatggtgatgttcacctaattgattctgttgttggtagagcattaaataatttatctgatgcatataaggcagcatgggggattaaacagactggtgataaaatcaatctccctaatttgtttgttgatggacgagggatatttgtacgcgctggtttgcaacctggtgtgatgcaggaagatgcgattagaaatattacaggtaatctgggatggcaggggcatgggctttttactcgtaccagtggagtattttatggtgttaggagtacggcaacagttattgctgcgggaacgaaggttcatagtaatcatggatattcagcatatgctacttttgatgcatcgaaggtagtaccaacggcagacgaaaatcgcccgctaaatattagtatgataccggtaatttatttaggtgtataa

SEQ ID NO: 5909 - DNA, 588 bp, Photorhabdus luminescens
atgagtgccaaaaatgattttaaagcttttgctattagtgataaagctaatgtgcccagtcaacaagagtatgaagcatatgcaaggttgcctgttgggtttgaagacggacagtatattcctaatcacatgttaaataaggcattacgtcaagcatcaactatatcatctgctatagctgattttattgtgacagaatctggcactgatgttttggatgatggcaatgtaactaaaatctccgcacaattcaaaagcgtattagacaaaaaaattgccaagtgttgtaatcttaatgtgaatacggctaataaggttgtgaacggttggtggaaatgcggtgatactggaataattattcaatggggccaggcaaatggctgtggggcgataaatgattacagatacttcccgattccattccctaatgcttgtttccagatcgttgcaacatattctgagtttgaaaattctggcactggagttgctgctttacctatttctgcaagccaatttattgtaacatgtagaaatggtgcatctcagttagcaggtaattttgtaagatatttggcgataggatattaa

SEQ ID NO: 5910 - DNA, 423 bp, Photorhabdus luminescens
atgtatttttatagtgcaaagacaaattcattctatcctatagaattggaacagaattatattgcttctggttcattgcccgatgatattattgaagttggtcttgatatttatcaagaatacgctgcgaataatgtaccggaaggaaaatatcgtatagcaggtcaaaatggtttaccggaatgggctgatattcctccaccaacaagagaagagttgcagcagtatattgaaagtaaaaaacaacaatttattgtagaggctagccagcaaatagcaccattacaagatgctgttgatttaaggattgcgaccaaagaagaggaggcggctctattggtatggaagaagtatagagtaatgctgaacaggattgatatttcactggctcccgatattgaatggccggaacaaccaaaataa

SEQ ID NO: 5911 - DNA, 906 bp, Photorhabdus luminescens
atgagtgccaaaaatgattttaaagcttttgctattgttagcaatgctaatgttcccagtcaaccattctatgaagcatctacggatttgctgaaagggtttccagacaagcaggttattgataattacatattaaataaggcattacgtcaagcatcaactatatcatctgttgtagccgattttattgcgacagaatctaacagtgatgttttggatgatggtaatgtagcgaaacttactacgcaattaaataaagcattagaacaaaaaatcaaagtagaatctgataatcgatttattcggttaaatacgaatacaaaaacatctggttgtattttatctaagacagcaaatgtatttgacgatcaatctctgcgggatttgtcattgtcaggtttcttgcgtccaaatggttgggcggacttaggtggtttggcaattcatgtagctcaccctagtgcggggattcagcactcaagaggaatttcgtttgaatacggtagtacatctggaggtcaggaggggtttggaatacatacgtatgcatttgacaaagatggtaagtttaaaggtaaaaaaagaattttaacggaagatgatcgtaataaagcgatattatcagtaaatggatggtggagatgtggtgatactggaatgatttatcaatggggtaatgtacctattggtgataatcagggaaaaattgtgaacttgcctattttatttccaaatgagctcttatcgcttcatgtaacggctatttcatcagcaccaaataacaatactgatgtaacttctgcttatggaaagccattaaataagtctcagatacatatttctgtttcatcaaattacaataataatggtataagtggtgtttatttttttgttattggttattaa

SEQ ID NO: 5912 - DNA, 423 bp, Photorhabdus luminescens
atgtattattatagtgccaaaacaaacggattttatccaatagaattggaacagaattatattgcttctggttcattgccagatgatgttattgaggttagtcttgatatttatcaagaatacgccgcgaataatgcaccggaaggaaaatatcgtatagcaggtcaaaatggtttaccggaatgggccgatatttcaccaccaacaaaagaagaattgcagcagtatgttgaaagtaaaaaacaacaatttattgtagagtctagccagcaaatagcaccattacaagatgctgttgatttagggattgcgactcaagaagaggaggcggctctgttggtatggaagaagtatagagtaatgctgaacagaattgatatttcacaggctcctgatattgaatggccggagcaaccaaaataa

SEQ ID NO: 5913 - DNA, 165 bp, Photorhabdus luminescens
ttgtcgtcagcttgggataatgcaggggtcgaacagattaacttttcagccttactggtggcttttgcgcaatcaaagctcgcgccgaatgataggaatgacatactacacagtattaatgccaaaaaacctattagtgttttcatacactactcctattggtga

SEQ ID NO: 5914 - DNA, 1026 bp, Photorhabdus luminescens
atgaaaatatttattacatcagaacaaaaaatcaaacttgaacgtcttcacgacaccactcgtgatggtcaggtacgagacagaataaaagcgatccttctggcttctgaagggtggagttctgtgatgatagcccaggcattgcgactccatcagaccaccgttgaccgccatatcagtgattaccttaatcaaggtaaacttaaatctgataatggagggtctgatagtttgctttcccgagaacaaactgattttttaatcaatcacttatctcaacatcttttccatcacacccatgaaatcgtggcctatgttgctcagctctggaatattacctttagcattcccggcatgaataaatggctacaccgtcagggtttttcttataaaaaaccttgtggcgtccctcataaattcgacgcagaaaaacagcgacaatttattgaatattatgagaatcttaaagtcacagcgaaagacgaacccatcctttttcttgatgctgttcacccgactcaaggcaccaaactcagttatggctggatgcgaaaaggcgagaaaaaaaccgtcaaaacaacaggaagccggactcgcctgaatatattgggtgccctcaacctgaatgccattggtcgtacggtgttccaggaatatcagaccatcaacgactacaacatttgctgttttttcaatgaaataagaaagtcttatcctgactatcatcaaaaaattcaccttattgtggatggagcgggttacaacaaagctcatcttgtgaaggagtgggcttatgttagcaatattgagttacattaccttcctccctatagtccaaatttaaacccgatagaacgattatggaaggtcatgaatgaacaggttcgaaataaccgttatttcgcggataaacatgaatttcgagacaacgtcttcaaatttttcaccacaacgctaccggatatagcggactcgctgatgtctagaattaacgaccattttcaggtgctaaaaactgcatcttga

SEQ ID NO: 5915 - DNA, 405 bp, Photorhabdus luminescens
ttgaagtttcttgggtataaacggtcatctgaaatgtacaaaaaaattgctgcgattaaaacaacagagaactgctataaagaaagacaaaaaattacgcttgatggcaccttattaaggatcacctatcccggcccgccaaattatgaaagcgtggaaaacggggatagccctgaaacttattgggtgctgcaaccggataagacgataaaatgtgccaagggtgcaccagaatggggggatcgtagtctgatgcaactggtggttcaggaggaattttatacagtgtatcgaagccttatcggacaccgcgtgaaagtaaccggaaccattatgtacgcggttactggacatcaccacacaccgataatgcttgaaactcaacgaattgaagcggctaaatag

SEQ ID NO: 5916 - DNA, 816 bp, Photorhabdus luminescens
atgaatgcattagctaaaattaaagctgaaagtaatttcactatattcaaattcggatctcatgaaatccgcgttatcaataaagatggtgagccgtggtttgttgctcacgatgtttgctctgctctagaaattcaaaatatcacgcaagctattgaaagattggatgatgatgagcggtctatgtttaatatagggcatcaggatgatattaatgttgtcagcgaatccggaatgtataccttagtacttcgttgtcgtgatgcaattaagcaaggctctattcctcaccgtttccgtaagtgggtcacaaatgaagttttgccatcaattaggaaagtagggaattatcactctcctaaaatcataactgatgaacacactctattacgtgatgctgtaaatatgcttgttggtaaacgtgggatgatgtgttcagaagcatacagtttcatccatcaacgttttaatatatctcatattgatcaactgccaatggataaaatcactgaagctatcgagtatgttcataagcttgtgcccgaagatgaatctattggtaaagccgagttaccagcactcgaaattaaacaatataaacaacaattcactgatgatgagctgtgtagtctttgctggttatggcgagatgctgtcgagatgattagttcaatatctgatgtttatcccattctgagagctgcggaacataggcttgaaggtaaatattattcaatgtcacatgaatatccacgaaacatgaacatagtccggcgagtattaaacagcttaagatttggaaatctaccgttctaa

SEQ ID NO: 5917 - DNA, 297 bp, Photorhabdus luminescens
atgagattacgttgcatggcttatcgtcaagatgggatgtatgtagctgcctgtttggatctttctttggctgcacagggtgacaatatagatgaagcagtaaataaactcgaagcccagattgaagattacctcagtgaggtgaaatcagaacctcagtacgaaaaacagatgttaagccgaaaagcaccgctatctatgtggtttaaatattggcgaattgcctttcgaattttcatgaacagaaaagacagtggcctagctaaagtttttaatgaacagtgtgaacccgcttga

SEQ ID NO: 5918 - DNA, 132 bp, Photorhabdus luminescens
atgttttttaagaaattaacgccgttgaaatacgccgaagtcattaaagggcttactgctcttggttttgagatgaaacctaaaagggggacttctcatgagcaatgggtcaagaaaactgagggcggttaa

SEQ ID NO: 5919 - DNA, 111 bp, Photorhabdus luminescens
ttgataaaatcaatggcgaaacaagctggtatcagtaccaaagagtttcattcattatgcaagggcatggttagcgctgaacaagtgcacgctgaaaactcatcagaataa

SEQ ID NO: 5920 - DNA, 183 bp, Photorhabdus luminescens
ttgtatcttaaagacgaggtcacaaatgaaacgctctcattgctgcaagacttggttgaccttaaaatggctaccgaagcagaaaaagccgctttgttggattggaaaaaatacagagtattactcacttgtgtagatattttacaagcgtctgatattaagtggccgcagatgcccaaatga

SEQ ID NO: 5921 - DNA, 1179 bp, Photorhabdus luminescens
atggcatcaagaccaagaaaaaaggaatttaggcacttacctgattttctttattacgataaatctgttaatgagtacagattgaccctcgttaatggaaaaaggaagtgcgttggtagcgacaaggctgtcgctattgccatagcgagagaatataacaatataatgaggccggagtcatctgtatctgtcagttcgctagttaaagaatcaggtggaaaatacggagaatcccttccgtttcatcatcatattgataaccttttttcccgtattattaaagatgaaaatccgtctgacaacactcttgcggattggcgaaatgatatagaacgaatgaagacgttttttactgatacactagcatgtgatatatcacttgaacacgttaataattatatcaaacattatcataacgatgcgtcagcaaacgtccaaaataggaaggtctctttcttaaaaaaagtattcagctacgcaatggatgaatcattaatgctcgacaatccagccgagcgcaagaaaatgaagcgtactgataaaaagaaacgtcgcaggctttcatttgatgatttcatgcttatacgtaatgccgctgaaccgtggttacgaacagcaatggatcttgcattgcaaaccactcaagcacggttagaagtttcccgtatcagatacaacatcaaatcaccgaaggaaggtgtttgcggctgtgtatggtatacggagccaaaaaacggcattcatggtatgctttatattcacaggcaaaaagtccagcataaagaagcatcacacattgcgatcccaattggttcaacgataaaagctatcatcgatgccagccgggataatatcgcaagcccatacgttgttcatcgagtaccagaacgtttaccaactaaaataagcaaagaagttaatcatcccactcaaattgctcccgattatttaagtagggcattttcttccttgagggataaagttggcgtggcgtcatgtctcccacttgatgaaaggccaacatttcacgaaattcgggcgttggctgctcatatatttaaagaacagggtatagatccacaagctcggatggcacacagtgacgctaaatcaacaaaaatttatactcaaaaccatgtcgattgggtcgaggttccacacgcagaaatagctatctga

SEQ ID NO: 5922 - DNA, 219 bp, Photorhabdus luminescens
atgattaacaatgctaaattaatgaaagctagcgcatggggaaaacgtgagtttgaagaaaactcggttccagacaacagaaccatcaaacattggatagagataggtaaattaaagggaaaaattattgatggctcagtgtgggttaattcatcagaaaggtggggggttgagtcttctatttcttcttgtgttagtcaattaatcagggattcataa

SEQ ID NO: 5923 - DNA, 240 bp, Photorhabdus luminescens
atgaaattaattagcttaataaagccgatcaaagttaactacttcggcatcgaattatcagttccattctggactaaatttatagcaacagaaagcaaaggaattgtattggcatggaacaaaaggccatctcaaattaacgacaactggttctctgaattaccatcatctcaatatgaaattgtagctcttgttactttagatggaactgactggaaagaaactctcgttgaaatatga

SEQ ID NO: 5924 - DNA, 645 bp, Photorhabdus luminescens
gtgagatttagtttgatgaaatatgaacttatttatgccgaccctccgtggcagtataataatgcatcttcacgcggtgcagcgaataatcactataagacaacatctttcttcgatttaactaaactccccatccattctatagccgccgacaactcagttcttgcaatgtggtatacgggtaattttgcaatggaagcaattaaactggccgaggcgtggggctttaaagttaaaacaatgaagctcttcacgtgggtgaaattaaataaattgactggtgatcggatagataaaaacggagttcaagatttctttgatttcatggagatattaaacaaagaaacggtgatcgggatgggtaactacacgcgagcaaatacagaggatgcattgctcgcagttcgcggaaatggaattgaacggattagtgcggcagtgaagcaagtggttttctcttgtgtcggagagcattcagaaaagccgtgggaggtcagaaacagacttgaacaactatatggaaatgtcccacgcatcgaattatttgcaagaagaaaaattcacggatggcatgcatggggaaatgagtccccaattaataatattgaatttatacaggaaataaaatcacatgaaattaattag

SEQ ID NO: 5925 - DNA, 231 bp, Photorhabdus luminescens
ttgaatatgaaagcgatgaatgactatctatgccatcacttctatttcatctggaaacgaatgttcaagcgatacatgataaatactctcgtgtaccgcggagctagtttaccagaagcaaaagaagccgcagcatgtgagattgaatcatattctagaaaagatgaatattggaaatacattcatcctcacgatgccgctaaagaatcattatcttattggagtgattaa

SEQ ID NO: 5926 - DNA, 657 bp, Photorhabdus luminescens
atgactaaaaatacagaaactttaatatctgcatgtcacgaattagcaagagtagcaagctgtgacgattatttaattctgaatgagattgctgacaaattgaaatttcttcgtaaagaacgtgatagctataaagaaatgttttatgactcttgtaagggtcttgctgcgatagctaatgctgcgggtattaaagcggaagatgattcaggttcgcccggccaagtaatagagaaaattgagtcaatgcttaatattgactggaatttttcaaatcaaccaaaaattaatattggagaagagaaaaaatattgggcttatgttaaaaaaagtgttaaaaaagattattatctttttaacgaagaaacaaataaatgcgaacttgtttgtgaccctgttaaacatcatttttatgttactactttaatttatgttaataaaccaactccaacaggaaaacatgaatatcagtggaatgacgatttgcctgactgggcgatatcagacgatgaatatgactggataaattttgtaggttgggctatacaatattcgcatcctgattattgcaattggattgattcattggagaaaaacgaagaggttattgcttgggcagaatttattcatccatccgcgccggagataagtcaatga

SEQ ID NO: 5927 - DNA, 438 bp, Photorhabdus luminescens
atgaaaagaacgccctggaatccagatacgcgagccattcagcgggttaaagacccgctaccaattcccgtgagatgtcattattgcttcggccacgtaacaatagcccatcatgaaaaagtattcggcaaaatccacagtaaatggccgtggctatatatttgcactgagtgtaaagcatatgtcggtctacacccatacactgatattccactcggcacactggcagattacccgacacggatagctcggatgagtggcaaacgagagtttgaagaaatgcgagagaaatggaatttagaacgcacggatgcatatcaattgctagcacggaagctaggaattaactttaggaaatgtcacttcggctggttcgatattgacacttgttatagagctaaagaaatttgcgaaaatatgattattaaaaagaggtaa

SEQ ID NO: 5928 - DNA, 180 bp, Photorhabdus luminescens
atggctgtgaagttagaaatttttatctcgtttaatgaagacttaaataagcatcatgttgaatattccactgcatttacttcatgtagtacgcatgaagagcgacagattcttgcggagttgagaactaaattattgtctgagatggataatcaatatgtaggaaattatattaattaa

SEQ ID NO: 5929 - DNA, 408 bp, Photorhabdus luminescens
atggaaatgaaacacaatcatgatgatatccaagttgggagggtttattgtccatattccacatttcacagcggctggttaactccaggagggaaaataaccaagaatccatttacagcatataatgccgctgaggagaaaaataattatcttaagtctcttgaagatgagttaaataaaaataaggatgattatatgtacggtgagaaatttaacggcgatccgtgcccacaggggcacacgctaagatatgtatccaatggtagctgtactgaatgccaaaaacataaagataaaaagagaaaaaaggaaaaaagagagagtaaaaataaagtctatctcgacgattttactcatagcgtatttattatcgggaatcccgaaagatgtaaaaatcaatcagtttaa

SEQ ID NO: 5930 - DNA, 684 bp, Photorhabdus luminescens
atgatcagcaatgaactcattctcagcaaaacaggggttgatttgctcacagtcgaacagggaagtcatgattggcagcggttaagattgggagtaataacggcatcggaagccggaaaagtgatatcaaaaccgcgtagtggtacaaaatggacagacatgaagctgacatatttctatacacttctgggcgaagtgtgcacaggtagtacgccggaagtaaatgcaaaaacattagcgtggggaaaaaattacgaagaatcagcaagagcaacttttgaatttgtagctgatgtaaatgtaacggaaacttcaattctatttaaagatgaatcgctcagaaccgcatgctcaccagatggtatttgtagtgacggacttgggcttgaacttaaatgtccttttactactgctgtatttatgaaattccgcttgggtggttttgatgctattaaatctgaatatatggctcaagttcaatattcgatgtgggtcacaggtaaaaatgaatggtactttgctaattatgacccgcgtatgactcgtgaagggattcattacgttgttgttgagcgtgacaacgaatatatgagtcagtttaatgatatggttcccgatttcatagaaaaaatggacgaatcattaaatgaaatcggcttcaaatttggcgatcaatggaaatga

SEQ ID NO: 5931 - DNA, 921 bp, Photorhabdus luminescens
atgagcacagcagtacaaaaagtttatgaaatcatcaacccgctcaagactgaatttgagcaaatttgtagtgagccgggcatagtatttaaacgtgagtctgaatttgctatgcagatattcgcaaataatgattttttagccacaactgcattaaataatccggtttcagcgcgtagcgcagtaatgaacattgcagcaattggcattagtctaaaccctgcgcaaaagctggcttatctagtgccacgaaacaaaagcgtgtgtcttgatatcagttacatgggtttgatgcacatcgctcaacaatcgggtgctattaagtggtgtcaatccgctgttgttcgaaaaaatgacatattcaagcgcacatctattgatactgcgccaattcacgaatacaacgaattcgacacagcgcaatcgaggggggacattgtcggcgcgtatacagtaatcaaaacggatgactgtgattacattactcacacaatgagagcatcagctatatttgatatcagagatagatcatcggcatggatagcatataaaacaaaagggaaatcgtgtccgtgggtcacggacgaggaacaaatgattttaaaaaccgtagtcaagcaggcggctaagtattggcctcgcagggagcgattagataaagccattgactatgtaaacacagaggcgggtgaaggaattgattttagcaaaggtcaaaactcttacattgacgtaactcccgcagcagatagcacaatcgaaagtataacaaacttacttacaacaatgaataaaacttgggacgatgatttacttccactttgttcaaagatattcagacgacaaatattatcacccgccgaattaacagagtcggaggcaattaaagcatctgattttttaaggaaaaaggcatcataa

SEQ ID NO: 5932 - DNA, 258 bp, Photorhabdus luminescens
atgaacccatatgcagtttatgatgagattgaagaaaagaggttggaagatgagcactacagggaaattatattagagcaacaaggcatggatgccgaaattatttataacaagcttcctgagcttgctggaattttttcaatcgaaactaacaaactctttggcgaattactcacggagaacgatgaagccgcagagctcgttaattctcttttgtatgaactaagcttaatgaaagtaaaaatggaggatatatga

SEQ ID NO: 5933 - DNA, 903 bp, Photorhabdus luminescens
atgtcagataaaaatgaactggttgttattgatataaaaccagagcaagcgccggctctttatatctcaaatgggcttgacggatttttaaataaaattcgagaatcagtaaatgaagttccagacacaacaacaaaaaaaggccgtgacagaatcgcatcattagctgcacaggtttcacgtagcaaaacagcaatagaaaaaccgggtcgcgaatatcttaagcgactcaaagaagccgtgagaccggcagagcaagaaattaagcgctttgttgatgcatgcaatgagctacgcgatgaagttcgcaagccattaactgactgggaagctgagcaggagcacattaagcgcgaagagaaggcacgtaaggcagcggcggaactggcaaaacaagttgaagtcgatcatgaaattgctctgttaatgaatgaaaaatttgatagagattttgcagagaaaaaagccgaactggaacgccagcgtgttgcttacgaggaagaaattaagcaacaggcagcggagcaggctcgtatcgatgccgagcgcaaagcttcggctgaaatcgaagccgcagagcaacgtgaagccgaagcaaaagcagcggcagagcgtgcagaacgtgaaaaactggaggcgctaaaacgcgctgagcttgaaaaacaagctgcaattgaagcagaacgtcgtaaagcagcaacagatgagcacgctcgtttggctgaaattcagcatcagaaagatgaggaaaagcggcgtcgggctgacattgatcatcgtaaacgtattaataatgagtctctgcaagagttaatcaaaactggaatatcggaagaatgtgcaatgaattgcattaaagctatagcgtccggcaaaacatctcacttaaaaatcatctattaa

SEQ ID NO: 5934 - DNA, 423 bp, Photorhabdus luminescens
atgtcagaaaataaaaaacacgtgcacgctgagttaatgttgcagtatgcacaagatgctttgagaacagataagccttgggagttgtgggaagcgtattggccttatagtactggtggaaagtggataggttttactaacaatccgggatggtatgaaaacgtaaaatatcgccgcaagccagaagttattacagtcggtaacgttagttttccgaagcctgttgattatgaattagattatggagttggttatttttatcctaacctacactcaagaggtggagatagacattgtgaacatttctggagtggcaatgagatagattgttcactgttaaaaataggttttattcatcttacaaaagaagctgctcagcagcattgtgatgcactaattaaaataagcaagggtgagttctaa

SEQ ID NO: 5935 - DNA, 258 bp, Photorhabdus luminescens
atgagtaaattaaacagtgaagaaaaaatctggcttaataaattgcaaaaaattttagatgaatgtccgtcggaaagacttggattttatacaattggagataatgacttatctgtttatgatttaacaaagactaaagagataaatgaacttcatcataaaactaatcgtgactacccggcctgtattgaagaatccggggctgaatttaactattatttgacttttccggcaaaagtagagggtgtcgctgggtaa

SEQ ID NO: 5936 - DNA, 180 bp, Photorhabdus luminescens
atgaacacaatcacatcacaagaagttcaagatatattcactgataatggcttatatatctctttttcagaatctgaatccactgccgcacatgcaaataaaaacgccgccgccaatctttggggaatagatagcgctaagcagtgggttgaattttggattgaaagcgaacgtcaataa

SEQ ID NO: 5937 - DNA, 531 bp, Photorhabdus luminescens
atgagaactcaaatatttttccacaaatataatttaggtagttttggtttatctaatgatgaaatcctgcgttttgaaaaatatgctataaactatattgaatcaatggaaaaagaaatagatgttatttgtttgccttatcccactttattttatgagcatgtaacgtgctcgatatctaaaaatctcagagaatatatttttaaaaaatttaaatttgaatcaattactaatacatataatcgatcaataaaaaaacatgaatttaaatctcattacagtgattatagacaaaaaaggaatgagcgacaaaaaggaagacttataatagcatttgaattacacatggaacatattaaaaataaagaaatatatatattgtgtgacaaaatattcatgtctaatttaaaacataataatatttcaaataaatctatttcagataaagttagattttacaaaaaagacccgaaattatataaaagaatatataaaatatcacctatagtaattttaccgtatagtaattaa

SEQ ID NO: 5938 - DNA, 207 bp, Photorhabdus luminescens
atggctattgccatagaaaaacagaaagaaaaagaacttgagaaaaagataaaagaaataatttctggttgtgataacaaaattctaaaagcaatagagttacccaatcctaattatcgtgatgaaaccgaaattcatcaaaaagctgatgcaatgcataaagtagttaaccacgcgcaccagcgaaatcccaaaaagaaatggtaa

SEQ ID NO: 5939 - DNA, 285 bp, Photorhabdus luminescens
atgaaatgctacgcatataacaatgctgctaagcgtcgtcgtgacagtagacaggcattaaccgaagcatataacaatgctcacggcattaatcctgatgaagaagttaagccagttcgtccgcttcttacaattaagcgcactgcaatgaatcgagttgataaagctctttcagtaagagaaactaaagtttatgactctttagacaattgcgtattaccaaatgtgcatctttattctgttaatgttaaaagtagtaaaaacattacagtgagagcaaggtaa

SEQ ID NO: 5940 - DNA, 219 bp, Photorhabdus luminescens
atgaacacatacaacaacgcaacaatgtacgtagataaatttacaggcaagcaatatctggtacagaacggctacagcggcagagttactcaatatgcagcaaacgtaaaagtgtggtttgactggtcttgcgcggcaggcgggaaattaggcactacagttttcaaaagccgcaaagatctgaacaactggttacgcatgatgggatttaagaagtaa

SEQ ID NO: 5941 - DNA, 174 bp, Photorhabdus luminescens
ttgttgtatgtgttcatcgtgactatcctctgttgttcgttgcgtctgtttctagcacttgcgaatcatcccgatattcgtgtgcctcgggcggctacttcgtgggctttccttgcctgttcgctgtgtgcctttgatggaatgaataatacaagaaacattgtatgcctgtaa

SEQ ID NO: 5942 - DNA, 411 bp, Photorhabdus luminescens
atgactaaacaagataatgtgattccaataaaaggcgatttgccatttaagactggcggcggtggaggtggagatatgttggaggcccgtgtagcaaggcttgagtccgatgttgagcatatcaaaaaatctatagacgagattaaattagatttcagggacgctaaaaaagatatatctgcaaccactaaaaagctagcagaaatcgagccttcgttgctggggaagattcaagctactgaattatcattaagtaataaagttaaatctgttgaattatcgttatctgaaaaaatcagcactgtagacaaacgaatagacggcactaaagtttggtttctaagtatactggtgttctcaattgccatgcccatcatcatgtttttacttaatctataccttaaaaaataa

SEQ ID NO: 5943 - DNA, 639 bp, Photorhabdus luminescens
atgacgatcgcagagcgagtaaaaactagacgaattgagatgggcttaactcaaactgagctggctgatttgatcggaacaaaacaacagtcaatagaacaactagaaaaggggaaaacaaaaagaccgcgttttctccctgagcttgctgtcgccttacaatgttctgtaagttatctactttacggtacggaagataaaaaagaagaaatagaatacgccggaaagcctaaaaacggattagttagagtaattggagaagctgttctcggtattgacggtgccgtagacatggttgaattccatgctggatggttacgcatttgtagtactgatcatgatgcatatggattaaaagttaagggagatagcatgtggccccgcatacagtctggtgaatttgttgttattgaaccaaacactccggtgcatcccggtgatgaagtttttgttagaacaaataatggtcataacatgataaaaattatgaacataacacgaaatggtgattatcagttttcaagtataaacagcgatcatcgaccaataacaatccctaagaataatgtaataatgattcattatgtatcggctattataaaaaatacgcgttacattgatgacgacgaaattagctaa

SEQ ID NO: 5944 - DNA, 204 bp, Photorhabdus luminescens
atggaaacattatcagagcgactcaaacggaaacgttcagagatgaacatgacacaatctgatttggcaggaagggtagggatgacgcagcaatctatacaattgatagaagctggtatcactaaacgtcctcgtttcatatttgagatcgctaatgtattgaagtgtgatccatcttggctgttatatggaaatccaaactaa

SEQ ID NO: 5945 - DNA, 318 bp, Photorhabdus luminescens
atgaatatcgcaatggaacgcaaaactaaagaaatcgaatcacgaataagaaagggaattgtcattaccgggcctaagcatgttgcaaatgcggttggcgtgcatcagtcgcaaataagcaggtggcaaacagaacagaccggctttgtcgctaaggccgccaagttgctggctgcaatcggttttgatgcaaatgtacaggaagtagttattcatggagaagaaacagcacagatagctaaagcgttgcaagagatgctatctcacttaagagaaagcgccccgtctgttacagcagatgaggctaatcaaatataa

SEQ ID NO: 5946 - DNA, 363 bp, Photorhabdus luminescens
atggacagtttcgactatcacgtcaatgtcttgatgccggcgaatttctttcgtgatgatgaaaaatggattcgagaaatgctgttgcagctcgatccgtccactcgcggaaaaatcacggtgcgttattcagaagtgtatgaagcggcttgggatgaagagccggtatcgtaccggaaagataacatcgcacggcgtcatgcaaatatccggttaagagaatttgtcaggaaatatgctgctttcagccaggggtatgtaacaacccctactgagctgctgaaaacaggcactagccagcaaaaccagcccataccggagccgcttaaacaccgtggagggttcttttctggtaagtgctga

SEQ ID NO: 5947 - DNA, 282 bp, Photorhabdus luminescens
atggtcgatgtatcaacgctcatatcacaaaccggcttgtcaaaaagtgcggtgtacagatcgataaaaaccctgaaagagtcagggatgatacgcagcaggtacagcaaagtttacgagataaacccggatgggttctggaaaggcaagcgggagttacgagataccgcgttgttttttgctgaatcaaaccgggcaagaaatgtgaaatacagattgaaccctgccagcgctgctacagattcattcactgttcccgctacgtttgaagaggaaacatag

SEQ ID NO: 5948 - DNA, 1542 bp, Photorhabdus luminescens
atgttaaatataacaccgaaggttaagcaggtcaccgcgcttaacatgcttcgtcatgactggaaaaaacatcgaacgtttttattatcggccagtgtaggctttggaaaaacagcaatagcggcgtttattgctgacggatttgtcagtcatggtatgagagtgatgttcgtagccccgtacacagtacttctcgatcagactgcgacccggttcgttgaatacggactgccagcagatcaaatcagctacgtttggcgaaatcatccactacatgacccagatcgactaattcaaattgcttcggctgacacgcttattcgtcgtgagtttccagacaacatcgacttactgatcattgatgaagcccacatgaagcgccgtaagttactggaaattatcagagatagcgacattcgagttgttggcttatcaggaacgccatttgcgacgtggatgggtaaatattacgagaagttgattaagccaacgacgatgaaagaactcattagcattggggatctgagcaaatatgagttctatgcgcccgacaggcccgatttgaccggcgtgaaaacaacaagtttagcggcttttggtaatgactataacgaggagcaactagcccagatcatgggcgattcaacgctggtgggcaatatcgtcaggaactggctggagaacggcgaggaccggccaacaatctgcttttgtgtgaatgttaagcacgctaactatgtcacgatggagtttaacaagtctggtattaacaccgaagtgatgacagcagaaaccccacatgatgagcggcagttgatcattaacaggtttgaacagggtgcgacgaaaatcatcgtcaatgtcggtgtacttgttgccgggtttgatagtgacgtgcgctgtatcatttatgcccggcctacaaaatcagaaatcagatgggtgcaatgccttgggcgagggttgagaacagcgaagggcaaagataaatgcttgatattcgatcacagtggcagcgtccatcttctcggcttccctgatgaaattgagtatgacaagttgccatccaaaaatgatggcatgaaatcttcatcaagttttagcgagaaagtcaaacaagagaaaatcccgaaagaatgccatggctgtcattacatgaaaccggctggcgtctatgtttgcccgaaatgcggtttcaagccgcttgctggtgagaacgttgatgttgatgagtctcgcgggctgaaaaaattagggaagaacgagcgaatttacagcaaggaagagaaacaaagctggtggtcacaaattaaatattatcagcgtgaacgggaaaatcaggggaaacccatttccgatggctggtgcgctcatacatacaagaaaaagttcggtgtctggccgcacggcttaagcgatcacttaattgaaatctcaccggaagtttacaacttcattcgttctaaacaaatcgcgtgggcaaagatgcaggagaaacagaaaaatgcgaacagtggaagcagtgagagggcggtggcctga

SEQ ID NO: 5949 - DNA, 765 bp, Photorhabdus luminescens
ctgctagaactaacccaaggaaaagatttcaagacattagcaagagaaattgattcactaataggaaacagttacaactacaaacgaggtcatgataagcagcaacagccagaaactcaaacaatccgtgtaaaagtcatcagtaaattttcaacactacccccgctaaacgataccgccgctcaacactacttgttcaatcgcggcatatttgaattaccgtccggccatattcgtttcaatacggaagaaaaaacgccatttgggaataagcaggctatctggtcaattgctacggatgataaaggggcaggctgttatctccatagaacggtactagacggagagaaaaaagcggattttgacggtaataagcggatgctgaaattgcaggaagataactatctgaactttgctaattccattgctatccgcatgtttccagtctcttcaactttggggatagcagaagggatagaaacagcattgtcatgcaaacagatatacggctgcaacacctggtcaactctgaatgccggatttttacggaagttccgcgctcccaagggagtgaaacacttaattattttcgcagacagggacagtaacgggacagggcttgctgcggcgtttgagtgtggtaataaaaatattctgagtaacaatgatgtggaacttgtcagcattcgttggcccgaagccggggatttcaacgatatgctgatcaatggtgccaaagtatttcaagagcagttacagagatga

SEQ ID NO: 5950 - DNA, 153 bp, Photorhabdus luminescens
atgttggagtatttcggcaatatgaagatgactgtccgtatcgttcatcaattgtcagatgcttcaattgtgatgcacaaacagcccagtttattaatgatgatatccgtcgacagcatgaaatggcaatcaaagcctggaataagagagtaa

SEQ ID NO: 5951 - DNA, 444 bp, Photorhabdus luminescens
atggaagctgatttttgttttcacgaatcaaataaatcacaagcttgggaaatattaaaagaaacacttgaaactaaacagccgcaccgaattattattaagccgtggaaagatactcgctcaattccacaaaataacacttttcatatgtggtgcggtgaaataagtcgttatttaaataaaaataacgctaaattgacgccggaggatgttaaggaagcacttaaacatacatttttgggttatgaggtcatagaagctattgatctcactacgcagcttacagagcgcatcaggactctgagaaagacgtcaaaattagatacgggtgaaatgttctatttcatgacgcaagttgagaaatgggcttttgatattggctgtttagtgaccatcccaaataactcacaatatatgaaattaaaacaggagcaagatagataa

SEQ ID NO: 5952 - DNA, 237 bp, Photorhabdus luminescens
atgaatgactggatactctatttctatgcgtttgctggcgttgtagcgacatttgtttgcgggcttatatggctgtcagcgtcggcaaggctattttatctttatgcgctgtggcagcttaagcagggtaaaagagcattgcgattaggcagagaaatgaagagagaagcaaaacagcttatagagtctaattttctcgcggctgcggctgcttttgagaagaaaagaaaggaataa

SEQ ID NO: 5953 - DNA, 381 bp, Photorhabdus luminescens
atgaaaaataaatatagtgaattgtcagattttgaaattaataaattagtattgattcaggaatctaaagaaagccttgcagaaattatcaatattcgacagcgtaatcatgtgtttcgtatatttcatcgtcaagtaatagctgatgttaaatttaaagatgaatctgatttttcggaaattggaccttttgatttttgtaataatccgtctgatgcatggaatattattgttaagaataaaataagcttagtctatgtaaatgatttttggtcagcacgtcagtatcataatgcatgcattgaagttaacgataagaatccattaaaggccgcaatgattgtatttctgatgatgagtaagggagcgacatcagtatga

SEQ ID NO: 5954 - DNA, 816 bp, Photorhabdus luminescens
atgaaccttgaatcactaccgaagtatttttcacccaaagggatcatgtttagtgactctccatctgcaactgctactgactcattctcaattaccgatgttatggcctcgctagggttggcgtccgcaaaagcgaggcttggcattgagctgtttttggcgaaacaggggatcaacagtattgatgaagccgtggagagcctttatcaatatgcaatgactcaggttcataagcatagtgctattaataagcttgatgaggatgttaagcaaaatgttctgcaattactcgcaaattatgcatttcaggattatgcgagaagtgcagccagtaagaaagtgtgtccagattgcgatggtggatttattacagttcgtaaattcacaacaaagtatggaagtagtgaaggaatgctggctaaggcattaaacatgaaacccaagcgttttattacctcaatccgagaagtagaggaaagatgcagggtgctttgcaagacctgcaaagggaaaggctctgtgagtcattcttgtcgctgtaatggacgtgggcaagttttggatgaaaagcagaccaagttacaaggtgtgccgatttacaaagcatgcctaaaatgctccgggcgtggatattcaagactgaaatttacagaagtctttgaagcaataaagccattaactgggatatctaaaacaacttgctatgacaaatatcaaccgttgtttgagcagttagtaagtgaatgctttaaagaagaggaacaagctgattgcgttttatcaaaattaacaaaaagagaatttatttctttttaa

SEQ ID NO: 5955 - DNA, 411 bp, Photorhabdus luminescens
atgctaggcgttattactgataaaattaattggacatcttctttcctgctgatactacttggttcaacaatcgctattatcggggattactatacggtatttgcagggttgttaatcactgccattgcgacaatgaaaatcatgttttcattcgaagtgacatcagaacgcgccaataagcaatcagcacgctatttgatgctctacaacacttcacatctgatcatctccgatgaagagttgttaaacaggcttgtgaatattcaggaggatgacaatagaccgtgggcctcactagcgtatccggcaatgttacaggccagtcaggttttaggcaggccaacggacattcaattaacatggtatgaaaagctgatggcttttctggctgattcagtgcctgtacgctaa

SEQ ID NO: 5956 - DNA, 186 bp, Photorhabdus luminescens
atgacagatgcgcagacactggcatttgaatatttacgccgttctgacaaaaaactttcacccgctcaatatttgcttgaactcagaaaacttgaagcggagtttaacgagctattacagattgatgatcttgagcaaaaattgaaagacgactccataaggacgtggaaagcccttagctcttag

SEQ ID NO: 5957 - DNA, 99 bp, Photorhabdus luminescens
gtgttgccgggtatttcacgcccggcgcgtggtatcatctttagtccctacaaccaaagaggaatctgttatgacagatgcgcagacactggcatttga

SEQ ID NO: 5958 - DNA, 324 bp, Photorhabdus luminescens
atgaagatgaaaaataatcctgatttatgggctgaattaatagacggcttaaaacattcgtggccgcaagtatctggcacggcagccgcaatattaatttgttggggacgtctgatttatgacggagtggaatgtaaaaacaaatgggctgaatgcctgttatgtggagttctgtcatgggcgatatccagcggtattgaggcgttcggtatttcctccgccgtatctccgatgatcggcggtgctgtgggatttatcggtgttgataaaatcagagaaatggctatccgtgccattaacaaacgcattggtgatgacaaatga

SEQ ID NO: 5959 - DNA, 411 bp, Photorhabdus luminescens
atgactagaggtattcgaaataataaccctggcaacattgactataacggattcaataactggctcggtcaactacctcttgatccaaagattgaaccccggttctgccggtttgagtcacctgagtatggtatccgggcgctgttcaagctactgcaaaactatcaacgtaagcataatctgaatacagtcagagagattatcaatcgttacgcaccgccacatgagaacaatacggaaagctacattcagtttgcggctaagaaggtgggtgtctctgcggatgatcggatatctacccaagacaagataatcctgttcgctttagctgaaggtattatcaagatggagaacgccaatcagcaaccctattcaccggagacgttcgaacgggcgtttgagatgctatga

SEQ ID NO: 5960 - DNA, 225 bp, Photorhabdus luminescens
atgagcattattcagattctggttccggtaatttattttgtcggtgttattgctgcatttattatttttatattgatagaaaaacgagtcaatgatccggaggagtttggggtcattttgtttatgtcattcatatggccgctactgattattcttatgccaattgtttttggattcttttttttaaacgagatatacaatcaattcgttggcagacggtcatga

SEQ ID NO: 5961 - DNA, 450 bp, Photorhabdus luminescens
atgaaatttaacgctagttactacacgatactcgcattaatcgttatctcactgacagcgtattactatcactctgagttacagagagagcagcgagtgacaaagcagcagcaagaagacattcagcagctcactgacactatcaactatcagaacgctcacatcacgatgttgaacgagcttgatgtgaagcatacaaaggaacttgctaatgccaaatctgaaattgatgttctgcgcaatgatgttgccgctggtcatcgccggttgcgcatcgcggccacctgtaatcaaggcgaagccggttcctcctcccgcttggatgatgcagccagcccacgacttaacccagcagctgaacaagattatttcgatctccgaaaaatgattgttgaaaacgagcagcaaacaaaagctttacaagattacattagagccgagtgtcagtaa

SEQ ID NO: 5962 - DNA, 279 bp, Photorhabdus luminescens
atgaaattaaaaaatattactctggtgaaaaaagctatggtgactggaacgatgactgataagttcatcggtaaaccatccccgcaagatgtcagaagcgctcgcatagcttctggcatgacccaatcacaagcagccaaaagattttcttatgcgcttgttagctggcagcagaaagaggcggaaggtaaaactaatcgctctctttcgtctggagagtatgaattattgcttcttcttgctgattcccacccagattatgaattaaaaacaaggtga

SEQ ID NO: 5963 - DNA, 669 bp, Photorhabdus luminescens
atgaagccaattgaatatcttgaaagcatttctctttatgattctgttgcgcgtgatgcattaaatgcaattaagaccggcgcattcacagaagaacaagtaatagctgagttcatgaaagtaaaagccttacaaaataatgctctattggaactgcttgagtggaaaagccttaaagaggccaaaccttttcaagcaacaaagggtaagggaataccaggcactgttagaatttcatatacagcaacagatgagcacggcaatgaaactttgcagaaagaacaccacatgcttcttactgacgtatataggtgccgttttatcgtgtttttagaagaattaaagaaaagtgcaaaagagttttatgaaacagtcatggagggggatgagtgggatcgaaaagatacaagcgaaaagagtgcagagtgtttaattgtgaacggaaagcaccacggtaagcgacgcactttaacttcaagagctgaaagatatctggttgtaagcgatgatgtgtttccgtgtgttgatgttgatgaaatccctgtgcatttttgggtaaatgaagcggacggtaaaatttacatgattgcaacagcagaagaattaaactcgtctgagattagtttagcgatttcggaaacagatccgccgcttaagccgatatattaa

SEQ ID NO: 5964 - DNA, 402 bp, Photorhabdus luminescens
atgggacaacaaacaaatcaggttggttgccctagcaagctgaatgatgagctaatcgctaaggcaagggattatctgtacggcggttatgaatcagttggtgatgtcgttcctagtgtagccggattagcttgttacttggctattgcacgttcaacagcatatgaatatgggaagcagtccagcgagttttcggacatcttagaaggcataggggccatgcaggaaaacaagcttataaacaaggggctgactggagattttaattctacgattgccaagatgatgttaacaaaacacggctattcagataaacaagaaatcgatcaccggtcccctgatggttctatgtctccaaaaccaactattatcaggctcgttggagtcgagccagggcaatga

SEQ ID NO: 5965 - DNA, 1230 bp, Photorhabdus luminescens
atgacggtagcagttgacctgccgattcccgcaaaactcgtacctgtatttacaaaagaaaatgttcgttaccgaggtgcacacggaggcaggggcagcgctaaaactcggacatttgcaatgatgagtgcggttagggcttatcaagctgctgaatctggtacaagtggggttattttatgcgctcgcgagtttatgaactctctcgaagaatcatcaatggaggaagtgaagcaggcgatccgttccattccttggcttgatgactatttcgaaattggcgaaaaatatatccgcacaaagaataggctagtcaactatgtgttctgtggcttaagacataacttagacagcatcaaatcaaaagcgcgtattcttctggcgtggattgatgaagctgaatctgtatcagagacagcttggaaaaagttacgaccgacagtacgtgagtctggttctgaaatatgggtgacatggaacccggaaaaggacggaagcgcaacggataagcgacttagaaagaaaccaccgaaaagctcaatcattgttgagatgaactacagtgataatccgtggttccctgatgtgctggaggaggaacggcaggaagacttggaaagtctcgatcactcagattatgcgtggatttgggagggcgcttatcttgagaactcagagaagcaagtattagcgaacaaatacaagattgaatcgttccctgatgatctgtggatgcaagccgaccgtctattgttcggcgctgacttcggtttcgcccgagaccccagcacgctacttcgcatgttcattttagataactgcctgtatatcgaccgtgaggcttacagtgttggggtggaactcgatcacatgcccgcgttttatgaccaagtgcccgagtctcgtaagtggcccatcaaagccgattctgccagaccggaaaccatcagttatcttaagcgtcaaggcttcaatatatcagctgcaaagaaatggcaaggcagtgtagaagacgggatcactttcttacgtggtttcaagaaaattatcattcatccacgctgtaaagagaccgcaaaagaagcccggctctactcatacaaagtggatcgtatcaccggcgaggtgcttcccattattgaggacgcacataaccattgctgggatgcggccaggtatgggttagatggatacataaaaggcagaacaactgtttgggacatcatgtaa

SEQ ID NO: 5966 - DNA, 1389 bp, Photorhabdus luminescens
ttgggacatcatgtaatgacgaaaaaaacgatgattggccgtcttactgatggccttcacagtatgctgacatctctcggtgagcgggtgtcggcaataaaatatgcgagcaataataaggcagatgtgcctgataaagagttgctcgcaatgtataaaagatcatgggtggtcaagaaatacatagataagacggctgatgatatgttgaagctaccccgcgaattatccggtgatattgatagctctctggttcagcgcatcaaagacacagaaacagcactagccgtctataagatatttcatgacgcgctaacttgggcttcattgttgggagattcattgattgttgcaataactgattgcgctgatgagatgattagtgaaccgctaaatctacagtcagaagacatcattaagtttttggtactaagaaaagaggaatacacgccctctgataatgttatctcggatatcgcatcaccacattttggacatccgcagacttaccagatcagcattggcaaccaacaactcaagtttcattattcgcgttgccatcgtacaaagctgggtaagcacagcattaaagatataacgaagtacggaacatctgacattcaagcgccatatgacgctatcaaaatattcgatgcggcaattgtcagtactggggacacgatccaggaggcaaatgttgatgtcatatttttgccgggtttaaataatcaaattgatgcgggacaagagacgcaagttgtcgaatatgctcgtgtgatgaagcaaacaaaatcgtcaacgggcttaatgctaatggacgccggtgatagcacgatgcagagccgctatgagcaaaaaacagctcaattctcaggactgtctgacgttattacaaagatggctaatgtcttagctggcgcacttgaccggccaataaatattttgttcggccagtcagccagcggctttaactctggtgaagaagataacaagtcgtattacgaaacaatcaacgggttacaagaaactcggttgcggcccatgcaagactttgttgatcaattcattctcgacaaactagccgcgagcatcgacacaatcagctatgaatatccgtcaatagacagcattaacgaagctgacgaagcaacacggtttactcagtatgcaacggggttcacttctttagtccaatctggcgttgttacggaagatattgcactgcgcgaaatgcaagcacggggcgtgctgacgactgtgactaatgaggaaatcgaagctatggcgggggcaaataatggacagtggtatcagcctgaaacagatgctggaacgcaagcagggacgtttgaaggctcgcaaccggctaatgcgtccgccaacgcctag

SEQ ID NO: 5967 - DNA, 813 bp, Photorhabdus luminescens
ttgaaggctcgcaaccggctaatgcgtccgccaacgcctagcaaacgaaccgaagtttggtatcgcgacaggctcattgagtttatcaggatgatgcaagatgttgtgatagatgacttgcaaaaaccaatattaaacgacgcacccaacaccccgccactttcaatcacttcaagactttcacgagcaatacaaaaactggcgaatatgtctattgctgatatggcaaagcgtttgtcattcggcatggtcaagcgtgcaaatgatcaaaacaaagatcaaacacagaaaacctataaatcagcgttcggtattgatttgacggggatgctcggtgatgaggttgtgaaaaaacagattgatgatgctgtgaaagagaatatcgatttaatcaagtcaatacagactgattttatcaatgatatcggctctaaagtgttcacgaatctgtttgatggcgggcgtcatgaaaaccttgtttctctcattcgtgagcgcggccaggtgacggaaagccgagcgaagcttattgctcgtgaccagacggcaaaactgaattcggcactgacagaaacccgccagaaagcgctcggcattgatttatacgattggggtggtgcgggtgatgagcgagagcgtgacagtcatttcgtattgaacaatatgacatgcaaatactcagaccctaccgtttattcagacgatggagggaagacctggaagaaacgcaaaagcattggggcatttgaggggaagcccggtgacgattatcaatgccggtgcgtcgctcttccgaaaatatcttgggattaa

SEQ ID NO: 5968 - DNA, 1158 bp, Photorhabdus luminescens
atggcatggaaaaaaacaccgcaggggtatgttgtcacatctgcaacgattacccgcgccggtcccgtcgaatattacgggcatgaagttaagttaactggcgctgatgcaaacagaaaaatcactattcaccgaaccatcgaagaactttcaaaacccgaaactcttaaatcatttgaaggattacccgtcacgctaacgcatccgctcagcggtgaggtcaatgctgacgagtggaaagataaagcaattggacacatacagaacgtacgcatagaaggcgattacgttgtttgtgatgtgtatctgaaagatgccaaggcgattcaattacttgaagaaaaaggcattagagagctttcagtcggttatgaacccactgagatagtcgagaaaaacggtgaattacatcaaatcaatatcctcggcaatcacgttgccgttgtagcggaagggcgcgtcggcgctgattgtagactaaacgataaaaaaggtagaccaatgaagaaactctcattgaaagatgtcattgcgttgcttaagggtaagcgcgctaacgatgccgaggggcaaccactgaccgaggaagagctgatcggcatgattgccgcattagagaaaaccttgcaagaactggaaggtaatgcaacaccagaggccactgcaaaagcccaagaagttgtggcgcaactggaagagcttaaagctcagcttgagcagtcaaaaggggctggaacaccgccacccaatgatgctgatcctgatccggctggtggcagtgatgacaaagacgcccgtatcgctgcattggaagctgaaaacgaacaactcaaagcagagaaccaggcacttaaggaagaactggaaaaattgaaaggcgaaagcgacacaagcacaacattgaatgacgccaaagcacgtttccctaaggttcaatttaacgatgcgaaatgtgcgcgtgatgtgcgcatgctcgcactgttaagtactggggcattcaatgattcacaagtgaaagccatgtcggatgatgaaattcgggcagcttatgctgcggctagtgcgctaaataaaccacgtagcaacatcggggcggcattgctgaacgattcagcgaaagcgaagaaaacagcttctcagcgtttagggggtaaataa

SEQ ID NO: 5969 - DNA, 486 bp, Photorhabdus luminescens
atggcctttggatttacagattgggacgccgaaaccggcacgatcaaacccggctctatcaaacgggcttcaagctcaaacgataaagtgtggggggaagaaaaccgcactgaaatagcgctgccctacggtactttcgtcgcggtaaacccagagggtggggtgaaacctatcacttctgcaagcgacgttatccacggcattgtcgttcgtgacatttacggtgacgcagctccgcataataaacaagtcaatgtaggacatttctctcatggtgactgtgtaggagcgctggcggttgaaaaagatacattcactcgtggggataaagtttatatcgttgcaacgggtaaggatgtgggaaaagtgactagcacagcaaaaggcaatattgatctaggctattgggctgaagaagttagcgcgggtaatcactgtgtagctatcactcttggttatatccacacccaaaaagtaggagagtaa

SEQ ID NO: 5970 - DNA, 960 bp, Photorhabdus luminescens
atggctatggaacccgcatacttcgaagaagtattacaggaagcgctgacagagcgtgaccagcagttgcaggaaaaggaactgcccgaaattaatatcggtgaagcgttgccggtaacagaggggttagatttttcccttgagtacgtcgatttcggtgtaactgatgtgcttggctctctgaaagacggcattattggcaacaaaacgaactcactgaaaaccattgatagtgatattgaatggcacaaagcgccggtcgggcagtggggcaaatcagcaacttggacacagcaggagctggagaaaattgcgcgcttgaatattaacttacaaacaaaaaagcaagatgatttgtatgcaaacgcaacggcaacaattcagtacgctggttatgttggtcacgagggcgtaaaagggcaagaagggctgctaactggatctaaagttcagttaattgcagaagtaaccggcaaatcaatcaaagacatgtcagcagaagaattcattaacatggttcttaatgcttataacgtcgcttgggccaaatcgggttatcgcattcagccaacccacgttgcaatcgatgcatctgattttatgttggcaatgcagaagttcgacactaacagcgtgattgtgggtgtcgatttgctgcctgtttctgcaatggatcgtattatggcggcactgcgtaaagcatcgaacaatgattcattcagcattacttttgtgaaagtcccctctaactttgctaaaaacattgttaaagggaaaactcgtctggctatttatacttacagtgaggattacatcgaaatgaaggtgcacatgcccgagttgctggcagtgcgtcagcgcgacttgctcacttttgagtgtggctatcgttccgcattcggtggtgcaatgtggaaacagccaaaatctgctgtatatgtagattataaaagctcataa

SEQ ID NO: 5971 - DNA, 363 bp, Photorhabdus luminescens
atggattttctcatccgttaccctgaatttgccaaaattgacgaaaatcgcatagagatagccttgcaagatgctgcaaatcagatgagcagcaaagtgtggggtaaactctacgagcaggggcgacaggctcttgctgctcacctcctctatgtctctggcgcattaacccgcagcggtaacagcaacgggaaacctgttcagacggcgacaagcaagtcggctggtggattatccattggctactctgcgcctgatgcgggtttcggggctaaccatgatggttatgcggccagcagttacgggcaggagtatttgcgcctgcgtaaacttgtctctcgacatatgctggtggtgcgatga

SEQ ID NO: 5972 - DNA, 594 bp, Photorhabdus luminescens
atgattaagaattctggcaattttaagggggcagggcttaaggcgcttgaggcccgtataagggctttaagtaaaaagaaagtggttgtcggtgtgcctgcgtcgaaaaattcagatcaggacggtacaagcattgtgacgattgccgtcgctcatgagtttggtgcagaaataaaggttccggcgagggcggtaacagtttatcgcaagatgaataaagatggttcctttgctggaaaaggtaagtttgttaaagcaacgaagtctaactttgccagtacccatactgtacctgctcacaccatcaatattccagaacgctcatttctgcgttctacgtttaatgaaaacaaagacaagtatgccaataaattagtgaaaggtatcaagtctgagttgaaaaatgacggtgacccgcagcaagcgctagaaaaactgggggagatggtcgccagagatgtcaaaaggaaaattcaggcaggcattgatcccccattaagccaggcaactatcaagaggaagaaatcaagtaagccgctcattgataccgggcagcttgtccaatccattacttatgaggttcgcgatgattga

SEQ ID NO: 5973 - DNA, 351 bp, Photorhabdus luminescens
atgaggttcgcgatgattgatgattttgttaatgaaatctttgacgatgatttctttcggcaagagctggagttcaaaacatcggacggtcaaagccgggtgcttgtttgtatcgttcagccagccggagcggaagatctgcaaattctgccagaaggggatcgttataacccgactgtcagagtgatgacgcaagagtcggtagagaataaagagcttttcgtctggaatggctatcgctggcgcatcatcagcaacgcaagatggaatgactatggatactacgactctctcgcaactcgatacgaaggcagtcagacggacgatagcggcggttttgaaattacctga

SEQ ID NO: 5974 - DNA, 432 bp, Photorhabdus luminescens
ttgaaattacctgaatctcaggtgcttgatgctgacggtgagactgatgtgtctgatatgcagtcgtttatcacggtcaatcgggttacatcggaattaatgggtgaagaatataaattcaatgctaagaaagaaattgaaattatcactgtcacccgcgaaaccatcgtttctattaatgccttcggcaaaaatgcttatcttattatcgaaaaactcgccagtgttctaagcacaagttacgcgcaaactctttttaagcgtcttggtgctggcatagtccgaaaatcccaggtccgtaatcttcccactgctattgctggtggcaaagagcagcgggcacaaattgatttaactctctctcatatccaccgaattgaaacgtcagtaaaccaggcgaagacggtcgatattactgtttatgaggattag

SEQ ID NO: 5975 - DNA, 1512 bp, Photorhabdus luminescens
atgagcttatctattaaagaggtggtcaatgctcagatcatgccgcaggctatggcggcacaacgccgtgatttgagtatgatagctatttttacgccagagattggcacgtcgttcgctgatgcggatacgcgctatattattgtgtcaagcgcacaagacgtggcaaatctattcggtaccaaatcggaagcctacaaaacagcacaagcgcttttctctgtgcgtccaacgcctaaacgcgctcttatcgctcggtgggcgaaagagaaacaagaaattccggccacggccaatgctctgaaagggtctacgatctcagcaggcattaacgcattcaaagccattactgatggctcaatgatgctgaatgtcggtggtaaaaacgttttgctgtctggcctgaatttcagtaaagcaattgatttttctgatgtggcgagtgttctgcaagcggcattacccaaagacagcaatcttcaagctatttgggatactgtcggccaccgggtaattgtccaggcgcaaactgccggtgcttatcctgctacaaaattaggttatgtcacggaaccgggcgcaggtacttacgttggcaaaatgctgaaactggaagacgggcaagcaacgattgttgtcggcaaagccgctatcacagtcgaaaaagaattgccctctgaagctctgcataaattgcagaacgtttatcaaaactggtacggcgtctatttcgctgatgctattgctgatgaacagttagatgatattcacacctgggttgcatccgctgacatgaaagtctctgcttacaccgctctgcgtgatgaacaaatcgagtggaacaacgacaatatcatcaaaaagctgtatgacaaaaacagtggccgcttaatgtctcagtacaacaagactggcgatgatcatgccgcagtagcgttactggctattgcattgtctacaaactggaacgcgcaaaattcagctaagaccgtcaagtttaagcagcaaacaaccgttcgttctgataaccggattacgcaatcagaggcagaaaaatgcaagcggctgggtatcaacttctataccgactatgacggtgtatcgatgctggcagagggcacgatgatcggcggccaattcattgatgagattgttggcctggatgcattcattgatgcgtgtcagaaacaggcattcaccacattacaagccaatccaacaaaaatcccccaaacagacaaaggtcagtcaatgctgatcggtgccttgactgttattggtaatgagtttgtgaggaatggtttcctggctggtggtgtctggtggggtaatgatgtgggtgaattgacatatggcaatcgcttagatgcgggtttttatttctactctgacagctacgatttgcaatccattgctgacagagaagcgcgtaaagccatgccgattatgtgcgcaatcaaattggcgggtgctattcattccgttgatatatcaatccaattcaatcgttaa

SEQ ID NO: 5976 - DNA, 429 bp, Photorhabdus luminescens
atgtacaatcatgcaaactcgattctgacgatatcaggctatgagatatcgggatacgaaaatgcggccgatgcgcttaattttgcccctgttggtgatgacggggatatgacttacggagtggatggggatggtgtttatgtggcttcgtgtaataaagggttaattattacaataaagcttttgcaacattgcgaatctaatgagtatttgaatgacttacgcaatactcagatcaatatcccgaaagcgtataccccggcctatatttattataaagacgtcattaacggtgatgaaattattgccgatcgttgtttcttcaccacgccccccacggttacccgcggtaccgcccataacacaatgacgtggacactgaaatcaacccggtcaacaatgaaactcaaaaagggagtttataactga

SEQ ID NO: 5977 - DNA, 396 bp, Photorhabdus luminescens
atgattattgacaatataaattacgaacaccgtttatctaatttcatcgaagccaaaaatcacgccttaaaactggttggcctgttaaagggttgcattaaattggcgggtgataaggttgatatcgatgtcggcgccatcgtttcaaatgttggttcacaggaaatgcagggcattgaacaatttattttgaaatatgtcacggtgattggtgcggacggcaatactgttttactacagaagccagacacgtttaatcagcatttcaatacttaccgatctcattatttccaactaatcattgacggattgaaatttcactttgcggattttttgcccggtggggtcgcctctgcggtaaatatgccgaacttggcggctctgaatctacagtaa

SEQ ID NO: 5978 - DNA, 138 bp, Photorhabdus luminescens
atgagaaacatgtgtactttgcatgaactccgcaccatttattcactctctgatgtcatggatatgcatgaagccatagccgaaacgctattgtctgagaagagggcaaacgatggaaatcgacgaactactcgttag

SEQ ID NO: 5979 - DNA, 1989 bp, Photorhabdus luminescens
atggaaatcgacgaactactcgttagcgtcggcgtagacacgtcacaagcggcgaaaatcaaagatgtcattgtcgctctcggtgctgcggcagtgcagatcgcgaatgaggccaatggggttaataaaatcctggggggtgttggcgaagagtcagttaaaagcactgagcaggccgctcaaaaagccgaagaggccggggcgtcaatcagtaaattaaaattgctggctgtcggggttgtcgcggctgtcagtgttgcgaccacaaaagtgcttggctttattaatagttctatctccggtgccaaggatttagcgaaagaaaaagggctgctttataagatatccgacagagagctaaagcaggctgatgagtacgaagcgtcaatgaaaaagatggggctctctatcgactcggttaagacaaagatagcgctcaatctcgttccatctatgaccaaggccgttaatggtttcaatgcctggatcgcttcaaacaaagagctcatcactgacgggctgacaaagattatcaaagtgggtggcaaagttgttcaggttattgtcaactcagtccgtgcgataaacaaaattgtcacatcgactattggctggaaagccgcgattatgcttatcgttggtgctctggcaattcttaagcgttccatgctaatggcgttcattgccaatccggtgacttgggtgattgctgcgatagctggcctgcttctcttgcttgatgatctgatggtctatttagatggcggcgagtcattatttggcgcgttctggggacctgctgttaaatgggttaaagatgtcatcaagtgggggaaagacttttacgctaagtacaaggatatcattgataatttagtctcaatctggagcaagtcatttaaagcaattttgtctatcttcagcggagttttccaatatatctggaacgtcctcaaactatttgtaggtctatttaccggcgatatggatcttgttagtgaggcatgggccgggatgaccgccgcactgatgaaaatatggaatgggctgattgcctatctcaaagccttttttgctttcttcggtgtgatgtgggggattgcgggaaaactggccgccaacgcatgggatttgatgaagaaactggcaggcaaagcttttgattggataaaaggcaaggctaaaggttttgtaagtagtctaggttctatattcaggaaagtctggggctacatcaccgcgccgtttaagagggcatttaaatgggtgcagggactgtttggcgtgagtgaaaaagatgctgatagatatatcgataatatcggtaaagcgtttgatgctgtgtttgctttcatcaaaagtccatttgagaacgcgtttaagcttgtcaagtcactgatcgatatcgccactaatgacaacctgactttcaccgaaaaaatcgaagaaattttctctgctgtctggggctacattacagaaccatttaagacggcatttaagttcgtgctcggcttattcggggtgaatgaaagtgaggccgataagtatgtatcaaatatcggtaaaacttttgatggagttatagaggccatcaaagccccgtttaaaaaggcttttgactgggttgtggaatattacgataagaccgttgggaaggttataggggctataaaagatttcttcactggaaacacaaaagcagaagaggcgacatttggttttagtgatgatgaccttaagaatattcaatcttctgttatagctggttcaggtgattttattggtggagctatcgctaatactaccaataccaccaacagttcatcacaaacaacgacaaatcatggtgatgtaaatatgaatgtatctataacatctccgtcacctgaaaaggctgctcaatattctgtaaatgagcttaataaagcattgaaaattgctggttacaatacaaaaggacagttttataacggcgctggtggttag

SEQ ID NO: 5980 - DNA, 288 bp, Photorhabdus luminescens
atgaaaagtttaatgttaccggttgtgttggctatctttttagttggatgtggagaaaaagatctgacaattgatgcttcaagctctaaggctttaaagtcttctacgcaagaaatttatcgctctctcgataaggatgatgcagcaaaattcaaacaggctgtcctcaatgtcggtttggctgctagcatagtaacaaataacgaggaagataagataaaggcaatcaacaagatgataggcggcaagactgccaagcagatcatcgaaatggacgagaagaagtaa

SEQ ID NO: 5981 - DNA, 276 bp, Photorhabdus luminescens
atgcagatgactaataaacccgtatcagcgcaagataaattcatgcttcgactacctgatggcatgcgggatgccgttgccgaaagagccaaagaaaatggtcgttcaatgaattctgagatagtccaaatgatacaggactgtttagatagaaaggctccagagactcaaccaacggtttccctcagtcatgaattgatggataaaatcattgccctggctgaatctatcgaagagatgaaagataagaaaaatcagttagataataaaaaataa

SEQ ID NO: 5982 - DNA, 174 bp, Photorhabdus luminescens
atgataagcctagataacagaaaaaagagcgcacaaatgcaactgagaacaacggagttcatgaaggagcaaatttgcaaattggcagataaagagggaatttctaagaatgcagttctgaatcaggctttggcttggtatatggatgaaagggcaaaaaatgcagcacaataa

SEQ ID NO: 5983 - DNA, 945 bp, Photorhabdus luminescens
atgcagcacaataaaagcgaagccccagttgcgcgaacaactagggcctctgagtgtcatttacctagcgtgataaacgactcagccattgtaacgaatggcgaatcaattttccagagtactaaaacggaaaaccagcagtttgccgctgctggtatccaagttgatataccaccggagagatatatgaagtcaattatcaaacattttgagtttaagtcaagcaatgaccaattagtaaccgtttcagggttgaaatataagggtaagcctgtgtttttcgctgtggagttagccgagggcttgggatacacgaacccatctaaggcactgaaagaccactgtaagtctttgattaaacttaattataacgattcgttagaattgggtttaggtgacaacccccgtggtgtcattcttgctgggcagtcagacatgttcagattggtaatgcgtagtaatttaccttctgctgagcgttttcaggattgggtgtgtgaagccgttcttccatctatcatggagacaggcagttactcaatcaagcaaagccagtctggtttgcctgagtatagaaaagccagaacgttgaagatgtcggttgatgcgatcactaacctgtttgagcttatgcccaatttgagtaatgaggcaaaacagtgtgcagcagctaacattgttaacccgatagttggttttgaagctgttccccttcccgcgctggaagagaaatattacacagccggtgaggtagggaagatgctggatttgtcagctaacaaaatcgggcggattgctaatgatcacaatctgaaaactgagcagcatgggaagttcttccttgataagtccgcttactctgataagcaggttgaagccttccgctacaatgagaacggcataaaagctcttcggcatttgatccacggtgttgaagtagcttaa

SEQ ID NO: 5984 - DNA, 207 bp, Photorhabdus luminescens
atgctttgcaacataagattagcctcttacacgccgaaaggcaaggagacgctaaccatgaaacagcaaaaagcgatatttatcgccatcgttatttgtattgccgctttagcggctgtgctggtcacgaggaaagacctctgtgaggttcgcatccgaagcggccaaacggaggttgctgttttcatggattacgaacccaggtaa

SEQ ID NO: 5985 - DNA, 720 bp, Photorhabdus luminescens
atggacataatcagcgacttcttaacaactcaaagcgcttctattgtcactcgttcaattggcgagtttcagttagatgctgttactgttgaaagccactcatctacactcagattgacggaaaaccctatcgagtccggggcgtccatagcagatcacgcggttcttgaaccgaaagagattacagtaacgggcgtcatggttggctatgaaccgccgcggctagtcagtgacctcatgggctttgactcatcagcaatagatagctttccattgccgatggaaattagagctatgacaaaacagagtgaagccctggtaagtcgctatatctctactgtagatgctgttgttgaatcaacaagccgctctatggctccgttcctaccagattatcagggattagctgatgattcatcacagacgcttgatcgtgttggtaaagcatataacgacttgctcaacttacagaaaaaaggtgaaacaatcacagttcagacgggtatcaagctctatgagaacatgatgattgtcagcattggggttacacaaacgagtgatggttcagcagaattttctcttacgttgcgtgagatattcattgttgaaactcagaaagcaaaagggctgaatgtgaaaaagtcgcctaaaaaaaagcagatgggcaagactcagccgaaagaaacatcaaaatctgctcttaaggggatattttcatga

SEQ ID NO: 5986 - DNA, 339 bp, Photorhabdus luminescens
atgatgtacgaaatcccagtatcaaccgaagaaatacaagagcaatcattcagtctatttaatatgaatcttagatttactttgcatttcaatcgtatatctaacgactggcagtttgatttgctcaatacaaacacagatcagtacattgctcagatgtatggacttacagtcaatagcccggcattgataacgaagaacttaccgtttgtgatcgtgatgagtgatagttccggttttggcctgaattctattagacgttctgagttgggtaacagactgaaaatttattttgtcgataaagaggtatggcatgaggcaattcggacgacaaattaa

SEQ ID NO: 5987 - DNA, 846 bp, Photorhabdus luminescens
atgaggcaattcggacgacaaattaaattaactatcggcaacacaaaagaatcaatagaaatcactaatctcagagttactttcgaagtatccaagacaatcacaagcgaacccaacccggccacaattcgggtctataacctcaatcaatcacatcgaaatctgattaccagtaaaacctataataaggcatcactagctgttggttatgatgagcttagagtgatttataccggtgatattatcgaagcaattacggttcatgatgatctggatttcattattgagctgacatgcggggatggctacgaggcttacacaggcgcacttgtgaacaaaacgctaaaagctggggcaactgatgctgatattctgtcagttgccacaaagtcaatgaaagttgataaaggtgtggttgatttaccaaaagatcggcagttaccgcgcggcaaggtactaactggcaatgcacgcgacatcatgcacaagatagcccgtaacaacggtgccaattggtccgtgcaagacggcaacatgattgtgttaccaaagaacaaagtattgactgacaacgagggcttcgttttatctcaggaaactgggatgatcggcagtcctgagaaaacggatgatggcctacaaatcacttgcctttgcaatcctgcattgcgtatcggcagcctggttcggattaagtcaattattcctgagtataacggtgactataaaatcactgaattagagcatgcgggcgattttatgtctgacgattggcatacgctgataacgtgcaccggtggaaaatatcagaaggtgaataatgaacaaaaatccaactctacttga

SEQ ID NO: 5988 - DNA, 672 bp, Photorhabdus luminescens
atgaacaaaaatccaactctacttgatgtactcgataaaaaagcagaaaacgagcgtttggatattcacacagcattacccgcccgcgttgtttcattcaacggccacacagcaacaatcgaactcatgatcactcagacactaagtaacggtgaagttattgaactaccgcctttagcagatgttcccgttcaatttatgcgcgctggtggattttgttttacagttccggtgaaagcgggtgatgaagggctagctatcttctcagagcggtgtattgatggctggtatgcaacgggcaataaatccgctccccttgatgcacggcttcatgactattccgatgcattttttatccccggagtttgcagccagccgaagaaaatacctgatttctttcctggtggcgcgtctatgcagactgacgacggttcaacatttattcgcatgactaatggaaagatcactatcaagggagatattgaacacctgggtaatagcaaacaaacaggaaatcacgagcagtccggcaattggaaccagatcagtggtaacagcgaatctaatgggactgtcagcgctgcaaaagttgtcggcgggggcattgacctgcaaacccacgtacacggcggtgtgcaatcaggtggaagcaatacggggaaaccacaatga

SEQ ID NO: 5989 - DNA, 363 bp, Photorhabdus luminescens
atgagggtgagacgcttagacaataatcatgactggacgttcggagataaccgcagtgattacgctacaaaatcagatgccattgctcagtgtgtgcaaacccggctcatgtctcttcgtaacgactggtttcttaatcccgatcatggagtgagatggtttgactatttgcggaaaaatccaaatttgatgcaaatggaatcagaattgaaaactacagttctgaagaccgatggggtgatagaaattaccgattttgacattcaaattgatagagatagccgaaaatcactggtaactgtcacttatattgatatttacggcaatagaaatgaggtcaatgcagatgctcaaaattactaa

SEQ ID NO: 5990 - DNA, 1134 bp, Photorhabdus luminescens
atgctcaaaattactaagacaggaatagttattgaccaacttgcagatattcaccagcgccttgcagatggatttaagcgtatctacggcgaagatattaacttagaggctgatacaccggacggtcagatgatagggttgttttcgcaagaactagccaacattaaccaagtgattgcttttgtcgggcagatgctagatccctatcaatccactggcgcgtggttagaacaacgggcaatgtatgcgggaataatacgccgtggtgcagaatacagctatcttgatgatgtagtgataactggtaatgctggggtaaacgtaccgaaagacacagttttgactgatgataaccgtgttaagtgggtaatgcttgacgatgtcacacttaacgagcagggttctgtaagagtgaatctacgtagtaaagaacttggatcctttacacttcaacccgacaaacaattgcaaatggaaactgtcatagtcggtatagaaaaagttgttacgacaaaaccagcaaagcagggcactaatgaagaaacggacggtaatttgttacttcgttttatgcaatcacattcagtaaataactatgatgatagagcaggtattaaagcggccttattatctttacctgatgttcgacaagcagaagtttacgaaaactacacaggacaaacagatcctgttactggcgttcctgcgcactcaatgaatgctgttattatcggcggcaataataaagatattgcgctgatgttaattaagaaaaaaattggcgggtgtgcattctttggtaaacaaacatgtgaaattaacttcgctggagcgaacagaaaaattaattttgatagagctgaaatgattgatatcaatattgatgttgcgttagtcagaactagcgaatttcatgatattgatatagatggcattaagtcagcattggcagccactaaatttaacatcggcgaatcagtttatgccatgcgtctgacatgccaagttaattcaatagcgggtttctatatcaaatcaattacagtcaatggctctgacaaagcaaatattggccctcggcaatgcgcagtcataaaacacgaaaatgtgaatgtggaggtgttgattgaataa

SEQ ID NO: 5991 - DNA, 657 bp, Photorhabdus luminescens
ttgaataaaaaaccagaggattttttgatatggcagtacagaggaaaacccaaggcccggcaaacagtcgggcttttgctttctgagagcgcgatagttttcaaatcagcagttaagctgactgaaatactcgatattaataaatcagaaaactatggattagatttgatagggcgacacgttggcattagtcgaacaatgaaatcatttgtcccaaaagattacttcggctttctgggaatagatagcgcacttggttttaataccggtgttttctatagatacggggactctctgaatgattcaacaaatcttgatgacaaagattatcaattttttattaaagccaaagttatcaaaaactaccaacgcccgacaattggaaatataacattatcgatttcttacttgttgggagatcaagcgttcattatcgataattacgatatgacaatgaatattgttattccttcaagttatttaacccctttcaggctgcatgcgataaaaaaattggacatattatctcgtccaattggcgtgcaatataaatacatagtaatcactgatagccacccgtttggatgggctaatgatccccacgcgtccggtttcggtgatggaaaattcacgaggattgtagatgtcaatagttaa

SEQ ID NO: 5992 - DNA, 1323 bp, Photorhabdus luminescens
atgtcaatagttaacaaaccagactataaagtctttgctcaagatgccaaatccggcgagattgaaacgttccccgatgtgcttcgcggctggggtgtaacactagatagaactgcgggcaagccacctcttgagtggtttaatgcaatcggtaagcgcgttgatgagtggttaatgtacttatcacaacgcgggttagcagagtgggattcaactgtagactatccgcaatatgccgcagtccagcattcagggaagttttatgtagcactcaaacaaaacataagccaacaacctgacagatcacaaaataattggcagtcaatggctgattttctaggcgctccaaaattggtcctagatgctttaaacacaaagcaagacaaaggtgactacgctacaaacgctcagttgaataccgtgtcttcagaactgaataaatcaatcaatgcagccaacactagcgccacaaatgccaacaacaacgccaacactcgcctgtcaaaatcccaaaacggggccgacatccctaataaaagtgagtttataaaaaacctcggtttagtggaaacggtgaataaggcgaataatgcggtgtcgtcaatcagcggcggtacaatcaaagcgggactaaatgtgcaaagcgtgctgagcgtcggaataagtcaaaataaaaatttgcgtatttcatctaatgaaaccgctgatagtcagattaatctaattgtgtggggaaattcaaacagaaaaactattttcgaatgcggagataaaaatgggtgtttattttattcacatcgattgtcatctaataatgttgagcttttttcgactggaaaaattattccatctgattacagcaactttgatgcacgttatgacaacgttcccgccggtgttccaatgccatatccccaccgctacacgccgcccggctatcttacatgcaacggtcagacattcgacaaatctctatatccaaagctagcggaagcttatcctgccggtagagtgcccgatttaaggggagagtttatccgtggttgggatgatagccgtggtgtcgatccgggtcgggtgtgtggaacgtggcaagctgactgcattccagatcacaatcactacaaagtagcttcaaaacaattagttgaagaccttgtattgaccggggatgccggatggtatacatcatccggcagtagcacgcgcacacgttcacttgatcaaaatacatatacgggcggcgttactgaagctcaagtaatagcaaacgaaacccgtccccgcaacatagcattcaattacatagtgagagcagtataa

SEQ ID NO: 5993 - DNA, 627 bp, Photorhabdus luminescens
atggcagaacaaaagtattctttagaacatgaaaccgctgtattgggtaaagatggtttggcaattcaggcaggctggataaaggtttttcactcgaatcagataacgagagaattcattgcttcagatatcgagtatgtgatgcttggagttagtttatcagccggtgcttatcctgatgccccggaactgccgaaaactaatgatgtggccgtttgcagaagtgttgataaaagccgctgggaaatcctcccagactaccgtggcaaaatagcttacgacacgttaacgcgagaaccgactgaagtaacagaaatcggtgagctgcctgacacgctcacattcaagaagcccccaactgatttcgacacatggaacggtaaagactgggtagtcgataaagacttactcaagtcccatcaaatcaacgaagcaaagcaacagcaagcagcactgttacaacaagcaaatgaaacaatctctttgctacaagactctgttgacttagaagtcgctacagactcagagaaagaagctctactcgaatggagaaaatacagagtattgctgactcgtgtagatgtgaaccaagcgccgagtgtggagtggccggaagtgccgaagtga

SEQ ID NO: 5994 - DNA, 1740 bp, Photorhabdus luminescens
atggtgactagccgtcagcgttatcgtgaaaaagtttcccaaatgattagctgggggcattggtttgccctatttaatattctgcttagtcttggattaggtagccgttacctgtttgtttctgactggccgagctcactgttcggccgagtctatgctttgtccagttggcttgggcactttagttttattgtttttgccgcttatttgctggttctgtttccactgacatttattgccatgtcgcagcgcctactcaggtttctttcagccattttcgccacagccgggctgacgctgttaatattcgatattgccatatacaaccgtttccaccttcaccttacacctttagtttgggatttagtcatcaatcctgatcaaggggaactggcgcgagaatggcaactcatgttcatctgtattccagtcatttttctgatacagatgttatttggtacctggagttggcagaaactacgcagcctgaatcggcaacggtttggtaagccgctggctgctgtccttatttcggcttttttagcttcccatttgatgtatatctgggctgatgctaatttttatcgcccgattaccatgcaacgttctaacctgccgctctcctatccaatgacagcacgtaaatttcttgaaaaacatggtctgctcgatcaacaagaatatcagcgccgacttatgcaacaaggtgatcctgcggcactaacagtggaatatccacttaatgatctgacctatcaggacaaaggaaacggatacaacctgttaatactagtcgttgataaactggataatagagatattaccgagaatatgcctgcgctctctcatttcagagaaaccaatattcagttcaatcagcatttcagcactggcattcaaaatgataccgccctattcgggctattttatggtatttcttctggttatctggatggaatattggctggacgtaaatcatcagccttgattaatgctctgacccatcagggatatcaatttggcctattctcttctgtagggtttggtactccgctttatcgtcatgcattactttccgactactcactgcccactgaagtcaaccaaagcaaccaactcacggtagaacaatggcagcaatggctaaatttacccaatactaacgctccgtggttctccttcttgaggctaagtggcttagataaagcagattcagtaggtaatgctgcggctctggatggtccgattaataccgtactagagacactaaaaaacaaaaatgcattgaacaatactgtcattgtcattaccgctgaacatagtgaaaccgccacgacacatccccctagatggataaacaatggcaaatttaatcgtgctcagatgcatgttccgctgctaattcattggccaggaacaccatcacagacaattagtaaactaacaagtcatcaggacgtcatgacaacattaatgcaacgtttgttgcacgtcagcaatactcctgctgattattctcaaggccaagatctattcgcggcacaacgtgataatccgtgggtgattaccggtgatgatggttccctgatcattacaaccagcgaaaataccctgttcttggataaaaatggcaactaccacctatatgacctggaaggcaacgaaatcaaagatgctaaacccaatctagcacaactgttacagatactaaccgaggttaaacattttatagccaactaa

SEQ ID NO: 5995 - DNA, 228 bp, Photorhabdus luminescens
atgccacagtcatctcgttacagtgacgaacacgttgaacgtttattaacagaactcgtcagtgttctggaaagaaaccgtaccccgacagacctttctctaatggtactgggcaatatggtgacaaatttaatcaatacgagtatatcgcctgcacagcgcagacatattgctgactcgtttgcacacgcgcttaaatcttcggtaaacgaagataaagcccattaa

SEQ ID NO: 5996 - DNA, 1005 bp, Photorhabdus luminescens
atgagtctgcaaatagaccagattgccttgcatcaattaatcaagcgtgatgaacagacattagatgtcgtgttgcgtgattctttgctcgccaccgatcaagtggtggaagatatgatggctgaattacaccgagtatacagcgcaaaaagtaaagcttacggcttatttaatgaagagagtgaattggcagaagcactcagacatcagcgtaaaggtgatgaagattttcttgggttcagtcgggcagcaacggcacgtctgagggatgaactggcgaaatatccgtttgctgagggagggacggtcctgttttgtcagtatcgctatctggcggtagagtatttattgattgctgtgcttaatagctgtaacagtatgtctgttaacgataatctggatttaaatactacgcattatctggatattcctcatgcagatattgttgctcgtatagatttgacggagtgggaaactaatcctgaatcaagccgttatttaacattcctgaaagggcgagtagggcgtaaagtttcagatttctttatggattttctcgctgctagtgaaggtatgaatgctaaagttcagaataaaggcttgctacaagccgttgatgattattgtgaatctggtgagcttaataaggatgagcgtcaagcgtatcgccagcaagtatataactattgtaatgaacaattgcaggcaggagaggaaattgaaattaaggcgttgtctcaggcattacctacatttggagagcagaattttcagcagttttctcaagagcaggaatatgaactggaagagagtttcccggcggatcgcagtacgttgcgtcaactgactaaatttgccggcagtggcggcggattaacaatcaattttgatgcgatgttatttggtgaaagaattttctgggatccggcaacggatactttaaccattaaaggcacgcccccaaatttacgtgaccagttacagcgccgtagcagtggtcattga

SEQ ID NO: 5997 - DNA, 285 bp, Photorhabdus luminescens
atgtttactattaatgcagaagtacgtaaagagcagggcaaaggtgcgagccgccgcctgcgtagagctaacaagtttccagctatcgtatacggtggcaaccaagagctagtttctattgaactggatcacgatcaggttatcaacatggaacaaaaagctgaattttatagcgatgttctgaccctggttatcgacggtaaagagactaaagttaaagtgcaggctgtacagcgccatccgtttaaaccaaaactggcacacattgacttcctgcgtgcttaa

SEQ ID NO: 5998 - DNA, 1758 bp, Photorhabdus luminescens
atgacttttactttacgtccctatcagcaagaagccgtggatgccaccgttaatcatttccggcaccatcatgaacccgcagtcattgtattaccaactggagcaggtaaaagcctagttattgctgaactggcaaaattagctcgtgggaaagtattagtattggctcatgtaaaagaattagttgcacagaattacagcaaatactgcgcatacggtttaccagcagatattttttccgcaggattgcagcaaaaacaaagtgcaggaaaagtcgtgtttggtagcgtgcaatctgtcgcccgtaatcttgaacattttgataatcaattctctttgctgataattgatgaatgccaccgtatcagtgatgatgaaaacagccagtaccagcaaattattcatcaccttcggcaaaataacccacaactacgtattcttggcttaacagcaacaccttacagactggctatcggctggatatatcactatcactatcacggcatgacccgtggtgatgaaagctgttttttccgtgattgcatctatgaattgcccctgcgttatatgattaaacacggtttcctgatcccgccaaaacggctagatatgcccgttatgcaatatgatttcagccaagttcgctccagtcagcaaagcatcttcaatgacactgatttaaaccacgaaatcaaacgacaaaaacgcatcacacctcacattatcagacaaatcattgaatattccgctgaccgcaaaggggttatgctttttgctgcaactgtcgaacatgccaaagagatttttcaattactccctcccggccaagccgcattagtcagtgctgatacatcaactgcggatcgtgatcggtttatcgaagcctttaaaactcagcgattgcgctatatggttaacgtcgccgtattgacaactggatttgatgccccccatgttgatctgatagccattctgcgtcctactgaatccgttagtttatatcagcaaattatcggtcgtggtttacgattatttcccggcaaaaaagattgcctgattctcgattatgcaggaaatcctcacgatctctacacaccagaagttggcagcaataaaccggataaacagagccaaccggttcaagtattctgccctatctgtaacttcgctaatatattttggggaaaatgcacctccgacggtgaaattattgagcactttggccgccgctgtcagggttgggaaaacgatcaatatggcaaacgccgtcaatgtgagttccgctttcgttttaaactctgccctcattgcaatgcagaaaatgatattgcagcgcggcgttgccacagttgccaagaggtgctggtcgatcccgacgatatgttgaaagccgcattgaagctcaaagatgcactggtactgcgttgtggtggcatgcaactcatccctgaaactgacagtaaaggcgaatggctgaaaattatctattacgatgaagatggcgctgatgtttcggaacgctttcggcttacaacaccggcccagcggctagcctttgagcaccaatttcttcgtcagcatcaacgtgcctcagcgataccttttaactggaaaaccgcctcagatatcgttcaccagcaacctttattacgccatccagattttgttgtcgcccgtaaaaaaggtcgattctggcagattcgtgaaaaaatctttgattaccaaggacgtttccgacgagcagacgaattgtactaa

SEQ ID NO: 5999 - DNA, 702 bp, Photorhabdus luminescens
atgcgattggataaatttttgtcacaacagcttggtatcagccggaatgacgtagggcgcgagttgcgtgcgggacgcatcactgttgatgatgagattgtaaaaaccggagcttataaattaactccagagcaacaggtcatgtttgatggttcattattggaacagcaacaagggcctcgttattttatgctaaataaaccacaggggtatgtttgttccaccgatgatccgataaatccaacggtgctctattttattgatgagccggcagcgcataaattgcatacggcgggtaggttggatatggataccactggtctggttttgctaaccgatgatggtcaatggtctcatcgtattacttccccaaaacatcattgtaaaaaaacctatctagtcacacttgaatgtccagttgcagcagagacggcagataaatttcttgcaggtgtgcaacttaatggtgaaaaaacagtgacaaaacccgcccagctagaaattctggagccgcaaatagcccgtctgacgattagtgaagggcgttaccatcaggtaaaacgcatgtttgcagcggtaggtaatcgggtaaccgcgcttcatcgtgagcgaatcggtgaaatcatcttagctcctgaattggagccaggcgagtaccgatcattaaccgagcaagaaattgccagtgtcacttttctttaa

SEQ ID NO: 6000 - DNA, 1185 bp, Photorhabdus luminescens
gtgcaacaacaacgatcatcctatttgggactgattctaatccttgggctactttctatgttaatgccccttgccattgatatgtatttgccgagtttgccgactgttgccgaggatttcggtgtagatagcggacaggttcagatgacgctgagcagttatattctcggttttgctatcggtcagatggtatatggcccaatggctgacagtttggggcgtaagccggttattctaggtggggttactgtatttgccttggcttcagctgcgtgtgcaatggttcagaatatcgatgattttatttatatgcgctttttgcatggattctccgccgccgcagcgggtgttgtcattaatgcgctaatgcgagatctgttcaccaaagatgaattctcgcgtagcatgtcttttgtgatattggtaatgaccattgccccattaattgctccaattcttggtggcatgataatgatttggttcacatggcatgcgattttctggagtattgcggtgacgtctgttattactgtattccttgtcgctttctttataagagaaactttaccaaaagaaaaaagacaaaaatttcatcttcgtacaaccgtaagccagtttattatgttatttcgccagcgtcgtgtattttgctacatgcttgccagcggtttttcatttgcgggaatgttctcttttctcagtgcagggccatttgtttatattgagttaaatggtgtttcgcctcagcactttggttattactttgcgcttaacatcgtatttctgtttgtgatgacgacaatcaatagtcgctatgtccggcgctttggtgcgttgaagatgatgtattttggtttgagtgtgcagtttatgatggggatctggttgttactgtctaccgccctcgattttggctttactgctctggtcatcggtgttgcagcttatgtatgtggtatcgcaatgattacatccaatgttatggccgtggttttagatgattatccacatatggccggaacggtgtcttcattggcaggtaccgttcgttttggtattagtgctttggttggtatattacttgccatgttacctgcacgtaatgcctggccaatggttggttctatggttttatctgttattttggctgtattgcttattatatacgcaaaaaagaggcgataa

SEQ ID NO: 6001 - DNA, 345 bp, Photorhabdus luminescens
gtgaataatattcagctttcggtagtacatcggctgccgcaaagttacaagtggtcacccggttttgtgggtatcaaagttgagccgcttccggttgatgaagtgaatgcagaaagcagcctgatggggttgaagttactcagccacgaagacggggctgcgtggaatgttatgcaaaaattacagcaatcgcttgctgatatgcaaattggaagcactgtgattgagttggaaggtcaaccgtgcttatttattaatagtgaagatgaaagtgcggttatgtgtcgtttgaagacacttggcgctgccattgctgaaaagataactgcgctttatccattttga

SEQ ID NO: 6002 - DNA, 591 bp, Photorhabdus luminescens
atggtcaagtctcaaccggcactgagatacattacgcggctgatacccgcgctgttcgtagcgatcaccttatccgcgtgcagctcaccagattcatcaaggtttcgtaacacacaaactgatacgcatgcagtaaacggtaagaacggcttcttacttcaagcgtctcaggatgaattcgaagcactcgttcgcaatctggacataaaatctaaaattcttagccaatacaatggctggaaaggggttgcctatcgactcggtggcgttactaaacgcggtatagattgttctggctttgttcaacgtactttccgtgaccagtttggtatggaactgccgcgttcaacatttgaacaacagaatattggcaaaaaaattgaccgttcaagattacgccctggcgatttagttttatttaagacaggtgcccgtaccaggcatattggcatctatgttggcaatgaccaatttgttcacgcctctactagcaatggtgtaatcgtttccagattaagcagcacatactggagcaaacgttattatagcggtcgccgagtcatcagtaatagcattgtgcctaatggctaa

SEQ ID NO: 6003 - DNA, 705 bp, Photorhabdus luminescens
atgacacgcagtcacccatttgccatatttatactgaacctgttagggatcactttatttctctcctggtatttaccagagcatcatggtttctggctcaagatcgactctgcaatcttctacttctttaatgagaaattaacatcaggctcaacattcacagaatttgtagcatttgtgaatatcagggccttcgatgtcatttcacttttatgtatgggattgctgtattacaacgcttttcgtaaacagaattacgatggcaaacgcagattattcatgattggtttggtcatgataataagcgcagttatacttaaccaaatcggtcacctactccctgttgtccgtccaagcccaacattaaccttcgatcatatcaatcgtattagcgaaatgaccaatctggtaacaaaagatgcatcaagcgatagctttccaggtgatcacggattaatgctcctgattttcagctgctttattcttcgatatatttcaggcagagcattctgtattgcattactcattatggtaatatttgcgttacctcgcataatggcaggcgctcactggtttactgatattgcagtcggttctttatctctgatactcatcggaacaagttggctactattaacaccattaagtgacataatgattaactggctggataagaatctgccgcaaattggtcgcccaatttaa

SEQ ID NO: 6004 - DNA, 312 bp, Photorhabdus luminescens
atgtttcgggttataatgggttgtttttttctgatgatttctggtcttgtcaatagtgagccagaaacagcatcaaatacaggggttattcgcttttctggtgcgatcgttgaatcaccgtgtcgttttgattggcgtgataactgggctgacaccacgtgttggcgaaaaggacataagattatccaacgacgaaagctcgatttgcaaaatgatatttatttttatttaccacaccaaatcggtgtaaccgagattaaatggataaaaggaaaagagaaaattggcgttgttacaattttctataattga

SEQ ID NO: 6005 - DNA, 573 bp, Photorhabdus luminescens
atggctaaagccaacgaaattaaacgcggtagcgccgtcagttataatggtaagttactgctggttaaagatattgatattcaagcaccaagcgcccggggagctagcacattatataaaatgcgctttactgatatccgcaccggtcagaaagtggaagaacgcttcaaaggcgatgatatccttgatacgatcagcctaactcgtcgtagcgttaacttttcctacattgatggtgatgaatatgttttcatggatgatgaagatttcacaccttatcactttaaaaaggaacaaatcgaagaagagttattatttattcctgaaggtggcctgcctggtatgcaagttctgacaatagagggacaagtcattgcccttgaactaccacaaacagtcgatatggttattgaagaaacagcccctggaattaaaggcgcttcagccagtgcacgaacaaaaccggccaaaatgagcaccggactcaccgtgcaagtacctgaatatatcagtagcggggaaagaatccgtattcatattgcagaacgccgctatatgggacgttgcgattaa

SEQ ID NO: 6006 - DNA, 1260 bp, Photorhabdus luminescens
atgtccactgagacaccccagagtttaaagcgccctcccatactgggtggtgcaatgatcattgccggaactgctgtcggtgcaggaatgttctctactcctgtggcaacttccggtgtctggtttactggctcaattattctgctggtttacacatgggtgtgtatgtatttctccggcttgatgatactagaaaccaacctgaactacccatcaggtgcaagcttccataccatgactaaagatttactcggtaaaggatggaatgcaatcaatggtatctctattgcattcgtgctttatatattaacctacgcctatatttcagcgggtggctcaattattgcccacaattttaaaaatattatttcgatatcacaggcaaatgctggctttattttcgcttttatcgttgcatttattgtctggttatcgactcaagctgtcgatcgtttgagcacaattttgatcggcggtatggttattactttttttatgtccgttggcggcatgtttaccgaagttaaatatgtcattttgtttaatcagacggatactacatcaaacgacacggcaacaagttatatatcttacgctttaaccgctctaccctatttactcgtttcattcggatatcacggtaacatcccaagtttagtaaaatattatcataaagatagaaaagccgttattcgcagcctgttattaggtacattaatcgcattaactatttatatcctatggcaatatgtcattcagggaaatattccccgcgaagcattcaaacagattattgctgatggcgggaatatcggtgatttattaaaacacatggataatacaacaaacagcaaaaccgttcaccagcttctaaatgccttctcttatatggcattagcaagttcatttcttggtgtctctttagggctatttgattacatagccgatttcttcggttttaaagataacaacaccggccggttaacatctgcattagtgacatttattccgccaacagcgctagctttactgttccccaatggttttctatatgccattggctttgctggattcgctgcaaccatctgggctgtcattattccagcactgatggctagggcaagtcgccagcgcttccctgaagccagttaccgagcaccaggagggaaattcctcattgggttcgtcattctgtttggtttgataaatgctatagcccatattttgtcctctcttgatttattacctgtgtatcattga

SEQ ID NO: 6007 - DNA, 420 bp, Photorhabdus luminescens
atgtctgtcattgtgggtgttggtgtggttattgtgaacgaatgtggtcaagtattactcggaaaacgtagcagtaaacatgctccatactggtcaatctttggtggtcatgttgatgccggagaaacttttgagcaatgtgcaatccgtgaaattgcagaagaaacgggtctgacgattcaatcaccaaaggtctacggtatttgtaataatcttcaaacttaccaacaggaaggaaaacatactatttcagtatgtttactggcaaaacatccaggtggtgaaccaaaattgatggaaccagaaaaatgtgaacaatttatgtggtgcgatcccaataatcttcctgaacctcattttgaagctagccggaatgcaataaaaatgtggcaagaaaataaattttatcttactgaatga

SEQ ID NO: 6008 - DNA, 939 bp, Photorhabdus luminescens
atgagccgtagagttgccactatcaccctaaaccctgcttatgatttggtaggattgtgcccggaaatcgtcaagggagcgatcaaccgagtgcaagccgctggactgcatgctgctggtaaaggcaataatgttgctaaagttttgcgtgacttaggtattgatgtcacggtgagtggttttttgggtaaggaaaatcaggaaggatttcaacagttcttcaatgaaaatggtatggtaaatcgttttcatttagtaccaggcagaacacggattaatgtcaaattgacagaagaaagcggagaagtgacagactttaacttcactggtttttatgtcggtgaagctgaatggtcgggatttgttaatgattcgctttcatggcttggacagtttgatatggttgttgttagtggtagcttaccggctggtgtctctgctgaatcgtttactgactggatgacctgtctacgtcagctttgtccttgcattatttttgatagcagccgtgaagcattggttgcagggttaaaagcatccccttggttagtgaagccgaatcgccatgagcttgaagtatgggcgggacgtctgttacctgagttgtccgatatcatcatagcagcacatcaacttagggatcagggaattgctcatgttgtcatatccttgggtgagcagggggcattatgggttaatgcgtctggagcatggttggcgaaaccaccacattgtaaagtcgtcagcactgttggggctggtgattcaatggttgggggcttggtttatggtttgctgatgcgggaatccagtgaacatacgttgcgattggcgaccgctgtatctgcacttgccgttagccagcctaatgtgggtatcagcaatcgtcctgaattagctgccatgatggccaaagttgaactgatacccgttagataa

SEQ ID NO: 6009 - DNA, 843 bp, Photorhabdus luminescens
atgaaatttgttggagcacatgtcagcgcggctggcggagttgatcaagcggttatccgggcgcacgaactaaaagctaccgcctttgccctatttacaaaaaatcagcgccagtggcatgctccacatttagccgctgacgttatcgataaatttaaagaaaactgtgaacgttatggatatggtagccgacaaattctccctcacgatagttatctgattaatctcggccatccagaaagtgaagctctggaaaaatcccgactggcttttattgatgagatgcaacgttgcgaacaattagggatcgatttattgaacttccatcctggcagccatctcaataaagtagatgtggataaatgcctggcgcgtattgcggaatctatcaatattgctctcaataaaacccagagagtcactgctgttatcgaaaatacggcaggccaaggcactaatctgggttttaaatttgaacatctggcagcaattattgatggagttgaagataaaaaccgagtgggtgtctgtattgatacctgccacgcctttgctgctggctacgatttacgtacaaacgatgtttgtgaacaaacttttcaacagtttgaaaaaattgttggctttcaatatttatgcggaatgcatttaaatgatgccaaaagtgaattcgccagccgtgttgaccgacatcatagccttggagaaggaaatattggtaaaacacctttcagttatattatgaaagatgctcgttttgatggtattccactcatccttgaaacaataaacccagatatttggccgcaagaaattgcctggctgaaattacaacaaaattaa

SEQ ID NO: 6010 - DNA, 1083 bp, Photorhabdus luminescens
atgtctgacattcatgccaaaaaattcagcaaacaatcatccattcccggtatgaaattaatacctgggttaatattagcggcaatacttactgcaatttcaatctatgccggaaatattccgtggtttattaatatgggactgggtacattaacactggcgatccttgcagggatcattgtcggtaatactgtctatcctttactcaaaccttattgtgatgagggtattcatttctcaaaacattatcttctgcgggcaggtattattctttatggcttccgtttgacatttcaacaaattgccgatgttggcattaccggccttctgattgatgctgctatgttgtcttccactttctttattgcaatttggctaggcaaatcactctttggattagaccagcaaacagtaatactgattggtgccggcagcagtatctgcggtgcagcagctattatggcaacagagccagtagtgaatgcccctgccagtaaagttgctgttgcggtctcgacaattgtcatctttggcactatcgctattttcatttatccgtggttttatcaactcaatgagcattatcagtggttaccacttactcaggaaactttcggcatctttactggctccacccttcacgaagttgctcaagttgttgctgttgggcatgctattagcgatcaaacggaaaacgtagccgttatcagtaaaatgatcagggttatgatgttagcaccattcctgttgttattatcccgttatattaaccatgccgacactaaaaatggcagaaaccatcaggagaaaacaccaataactatcccctggtttgcagtgatttttattgcaatagcgggttttaattctttcaatttacttcctgctgcaatagttaattctctgattaatattgatactattatgcttactatggcaatgggggcactgggtttaactactcatgtgagcgccatccgtcaggccggatttaaacccattttattagctctcattttgtttgtatggctgatggcgggcggtcttttaataaatcttggcattcaacatctgtttggctga

SEQ ID NO: 6011 - DNA, 864 bp, Photorhabdus luminescens
atgcacatcacattgaggcagttggaagtttttactgaggtattgaaaagcggttcaacgacgcaagcctctcagcaattggcgctatctcagtccgcggtgagtgcctcattaacggatctggaaagccaacttggcgtacagctttttgatcgagtaggaaagcggttggtgacgaatgaacatggccgcctactctatcccaaggcgttggcattgctagagcaagccggggaaattcagcagttattcaaacaggagttaggagcgttacgtatcgctgccagtagcaccattggtaattatatgttgccggaaatgctggcaaattatcgtcaggattttcctgatacgccgctagagttaaatatcagcaatacgcaggatgtcatcaattctgtgctggaattccgtgttgatcttggtttgatagaaggttcctgccatagccctgagttgataactcagctatggatggaggatgagttggttattttttcttctcctgaaaatccgctagctgaacaggatctaaaattggatgatttagttaaggcatcatggatattaagggagaggggatcgggtacaagagaagtgctggatcatctgttgtttgtccatttacccgggttcaagattttgatggaattgggaaattctgaagcgataaaacatgcggtcaaatttggtatgggtatcagttgcttgtccagacgagtcgttgcagagcaattgcaaaatcgtactttactggagttaaaagtgccagaattaagacttttcagaacattgtacctgattcatcatcggcaaaagcatatgtctatcgcactgcaaaaattgcttagttactgccggtaa

SEQ ID NO: 6012 - DNA, 1482 bp, Photorhabdus luminescens
atgtctcaacaacaaaaaagtgtttcccggaaacccgcaacgcaacatttgcgacgtgaattgaaagctcggcatctagcgatgattgccattggcggatcaataggcaccgggttattcgtggcttcaggtgcgacagtttcacaagcagggcctggcggagcattactttcctatgcattaattggcttgatggtttatttcctgatgaccagtttgggtgaactggccgcttatatgccggtttccggttctttctcaacttatggttccaaatatgttgaagaagggtttggttttgccttgggttggaactattggtacaactgggcggtgactatcgcggtggatttggttgcagcccaattggttatgggttattggctgccggatatgccgggttggatctggagtgcgttattcctcgcgttgattttcctactgaattttatttcagtgaaaggatttggtgaagctgaatactggttctccttgattaaagtcagcacggttattgtttttattgtggtcggattactgatgatagccggcatcatgaaaggggcagaaggtgctggatggcataactggactgttggtgatgcaccttttgccggtggtttctctgccatgattggcgtggcaatgatagttgggttttcttttcagggaactgagctaattggcattgcggcgggtgagtcaaaagatccggcaaaaaatgttcccagtgctgtacgtaaggtattctggcgtattctgctattctatatttttgcgatcctgattatcagcctgattattccttatactgatccaagcctactgcgtaatgaggtcggtgatatcagtgttagtccgtttacgttggtatttgaaaacgctggtttgttatccgccgcagctatgatgaatgcggttattttgacggctgtgttgtctgcgggtaattcaggtatgtatgcatcgactcgtatgttgttcacattggcaaaagagggtaaagcaccgaggatttttggcaaattatccaaaggtggtgtaccgcgtaatgccttgtatgcaacaacggtggttgctgcgttgtgtttcctcagttcaatgtacggtaaccagaccgtctatctgtggttgttgaatacttctgggatgaccggttttattgcctggttggggattgctattagtcattatcgtttccgccgtggttatgtcgctcaggggttggatttaagtaaattaccttatcgttcaggatttttccccgttggcccaatttttgcgtttgttttgtgtctaaccatcacattaggacagaattatcaggcatttctacaagataaaattgactggtatggtgtcactgcaacttatgttggtattccactcttcctgttgatttggtttggttacaaattagctaggaaaactcactttatcaaatatagcgagatgaaatttcctgatatcgagaatcagtga

SEQ ID NO: 6013 - DNA, 1125 bp, Photorhabdus luminescens
atgtctcgatccatagcaaagagtatcagtgtcggcctgttagcgggttcggcagttatggcaagcttcgcatcatgggctgaaacggtcaccgatatcgttggtcgtactgttgaagttcctgagaatgtaaatcgtattttgttgggcgaaggccgtttgttccacgctatcgctttgcttgaaggcgataaaccactggcccgtattgcgggttggcaaggtgatttccgcaaactggacccacagtcttacgccgtctataaagctaaattccctgagattgacaaagttcctttgattggtaataccagcgctgagagtgtcagttctgaaaaagtattaactctcaacccggatatcgccatttttggcttgtctggtcatggccctggtaaagacagcgaactggtcgcccaacttgaaaaggctggtgttccggttgtatttgttgattttcgtactgagccgttaaagaatacgctgccgagcattcgtatgctaggtaaagtactaaatcgtgaaaaacaagcggcagaatatgccgatttttacgagaaaaatgtaaaactagtgactgagatcaccaataaaatcccggaagagaaaaaacccaccgtatttatcgatttgagagcgggtgcttttgaagactgctgtgcgactgccggtgatggcaatatgggtaactttatcgatttggctggcggtaaaaacattgctaaaggtgttctgccaggcgcacttggtaatatgaacctcgaaaaaattattgcagttgacccttatatttacattgctagtggggcaaaagcgccagacagtaatgaaccaggtgtaaaactgggtgcgcaatctacgtctgaattagcaaaagccagcctgaaacaaatgactgaacgtaaaggtattagcacgttgactgcggtcaaagagggcagagactatgcgatttggcataactactacaactctccctataatgtggtagcgactcaggtatttgctaaatggttctatcctgagaaatttacagatttagatccacagaagacactgaatgaattacacagtaaattcctggcagttgatccatcaggggtttattgggtcagtgaaaagtaa

SEQ ID NO: 6014 - DNA, 987 bp, Photorhabdus luminescens
atgatggttttcatcgtgctgattattggtgtttcactggtattagattttacgataggtccatcaggtttatctttgtcatctctctggcagactttagtgtcgccagagagtgtggatgcggggactcgggtaattgtttgggatatccgtttaccctatgccctgatggcggtagtgattggcctgtcccttgggctggctggcgcggaaatgcagacgatcttaaataacccattagccagtccctctactttaggggttgctcaagcggctgcatttggtgctgcgttggcgattgtatctggtattggtatcccaggcgtgcctgatcagtggttcatctctgcgaatgctttcattttcgctttgttggctgcattggtactggatacgatcactcgttggacacgcgttgctacgtctggggtcgtattatttggtattgcattggtctttacctttgaagcattggtttccatgatgcagtttatcgcaacggaagatacccttcaggggctggtactttggacaatggggagccttgccagagcaacctggataaaactgggtgtgatgttattggtgtttgcagccatttttcctatttcaatgatgaattcctggagactgacagcgctgcgtttgggtgaagatcgtgcaatcagttttggtattgatgttcgtcgtctgcgcttggggacattattgcgtatcagtattcttgccgctttagcagttgcatttgttgggccaattgcttttatcggtttaattgcgccacatattgcccggatgatgtttggtgaagatcatcgtttctatttaccagccagtgctctaattggtgcattggtgttgtctatggcgtccatcgcctcgaagaacctgatcccaggtgttgttattcctgttgggatcgttactgcgttagttggggttccattcttccttagcataattttacgtcatagggcgaatatatga

SEQ ID NO: 6015 - DNA, 801 bp, Photorhabdus luminescens
atgaatccgggattagccattaacaatttttttgcaggttatccgaaacattcggttattgaaaatctgaatattgctccgttgcctcgtgggaaaattacggtactgttggggccaaatgggagtggtaaatcaacacttttgcgttctttggcgggcttaaattgtgcaagaggtcagctttggcttgatggtcaagatttgatgaagatgagttttgtccagcgatcggaaaatgtggtttatttaccacagagcttacctgctggtgttcatttgcatgtactggagtcaattatcgttgctcaacgggcatctggagggcgtcattctgaaaccagtgaagaagaagtgatgttgctgttacgtcagttggggattgagcacttggcgttatgttatttagatcaattatctggcggtcaaaaacaattagtcggattagcacaatcattaattcgtaaaccaacattattattattagatgaaccacttagtgcgctggatttaaattatcaatatcacgtaatggcgttggtggcacaagaaacttatcggcggaatatgattactgtggtcgttgtgcatgatattaatatcgctttgcgtcatggtgaccatgtattaatgttgcaaaaagggcatttaattgccgagggaattcctgagcaggttattacgccagatagtctggcacaggtttatggtgtcaaaggcagaattgaacgttgttctcagggcattcctcaggtattagttgatgggttggtttcaaagctagcgagtgagaattcattttaa

SEQ ID NO: 6016 - DNA, 1980 bp, Photorhabdus luminescens
atgggtgtttttaataaaagaaaaatcgcgttaggtattattgctacaatctcatctggctcagtttttgcggctagtagcagtaatgacactattcttgttactacggcagcaggttttcaacagaagattgaagatgcgccagcgtctatttctgtggtgagccgtgagcaattggaaactaaggcttatcgtgatgtgactgatgcactgaaagatgtaccgggtgtcgttgttacaggtggtgctagcagcagtgatatcagtattcgcggtatggcggctcaatatacaatgattttggttgatggtaagcgtgttgatacccgaggtactcgcccaaaccgtgataattcggggattgaacaggggtggttgccgccattggccgcgatagaacgtatcgaggttgttcgtggtcctatgtcttctctttatggttctgatgcgatgggcggggtgattaacatcattacccgtaaggcacagaaagagtggaaaaccagcttccgcgctgatggcactttgcaggagcgttctaaatcaggtaatagtcatcagagtagtgtgtatacttcaggtccaattattgatggattattagggctgaaagtgagcggcctgtattctcaccgtaatgaagataaatttatcggtggttttaacaaacaggaaatgcgtaatggttcagccactttctctttcactccggatgagcagaatacttttgattttgaagcgggacgttatgagcaagatcgtgattctactgtagggaaaacaaagacaagtagttggcgatctccaggtaatagtgaaagtcgatataaaaggaataattactctatcacccataatggcgtttacgattttggaacgtcgacaacgtacttccagcgtgatgaatcacgtaaccctggtcgtgatatgaaatattacgataatctgttcaatactcataccgtatttatgttggatgatcattcattgagtataggtggtcagtatcgttatgaagatttacgcgatgaagggaatcaattagcttctgctaaaaatatcaataagctgaaccgttggagttgggcgttatttgctgaagatgaatggcaaatgaccaatgactttgctctgaccggtggtatccgcatggataaagacgaaaacttcggtgaccactggactccacgtttgtacggtgtatggcatgttgatgaacaatggacgattaaaggtggcgtttctacaggatatcgttcaccagaattacgtcaggcggcatctaattgggggcagattacgggtggcggtggtgatccagcgattatcgtcggtaatccagatttgaaaccggagaagagcttcaatcaggaaattggtgttatctggaacaatcgggataactttaatgtcggtttaacaatattcaacactgaatttaaagataaaattactgaattacgtcgttgtaccgatccaagtggtaaatctcagggcaaatgtgttattgatggcactgcttataaatttatcagtgaccgtgtgaacattgataaagccaatatgcgtggtgtagaagcgacgatgaactgggatattgttgataactgggtattggctgcaaactatacgtatactgattctgagcaaaagagcggtaacttcaaagggaagccgttgaataagatgcctaaacatatggcgaatgccaccttaaactggcaggcttcaccagaaatgcaagcttggacccgtgttaactaccgtggtaaaacgtcgaattatttatcacgtacctctatggggacgggaacaccgtcttatacctttgtggatatcggtgtcagctattatctggctgaaggtttacgcttggtagggggggtatataacgtctttgaaaaacaagtgactgaagacacccatgatatagtcttggatggccgtcgttataacattggtatcaattacgacttttga

SEQ ID NO: 6017 - DNA, 1383 bp, Photorhabdus luminescens
atgtctcataatactgtaatcactctaggcaccaaccagacgggtgctaacaatcgtgttcagctcagaaaaacactgaccttggttcaggtagtgatgatgggtctcgcttatctgcaacctatgactatctttgatactttcggcattgtttctggtttgactgacggccacgtagcgacatcctacgcgattgctttgatcgcaattctgtttaccgccgtgagctacggaaagttggtaaaacgtttcccatctgctggatctgcatatacttatgcgcaaaaatccattagtccgcatgttggctttatggtgggttggtcatcgctattggactatatgtttatgccgatgattaatatcttgttagcgaaaatttatcttcaggccatttttcctagcgtagatccgtggatcttcgttgtgggttttgcattactgatgacagcttttaacctgcgtggcattaacgttgttgctaatctcaacacggctattgtcattgttcaggtaaccgttatggttgtatttgtgggtttactgatccacggtgtgtacaacggagaaggagtaggaactttatggaatgcgaaaccattcgtttctgaagatgcccatttaatcccaatgattactggggcgacgattttgtgtttttcatttctagggtttgacggcattagttcgttgtccgaagagactccgaatgctggtaaggtgattccgaaagcgattttcctgacagtattaattggtggtgttatcttcattgcggtttcttatttcttgcagctctattttccggatatttctcggttcgagaacccggatgaatctcagccagaaattatgttgtatgtagcaggtactctgttccaatccattattttggtgttctcttgtgtcactgttttggcttctggtatggcggctcacgcgggggtttcccgtttgctctatgttatggggcgcgatggtgtatttcctgagaaaatatttggctatgttcatccaaaatggcggactccggtaatcaacgtatcgctggtaggcatcatcgggttatctgcgattacctttgatctggttactgcaacagctctgattaactttggtgcgttgatagcgttcacctttgtaaacttatcagtcatttctcaattctatatccgtgaacgtcgtaaccgtacattaaaagataccattaatttcttggtattacctgtgataggggcttgtactgttagcgtactatggatgaatctggagcaaagttctatggaattggggctaacttggggagcaattggtctggtttatatggtattcctgactcgtcgcttccgtcagccgatgcctcaatgctctgaaatggtttaa

SEQ ID NO: 6018 - DNA, 1716 bp, Photorhabdus luminescens
atgaatgatgcaaagacctctcaaaatcaacaactcattactaccctgaccaatattgtcggtaaatctcatatcctgactgctccccataaaactgaacgttatcgtaaaggctttcgctccggccagggagacgctttagccgttgtatttcccggctcgttggtggaacagtggcatgtgtttaaggtctgcgttgaagcagataaaattatcttaatgcaggcggccaacacgggtataaccgaaggttctaccccgaatggtaagggttacgatcgtgacatagttattattagtacgctgcgcatgaataaaattcagattttaaaacagtgtaatcaggtagttgcgttacctggcagtacattatggcaacttgaacgtgcgctcaagccgctgggacgtgaacctcattcagttatcggttcttcctgcattggcgcttccgtgattgggggcatctgtaataactcaggcggttctttagttcatcgtgggccggcttataccgaaatggcattgtatgggcgtgttaatgagtgtggtaagccagaattgattaatcatctgggtatctatttgggagaaacaccagaagagattctctcttgtctggaagaacagcgttacagtgatcaggatgtagaacagggtcagcgtaaagcatctgatcatgaatatacccaacgagtacgtgacgtcgatgctgatactccatctcgtttcaattctgacgagcgccgtttattcgaagcttcaggttgtgcaggtaagttggttgtgtttgctgtccggctcgatacttttccggcagagcctttgtctcaagtattttatattggtaccaaccaaacgggcgtattgacggaattgcgtcgccatatattagcaaattttcataatttaccaatggcgggtgaatatatgcaccgggatattttcgatattgcggaaatttatggtaaagatgctttcatcatgattgataagcttggcactgataagatgccgacttattttactttgaaagggagaatggacgctattttcaaccgagttccatttttacctgtcaatcttattgatcgcattatgcaggggttaagtcgtttacttccttcccacctgcctaagcgtttgaaagaatatcgtaatcgttttgagcaccatttgatattaaaaatgtcaggtgatggggtggaagaggctagaagctggttggaagactattttagccgggtggaaggggatttctttgcttgtacgccggaggaaggtgctaaagcgttcttgcatcgtttttccgctggtggttcagcgatccgttatcaagcggtgcatagcaacgaagtagggaatatcctgtcacttgatatcgctctgcgccgcaatgatcgtgaatggtttgaacaattacccccagagtttgatgatgtattggtacataaactttattgcggacattttatgtgctacgtgtttcatcaggattacattgtgaaaaaaggggtggacgtacaggcattgaaagcaagaatgatagagctgcttgataaacgaggagcggaatatcccgcagagcataatgtgggtcatctatatcaggctaaacctcaacttaaggctttttatcggatgtctgatcctactaatactctcaacccaggaattggaaaaacatccaagctgaaaaattggggcgaaggatcttaa

SEQ ID NO: 6019 - DNA, 1431 bp, Photorhabdus luminescens
gtgaaaaatagcagcgaacaacccactttctacatccacgactacgaaacttttggtcaacatccggccttagacagaccggctcaatttgctggtgttcgtactgatatggatttcaatattattgaagagccattagttatttactgttcacctgctgatgattatctgccacaaccagaagctgtcatgattacaggtattacacctcaaattgcattagaaaaaggggtcaatgaagcggaatttgcccgccagattcataatgcattcagtgtaccgaacagttgtatcctcggttataacaacattcggtttgatgatgaagtcagccggaatattttttaccgtaatttttatgatccatacgcttatagttggcaaaaaggtaattcccgttgggatttacttgatgtattacgtgcctgttatgccttgcgtcccgaaggtattatctggcccgagaatgaagagggtctgcccagctttaaactagaacatctgaccaaggcaaatggcgttgaacattcacatgctcacgatgctatgtccgatgtctacgccacaattgcaatggcaaaattactcaaagaagtacagccaaggatgttcaattatttctttcagttaagaaataagcagaaaattaacgctctcatcgatatcccccaaatgaaaccgctggttcatgtttccgggatgtttggtgctgctcgcagcaacctcagtttggttgcacctcttgcctggcatccagccaatcagaatgccgttattgtgtgcgatttagctggggatatttcaccattattggaactggatgcagatgcattgcgtgaacgtctatatacccgccatgatgaattgcaaccagatcaaccaccagtcccgataaaactggttcatattaataagtgcccgatagtcgcccccgataatactttgcgcacagaagacgctgaacgtatcggtttggatcgtgattattgtggaagaaatctagctattctgcaaaataatccacaaatcagagaaaaagttgtagagctatttgcagaggcagaacctttccctgaatccaataatgttgacactaagctgtatgatggcttttttagcagtgccgataaagcagcaatgaatattatccgtgagactctgcctcagaatttaccggcactcgatctgacttttcaagactcacggattaaaacgctgttattccgctatagagccagaaactaccctacgactctgacttatgatgaacaacaacactggttacgtcatcgtcaagaaatattcactcaggataaactcagtgaatatttctttataattgaacagctctttactgaatatcaaggcaacgaagaaaaatgtcgtcaacttaaagcactcatggaatatgcagtgcaactggctggataa

SEQ ID NO: 6020 - DNA, 282 bp, Photorhabdus luminescens
atgacacacgatgaaatggttgcaaaaatgttgtcaaatccggctgtaaaagctgaatacgagaaactggaacaagaatttgcattgcttgatgaactgctagctgcacgcaaaaaggccgggctaacacaagcgcaagtagctgaacgcatgggaaccaaagcaacagccatcacacggcttgaaagccggctagcttctggcacacaagggccttcgtataatacattgaagaaatatgcagcagctgtcggtaaaaaattacagatacgcctagtatga

SEQ ID NO: 6021 - DNA, 330 bp, Photorhabdus luminescens
atgaaatatactatctattactatagcaccgaggtggagaacgagatccttgctctccctgacacacttcaagcccgttacatcaggtattccgaaagaatgcgagaacatggtgccaacctcggagaaccacacacagaagcgtttggtaatgggttgtttgaactcagactcaaaggggctgaaggaattgctcgcgtattctattgcacaatgattgggcaccgtatagtgatgctgcacagcttcgtgaagaaaacacaaaagaccccacttaaagaacgcaggaaagccgaagtcagaatgaaagaggtaaaaaatgactggtaa

SEQ ID NO: 6022 - DNA, 201 bp, Photorhabdus luminescens
ttgaattgcaccccaaaagttgggtgcccgattactgacttaaggcggtggttctatgaagaaaaatatcctgttgcctctagaattcaggttgctgagtatttcctgtcaggtactcttggcgctaaactgactgtaaaacattttggcattgatcatagtactattgtgtacatattttcttactttcatgttccatga

SEQ ID NO: 6023 - DNA, 318 bp, Photorhabdus luminescens
atggataacgtaaataagccgtcattccacaatgtgctggagtttgtacgtatgtttcgtcgtaagaataagttgcagcgtgaaatcgcagataatgagaagaaaatacgcgataaccagaagcgtgttttattgcttgataacttgagcgaatacatcaaacctggtatgtcaattgaggatattcagagcatcattatgaatatgagaagtgattatgaagaccgtatagatgatcatataattaaaaatgcggatctttctaaagagcgtcgtgaattgtctaaaaagcttaaaacaatgggtgaactcaaatag

SEQ ID NO: 6024 - DNA, 633 bp, Photorhabdus luminescens
atgaaaccgtggcttatttttggtgcgggtagtggcattggacgtcatctcgtgactgtcgcactgcaacaaaaacgtcccgtcattgcgcttatccgcaattttcagcaggctactgaactgagtgctttgggtgtcaaagtgatacaaggtgatgcctgtaatgctgaagatgttgaaaaaacagtacaacatgtaagttcagaagcaatcgtcttttctactattggtggaattgattcagatctctttggcaatatgactatcattgatactattgagaaaactgaaataacacgtatgttactcgttacctcaataggttgtggcgaaagctggaaaaccctgtcacccagagttaaatcattgtttggtcaatctgtcaggcgtaaatcaatggcagaaaactaccttcagacaagctccttgaattacacaattattcgtccaggaggattaacagataaacccggaacaggccattgtcaaagatatcagcatgaaattcatggtgcagctagtcgccaagatgtagcacatcaactggcaactatggcagaagaagaatcttcatatcagcagatttataccttagttgatccagagcttaaacctgattgggctgttgcgtag

SEQ ID NO: 6025 - DNA, 3105 bp, Photorhabdus luminescens
atgaaaagaatgctaatcaacgcaactcagcaagaagagttgcgtgttgctctggttgacgggcaacgcctttatgatttggatatcgaaagcccaggacacgagcagaaaaaagcaaatatctacaaaggtaaaatcacccgaattgaacctagtctggaagctgcttttgttgactacggcgctgaacggcatggtttccttcctattaaagaaatagcccgcgaatattttcccaataactaccatcctcacggtcgccctaatatcaaagatgttttaagggagggccaggaagttatcgttcaagtcgataaagaagaacgtggtaataaaggggccgccttaaccacttttatcagtctggcgggcagttatctggtactcatgcccaataaccctcgcgcaggcggtatttcccgccgtatcgaaggagatgaccgcacagaactgaaagaagcgttggcatcgttagaagtgccagaaggaatgggactgatcgtccgcactgcgggcgttggtaagtccgcagaagcactacagtgggatttatcattccgccttaaacactgggaagcgatcaaaaaagccgccgaaaaccgctcggctcccttcttaatccatcaagaaagcaatgttatcgtccgggctttccgcgactatttgcgcccagacatcggtgaaatcttaatcgacaatcccaaggttctcgatctggcacggcaacatatcaccgcacttggccgcccagatttcaccagtaaaattaagctgtatagtggtgaggttcctctgttcagccactatcagattgaatcacagattgaatctgcatttcagcgtgaagttcgcctgccatcaggcggtgctgtggttatcgataccacagaagcattaactgcgatcgatattaactcttcccgagcaacacgcggaggagatatcgaagagacggcttttaataccaaccttgaagccgcagatgaaattgcccgtcaattacgcctgcgtgaccttggtggtttgattgttatcgattttatcgatatgacaccagtacgtcatcaacgtgaagtggaaaaccgactacgtgatgctgttcgtcaggatcgtgctcgtattcaaattggccgtatttcccgctttggtctactggaaatgtcccgtcagcgcctgagtccatcactcggtgaatccagccaccacgtttgcccacgctgtagcggcacagggactattcgtgacaatgaatccctgtcgctatccattttgcgtctgattgaagaagaggcactgaaagagaacacgcatcaagtccatgctattgttccagtacaaatcgcctcatatctactgaacgaaaagcgccaggcagtcagtgcaattgagcgccgtcagggagatgttggcgtagtgatcgtgcctaacgatcaaatgcagactcctcacttctctgttctacgtgtgcgtaaaggtgaggaaatttctgcactgagctatctgcttcctcaatttcatgaagctggcgcgataaatcctcaagaagatgttcaacctgaacgtaagcgtcctgagcagcccgctatttctgcttttgctttgccagccgatacgccagcacagcaaccatcacataaagcaaaagagaaaaagccaaaccacactgctcagactataacggaacaaccgggtctcttaagccgcttcttgactgctttgaaaaaaatgttcagtacagaagcagaagaagaaaaaccggcacagaaaaaagagaacaaattatccggtcatgataaccgtcgctcttctgaacgacgcaatcaacgccgccaaaattcacgtaaagatcgtgatgataataatctgcgtgatgaacaacgtaataaccgtgatcgtgacgaacagcggaaaaatcgaaatactcaacagaaaaatggcactcaagataacaacgtgacgatagacactgctgctcgtgaaacccaacagcagcaacgtcgcgagcaacgtgcagaacgtcaacgccgtcgtcaggaagaaaaacgccaactgcaacctgaaacccagaaaccagaaattgttgaaaatgaggtagaagaacgtctaccggttataccacgtcgccaacgtcgtcagcttgaacaaaaaattcgcatcatagatgaagtgaaagaagttacaactgtcgcctcgctgcccatacctgttgttaccgaagagcaattaccagtacctgttgaaataccgctagaaacagctcagccgcaacaattgactgaaaataaagagcaacaagataatgttatgccacgccgctctcgtcgctcacctcgccatttgcgcgttagtggtcagcgccgccgccgttaccgcgatgagagaaatctacttcaatcaccggcaccattatctatggctgttgcatcaccagaaatggcttccggtaaagtttgggttcgctatccggtggttccgatttccatagaaatgcctgaggaaatttccatgatcgaacagcaagaacaacaaaatgaggtattgccggtaatagcagcagaaacagtacctgcaatcatcgttgttgcagaatctgaacaaaccgttattgaatctccgaaggtagcagagacgccagcagctcaccagaacggaatcaaatctgcaacaggaattacagaacaaaatgacattgttctacagcaaactaaaccagtgcaggaagagcggtcagttattgaactggttgcaacaacaccgattattcctgaatttgagcagcaatctgaagcagacgaagacattgttgtttctgaagacgttgttgtttctgaagacattgttatttctaaagaaattgcagcagtgatgattattgaagagagtaaagatgaaatggttaaacaacctgttgctattatagccaaagttcatcattcttatgcgccaatgaccaaagcaccagcccctgagatgattgaaaaacctattgttatcaacgaatggcaacgacctttttctcattttgaagggaaaggcggagcggggggccattcagccactaatgcggctacttcaccaatggctaaaccgcaattctttgaataa

SEQ ID NO: 6026 - DNA, 960 bp, Photorhabdus luminescens
atgaaaacgaataatcaagttgtacaatttgtcactattgatgacgatgaagctggacagcgagttgataattttttattagcgcgtttgaagggtgttcctaagagcatgatttaccggattgtgcgtaagggggaagtgcggataaataaaggcaggataaaacctgagtataaattgtctgcgggggatgttgtcagaattccaccggttcgggttgcagaacggcaagcagtgccagtttcagctaaactggataaagtcgctgcattagacgattgtatcttatacgaagatgaccatattctagtgctcaataaacctgctggtacggccgttcatggcggtagcggtttaagttttggtgttattgagggattgcgggttttgcgtccggaagcaaaattcctcgaattagtgcatcgtttagatcgtgatacctctggaattttgttaattgctaaaaagcgctcagctttacgggccttgcacgagcaattacgccttaaacagatgcagaaagattatctggctttagtacgaggacaatggccatcacattgtaaggttgttcaggctccattgctgaaaaatatcctgcaaagtggtgagcggattgttaaagtaaacagtgaaggtaagccttctgaaacgcgttttaaagtagaagagcgttttgccaatgcaacgttagtgaaagccagtccggtaacgggtcggactcatcaaatccgtgttcatactcaatatgctgggcatccgatcgcttttgataatcgctatggggataaagtttttgattcgcaactgtcagctacgggtcttaaccgcctattcttgcatgccagtgtgataaaatttactcatccctcgacgggggagacattacgtcttgaagcaccgatggatgagcaattgcgctattgtataaacacgttacgtcagaatcacagtaattaa

SEQ ID NO: 6027 - DNA, 609 bp, Photorhabdus luminescens
atgtcttttggaaaaattatgacacaaatcattttagcttccacatcagcttaccgccgcatgttactggaaaaacttcgtttaccctttatatgtgcagctcctaatactgatgaaacacctcgaatgaatgaaaatgcagaacagctcgttatgcgtttggcgcaagccaaggcacaggcattacaaacaaaatattctcagcatttgattattggttccgatcaagtttgtgttattaatggcgaaatcactggcaagccccacagtttcgaacatgcatttaaacaattgcggcaagccagtggtcattgcgtcaccttttataccggcatttctctctttaacagcaaaacaggaataaccgatacccgttgtgaattattcaatgtctattttagagagctggctgatgatgaaatccgggcttatttaaccgcggaaaacccgcttaattgtgccggaagctttaaaagcgaagggttaggaatcactttatttgaacgacttgaagggaaagatccgaatacgctcatcggtttaccattaattacattgactgaattattaatccgccagggggtaaacccactgacggcgataggttaa

SEQ ID NO: 6028 - DNA, 525 bp, Photorhabdus luminescens
atgcaaaaagtaaaattacccctgaccattgatgcgcttcgcgcagctcagaaacgattagactacgcaggtagttattcacctgagcaagttttgcgtatcgcggaatctgtggttagcgtggacaatgatgtagacagcgttttatcgtttcagatagataaccaacgtctggcggttgtgcgtgggcattccgatgtggatgttacgcttgaatgtcagcgttgtggcggtaatttcagccatcacgttcacataacatattgttttagcccggtcgtcaatgatgaacaggttgaagcattaccggaagagtatgagccaattgacgttaacgaatttggcgaaatagatttgctggcaatgattgaagatgaaataattctttctctgccggtggttccggtacatgattctgaacactgtgaagtgtccgaagcggacatggtgtttggtgaattacctctagaggctgaaaaaccaaacccatttgccgtattagccagcttaaagaaaagtacttaa

SEQ ID NO: 6029 - DNA, 171 bp, Photorhabdus luminescens
atggccgtacaacagaataaaccaactcgttctaaacgtggtatgcgtcgttctcatgatgcactgactgcaccattactatctgtagataaaacttctggtgaaactcacctgcgtcaccatgtgactgctgatggctactaccgtggccgcaaagtcatcaacaaataa

SEQ ID NO: 6030 - DNA, 1038 bp, Photorhabdus luminescens
ttgactaatctgactttagcgttagatgctatgagcggggactttggtcctcgcgttacggtgcctgctgcattgcaggcactggcgtctaaccctagacttaaattattgctggtcggaatccccgatatcatttctccgatgcttgtaaatagtgatactgagttgctcagtcgtttacaattggttcctgctgaacgggttgtggctaatgatgcgaaaccgtcgcaagcgattcgtaacagccgaggaacatcaatgcgcattgctctggatttagtgaaatcaggtgaagcgcaggcgtgtatcagtgcaggaaataccggagtattgatggggttatctaaattgatgctaaaatcgatagaaggcattgaaagacctgctttgatgaccgtgttgccaaacctgaaacagcggcaaactgtcgtattggatttaggtgccaatgttaattgcgatagccgcatgttggtacaattcgccattatgggttcagtgatggccgaggaagtcgtgggggtggttaatcccgcggtggcgttgcttaacattggtacggaagagagtaaagggctggataatatccgcgaagccgccactattttaaagcgtattccgacgataaattacattggttatctggaaggtgatgaattactgacaggtaagagtgatgtattggtatgtgacggcttcgcaggtaacgtgacgttaaaaacgatggaaggggcgatcagagttatcttatccctgcttaaatcatcggatggacaaaagaaaaaattttcctggttgttgagaatagtcaagaagtggttgcaaaaacggatgacaaaacgcttcggtcacctgaaccctgaccagtataatggcgcatgtctgttaggattatatggaattgtaatcaaaagccatggggcggctaatgagcatgcgtttaaagccgcaatcgaacaggctgttcaggccgttgaaaggcaggttcctgatagaattgctgcacgcctggaaacagcattacccaagagtgactga

SEQ ID NO: 6031 - DNA, 954 bp, Photorhabdus luminescens
atgtatacaaaaattttaggtacaggtagttatctgcctgcgcaagtgcgtactaatgctgatttagaaaaaatggtggatacttctgatgagtggattgttacccgtacaggtgtccgcgaacgtcgtcttgctactgatgatgaaactgttgcggttatggggttccgggctgcaaagaaagcaattgaaatgtcgggcattgataaagagcagattgatttaatcattgttgcaacagcttcatccacccatgctttccccagttctgcgtgccaaattcagcacatgttgggtacccaaaattcagcggcttttgatatttctgctgcttgttctggttttgtttatgcactgagtattgctgataagtttattaaaaccggtgtggcaaaacatgcattggttattggttctgattctattaccagaacacttgatccagaagatcgcggaacacttgtcctgtttggcgatggtgcaggtgctatggtggtaggggcttctgatgagccaggaattctttcaactcaccttcatgcaaacggtagctatggtgaattgctggtattgccttatcaggagcgtcagaatctaaaagagcccgcatatgctagtatgatcggtaatgaagtatttaagattgcagtccgtgaattggctaacatagttgatgagactttagaagcaaataacttaccatatagtgagttggattggctggtacctcatcaggctaatttgcgtattatcgcagcgacagctaaaaaattaaacatgacaatggataaagtagtggtaacgctagatcgttacggtaatacttctgcggcatcggtacccacagcatttgatgaagcagtacgtgatggccggattaagcgtggtcagttaatcttaattgaggcttttggtggtggccttacttggggttcggcactgatacgtttttaa

SEQ ID NO: 6032 - DNA, 933 bp, Photorhabdus luminescens
atgtctgaatttgcaatggtatttcctggtcagggttctcaagaccttggtatgttggccgatttggctacagcgttcccagttgtcgagcaaacttttgctgaagcgtctgatgtactgggatatgatctctgggctctggttcaacaggggccagaagaagaactgaataaaacatggcaaactcaacccgcgttgttggccgcatcggttgctatttggcgggtttggcaggaaaaaggtggaaaagcaccatcactgatggctggacatagccttggtgaatattctgcactggtttgtgcgggtgtcattgatttcaaacaagctattagacttgttgaactgcgtggcaaattgatgcaagaagctgtacctgaaggcactggtgcaatgtatgttattattggtttagataatgaatccattgatcgtgcttgtaaagaagtagctcaggggcaaattgtttctcctgttaactttaactcacctggtcaggttgttattgccggtgagaaagaggcggtagagcgtgctggagatgcatgtaaagccgcaggggcgaaacgtgcgctgcctttggcagtcagtgtaccgtcgcattgtgcactgatgaaacccgccgcagataagctggcagttgttttggaaggaattgaatttggctatcctcagttcccggtggtaaataatgttgatgtgaaaatagaacaatctgctgaagctatccgtcatgcactggtacgacaactctataaccctgttcgttggacagaaacagttgaatttattactgaacagggtgttggtcagctattagaaatagggccaggtagagttttgacaggtttaactaaacgaattgtcaataccttaagcgcagcagcagttaatgacacagcttcactaataactgcattggaaaataattga

SEQ ID NO: 6033 - DNA, 735 bp, Photorhabdus luminescens
atgagattagatggaaagattgcattagtaacaggcgctagccgtgggatcggccgtgcaactgctgagctattagcagagcgtggagcctatatcattggtacagcaacaagcgataaaggcgctgaagtcattagtgcttacctcggtgaaaaaggtaaaggttttgtactgaatgtcactgatccggaatcgattgaacagcttatgtctaccatccgaacagagcatggcgggcttgacattttagtgaacaatgcgggtatcaccggtgataatctggtgatgcgcataaaggatgatgagtggcagcatgttattgacactaatctttcatctgttttccgtatgacaaaagcggcaatgcgcttcatgataaaaaaacgttatggtcgtatcatctctattggttctgttgttggatcgatggggaacgctgggcaggcaagctatgcagcggcgaaagcagggcttgttggtttcagtaagacattggctcgcgaagtgatttcccgtggtattactgttaacgttgtcgcgccagggcttattgaaactgatatgctaagagcgttgccagaggagcagttggcgaacttttcgaatgatatccccgctaaacggcttggggatgtaaaagaaattgctagtgctgtggctttcttcgcttctgatgaagcggcttacatcacaggcgaaacattacatgtcaatggcggcatgtatatgaactaa

SEQ ID NO: 6034 - DNA, 237 bp, Photorhabdus luminescens
atgagcactattgaagaacgcgttaaaaaaatcatcgttgaacaacttggtgttaaagaggaagaagttgttaattcagcttcttttgtagatgacttgggcgctgattctcttgacacagttgagctggtaatggctctggaagaagagttcgatatcgaaattccagatgaagaagcagaaaagatcactacagttcaggcagctattgattacgtccagaaccaaagcgaataa

SEQ ID NO: 6035 - DNA, 1251 bp, Photorhabdus luminescens
gtgtctaagcgtcgagtagttgtgaccggactaggcatgttatctcctgtcggtaatacagctgaatcttcttggaaagctgtttgtgccggacagagtggtatcagccttattgaccattttgacaccagtcaccatgcaactaagtttgctggtctggttaaaggttttaatcatgaagatttcaatatttcgcgcaaggatgcacgaaaaatggatgatttcattcaatatggtattgcagcaggtgtgcaagccattgaagattctggaattgaagtaacagaagccaatgctagtcgttttggtgctgctattggttctggtattggtggtttgggtctgattgaagaaaatcacggggcgttggtggcgagtggtcctcgtaagatcagcccgttcttcgtaccttctacgatcgtaaacatggtagcaggtcatctgagtattatttacggtttgcgtggcccaagtatttctatcgccacagcatgtacgtcaggtgtacataatattggtcatgctgcccgtattattgcttataatgatgctgacattatgctggccggtggtgcagaaaaagccagtactcctctgggggttggtggttttggtgctgcccgagctttatctacccgtaacggtaatccacaaggtgcaagtcgtccgtgggataaagaccgcgatggctttgttctgggggatggcgcaggtatcctggtactggaagagtatgagcatgcgaagagacgtggtgcgaaaatttacgcagaaatcgttggctttggcatgagcagcgatgcttatcatatgacgtcaccaccagaaaatggtgcaggtgctgcgttggcgatggaaaatgcgctgagagatgccggtatcactaccaagcaagtgggatatattaatgctcacggtacttcaacatctgctggcgacttagcagaagcgcatgcagttgagtccgtgtttggtgaaggcactgatgttttagtgagctccactaaatcaatgacgggtcatttgttgggcgctgcgggggccgttgaatctattttcactatcctggcattgcgtgatcaagttgttccgccgactatcaacctggaaaatcaggatgagaactgccgtctggatttcgtgccaaatgagtcccgtaaggtagaggggatggaatatgcattgtgtaactctttcggcttcggtggtactaacggctcactgattttccgtaagattaaacctgattaa

SEQ ID NO: 6036 - DNA, 825 bp, Photorhabdus luminescens
atgtattggattaatggggagcggtgcgactatttacctgccaatgatcgttcagttcaatttggtgatggttgcttcacaacagcaaaaatagaacaggggcaggttgctttgttgtcgctgcatatccaaagattacaaaaaggcgttgaaaggttatatcttccacaacccgattggcaacggcttgaaagccatataagacagattgcttccacgactgaacaaggtgtacttaaagttattatttcccgtggaaccggaggacgtggctatagtgctcaggggtttacgcaacctaatcagatcttgtctctgagtccttatcccgacaaatatttgaaacagcgtcagaaaggtttatctatggtgctcagtccggtagcgatgggaataaacccctatcttgctggaattaaacaccttaaccgattagaacagatattgattaaaacatttatcgaaaaatcgaatgctgatgaagctctggtacttgatactgatggcttgctggttgaatgctgtactgcaaacattttctggcgtaaaggaaaaggtgtgtatactcctgatttacgaggttgtggtgtcgaaggtgtgatgcgggaaagaataatcgcgttattatcggaaagcgattatcacttttcttgtgtaagctgttatcccgaaacattggctgatgcagatgaagtgatagtttgtaattctttaatgccggtgatagctgtcaaagaaattcaagctcatgaaaatcagcccagatggcaatatcagtcaagggaactgtatgaatatttgcttcctgaatgtttgaagttgtaa

SEQ ID NO: 6037 - DNA, 1017 bp, Photorhabdus luminescens
atgaaatggaaaaaacgcctttttgccctattggctttgattgtcattacggcagcaatattactctatgctggctatgaaaaagttgaaaaatttgcggatcaaacattaacaattaaacagaatcgaatatttaccctgccaacaggtattggtcgtcatggtttggaagcgttactggttcgggataacctgattgaagatagtcatattttcccttggttattaagattggagccaaaacttgccgagttcaaagcgggaacttaccaattaacacgagaaatgactttacgggaaatgttgcaattattctctagtggtaaagaagcgcaatttacggtccgttttgttgaaggtagccgtttatctgattggtggagaatactacagcaatctgaatatcttaaacatgaattggataataaagatgctcaggaattggctgaaatactcgatattaaagatacagatactctggaagggtggctttatcctgatacctatcactatacggcaggcacaagcgatgtagcattgctgaaacgagcatatcgacagatgaaaatgacgctggaagaggaatgggaaggtcgcgacaaaaatctgccctataagaatgcttatgaaatgttgattatggcgtcgattattgaaaaagaaactggtgttgaggctgagcggacaaaagttgcttctgtatttattaatcgtttacggttgaatatgcgacttcaaactgatccgacagtgatttatggtttaggtgaaaaatatacaggcactatttttcgtaaagatttaacaacattgacgccctacaatacttatatgattaatggtctgccacctacaccgattgcaatgcctggccttgcttctataaaagcggctgcacacccggcaaaaaccgaatttctctattttgtggcgaatggcaaaggtggtcatacttttacgaccaatctggctgcgcataacaaggcggtaaatatttaccgtcagaggttaaaatag

SEQ ID NO: 6038 - DNA, 639 bp, Photorhabdus luminescens
atgaacagcaaatttattgttattgaagggctggaaggtgcaggaaaaacgtcagcaatgaaaacaattgttgaaatgttgcagcagcacggtattcagaatttaatttttacccgtgaaccgggtggaacacctctggcagaaaaattacgtgggttaattaaacaaggtgttgaaggtgaacctctgacggataaagcagaggtgttaatgttatatgcagccagagttcaattagtcgaaaatgtgattaaacctgctttggcccgcggtacatgggttgtgggtgatcgtcatgacctctcttcccaggcatatcaaggagggggacgtggtattgataaaaacttgatgacttcactacgtgatactgtgctgggtgattttcgtcctgacctgactatttatctcgatcttcctcctcaaattggtttactgcgtgcccgtgaacgtggagagttagaccgaattgaaaaagaatcgatggatttttttgatcgtacgcgcagccgttacctggagtttgcagcacaagataagagtattgtgaccgttgatgcagctcaaccaatagagcaagtacaagcagatatttatcaggtacttgagcaatggctaaagcagcaggaaaatggctaa

SEQ ID NO: 6039 - DNA, 990 bp, Photorhabdus luminescens
atgaattggtatccttggcttaatcaggcatatcgtcagttggtggaatctcatcagcaagggcgaggccatcatgctttattggttcatgctaatgcaggtactggggccgatgtgttgatctatggattaagccgatggttaatgtgtcggaatagacaggggatgaaaagttgtgggaagtgtcatagttgtcacctgatgatggcaggaactcatcctgattggcatattatgtcgccggagaagggcaaaaccagtgttggtgtggaagcggtacggcaaattacggaaaagctctatagccgttctcagcaaggtggggtaaaaattgtttggttacctttgaccgaatgtctgaccgatgctgctgccaatgcattattaaaaacgttggaagagccaccgaaacatacctattttcttttggaatgtcggcagccgtccagtcttttggctactttacgcagccgctgtttttactattttctgccggtacctaagacggaaagtagcctttactggttgcaaaaacagttgcctttaatttcttcggtcgatgcaatgaccgcgttgaaactgtctcagggagcgcctgtagcagcagaacaattgttgcaaccggagcaatggcagatacgggagcagttttgccaggctgttaaacaggctttggataaacatgatgctttgtcacttttaccccaactgaatcatgaaaatgcgccacaacgccttcattggcttatcagtttgttatttgatgcggtgaagtggcaacagcagttacagcgttattgtatcaatcaggatcaacaaacgctgatttatcaattgagttccatgcataccctggctgttttacttcaaggcgttgatgactggatgtcttgtcgtcatcagttgctttcagtcgtgggcgtaaattgggaattgttactggtagaacagttgctcaattgggaaaaacagtttacttcatcaccctga

SEQ ID NO: 6040 - DNA, 786 bp, Photorhabdus luminescens
atgttgttagttgattcgcattgtcatctcgattgtctcgattatgaaaacctacataaaaatgtagatgatgttgttgcaaaagcggcagatcgggaggttaaatttatgctggcagtagcaacgacgctacctggtttccagcaaatgaaaaccttaattggtgaacgggaaaatatcgtattttcctgtggtattcatccacttaacttggatgaaggttataattttgatgagttggcgcgtttagcttccgggaatgaagttgttgcactaggtgaaactgggctggattactattatcaacaggataatgctgaattacagcgaacctcatttcgtgaacatatccgtatcgggtgcaaactcaacaagcctgttatcgttcatacccgtagtgctcgtgatgatactttgagggtattacgagaagaacaggcacgagaatgtggtggtgttttgcactgttttaccgaagataaagataccgctagagaattactggatttaggcttctatatttcattctctggtattgttactttccgtaatgcggagcagattcgtgaagcggcaagatatgtaccgttggatcgtattctgattgaaaccgattctccttatcttgcacctgtgcctcatcgtggtaaagaaaaccagcctgcctatgtgcgtgatgttgcggaatatatggctgtacttaagggagtgagtattgaggcattggcagaagtgaccacacagaatttttgcgatttatttcatgttgatgtagacaaaatttga

SEQ ID NO: 6041 - DNA, 357 bp, Photorhabdus luminescens
atgatagaagaaactattttcagtaaaattattcgccgtgaaataccttctgatattgtttaccaggacgatctagtcactgcattccgcgatatttctccacaggccccgactcatattttgattattcctaatgttctgatcccaaccatgaacgatgttaaaccggagcatgaagcagcattaggtcggatgatgacggttgcagcaaaaattgctgaacaagaaggcattgctgaagatggatatcgtttgattatgaactgtaatcgccatgcggggcaggaggtttatcatattcatatgcatttggttggtggtcgctatttagggccattgttgatgaagtcaatatga

SEQ ID NO: 6042 - DNA, 570 bp, Photorhabdus luminescens
atgagaagaattctttttgtagcactatcggttatgtttttggcgggatgtccatccttgccaccggagcagcctgaacctccgactccggttgtaccagtgaccccatcggaaaaaccgacaccaccatctgaaaaggtaccagagcctcctaaaatgagtgcgattgactgggaaagtaccgtgcaaccattagtagagcaactcgttaaggctcatgggttggaaaacgcgaagttactattagttgatacagtgaaaaacaatactaacggcgcattacaaaccatgcaagcaaccgatgctttgcgtcaagctatcagtagcgagcatgtttttgaattaataccccaaaatcaggtgcaaaatgcccgtcaatctctgggcttatctgaagaagatagtttgggattgcgcagtaaagcgattggtctggctcgttatttgaatgcggaatatgttctctattccatagtttcaggtaatagcgataagcgtgatatcgtcatgcaattgatgctggtaaagacgggcgagattctttggtcggggcacggtgacgttaaataa

SEQ ID NO: 6043 - DNA, 864 bp, Photorhabdus luminescens
gtgacgttaaataatcataattgtttattgcgggcattgtgcaaacaatggccgcataccgcagtaaatgattggaagataagaccgttaagtgggctgacgaatgagagttattatgccaccaatggtgaatatcatattgttggccgcaggcaggggcagcaggggaaacagcttggcgttaatcgtcagcgtgaaaatgccattctgcgccatctcagccaggtaaaaattgctccgcaagtcatagcaatggttcctcactggctgttgttggaatggctgcccggccatattattgggcaaaatgagttttctcagcctgatttgttgcaaaaactggcggcattattggctattttgcatcaccagcctctgtttggttaccggcttcaattgaggcatcagctagaaagccattggttgcaaattgataaagcgcgtcttactccctgttggttgcggctgcataaacgttttatgtcgtctccgatgccttcaatactaaaattatcacccgctcatatggatgtgcattacggtaatttgcttaatacctctcaagggctgaaacttattgattgggaatatgcaactgatactgatattggatttgcgttagcggcactgtttcgcactaatcattgggatgagccgcagcagcaggattttttgaattactattgtagccagtcatcaggatattcaaaccggacactattagaacgccaaattaaacgttggctaccttgggttgattacatgattttaatgtggtttgaagtgcgttggaaacagagtggtgatccacaatttttagaattagcgcaaccgttacgtctctcttttggtctaacgttttaa

SEQ ID NO: 6044 - DNA, 1023 bp, Photorhabdus luminescens
atgggtccggttatgttagatgttgttggttatgaattggataatgaagaaaaggaaattttgcaacatccattagtgggcggattaattctgtttacccgcaatttctatgatgttgagcaattaagagaattagtccgtcagattcgtaaggcttctcgtcatcgtcttgtgattgctgttgatcaagaagggggcagagttcagcgtttccgcgaaggtttcacttgcttaccggcggcccaatcttttgctggattgagtgacaatctcaatggtactcaattggcggaagaggcgggctggttgatggcgtctgaaatgattgctatggatatcgatatcagctttgcgccggttttggatttaggtcaccagtgtgcggctattggtgagcgttcattccatgaagaccctgaacaagccaagatgatggcagagcattttatcaaaggcatgcattctgccggaatgaaatcgacaggtaaacattttccggggcatggtgctgttaatgctgattctcataaagaaactccctgtgacgatcgcccgttggaagttatttgtcatcatgatatgtctattttccgtgattttatccagcgtaatttattggatgcgattatgccggctcatgtgatctatcctcaggtagataagcatcccgccagcggatcgtcatactggttaaaatcagtgttgcgtcagcaattgggctttaatggcgtgatattttccgatgatctctctatggagggagccgcgatgatgggaagttacgttgaacgcgggcagactgcactcaatgcaggttgtgacatgattttgatatgtaataaccgtgatggcgcggttagcgcgcttgataatctgccgttgaccaaagtggaaaaattatcagaattgtaccatcgaggtggtcaatacagtctgaatgagttaaagaattcagaacgttggcagcaggctaataaagcactaacggctttgtatgaacaatggcaggattgcgcacggtaa

SEQ ID NO: 6045 - DNA, 1305 bp, Photorhabdus luminescens
atgacaacaccaaagaagagaattgttatcattggtggaggtgccggtggtttggaactggcaaccagtctggggcataagttaggtcgtaaaaagaaagcagaaattgtgctggtggatcgtaaccaaagtcatttatggaagccgttattacatgaagtggcaacaggctcccttgacgatggagttgatgcgttgagttatctggctcatgcccgtaaccactatttcagtttccaattaggggcattgactgatattcaccgtgatagcaaaaaaattactttgaatgagatcagggatgaatataacgaagtattggttcctgaacgtgaattgagctatgacattctcgttatggccttgggaagtacatctaatgattttaatacacaaggtgtgaaagagcactgtatcttcctggataacccacaacaggctcaccgtttccataatgaaatgttgaatctatttcttaaatattctgcaaactgtggtcagcaagataaggttaatattgctatcgttggcggtggagcgacaggtgttgagttatcagcggaattgcacaatgcggtaaaacagcttaacagttatggttttgaagggctgaattcagaagcgttgaacgtgacgttagtcgaagcaggggagcgaattttgcctgcattgccggcacgtatttctgctgcggcacatcaggaactcacaaaacttggcgttcatgtattaaccaaaactatggtgaccagcgctgatgaacatgggttgaatactaaagaaggtgagctgattaaagctgatctcatggtatgggctgccggtattaaagcacctgattttatgaaagatattgccggtcttgaaactaaccggattaatcagctagtggtaaagccaactctgcaaacgacacttgatgatcatatttttgccattggtgattgtgcatcatgctcgaagaaggaggggggttttgttccaccaagggcacaggcggctcatcaaatggctagccgctgttacagtaatattattgccttgttgcatgataaaccgttaaaagagtatacctacaaagatcatggctcattggtatcattgtctaaatttagtacggtgggtagtttgatgggcaatttgatgcgtggttcaatgatgatcgaagggcgtatagcccgtgcggtttatatctctttatatcgtatgcatcaggtggctttacatggttatattaaaactggcttgatgatgcttgttggcggaattaaccgtgttatccgtccgcgattgaaactacattaa

SEQ ID NO: 6046 - DNA, 1677 bp, Photorhabdus luminescens
atgtccatatcccttgagtattttcaatctgcaaaatttgacggtaatttatatcttaaatgtcacggtgaaattagtaacgatacagaaataaaatacaccgtaaccaattcaaaaacaaaagagatatatgaatgttatagtgaagataatcaactcgtctgtttgacttcacttaaacccgcaaattataaaatagaagcaaccattaaaaaagacggtaaaataattgctacgcttacaccagaagatatagaaataaaagaatcagactttctgtttgatatcgataaaaaaatcgatgagatagataaagacaaaactgataatatcaacattaaccatataccatcgaaacagataccttccaaaggaaatactgtttctttaaaaggaaacaatgatatcccaaataagaatttgaaatataaccttgagattatgttttcccctgatggattaaaaaaatttgaaatagaaaaagataatttattacctgcttttaattcatctcaacattcaatagagataaaacctgtttttaatcaagaagatttagataagaaaacctggaaaacaccagaattcagtaaattaattcatctttacaagatagatgctgatattaatcatgctgatttagtcaagttagccaatgaactggagaaactggattatgtcgaattttgctctcttatgccgattttgaaagagctgccgccgccacctttgcttctatccgaagaggaaacgataattcctgaatttgatactactcatatcgttacacctgatttttcacatctacaaggatatttagacgaacacagcggtatgaatattagaaaagcctgggatgaaggttataaaggcaaaggtgtcactgtacaccatcttgattttggtgtttatagaaaccatgaagatttagttggtaatattacggttatcaacagccgcccagaaacacaagattgtaatcacggcacagccgccaccggctgtattgctgcaaaagataatacattcggtgtgacaggtattgctcacgaatgtcaattccgtttttatgacgtcgatgactttgatagaataatatatagctttttaccgggagatattattagtttaaatattcaaactgtagccaataatagatattatccttttacctatctcaaatctaattggcaaagaataaaaagttgtgctgatgcaggggcaataattattttcgcttctggtaatagtggtattaatttagcctatgacttcactttccctaattatggcgatcctggcggtattatgattggtgcctgtacatcaattaatggacacaggttaggtttttccaatcataatcttcacaccagtttaaattcctggggtgagaatgtcacaacgactggatatacaaacttacagtacctaccaggaaataagagaaattatacgcgcagttataatggaacatccagtgcgacacctttagtctcaggtgcattagcgcttattcagtcctatataaaattaaaatatcataaatatcttaattgcactcaaatagcaacactggttagaagtagtggttttacaataggtgaactacaaggagtcggcacgcgaccaaatgtcgcaaatgctttcaaattagttgatcgcctgttttcttaa

SEQ ID NO: 6047 - DNA, 507 bp, Photorhabdus luminescens
ttggttcataaaagcttcgactttaaagagttacaaactaatgatcctcaagaaaacctactatttaaattaaatcaggttccacacgtcccttcttcctatgtttttattgaggacagcaccttccatataaatgctcttaatggtttcccctcgctgtatactaaatacattttatcttcattaggcgttcagggaattattaacctattagcagaaaaaggtaaccgtgagtgttatttcatcaatcacttggcgctcagaacagaaaataataaggtagtctttttttcaggcactacaagagggttatctatttctctctctcctttagagcgcagtaatgagacaagctggtctgatctttggcaaatattaaaagtaacagatggtgggcagttctacagtcaattaattgaaggagataagcaccttttcaaccaacagaataacaatactgatgcttttcaactactcagggatcaccttactgagatagagttataa

SEQ ID NO: 6048 - DNA, 288 bp, Photorhabdus luminescens
atgtggggtattttccgttttccaagcgaacccagaatagaaccaaaagactcattgaaattttttgaaaactcaattccaagctccaaaaattatgataataaagaagttaggttctctaagggtgaaaaaggtaatattcatcggttcgaagaaactaatgggaagtatcactggaatagaagtaccagtgatgtaaagaatccgttgaataaaaatgacattcctaatgttttattttcttttcaggaaaataagacattgtttgaaaaggaactaattaattag

SEQ ID NO: 6049 - DNA, 846 bp, Photorhabdus luminescens
atgacagaattaaatagctttcagacagaagaaataaccccttttggtttaaaaattacgcctcaatattccgatcaacatattgatacattaccagtggaacaactgaaagaactggcaagaaaacaccatctgcttatattacgtggttttaaatctgatttatctgatcacgaaaaatatgaaaaatatgcccgtaattggggagaaataatgatgtggccgtttggtgctattttagatgttcgtgaacaccaagatgctaccgatcacgtttttgataatagctatatgccgttgcactgggatggcatgtacaaaccaacaattcccgaatttattatgttccattgcgcccacgcacctgaaagcgatcaagggggcaggacaacctttgtcaatactcgccgtgttgttgctaatgctactcaacagcaattagaacagtggaagaatatatcgattacttatcgcattaataaagtcactcattatggcggggaagttcactctcctttagtggaagaacatccggacagaaatggattcgttatcagatataacgaaccggcagtagatggagaaaaattcctaaataaacatgctattgaatatcataatatcaaccccgatcaagtagcagaatttcaacaagattttatcaatatattatatgataagcgccatttatatgctcatgcatggaaaaaaagtgatctggtgattgtggataatttctctctgctacatggccgtgaaggatttacttccaaatcagaacggcatttacagagaatccatattcaatctaatccagcatttaataatcaggcgttaagatcatag

SEQ ID NO: 6050 - DNA, 978 bp, Photorhabdus luminescens
atgcaaagtgtcaccgctaacaatattacatccgagaatgtttccttgaataatatttctatgcaaattctgcgcgaattgttgcaatatcgcaggcaccttactgatccagtgaaaaattcagctaaagaagaagagattattaaaactgtacaattacccagaattgaatactttatcaagaataaaaagcctatcgaattcattctaccggcattcccaaccaagtcaccaaacataaataaagtacttggtactgcccctgatatggcagaacgcttatctttgatttttcttaattctttttgccaacgtatccagctttattatcctcctggtgctcgcattattatttgttctgatggacatgttttcggtgatctcattcatgtcagtgatgaagttatcagccaataccatgaagatattaaacaattacttcatgaagtgggtgctatcaatttaagtacatttaacctcaatgacgataaggaactctgcgaacatagtgatgattttaatttacagagacagatgttagtaaaacattatgcccgctcagaggcatctatcaaagacgaactgttgcaaaataataacggattacaattataccgtgcagtcacccgctttttatatgaagacagcttattacctggttacaccggatcaaacaatgccctacagaaagatgccaaacaaagagctatcggtgttattcaacgaagttgggcatggggaagtttattagatactcatttcccaaaagccatacgtctgtctattcatcctcaaccagcagacagtattaaatttggtattcatatgatgccaacccgggatgattggttaaccccttggcatggtgtcgcagccaatgtaaatgggcaatttatacttatgaaacacaaagaagttcagatgatgggcggaaaattagtaaatattcatggaaaacccagtcactatgtaatttga

SEQ ID NO: 6051 - DNA, 3447 bp, Photorhabdus luminescens
atgtcctcaaaatatcgttatgaacttcccgaacgtcgcggtgataaccgtcaattaggccaacttactggtgccgcttgcgcggtagagtgtgctgaaattatcgaacgccatcaaggccctgtcgtactgataaccaaggatatgcaaaacgccttacgtctgcatgatgaaatccatcagtttaccgactgctccgttgatctcctttccgattgggaaacactgccgtatgacagtttttctcctcatcaggagatcatttccaaccgtctgtctacactttaccgtctgccgacgatgaccaaaggtgttttaatcctgccgataaataccttaatgcaacgggtttgccctcatgagtaccttaacgggcatgcactcgttatgcacaaagatcagagactctcacgggataaactccgtactgaattagaacaggctggctatcgtagtgtcgaacaagttcttgaacacggcgaattcgctactcgtggcgcactacttgatcttttccctatgggaagtgagcatccctatcgtattgattttttcgatgatgaaatcgacagcttacgcattttcgatgttgacagccaacgcacgctgactgaagttaaacaaatcaacctactgcctgctcatgaattcccaaccgataaagagacaattgaactgtttcgcagccagtggcgggaacgttttgaagtccgtcgtgacaatgagcatatttatcagcaagtcagtaaaggcacgttaccggccgggatagaatactggcaaccgttgttttttaaccaacccttgccttcattgtttgattatctacccgacaacactttgcttatcagtcaagaaataaaccattccgccgaacgtttttggcaagacatccaacaacgctttgagagccgtaaaattgacccaatgcgccctctcttacccccagaagagctttggcttccggctgacaatttattctcagcgctaaaaaactggccccgcattcaacttaaaacagaggaattgagcaaaaaagcgagtcacgtaaatcttgattatcaactgctgcctgatctctccgttgttgcgcaaaataaggcacctctggataagcttcgccgattccttgaacaattcagtggccgcgttattttctctgttgagagcgaaggacggaaagaaacgttacaggaattattgtcacgaataaagattaaacccattaaaatcagcaaattgcatcaagcacaacagccaggtcactttttgatgattggtgccgctgaacatggttttatcgatacaaagaatgaactggctctaatctgtgaaagcgacatgcttggtgaacgtgttgtccgccgccgtcaagatacccgtcgcacgattaataccgataccctgatccgtaaccttgcagaattacgccccagtcagccagtggtccatttggaacatggcgttggtcgttaccaggggctaactacgctggaagcaggtggtatcaaagctgaatatctgatcttaagttatgccggtaacgacaaactttatgttccggtctcttccctgcatttgatcagccgctacgcagggggtgctgatgaaaatgccccattacataaattgggcggagaggcatggaacaaagcccgccagaaagctgccgaaaaagtacgcgatgtcgctgcggagttgcttgacatttatgctcaccgcgccgtaaaaccaggatttgcgtttaaacatgattgggaacaataccaattgttctgtcaaagctttccatttgaaacaacgccagatcaggaacaggcaattaacgcagttctgaatgatatgtgtcagccaatcgcgatggatcgcttaatttgcggtgatgtaggctttggcaaaaccgaagttgcaatgcgctccgcatttctggcagtccataatgacaagcaggtggcggtcctggttccgacaaccctgttggctcagcaacattttgataatttccgcgaccgttttgctaattggcctgtacgtattgagatgatatcccgtttccgcagcgccaaggaacagcaacaaatcgttgaaatggcagccgaaggtaaagtcgatattattattggtacgcataagttgctacaaagcgacttgcgctggaaagacctgggtttgttaattgtggatgaagagcatcggtttggtgttcgccacaaagagcagatcaaagccatgcgtgccgatgtcgatattctgaccctcaccgcaacccctattccacgaacgctcaatatggcaatgagtagtatgcgggatctctcaattatttcgaccccgcccgctcgccgtctggcagtcaaaaccttcgtgcgcgaatatgacagtttgctggtgcgagaagccatactgcgtgaagttttgcgcggtggtcaagtctactacctctataatgatgttgaaaatattgagaaagcgaagctgcgtcttgaagaattagtaccagaagcacggatcgccattggtcatgggcagatgcgtgaacgggatttggaacgggtgatgaccgatttccatcatcaacgatttaatgttctgatttgtaccacaattattgagacaggcatcgatattccaagcgccaataccatcattattgaacgtgctgaccattttggcctggcccaactgcaccaattgcgggggcgtgtcggacgttctcaccatcaggcttatgcttacctgctgacaccacatccgaaagcaatgacaaccgacgcacacaaacgtctggaagccatcgcctcccttgaagatttaggggcgggttttgcactggcaactcacgatcttgaaatccgtggagccggcgaactcctaggtgaagaacaaagcggtcagatgacaacaatcggcttcactctctacatggagctgttagaaagtgctgtcgatgcactaaaagcaggccgcaaaccctcacttgaagacttgaccaatagtcaaactgacgttgaattgcggatgcctattttgttacctgatgattatattcctgatgtcaatatgcgtttgtctttttataaacgtattgccagcgccaaagacgcatcagaattagcagaattgaaggttgaattgatagaccggttcggcacattacctgatccggggcgtcacttattacactcagcagccattcgcctgttagctcagaaattaggtattaaacgaatagaagcccatgaaaagggagggttcattgagtttagtgaaaaaaataaagttgatccaacttatctgatcggcctgttacaaaaacaacctgaaatttatcggttggatggccccgctaaacttaaattcatcattgatctgaacgaaagaacggcacgcctggaattcattcagcaattacttgatacttttgaacatcatcagatctgctcttaa

SEQ ID NO: 6052 - DNA, 1203 bp, Photorhabdus luminescens
atgtttcaatctgtctcattatttataggtttgcggtatatgcgtggtcgggcggctgataaatttggtcggtttgtttcctggctgtcaaccattggcattactctcggtgttgccgcattaattacagtattgtctgtgatgaatggttttgagcgttcactggaaaccagtattcttggcttgatgccacaggcggttgtgacgtcggtaaacggctcgctagacccaaaagcgcatcctgccagtgaacttgcggctctcaagcaggttgacaggatgacgccattggtgatgggggatgttgtattgcaaagcgcccggaatgtcggtgttggtgtgatgctgggtatcgcttttgatgaatatgagccgctgactgaatatttaaccggcgcttatcgtcatcaacttgaacccggtagctacaatgctattttgggcgaaaaactggctggggagcttggggtaaaacgcggtgatcgcattcgcctgatggtgcctggtgcaagtcagttgacaccaatggggcgtattcctagtcagcgtctatttactgttattggcacttttgcgtctaatagcgaagtcgatggcacacagattctggttaatcagcaagatgcagctcgtctgatgcgctatccaccaggtcacatcactggctggcgtctctatctctcagaaccattggctgtagatagtttgagcttacaaaccatgccggaagggttgttatggaaagattggcgcgaacgtaaaggtgagtttttccaagcggtcaggatggaaaaaaatatgatgggcttattgttaagcctgattattgccgtggctgcgttcaatatcatcacttcgcttggtttactggtcatggaaaaacagggagaagtggcgattttgcagacacagggactggtacgtcgtcaggttatggcgatttttatgatccagggagccggagccgggatcatcggcactttactgggaactgggcttggtgttctgctttccagtcagcttaataacttaatgccactgattggcttattgacctcaggtgttgagctgcctgttgccattgagccgctacaggttgctacaatcgcaatttcagcgatggcgattgctctattgtctacgttatatccttcctggcgtgctgctgccattcaacctgctgaggctttgcgttatgaataa

SEQ ID NO: 6053 - DNA, 705 bp, Photorhabdus luminescens
atgaataatcaaccactattgttgtgtaataatctgtgtaaaaaataccaggaagggcaagtactgaccgaagtgctgaaaaatgtcacttttgctatcaatcagagtgaaatgatggcgattgtgggaagttccggttcaggtaagagtacgcttctgcatttgcttggtgggttggatacaccgacttctggtgaagtcctttttaaagggcactctttgaataaaatgtcctccggagccagagcagaactgcgaaatcatgaattgggctttatttatcagtttcaccatctgttgccagattttaatgcggtagagaatgtcgctatgccactgttaattggtggtaaaaatcgcggtcaggcacagaagaaagcattcgaaatgctggcggctgttggtttggagaagcgtgctcatcaccgtccatcagaattgtcagggggagaacgccagcgtgtggcaattgccagagcgttggttaatgaaccttctttagttttagcggatgaacctaccggtaacctcgatttacgtaatgcagatagcatctttgcattattgggtgagcttaaccggcagcaaggcacggcatttctggttgtcacccatgatttgaatctcgccggcaggttaaatcgtcaggtggagatgcgtgatggctatttacaggatgaattgaccgtgacgggagcgttgtaa

SEQ ID NO: 6054 - DNA, 1248 bp, Photorhabdus luminescens
atggcgaatttgcctctctctttggtcactgccttgagatttagtcgcgggcgtcgccgtggcggtatggtatctctgatttcggtgatttctacgttagggattatgcttggtgtcgctgttctcatcattggtctaagtgccatgaatggttttgaacgagaattgagaaaccgcatcctttctgttgttcctcatggtgaaatttatacggttcatcagccttttgaacagtggcagcctgcattggaacgggtaaaaaacaccaccggtgtggttgcggcttcaccttatattactttcactggattgatggaaaaaggtgccagcttgcatgctgttcaggtgagaggggttgatttagccacggaatctcaggtcagctcattaccacaatttgtccaagataatgtctggcaaaattttcaggcgggtcatcaacaggtcattctggggcagggagttgctaatgctttaaaggttaagcagggtgattggttgactgtcatgatcccgaacaatgatcccgaaatgaaactgttgcaaccaaaacggattcgtttacaagttagcgggatttttcaattgagtggtttgcttgatcatagtttggctttggtccctttggccgatgctcaacaatatttagattatgggcaagggatcactggcattgcaatcaaggttgatgatgtatttgccgctgatcaacgagtaaggtctgccggggaagcatcacaggaatatgtctatatcagtagttggataagaaattatggctatatgtatcatgatattcagatggtacgtagcattatgtatctggcgatgattctggtgattggcgtggcatgttttaatatcgtttctaccctgattatggcggtaaaagataaaagcagtgatattgctatcctgcgaaccctcggcgctaaggataggcaaattagagcagtttttctctggtatgggttattgacggggatgacgggcagtattgctggtgctgtagctggcgtgttggcatcactgaatctgacagcgcttattcatgggctggaaaagctgatcgggcatcaatttctttccggtgatgtttacttcattgatttcctgccatctgagttgcatggcatggatgttctgtatgttctggcgacggctctgattctgagtttattagccagttggtatccggcaaggcgggcaagtagacttgatccggcacgaattttaagtggaaaataa

SEQ ID NO: 6055 - DNA, 852 bp, Photorhabdus luminescens
atgcgagttcgtcgtcggcttagtcggcttggccggcttcgtaaggttaagcgtttgaggcatcagagatttcgtagccggattttttatagggacaatcgattggcgcttaatatgaaaaaaccttacatcgtggtattgacaggagccggtatttcggccgaatcgggtattcggactttccgttcctctgatgggttgtgggaagaacatcgggtggaagatgttgctacacctgaaggttttcagaaggatccagaattggtgcaggcattttataatgctcggcgtcatcaacttcagcaatcagagataaaaccgaacgtagcgcattatgctttagccgcgctggagcatgaacttggcgataattttttgttgattactcagaatatcgatgatcttcatgagcgggcgggtagctatcgcacggtgcatatgcatggtgagttgttcaaaattcgttgttgccaatctgggcaagtgtttgagtggacagacgatttaacgacagatgaacgttgccattgttgtcagttcccttcaccattgcgcccacatgttgtttggtttggtgaaatgcctttggagatggaacagatctattctgcactggctcaggcagatatttttatcgctattggcacttctggccatgtttatcctgcggctggatttgtacatgaagctaaactggcaggggcgcacacggtagagctgaacttagaaccgagtcaggtagaaagtttatttgatgaaaagcattatggaccagccagtaagatagtcgatgagtatgctcgaaggttaattgatagtattaaagaatttaaagctgatttgacgcaataa

SEQ ID NO: 6056 - DNA, 1266 bp, Photorhabdus luminescens
atggacagattactagaacgtttttttaaatacatatcttttgatactcagtcaaagccgtcagcgaagacgattcccagtagtcatgggcagctcgaactcgccaaagcgctgaaacaggagttgatcgaattaggtttttccaatgtggtacaggatgctcatggctgtgttatggcaacattacctgccaatacatcttggcctgtacctgctatcggttttattgctcaccttgatacttcacctgatttttctggaaaaaatataagtccacaaatgttggaaaattatcgaggtggtgaaattgcgctgggggcgggtaatgaagtgttatcaccggttatgtttcctattttgcataatatgttggggaaaacactgattaccaccgatggtaaaacgttgcttggtgccgatgataaagcgggtattgcagaaatcattactgcaatggttcgtctgaaaaatagcaatatcttacatggtgatattcggattgcgtttacacctgatgaggagataggtaagggagcacgctattttgatattaattcatttgatgctgagtgggcatataccgtagatggtggtggtgtaggtgaactggcatttgaaaatttcaatgcggcggtagtaaccgttaagattgttggtaataatgttcactctggtagtgctaagaatgtgatgatcaatgctttatcactggcgatccatatccatcaagcattgccatcggaagagacaccggaacataccgatgggtatgaaggcttctatcatttgcaacgtattaaaggcacagttgagtgtgctgaaatgcactatatcattcgtgattttgatcggaataacttcgaagaacgtaaaaagaagatgattaaaattgctgaaaaagccggtgagggattgcatcctggttgttatatcgaactgactatcgatgacaattattacaacatgcatgatgaagttatcaaatatccgcatgttattgagattgccaaacaggcaatgctggattgtaatattgaacccattattaaaccgattcgtggcggtactcatggcgcacaattgtcgtttcgtggtttaccttgcccgaatatattcatgggggggtataattatcatggcaaacatgaatttgtttcgttggaaggaatggaacaggctgtcagtgttgttatgcgcattgctgaattaaccgcactgttgtctaaaaagtcggaaatgagtcaggcgttttgcagtaggagttaa

SEQ ID NO: 6057 - DNA, 1122 bp, Photorhabdus luminescens
atggactatcagttgaatctggactggcaggcatttttgcataatcattggcaaaaacggcctttactgattaaacaaggcttccgtcaattcattgatccccttactcccgatgaactcgcggggctggctatggaaaatgaagttgactgccgtctggtcagccagaaaaatggccgttgggatgtctctcatggtccattcgaaagttacgatcatttaggtgaaaaagagtggtcactgctggtacaagcggttaatcactggcaccgtccttccgccgcattaatgcaaccattccgcgtattatctgactggcggatagatgatctgatggtctccttctccgttcccggtggtggtgttggtccgcatctagaccaatacgatgtgtttatcattcaaggaatgggccgccgtcgctggcgcgttggggaaaagctaccaatggaacaacgctgccctcaccccgatctattacaggtcgatccctttagtgccgttattgacgaagagatggaaccaggcgatatcctctatatcccaccaggatttcctcatgaaggttattccatcgaagattcactaaattattcagttggtttccgcgcccccaattcccgtgaactgttcagtagcttcgccgattatgtgctggctaatgatttaggcagctatcgttatagcgatgccgatctgactttccgcgaaaatccggcgctggtccagccgcatgaattatcagcgctacacaccatgatgaacgagttattggcacagcctgacactttccaacaatggtttggtgaattcatttctcagtcacggcatgaacttgatattgcgccaccagagccaccttatgaaagtgatgaaatttatgaattaatgaaacaaggtgaaaatctccaccgtcttaacggattacgggttatcagggttggtgatcagtgctttgttaacggtgaattaatagatacacctcatattaaagcggctgatgttctttgctgccattatgaaattaatgcagaaatgcttggtgaagcgatagatgatgttcgttttatcagactgctcactgcattggtcaatagtggttactggtactttaatgattga

SEQ ID NO: 6058 - DNA, 1464 bp, Photorhabdus luminescens
gtgcttaagcacaaaaagcagcctttctcactccgtacccggtttttaatggcaactgctgcggttattcttgctcttaccatgtcttacggtattgttgccattgtcggttacctggtcagttttgataaaactgcttatacactgctacgtagtcagagtaatctatttttcagccttgctcagtggaataacaatcagctagatatttcagtcccccccaatttcacactgaataacccatcattggttctgatttataacaacaaaggtgccatcctctggcgtcaacaccatatcccaaaagtcgaaaactctattcctagtgaatggttaaaagaagacggtttatatgaactagatactgacctaaaaagcagccgggatttgctaaaaaactcggctaacacacaaggacaattaggtaaacttaattcacttgacgaaaatgaagataatgagctaactcactccgtctctgtcaacagatatagtgcaacagctcatttgccagcgttaaccattgtcgtcatcgataccattccacaggatttacaaaaaacagttctagtgtgggaatggttcggttatgtattgattgccaatcttattctggttatcccattaatctggctggccgcacactggagtttacggccaattaaatcgcttattcatcagatcagttcattagaaaaaggtgagcgggaaaaattggatgaaaatccaccaacagagctgcgggggctagttcgtaaccttaatgtgttgctcaataatgaacgcaatcgctatacaaaataccgaacaacactggctgatctgacacacagcttgaaaacgccactggctgttttacaatcaactctccgttctttgcgtgacagcaaacaaatgactattcaacaggcagaacctatcatgcttgagcaaattggccgtatttctcagcagataggctattatctgcatcgtgccagtatgcgcagtgaacacagtactattatgcggaaagtctcttctgttcctgctttactagatagcctatgcagcgctttaacaaaagtctatcagcgtaaaagtgtcagtctcacgttagatgtctcaccggagatcacctggcttggtgagaaaaatgactttatggaagtcatgggtaatgtgttggaaaacgcctgtaagtactgccttaaatttgttgagatctctgtgacgattgatcacgattcggtaatgattattgtcgacgacgatggtccaggggtgccaattgaaaaatgggacatcattttccaacgaggtcaacgtgttgatactttgaagcctggtcaagggcttggattgtcaattgcttctgaaattatcgaacaatataaaggtgatatcagtatcagtgacagtccacttggtggtgccagaatttgcgttatattccgatgccagcaaattaatgatgatgattag

SEQ ID NO: 6059 - DNA, 669 bp, Photorhabdus luminescens
atgcggatattgatcgttgaagacaacatgttactgcgtcaccatctaacggtacagcttcgtgacaccggtcatctagttgatgccgctgcaaacgccaaagaagccgattactatctggtcgagagcgaacccgatattgccattgttgatcttggtttgcccggagaagatggtttgagtttgatccgtcgctggcgccaaaaagatgaaaaactccccattcttgttttgaccgcccgcgaaagctggcaagaaaaagtcacggttcttgatgcaggagcagatgattatgttaccaagccctttcatcttgaggaaattattgcccgtatgcaggcactcctacgccgtaataatgggctggtttctcagattattgaattcccacctttcaaaatcgatctgtcacgcaaggaatttacagtttacggggagagcgtcaaactaacggcgtttgaataccgaatcattgaaatactgatgtgtaatagcgataaagttgtcactaaagagtcattaatgcgccaattatatcccgatgctgaactgcgcgaaggtcactccatcgatgtcttaatcggccgactaagaaaaaaaatattagatatttggccttatgaagctatcgtgactgtccggggccaaggctatcgcttcgatgtgtaa

SEQ ID NO: 6060 - DNA, 189 bp, Photorhabdus luminescens
atggttctgctgagtatgttagatacatggatctgtaacagcaagacgttaagtggaaatagagaatataactttagagtatgtttgggattggtttatataaggatagcaacagacggatgttttatccgtctgttgaatatcaactacttcaattcatcaaccagtgtgattgcacggccaatataa

SEQ ID NO: 6061 - DNA, 1371 bp, Photorhabdus luminescens
atggaattatcctcactgactgctgtttctccgatcgatggccgttacggcgataaagtcagcgtattacgtaccatttttagtgagtttggcttactgaaattccgcgtacaggttgaagtacgttggctgcaaaaactggcagaatgtgctgaaattaaagaagttcccgcgtttgatacagacgcaaacgcttacctgaatgaaattatcgcaaatttcaatgaacaggatgcaatgcgtattaaaactatcgaacgcaccactaaccacgatgtcaaagcagtggaatattttctgaaagagaaagttgcacatattcctgcactacatcaagtttctgagtttattcactttgcctgtacttctgaagatattaacaatctagcttatgcgctgatgctacaaaccgcccgagaagaagtacttttaccccaatggcgtcagatgattgataccatcaaaaaaatggcgagtgaatatcgagacttaccactgttatctcgcactcacggccaaccagccacaccttccacggttggtaaagagtttgccaatgttgctcaccggatggaacgccagtatcgccaactggaacaagtcgaaatactcggtaaaattaatggtgccgtaggtaactataatgcccatatagccgcttacccacaggttgattggcatcagtttagtgaaacttttgtgacttcactcggcatcaaatggaatccatacacgacccaaatcgaaccccatgattatattgctgaattgttcgatactatcgcccgtttcaacacgattctgatcgattttgaccgtgacatttggggttacatcgcacttaaccatttcaaacagaaaacggttgccggtgaaatcggttcttccactatgccacacaaagtcaatccaattgattttgaaaactcggaaggcaatttggggctggcaaatgcggtatttggtcatctggcaagcaagttaccgatttcccgttggcaacgagatctgactgattcaactgtattgcgtaaccttggagttggcctgggatatgctctgatcgcttatcaatctacgatgaaaggcttaaataagttagaagtcaatgagcagcacctgctggatgagctagataaaaactgggaagtgctggctgaacctatccagacagtgatgcgtcgctatggtatcgaaaagccttatgaaaaactcaaagaacttacccgcggtaaacgcgtcaacggtgaaggaatgaaaacctttatcgatggactggatttaccggaagaagagaaaatacgattgaaagccatgacgccagcaaattatattggccgtgcaatcacactggttgatgaattgaagtag

SEQ ID NO: 6062 - DNA, 627 bp, Photorhabdus luminescens
gtggcaaagaatcattacaacattacactagcgctggcgggaatttgccagtcaggtcgcttggtacaacaactgtctcatgaaaaccagtgtgatactgatgctgttaccaccatggttaatagcattttaaacaccaacccggcatctgttttagatgtgttcggcaatcatgaacgcaatctgaaaattgggctgaacgcaatgctagggatgtttaatagctctaacaatggtatttctgccgatcttacccgctatatcttgagtctgatagcattggagcgccggctaatgaaaaatcaggcagcttccgatgcattgggtaaccgtatcagtttacttgaacgtcaacaggcatatttcgaacccatgtcagaagggatgttcaatgcgttggccggtatttatgtcgatgttatcagcccattaggtccacgcatccaagtgactggttcccctgatatcctgcgcaatccactggtacaagcgaaagtccgggctattttactggctggcgtccgttgcgcggtcttatggcaacaagttggcggtggtcgcttgcaattaatgttttctcgtcaacgtctgatccaacaggcgaaagatattctttctcattgttaa

SEQ ID NO: 6063 - DNA, 1104 bp, Photorhabdus luminescens
atgtcagataacagccagaaaaaagtcattgtcggcatgtccggcggtgtagactcctccgtttccgcctatttgctacaacagcaaggttatcaagtggctggcttgttcatgaagaattgggaagaagatgatgatgaagagtactgttcagccgcgactgatctggctgatgcccaatccgtttgcgataagttgggcatcgaacttcataccgtcaattttgctgccgaatattgggataatgttttcgaacattttcttgctgaatatcgagcaggcagaacacctaacccagatattctatgtaacaaagaaattaagtttaaagcatttctggaattcgctgctgaggatttaaacgcggattacatcgcaacaggtcactatgttcgccgcagagatattaacggtaaaagccaattattgcgtgggctggataataataaagaccaaagctacttcttatacacgttaagccaccagcaaattgctcaaagcctatttccggtcggtgaactggaaaaaccagaggttcgtcgtatcgctgaaaaaatcggtctggtgacggcaaagaaaaaagattccaccggtatctgttttattggcgagcgcaaattccgtgacttccttggccgttatttacccgccaaacctggcccgattatgacagtagatggagaatcccttggtgaacatcaggggctgatgtaccacacattgggtcaacgtaaaggtctgggaatcggtggaacgaaagaaggcagcgaagagccgtggtatgtcatagataaagacgttcagaacaacatcctgatcgtggcacaggggcatgaacacccccgtttaatgtctaccggccttattgctcagcaactttactgggttgacagacagacattaactgaaaaaatccattgcgtcgtcaaaacacgttatcgtcagcaagatattccttgctctgtcacccctataagcgaagataaaatagaagtccattttgctaatcctgtcgccgcagtcacccccggccaatcagccgtcttttatcagggtgaagtttgtcttggcggtggagtgatcgaacaacgtttgcaggagtaa

SEQ ID NO: 6064 - DNA, 471 bp, Photorhabdus luminescens
gtgaatggaaggagattaattttgtttagcccccacatcacagttgcctgtattgtccatgcccaaaataaattcctggtcgttgaagagacaattaatggcaaagcattatggaatcaacccgctggtcatcttgaggctggtgaaacattgttacaagcggcggaacgcgaattatgggaagaagccgggattcaggctaagccgcaagcactgctgaaagttcatcagtgggttgcaccagacggcaccccctttatccgttttctgtttctggttgaaatggaacaacaaaccgtaccccatccgcaagaccgtgatattgattgttgccattgggttacagcagaacaaatattcagtagccattatcttcgttctccactcgtcgcagaaagtattcgctgttacctgcaaaacgaaaagcatcctctcactctactggatagttatgtttctccgtttatttaa

SEQ ID NO: 6065 - DNA, 537 bp, Photorhabdus luminescens
gtgttgatatttaacaaaccttatgatgttttaccccaattcactgatgaaatgggcagaacaacgttaaaagattttatcccgttccctaatgtgtatgctgccgggcgtttagatcgtgacagtgaaggattactaattctgacgaatgacggtaaacttcaagcacagctaacccaaccgcataaaaaaacagccaaagtttattatgtgcaagttgaaggcgttcccgatgaaatctctctcgataagttacgcaatggcatcatattaaaagatgggcctaccctacccgcaggtgtcgagttagttcatgaaccgacatggctctggagtcgccatccaccgattcgtgaacgtaaaaatattccggtaagctggttaaaaataacactttatgaaggccgaaatcgtcaagtgcgcagaatgacagcacatatcggttttcctacacttcggctgattcgttttagtatgggaaacttaccattaggcaagatgaaacccggtgaatggaaggagattaattttgtttag

SEQ ID NO: 6066 - DNA, 1254 bp, Photorhabdus luminescens
atggaaagcaaagtagttattccggcggaaggtaaaaaaataacagtcgacgctaaaggtaaactggttgttccgaataacccggtcatcccttatatcgaaggggatgggattggtgtcgatgttacccctgcaatgttgaaagttgtcgatgcagcggttcagaaagcctatcagggtgagcgtaaaatttcctggatggaaatctacaccggtgaaaaatcgactcatgtatacggtaaagatgtttggttgccggatgaaacgttggatctgatccgtgaatatcgcgtcgccattaaaggccctctgacgacgccagttggtggcggcattcgttctctgaacgtagcattgcgccagcaattagatctgtatgtttgcctgcgtcctgttcgttattatcagggaacgccaagcccggtcaaacaacctgaattgaccgatatggttattttccgtgaaaacgcggaagatatttacgccggtattgaatggaaagcggggtctgttgaagcggataaagtgatcaaattcctgcaagaagagatgggcgtgaataaaatccgtttcccacagcaatgtggtatcggtgtgaaaccctgttctgaagagggcactaaacgcttagttcgtgctgccatcgaatacgcaattgataatgaccgtgaatctgtcactctggttcacaaaggcaacattatgaagttcaccgaaggtgctttcaaagattggggttatcagcttgctcgtgaagagttcggcggtgaactgttggatggtggtccttgggtaaaaattaagaatccgaaaaacggtaaagagatcattgtcaaagatgtcatcgcagatgcgtttttacaacagattctgctgcgtcctgctgaatatgatgttattgcctgtatgaacctgaatggtgactatatttctgatgcactagctgctcaggttggtggtatcggtatcgctccgggagcaaatatcggtgatgaatgtgctctgtttgaagcgactcatggtacagcacctaaatatgccggtcaggataaggtgaatccaggttctgtgattctttccgctgagatgatgttacgccatatggggtggacagaagccgcagatctgattgttaaaggtatggaaggcgcgattgccgcgaagactgtgacttatgatttcgaacgtctgatggaaggggctaagctgctgaaatgcagtgaatttggtgacgcgattattcagcatatgtaa

SEQ ID NO: 6067 - DNA, 396 bp, Photorhabdus luminescens
atgagtggctcagatgataaaaaaatagagtttaatacgagcgatgtactgaatgctctcttacaccgagggcagaatatgcaacatcttgcaactcaggaaagtgttgataatctgcgccgtgagaccgaggttaactttgcatcacttgataagtgtttcgaatctattgataaacgctttgaatctgttgagaagcgattcgaattaatagatagacgcttcgaatctatagataaacgtttcgatgttatggataaacgttttgaatctatagataaacgttttgataaacttgaaggtaaatttgatcgacttcaatggtttattgttgcggcggcactggcgttgctattcaaagaatatatttttaaggcggctgctgttatccagtaa

SEQ ID NO: 6068 - DNA, 543 bp, Photorhabdus luminescens
atgaagcacgaaaaagtcatagcagcagtagcaattggaagtaatcttagtcagccttattacaacttgttaacagcagaaaatcatttgctggcattgaaggaaagtacaaacttccgatttagtccgatatataaaacagcaccgattgacagtacaggagcaccagactacttgaatgccgttgttgtctttgaaacatcgctaacaccggtcgttttgctcaccgaattgctaagtattgaaactctcaacggcaggaaacgctcgtttgtcaatgctcctcgaacgctggatcttgatttactcttatacggagacaaggttatatctacggagaacctgattgttcctcatccgaggtttcataagcgcttctttgttttgacaccactcaatgacttattacctgaaacacaacatccactccttaaagcatcgattaatgaacttgagcaaagattgcaaacactgtatgaaaaagagaaatatatatctcatttcgaccaaacatttcgatctgtttctactaacattcattag

SEQ ID NO: 6069 - DNA, 765 bp, Photorhabdus luminescens
atgaaaaatgaacattctacatcaatgcgaaagcgacgagttgcactgatcacgggtgctgccagaagattaggcgcggttatcgcaaaaacattgcatgctgagggattcaatatagtggtacactgtaatacatcccaattagaggccaaccaactcgttcaggaattaaattcgatacgagcccaatctacaatatccgtgcaagccgatctgagtaatttatgcaattgtgaacccatcataaatgcagcaataagcgaatggggacaattggatatattagtcaataatgcctcaacctattacccaacagaaattggatctgtttcccatagccaatggcatgatttggtcgatattaatctaaaaataccgttttttctgatccaaactgccatgccttggctgcatcaggttcgtgggaacatagtcaatattgtagatatcaatgctaagcgtcctctaaaaggatatcctgtctattgtgctgcaaaagcgggcctcgcactactcacagaagccctcgctttagagttagcacccaatatccgggtgaatggcgttgctccgggaacgatcatgtggcctgaaaaaagtaataaattggacgataacgaaaaattcaccactttgaaaaaaatcccccttggccgaattggtgatggcaaagacatcgctgaggcggtacgatttcttgcaatttcagagtatattacaggtcacatcatcaggatcgatggcggtgcaatactttccagataa

SEQ ID NO: 6070 - DNA, 1362 bp, Photorhabdus luminescens
atgataccagctcaagaattacaccgattagcacacgaagcattaaatcgtcaagatttcgaacactgcgccaaatattgttacacacagctcagggctgcaaatgaaccgtattgtctgcaagatgaaatcactctagattgtatttatatgctactgtttatacatgacatttataatcaacaatgccatctccctttcactgagaaatggacaagacatgatctattctccttggcagaaacttattatactaagaaaatatcacttgatacgcatattaaactgaaagttctcaaaggaaagtacctcgccaatacacaatcatcggaagcagccatcttggcaatacaagatgcagtcattttagctgaaaacagttgtactccctatatcaaagcccttgcattagctgaattaggccacaagactatgaaaatcagccttaagcatgggagagaattgatccggcaagcccacgatatcctgcatcagagtccagtaagtcatgaactgtcattggaaaaccaaaggcatatccattttatttcttcgatacatggagtttgcgaattcgattttggaaactacgaagcagcaatgaaacatctgtccaaagtttacgagtcaagcctgcacctcggcatcaaattcgacatttccatcttctgcaactacctggcacaagtccatatcagtctaggagattatgaaaccgctgagtcgcttctactcagctgccttgaatatttcatccctgagaaaacgccacacgcatggaatgcaaataatcgtgcactccttggcaaggtctatatggaatggggaaaatatgacaaggcacgtgaacacctcataacagggtggaaagagagcagattagctcgcagcttaccgttgataacgcttgtcagaaattactatgcagaatttcttttacaacgagaaagtagtccgtccaaacaaaatatctccttggccgaagaaatcttgcaggaaaatatctctgaagcacaccaagcgggaatatatcgtagcgaaatcctttctttatcgcttatgggacaaatttccctcagccgaaatgactttgacgccgccaaaaaatatagccaatctgctattgatatgctcattcacatgggatggctacccgctctccgcgcacaggagatctacatgaaccactataccgtagcaatcagctgtggagatatggagcaggaaaaatactggttatcggaagcttataatgtggtaatgagtatagctcgtcgtattcttgatgataccagacgcctttcatttttaaatcgggtaaaaatcaatgaaatgattgttcacaaatatatggaaacttaa

SEQ ID NO: 6071 - DNA, 2808 bp, Photorhabdus luminescens
atgaaaaataccattattcttgagaagctaagcgccaacgacgagacaatgttaatctcagaatggttggtcgaagagggagattatgtcactgtcgggcaaatgatcgcgagggtagaagcttccaaagccatagtggaaatccatagccctatgtcaggatatctgcttaagaggtatcaagcaggagatgaggttgctgtaggaaatgttatcgctgaaatcgtccaagaacctacttccaccccaaccaaggaagatcccgacgcatccatgttccaagtggatagaagcaacgcaacggccagattctctaaggccgctaccgcatatctcgaacaccacagaattaatccttcaaaactgggattcagcggcctcataactttggattacctcagacaacatttcgctgtggaaaaacacattcaaaagccattcacaactacactattagctgacccccacgaatcggataagattttatcattagtcgaaaatatcacgactacggaaccgatcgaagtttcgaaacaagctgaaatacgcattctctctgacgctcagaatggctcattacccagttctatcaccgtgcagttcaattccatcaatctacgggaaaaattgcgaaatgatacaaattccagtggacaaattttcccttatcttttgtggatactcggtattacactgcaagactggccacaattacgctcttattatgagaaacaacggattcatcgctacagcacagtgaatattggcgttgcaattgacatgaatcatggcctgcgagtccccgtgattcggcaaataaatcaattagcattgccaaatgtggaagccgctgtcgccgattatgtctgccgataccatgaaaacaaattaagccttgaagatgttacgggagcgacctttaccgtttccgacctgtctggtcagaatgttcttcattttcagcccatgttaaataagcagcaatgcgccatcctaggaatcggaggtgataaagatcttgagggataccccatgtcactcaccttagtattcgatcatagagtcatcactggtgccatcgcagcacaatttttaaatgactttaaacgaagactactcaccagcaatgccactaaattacacttatccgatacagaagctcagcaaccgaccccggttcacaatcgcttttccccgacaaatttaaaattagctgacgatatcagcaatatttggcaatcgcagcttgaatgccaaggagtgaatccatcagacaatttcttcaaactcggcggtgactcgatgaaggctgcccacacgatatcgcaagtcgcggctcatattgccgttgctgtacctctgcgattgcttttcgaaaaccccacccttcaaaaattcacccagaaaattacacagctgattaatgaaacaccacgaaacattgacgatcttttacctgcgtcgccggataactacgccacactctctcttcaacaagagagattactcaaattatgcgctgatggagatccctctgactataaccttttccgcgcttatcggctcattggtcatctcgatagagaggcattaaggcaagcactgcatcacctaacaaaacgacacgaaatccttcgtagccgattcgattggaccaccgcttcattgattgggtactttgaagaagatgccgatctgccaattgagataattgacctttctgcaataaccaaagaaggtcaagacgaacaattaatgtccgccttacaacgtaattcacaatgtatctggcatgcaggcgactggctgtttcacgtaagcctgattcttctcaaaacagacgagcaggttttaacactttgtctacatcacttgattgcagatggtgagtctattcgaattctcgctgccgaattatcaactttctatgcccatgcatgcggtgacaaatcagtcgctttgccaaaagatctacaacgacaatatcgccactatgctaactggcaacaacaatatatccgtgatgtatctgtaaaacgtcaaataagttactggaaacataaaatggaaggtgcaccttccctactcgctctccctatatgcaatcaatcagaaatctatcaaacaagatgttccgcatcagaagtgtttcagatcccacaagagattggtgtccttgaattcagccgccatataggagccacaccctatacggttcttatgtcagcttgggcaattgttctttcccattattcatcccaacaagaagtcgttattggcactgcggcggacaacagacaaccggaatatggaaataatctcggtttctttgcaaacaattgggctgcacgcatattcgttgaagatacacaagcattcacattactgactaaatcgatacgccgaatcactctggacgcaaaggataatattgattggtctttcggcacaattgccgatgcactcgctccttatgaaaaacacaaagtacgatcacgcatctttcaggtcatgttaatcatgcttcccaacgcaaaattgaccttacgaaacatcgagaccatacccatgaacttagatatagggcgtggcagagaaccttttgacggtacagttttagatatgacgctatggatatctgtagagcatgaaaatatatatgcaaagctagtatataacgttgatctctttcaacagaaaaccgtgaaatccatagttcgatcattcacagcagtccttcggaaagcatgttcggagagcagtattacgctgcttaaacttaaagatacttgtgaaaccattgagtaa

SEQ ID NO: 6072 - DNA, 1953 bp, Photorhabdus luminescens
atggacagcgatatcttacggacatctctactaatacgagaaacggaagaagcattgttacgtctttattccactggagagctccatggaacagtgcatacatgcattgggcaagagttaacaggcgcaatagtatgcaagtttctgaaaaaaaatgactgggtattctccaatcatagatgtcacggccactttctttcgcggacaggcgatgttacaggactgatcgcagaggtgatgggaaaagagaccggcgtgtgtggaggccgtggaggaagtcaacatctatgcaaagagggatttttttctaacgggattcaaggcgggatcttaccggtagcaaccggggcagctttcgccaagaagttacgccatgataattccatctcaatagcatttatcggagatggcactctcggagagggtgtcgtatatgaagtattaaatatcgcagcaaagtgggatctaccgctattgatcgtgttagaaaacaatcaatacgcacaatctactcatatctcagagacattatcaggcagcataagcaaacgcgcacaggcttttggcatgagatatacgaaatctgatgtttggaattgggaacatctgatagctgagacagaagagctgataaattatactagaaaccaaagacaccccgcttttctacaaatcgatacttaccgtctcaaagctcactccaaaggagacgatctaagaaacatcgatgaaatcgaacactttaatactatcgatcccatcaatgtcattctgcgtgaacgtgctgctgaattggagacagaagtcgccggagttcaagaaagagtaaatgacgcaataagaaaggcaaaacaggctcgctcatcaccgttttacggcgctgaaacacaattgcaatcgcgatcttccacatttcatccgctacccagccaggggtctaagattcggctatcccgtgcaatcaataaggcatttttggaaatcatggagctggataaaaatatcctgttcataggagaagacgtgaaagcgccttatggcggcgcatttaagatatccgatggcctgtccgatagctttcccgaacaagtcataaatactcccatctccgaaagcgctattgtcggcatcggatgtgggctcgccatgcatggatattgtccttttgtggaaatcatgttcggcgacttcttgactttagcgtttgaccaaatattgaatcacgcagccaagttcagggacatgtacaacgatcaggtgaaagttccattagtgatccggacaccaatgggcgctggccgcggttacgggcctacccatagtcaaactctggaaaagcatttcatgggaataccaggtctgacgatactggcaattaacaatcttatcgatccggcaatagtctataaaacacttgcaaaacaggaggaaggtcctgttcttcttattgaaaataaaatcctctataccaagagcattcgaaatgctccattggggttcacaagctatgcctctgacgatccattcccagcggtcgttgtaagccctctgtcaacaaacgtcgacgttgtaatcttcggttatggtgggctgagcgatctactggtagatgtagcagaagaacttttcgtagaacacgatgtgattgctcaagttatctgcccactccagatatatccgtttagtgtaatcccatatatcaaactcgtatcgaaatgcaaaatcgccattatcgttgaagaaggtcagggatttgcgggtttcggttcagaagtcgttgctcaattgactgaaattttgggtaagttattacctcgtacaatacgcatatatccttccagtatggcgataccctcaagtaaagcccttgaaaaccttatgattccaggaaaagacatgctgattgaacgtattcttaaggcatacatatcagaggctgagcctcaacaataa

SEQ ID NO: 6073 - DNA, 585 bp, Photorhabdus luminescens
atgacaattcaatatattactcgcaaaggctcttttgattccgctcatcgcgtaatgaatgaaagggtcaaatgcttcaatatccacggacacacttatctgtatgaacttactttctcatttgaacagatgcaaccaattggatacgcgatagatttcaaagagataaagcgcataggtgccgcatggattgatgagtttctggatcacgcctcaattcttaatcccaaggatgcagactttatatccgctgttcatgctacacgcagtaaattccgactgatgagcttaaatcgtcatggggagtactgtaatccaacagttgagaatattgccaaagaaatattcctcactatggaggttctttttaatgaatgggataacctaaaaattcatcacatcagactctatgaaacacccaattgttttacagattgcaatgccgagtcaattcatgaagaagaacgcagcgcatttctcagtcaacggtttgaggaactcaaagcttattcacaggcaatgggccggtttgaatatgactcaagaaatgttgtgacatccgattctactcatgagcgcttataa

SEQ ID NO: 6074 - DNA, 705 bp, Photorhabdus luminescens
atgccgacggtggagccaggagacttggaagttgccacacatggatttgccgatggaatatccatgcaattagcaaaaaagcgcgcattacacggacccaatgaggttctaaccaaaacagaacttaaccttattatagatgaagctgctatatcattcggagaattcctgactgctcttggcgttgactggaaaaatgatcctaactcaaaagacacgccgagacgtgttgcaaaggcttatgttcttgacctatggaaaggccgatacaaaccaatgggacccatcactacatttccggcagataactacgatggcattgtattcgacggctggatagcgctcgattccatgtgctctcaccatcatcaagcaatcagtggctatgttcacgttgcctatatgccaagtcaatacgggcgtgttcttggcttgtcaaagttaaaccgaatagtcgaacatttcggcagacgtgggctcatacaagaacggttaacagcagcaatccacaatgcagtaaaccaagtatgtgaaagaaaccaaggcgtcgcagtattagtcgatgcatcgcacaattgtgtacgttgcagaggtgtacgccaccagagaagccgtatgaagacacaaatgttttcaggtgcattcgctgaagctgattcaccggcaaaacaagagttctatgaattgattagaggtattgcatga

SEQ ID NO: 6075 - DNA, 894 bp, Photorhabdus luminescens
atgaagttacgacatttacggtgttttgtagtagtagcagaagaattacattttgctagagctgcggaacgcctgcatatagaacaatcaccgttatcaagaataatcaaaaaattggaagacgatcttggtacgatgttattcgtacgtactacaaggaatacccggctcacacgtgcaggggaaattttactggagcaaactcctcgcatcttttcagtactcggccaggctcgtgatagtgtgaaagcggttgcggccggattccatagtcaacttcgtattgcgttatctgatggcgttacaccatccaaattagctgagctgttagcaaaatgtcgtgaggacgagccggagacggatattcgtttacacgaggtacctttagctcaacatatgaatggattacgtgataacctttttgatgtgggattcgctcaatctacgatagtgcgagatggcatcattgcaataccggcttggtatgattcattggtggcggttattcccgccaggcatccgcttttggcatataaagaattaccgctgaatgaatttttgcgctattcactgattgtctgtggtcaggaaactcacgagggatttctgagacaagttctgtctatattccaaaatgcaaagttagttccatgtatctccgaaaaggttgccagttttgatctcttgttaactttagtggctgccgggtatgggattggtgtggcgggagagtcacagatcaatttggctcggcatggcgacgttgctataagaccatttgctggtggtattcctaaactggtgacgtatatgcttaggcttgactccccgttaacagaagaacttgtacggttcaaagaacgggttggaaatttgtaccacaatgtttattga

SEQ ID NO: 6076 - DNA, 1473 bp, Photorhabdus luminescens
ttgactaacttgacggaactaattagcttttttaacagtatcctttggggctccgtgttgatttatcttcttcttggggcgggtatttacttcactatacgcacgggttttatacagattcgccattttgggcacatgttttcagtattgaaaaacagtaaaaaatctgacagtgcaggtatttcatcattccaggctctgtgtaccagtttagctgcacgggttggtaccggcaaccttactggtgtggcaatcgccttaacggcgggtgggcctggtgccattttttggatgtgggtggttgctctgattggaatggcaacctcttttattgagagtacacttgcccagctgtacaagacaaaagacgataaggggaattaccgcggtggtccggcctactatatggaaaaggggcttggagtacgctggatgggcgtgatgttctccatatttcttattattgcttttggtctggtatttaatgctgttcaggcaaattctattgttcaggctgctgctttcgcatttgatttcgatcctttgtatgtcggcattggtttggtgattcttagcggattcattatttttggtggcttgcgctctattgctcgggttgcagaattagttgtcccttttatggcgatagcttatctgatcttggcgttctgggtcgtcgggcataactttgaacgaatgccggaagtgtttgcattgattttcaaaagcgcattcggtttgcaggaagccgtttcagggaccgttggttatggtgttgcacaggcgatgacacaaggtgttcaacgcgggttgttttcaaatgaagccgggatggggtcagcgcccaatgctgctgcttctgcttctccatatcctcctcatccagcatctcagggttatgtgcaaatgctaggtgtttttatggatacgctggttatctgtagcgcgactgctgttatcatcctgtcatcgggtgtacttgatggcaatatttcaggaataagtggaatagaattgactcagcgggcattgtcttccgctgttggtgattggggatctgaatttattgcactggctatcttctttttcgcattcacatcaatcattgcgaattatgcttatgctgaaagcaatattgtattccttgaacgtaatcataccgcgggcttgatgatcttacgtctggcggcgttgggtatggtgatgtttggtgcgttggctgaattgcctttagtttggaaaatggctgatttgtctatggcattgatggcaattaccaatctgaccgctatcttgttgctttctggcgtcgcatttaaactcgcaaaagattacaaccaacagagacgtgtcggtaagttaccgacatttgatattaatcagtatcctgaaattcagaaaaaggtcgaagttggtatttgggaagaaacggcaagtcttgccaaatcgaaccaagtggctggccacaagtga

SEQ ID NO: 6077 - DNA, 822 bp, Photorhabdus luminescens
atgatgaagaagatcatattggttggcttatttatgctattggcggggtgttccagtctggaagatcggggtgcttataaagttgatagctcttttccttcacaaggtcaaaatgacagagtaaggtttttggtgttccactataccgctgtcgatgataaagattctttacgtatactcactcagggcggtgttagtgctcattatttaatcccatcgttaccgaattatgtgagaggaaagcctgttattctacaactggttcctgaagagaagagggcatggcatgctggtgttagtggatggaatggtcggaaagacttgaatgacacttcgattggcattgaaattgttaataaaggatttacggaaatgctacttgagaaagagtggtatccgtttaatgagcagcagatcgatctattaacgcgtttggcgaaagatattattcaacgttatggcattgaacctattaatgtcgttggtcacagtgatattgcacctttgagaaagtatgatccaggcaaacttttcccttggaagaatttggctgagcaaggtatcggtgcatggcctgaagatgcaaccgttgaaaaatatatggctggcagaaaatggcatgataaggcttctgttgagttaattcagaagacattggctaaatatggctacaccattccacaaacgggtgtacttgatgaagatacccgtaagaccatcagtgcattccagatgcatttcagaccagatgacatcagcggtaaccctgatgcacaaactgaatcaatagctctggctttggttgagaaatataaaaaatag

SEQ ID NO: 6078 - DNA, 429 bp, Photorhabdus luminescens
atggacgattctccagttagtgcaatgaaaagctatttcagtcaaaaattgagtagaaaagattatattattagttttattaaaatagcggttattttcggaatattaatctttctctctggttacctagcagaaaataattatgccgcccatatgcaatatgagttatcagtgtggctgtacatgatctctattggtttatgggcaatgtgctccttcgctacgatttactatttaatcatgaaaacagcttacagatttaatgacgtggggttatatggctggttaatctctatttttatctatctgtgcagcgtcttaccaaactatttttccgaaaaaataataatgtattcacctcttattagcctaattgggattattcttgcatttattctgcctggaggaaaaaatcataataaagagtaa

SEQ ID NO: 6079 - DNA, 495 bp, Photorhabdus luminescens
atgattattcgcttatctaagactttgatgatttttgcaatagctttgtttgcgacattagcggcttttggcaatattacagactatgcgactaatttcgcatttgtacagcatgtattaatgatggatactattttcccagatacaactattacctatcgtgcaattcattcaccgttgctacaccacattggttatattgtcattatttctttagaaactttaacggcagtgttatgttggattggcggtattcatttactggtaaatttaaaatctaatgctgctgtctttaataaaaagaaatctattgcgatagttggtttgaccttgggattcttgacttggcaagtggcatttatgtcaattggtggagaatggtttgggatgtggatgtccaaacaatgggatggtgtgtctagtgctttccgtttttttatcactatcattctggtattgatttacttaattcagtatgacaaagaacaagaataa

SEQ ID NO: 6080 - DNA, 135 bp, Photorhabdus luminescens
ttgaaacgggcaattacccaaccaatgcaactgtgctttccggcgaaagacaaagagcttcaacctttgtgttctgaccttttatttgatgccagacatcatacttcccttaacaaggctctctgggtttcatga

SEQ ID NO: 6081 - DNA, 390 bp, Photorhabdus luminescens
ttgttaatgccacaggataatcacttagcacttgtatgtgctctcagcaaatggattgagaatcaccttggccgggtaatccacctggaagaactggcaacttactccggttactcgctttggcacatgcagaaaatattcaaggaagtcaccggaatttctcttggtaaatatatccgccaacgacgcctggctggcgctgttcatcttttaagaaacagcgcgttgcctatttttgatatcgccttagatttcggctttggctctcaatctcatttcacttatatgttccgcaaagagtatggcataactccctatgatttccggcagaatccagagattgagctcgaagttaaattaccgctgcatttcactactcactgttcatga

SEQ ID NO: 6082 - DNA, 144 bp, Photorhabdus luminescens
ttggacataaaaaaaaccattgcaatcttagcattacttggaatatgtctgttcttgtacctgctagctttggatagctattgtgatcagggggaacagtttgattcaggtatttgttctgtgactcgatatctgcctttctga

SEQ ID NO: 6083 - DNA, 1380 bp, Photorhabdus luminescens
atggcaggacaatcgcagcgctcaacacttaaacgcggtttaaaaaaccggcatattcaacttattgctttgggggggtcggtcgggactgggttgtttctcggtattgcacaaactataaaaatggcaggtccctccgtaattttaggctacgctatcgcaggctttattgcatttctgattatgcgtcagctaggtgagatggtagtcgaggagcctgtagcggggtcgtttagccattttgcatataaatattggggcgattttcccgggtttttatcaggctggaattattgggcgatgtttactctggtcggaatggctgaactaacggctgtgggcatgtatatccactattggtggcctgatattccaacctgggtttctgcaaccatcttctttgttttaatcaatacggtaaatttaattaatgtccggttatatggtgaaacagaattttggttttccatcattaaagtgaccgcaattatctgtatgattgtttttggctcttacctgttagtcagcggaaatggcgggcctcaggccagcattactaacctttggcagcatggtggctttatgcctaatgggatctccagccttattatggcaatggctgtcatcatgttctcttttggtggattggaactggtgggtattaccgcagcagaagcggaaaatccacgtatcagcattcctaaggccaccaatcaggtggtatacagaatattgattttctatattggttctctgacggtgttattgtcgctttatccgtggggcaatgtcgttgaaggtgaaagcccatttgtgatgatttttcataacctggatagtttctgggtggctaacattctgaatattgttgtcctaacagcggcattgtccgtttataacagcggtgtgtattgcaacagtcggatgctgtacggtttagcaaaacaaggtaatgctcctgaaatgctgacaaaagttaatgaaagtggtgtgcctatcagagccattgtcatgtctgctttagcaacgtccattggcgtattgattaattatgtgatgccgggcaaagcatttgagttattaatggcgttggtggtaacaacgttggtgattaattgggtcatgatctgtatggcgcatttaaaattccgggcagaaaaagttaaacaggggatagcgccgtcatttaaggcattttggtatccgttcggtaattatctgtgtctggttttccttgcttttatacttgtcattattttaatgatggatagcatccgtatttcagtcatcctgatgccattctgggtgggggtgttatggctcgggtttttaatgtcccattctcgccgtgataaaatgaaaacagaggagctgggataa

SEQ ID NO: 6084 - DNA, 624 bp, Photorhabdus luminescens
atgaagtttgatttaaccgcagcctgtaccctatcagccacgcttttagtctcatctgggacagtatttgcaacaacagcaaatactgctaacaaatcattaacaaccattgaatctcacacaccgatcagttatggcaacaattcgagcagtttatgggaaaaattcaataataatgtcgctcttacttgggatgcacccaacaatgaactttatctgccggtaattacttggcataacagacatacctacgataaagagaaaaccgatagatataatgagcggccttggggtttcggctatggtaaatatcgttacgacgaagacaacgattggcattccctttatgcaatggcttttatggattctcataaccgtttggaacccatcgttggctatggctttcagaagatgtggatacccggtgatttagagggtttccgaatgggaattggtttcactctgagcgttacagctcgtcatgattattattatgtccctattccactcccattaccgttattctccatagaatatgatcggttatcgtttcaaggaacgtacattcccggcacatataacaacggtaatgtactcttcgcttggttacgctggcaatggtaa

SEQ ID NO: 6085 - DNA, 210 bp, Photorhabdus luminescens
atggcaaaaatcactggtactgtaaagtggttcaacgaatctaaaggttttggttttattactccagctgatggtagcaaagatgtgtttgtacattttagcgctattcagagcgagggttttaaaactttggccgaaggtcaaaaagttgagtttgaaattcaggacggtcagaaaggtccttcagcagcaaacgttacagcagcataa

SEQ ID NO: 6086 - DNA, 798 bp, Photorhabdus luminescens
atgagaatcaattcactgacaattgccggtactgatcctagtggcggtgctggcattcaagccgacctaaaagctttctccgcacttggtgcttatggcacaacagtaatgaccgcgcttgtggcgcaaaacacctgtggtgtgcaatctgtttatgatatcgatcctacttttgttgcggcacagcttgaatctgtgctgtcagatatcagaattgatagcgctaagataggcatgttatccaatgcggccaatgttgttgtcgttgccgatgcaataagccgttatgccgttccttatgttgtattggatacggtaatgattgcgaaaagtggcgatccgttgttggcaccggaagcggtttccgaggttgttgaacgattattaccgaaggtttcgttgattaccccaaatttgccggaagccgccgtgatattgcaatgctctgtagcagaaactgaaacggacatgcaaaaacaagggcgtgaactattatcgctaggatgcgaagccgttttactgaaaggcgggcaccttacagaacatgaaagccctgattggttatttactgctgagggagaatggcgttttactgcgccgagaattaatactcgtcatactcatggtacaggatgtacgctctccgccgcactggctgctctgcgtccgcgttattcgaattggcaaacaaccctgcctgttgccaaatcatacctccaggcggcgttagaacaggcggactcgttagaggtaggaaaaggaatcgggcctgtgcaccattttcatcagtggtggtga

SEQ ID NO: 6087 - DNA, 1050 bp, Photorhabdus luminescens
atgactgatatcgctaagttgttaggcaaagatgcggacagtttattgcaacatcgttgtaataccattctaagtgaaaatctttatctgcccggtgccgattttgttgaccgcgtaatgatcgacaataaccgacctaatacagttctgcgctccatgcaaacattgttaaatcatggtcgccttgcaggtacgggttatttgtctattttgccggtggatcaaggtgtagaacattctgctgccgcttcttttgcagcaaacccactctatttcgatccaaaaaatatcgttgaactggctattgaagccggctgtaactgtgttgcctctacttatggcgtgttatccgcggtttctcgtcgttatgctcataagatcccatttctggttaaactgaaccacaatgaagcactgagctatcccgctcaatatgatcaaactttatatgctagtgttgaacaagcattcgagatgggtgctgtcgccgttggagcaacaatttactttggctctattgaatcacggcgtcaaattgaggaaatttcagccgcctttaaacgggcgcatgaattgggcatggtaacagtattgtgggcctacctgcgtaattctgccttcaagaaagagggggtagattatcacgccagtgcagacctcacaggccaggctaaccatttagcagccactatcggtgccgatatcgttaaacaaaaaatggccgaaaataacggcggctatacggcgattggctttggtcataccgataaacgtgtttacactgatttaactaccgatcatcctatcgatctggtccgttatcagatagctaactgctacatgggtcgcgccggtatgattaactcaggtggtgcatccggtaataatgatttaagtgactccgttcgtaccgccgtcattaataaacgcgcaggcggtatggggttaatcctcggccgtaaggctttcaaaaaatccatgaaagagggtattgagctgattaatgcggttcaagatgtctatctggataagcaagtgactatcgcgtaa

SEQ ID NO: 6088 - DNA, 1377 bp, Photorhabdus luminescens
atgtttactccagaattactttcccctgccggttcgctaaaaaatatgcgctatgcttttgcctatggcgcagatgccgtatatgctggtcaaccacgttacagcctgcgtgttcgcaataatgaatttaatcacgaaaatctggcactcggcattaaagaggctcatgagcttggtaaacgcttttacgtcgtggtcaatattgctcctcacaatgccaaattgaaaacttttatccgtgatctaaagcctgtcattgatatgggacctgatgccctcattatgtctgatcccgggctgattatgatggttcgtgaagcttttcctgaaatggaaattcatctttccgttcaagctaacgcggttaactgggcgacagtaaaattctggcaacaaatgggactaacgcgggttattctttcccgtgaactttctctggatgaaattaacgagattcgccagcaggttcccgatatggaactggaaattttcgtacatggggcattgtgtatggcctattccggtcgttgcctattatccggctatattaataaacgcgatcccaatcagggaacctgcactaatgcctgccgttgggaatatcatgtccaagaaggcaaagaagatgatatcggtaatattgtgcatatgcatgaaccgataccgacaaaaaatatcgagccaacattgggaaaaggcacaccaacagataaagtatttaccttcgaagaagcaaaacgccctggtgaatatatgtcagctttcgaagatgaacatggtacttacatcatgaattccaaagacttacgtgcagttgagcatgttgagcgattaactaaaatgggcgttcactctctgaaaatcgaaggacgaacaaaatccttctattactgcgctcgcacagcacaagtttaccgccgagccattgatgatgccgttgcagggaaaccttttgatccaacgctgctaacaacattagaaggacttgctcatcgcggctataccgaaggatttttgcgccgtcatacccatgatgcctatcagacttatgaatacggttactcgatatccgatacccaacaatttgttggtgaatttacgggtgagcgagtcaacggattggctgaagtggctgtcaagaataaattcatgatcggagaccgtctcgaattaatgacaccatcaggcaatatccagtttacactggaaacaatgcaggataaaaaaggccaaccaatggaagttgcgcctggggatgggtatattgtctatttaccaattcctaaacaaattgatattaattacgccttattaatacgtaatctaaatggtattaattctcaatatcctcaaacgaaccgaaactcagacaaataa

SEQ ID NO: 6089 - DNA, 345 bp, Photorhabdus luminescens
atggctgtgggtcattatgatcttaagagaacaaaaaacaagcagtattacttcaatttaaaagcatcgaacggtgaagttatccttaccagtgaaatgtatacgaccaaggcagcagcgaataaaggaattcgttctgtccaagcaaattcaccggcagaaaaaaacttcgaaatcagagaaaacaaatctggcaagtcctatttcgtgctgaaagcgagaaactatcaagttatcggcatcagcgagtcttacgataatgaagtcgcggtcaaaaaaggcattcaatctgcgattaaacatggctctagcgtcaatgttcgagatctaacaaagtcagaataa

SEQ ID NO: 6090 - DNA, 705 bp, Photorhabdus luminescens
atgagtacagaatttgagcattatactgttttgattgttgaagatgagccaaaacttgggcaattgctggttgattacttgcaggcggctgattacgaaacccagtggctactgcgaggtgatgaagctgtctcccatgtacagcaacataatccagatattattttgctggatttgatgcttccaggctgtgatggcatcactatttgtcgggaaattcgccgcttctctgatgtaccgattattatggtcaccgccaaaacggaagaaattgaccgtttacttggattggaaatcggggcagatgattatatttgtaaaccttacagcccacgtgaaattgtcgcgcgagttaaaacgattcttcgtcgctgttaccgaccacaagatattgtcaaacaaagcgatttacacattgatgaagcctgtttccaggcgcgttaccgcgataaaatactggatttgaccccggttgaattccggttattaaaaacgatggcaagtcgccctgggcaagtattttcccgcgataagttattgaataacctatatgatgatcaccgaatcgtgacagaccgtaccattgatagccacattaaaaatttacgccgtaaactggaacaattggataacagtaaaacattcattcgttctatttatggacttggttaccgatgggaagcagatatatgccgtttgttataa

SEQ ID NO: 6091 - DNA, 1389 bp, Photorhabdus luminescens
atgaaactcggcatcagtggtaaactgtttatggccattttcgccacttgcatgctagtactcatcaccatgcactggggcgtaagaagcagcttccagcatggttttattggttatataaaacaaaatatccagctacgtactgccatgttagccgaagcactggctgaacaatatcaacaacatggcaactggaaattcttaaagaggaatgaccgggcaatttttcaaatcatccgctccattgaacaaaccagtgaaagccgtcaaggtccaccacctcgcggttggcgaactcaattttgggtggtggacagtgacatgaaactgctggtcggtcatgaaggtaaaatcccgtcagagacttatcgcaaaccgattatctatcatcatcaagtcgttggttgggtcattgttagcacatcagataaaattacccgtcaagctgatatcagttttgatcgccagcaacaactgacaagctggataattgccggtttatctaccttgctggcaatgatagccacgctattattatcccgcggtatgttaaaacccgttaaacgtttggttgaaggaacacataaactggcagccggtgattttagtgtccgagtcacaccatcaagtaaagatgaaattggtcagcttgcccacaattttaaccaactcgccagtaccctggaaaaaaacgagcagatgcgtcgcgattatatggccgatatttctcatgaactgcgcactcccctttccatattgcgtggtgaattggaagcgttacaggatggtgttcacaaaccaacgccagaaactctcaattcgttattggctgaaattaccacattgaccaaactggttgatgatttacatcaactatctctatccgatcgcggggcgctggcataccggaaagaatttatcaacatcagtgagttaattcaggttgctatcgcatcttatcatggccgtttccttgataaacaaatccaagtggatgttaaacttcctgaaatgattacgttgtttgctgacccaagcagattgactcagctatttcataatttactggaaaatagtcttcgctataccgctgataatggaaaattgatcattaaaggttgttctgacgataaccacttcattctgaattgggaggacagcaagcccggtttgtcaccagagcaatgccaacgggtttttgaacgattctaccgcagtgaatcctcacgaaaccgcgccagtggtggctcaggacttggtttagccatttgctataacatcgttgaagcccataacggtacgatccatgccgaaccctcacctttaggtggcctgagaattatcgtagaattgtcgctcactgaatccctcgacggcgaaacgttatga

SEQ ID NO: 6092 - DNA, 3111 bp, Photorhabdus luminescens
gtgaaattttttgccttatttatccaacgccctgttgccaccacgctattgagtttagccataaccctatgtggggtattgggatttaccctgttgccggtttctcctttaccacaagtggattttccggtgatctcggtttacgcctcattaccgggcgcttcaccggaaacaatggcctcatctgtcgcgacgccattggagcacgccctaggccgaattgccggagtcaatgaaatgacctccagtagctcccttggtagtaccaatatcacgctcgaatttgatctcaatcgtgatattaacagtgcagcacgggatgtacaggcagcgctgaatgccgctcaaagtctgttgccttcaggtatgcctagccggccgcattattacaaagtcaacccgactgatgccccaatcatgatcctcacattgacttccgatacctataatcaggggcagctttatgattttgcctctactcaactggctcagaaaatcgcccaagttgaaggcgtcagtgaagtctctgttggcggcagttcattaccggcagtcagagttgaattgaatcctggcgtcctgtttcatcagggggtttcgctagatgcggtacgcaaagctatcagcaatgccaatgttcgccgcccacaaggatatgtggattccgagcagcaacactggcaaattcaaatgaatgatgagttaaaaacagccgaaaactatcgcccgatcatcgttcactacaacaacaattcaccggtgcgattgcaggatgtagcaaatgtaaaagattctgttcagaatgtcagagcagccggaatgtctggcggtgagccggctattttgttgatcattcgccgtgaggctggcgcgaatattatcgccacagtaaaccgtatccgtgaacaattacctgcattacatgaatctattcctgccagtattcaacttaaagttgctcaagaccgcacacccactattcgtgcttcaatagtggaagtagaacgagcattggtgattgctatcgggctggtcattctggtggtattcctgttcttgcgttctggtcgcgcaacattgatccctgccattgctgtaccggtttcactcattggcacctttaccgctatgtatctgtgcggtttcagtttgaacaatctttccttaatggcgctgacggttgccacaggatttgtggtagatgatgcgattgtggtactggagaatatttcccgccaccttgaagccggcataaaacccatgcaagcggccctacagggtgtccgggaagtgggttttacggtcctctcaatgagtatttcactggtagccgtctttatcccgcttctgctcatggatggattggttggtcggctgttccgtgaatttgccattaccctaaccacatcaatcagcatctcattattggtttctctaacactaacgccaatgatgtgcgctcatttactaaaatctcagcgtcccaaagcacagaagaaaatacgaggattcggtaaagttctactgaaaattcagcaagtttacgggcgctccctgatgtgggttcttaatcatagccgttgggtattgttaattttggccggcatcattgccctaaatgtttggctctatatcaatatccccaaaactttcttcccagagcaggataccggtcggttactagggtttgttcgggcagatcaaagtatctctttccagtctatgcgtgaaaaaatgaaaaacttcatgcagacaatcaatgcagatcctacggtagacagcgttatcggttttaccggtggtgggcgggtaaataatggctttatgtttatctctctaaagccattgaaagagcgttcagaaaacgctgaacagattatctcgcgcctgagaattaaacttgccaatgaaccgggagcaaatctatttctcattccggtacaagatatcagggctggcggtcgccaggctaatgccagctatcaattcacattgctggcagatgatctgaatgatcttcgcaaatgggagcctgttatccgtaaagcattagggcaattgccgcaactgactgacgtgaattcagataaggaggataaaggcgctgaaatggcaataatctatgaccgcgataccatgtctcgtctgggcattaatgtcagtgaagccaataatttgctgaataatgcttttggtcagcgacaaatatccaccatttatcaaccacttaatcagtacaaggtggtgatggaagttgcaccagaatatacacaggatgtcagcgcactggaaaaaatgtttgtgattaataatcaaggaaaagccattccgctctcctattttgctcactggcaaccggctaacgcgccgctaagtgtcaatcatcaagggctttctgctgcttcaaccattgctttcaatgtacccgaaggctataccctctctgatgctatcaatgcgattgaaagaaccacaaccgaacttagggtaccttcaacggttcgtggcacttttgcaggcaccgcccagatttttcaggaaaccctgaaatcacaattattcttgattctggcggccattattaccgtctatctggtgctagggatactgtatgaaagttatatccatccattgactattctctctaccctgccttccgccggtattggtgccctgctggcattagaactgtttgacacaccattcagcctgatagcattaatcggcatcatgttattgattggtatcgtgaaaaagaatgccattattatggtggactttgcgattgaagctcaacgtaacggtaatatctgcgcccgtgatgcgatattccaagccagcctattacgtttccgtccgattctgatgaccacactggccgccttgtttggttccctgccactggttttgagtagtggcgacggtacggaattacgccaacctttaggaatcaccattgtgggtggtttggttatgagccagcttttaacactatataccacaccggttgtctatctctgttttgatcgactaagagcctatcccaataggcgtaattgttgcaggcagtttgaacacggacagcgcggaaaaaccggaacgtacacgtag

SEQ ID NO: 6093 - DNA, 3147 bp, Photorhabdus luminescens
atgcaggcaggctccccaatcccaggtggcggaccatcacgcctgttcatcttacgacctgttgccaccactctgtttatggcagcaatcctgctagcaggtattatcggctatcgcatgttgcccgtgtctgcattaccggaagtggactatcccaccattcaggttgtcacactctaccccggtgcaagccccgatgtgatgacttcggcagtcaccgcaccacttgagcgccaactcggacagatgtctggccttaaacagatggcctctcaaagttccggcggggcttctgttatcacattacaattccagctaactttgccgttagatgtcgccgagcaggaagtgcaggcggctatcaatgcagccagtaatttattgccgaatgacctgccttatccccctatctacagcaaagttaatcccgctgatccaccgattctaatgctagcagtcacctccgatgcaatgccaatgacacagattcaagatatggtggaaacccgtattgcgcagaaaatttcacaggtcaacggtgtaggattggtgacactcgccggcggccagcgaccagccgtcagagtgaagctaaatgcccaagcggtcgctgcacagggattggatagcgaaaccatccgcaccgctatcaacaatgctaacgttaattccgccaaaggtagccttgatggtccgactcgctctgtcacgctttcggccaacgatcaaatgaagtcagtaaatgattaccgcaacttgatcatcgcctataaaaatggctcaccggtacggttacaagatgtcgcaaccattgaacaaggcgctgaaaataccaaactaggtgcatggtccaataacacacaagcgattgtgattaatgttcagcgccagccaggtgccaatgtgattgaaactacagataacattcgccagatgttgccggaactcatcagcagcttgccaaaatccgtcgatatgaaaatcctgactgaccgcacaacaaccattcgcgcctcagtgaaagatgttcagtttgagctattactggcaattgcactggttgttatggtgatttatctgtttttacgtaacggtatcgcaacacttatccccagtatcgccgttcccctttcactgatcggcacattcgcagtgatgtatttctgcggtttctccgtcaataatctgacgctaatggcgctcaccattgctaccggttttgtcgtagacgatgccattgtggtcattgaaaatatctctcgttatatagaacaaggcgagaaaccgatgacagccgcattgaaaggcgcgggtgaaatcggttttaccattatctccctgactttctctttgattgcggtgctgatcccgctgctttttatgggcgatatcgttggccgcctgtttcgtgagtttgcaattaccctggccgtggcaattctgatttcagccgttgtctcactgacattaacccccatgatgtgcgctcgaatcctgaaaccggaatcacagataaaacacaatcgttttgaacaagccagtggacgattttttgaacaaatgattgccggttatgctgtatggctaaaaagagcactgaatcacccgtggatcacctttggcatcgccctaagtacattggcgctaactgccctgctctatctgatgattccaaaaggattttttccatcacaggataatgggctgattcagggaacactggaagcgccacaatccatttccttcaccgcaatggtgaataaacaacaacaggtttcatccttattgctgcaagacccggcagtagaaaatatcaccacttttgtgggcgttgatggcagtaacccaacattgaataacgggcgactgcaaatcacactaaaaccactcaatcagcgtgatgacagaatcgttgacattattccgcgtttgcaggaaaaagttgccgctatacccggcataaagctctatctgcaaccgatgcaggatttgacgattgacactcaggttacccgtacccaataccaattcactttgcaggcaacctctctggatgaactgagtatctgggtgccaaaattgctggctgaactaaagcagagagcagagctagttgatatcagcagtgactggcaagatcaggggctgatcgcctacgttaaagtagaccgagacattgccagccgattgggcatctcaatggctgctatagataacgcactctataacgcattcggccagcggctaatttcaaccatttatacgcaagctaatcagtatcggatcatcttggaacatgatgtaacatcgactccggggctggcagcatttgataacatccgccttaacggaactgatggccatgtcgtacctctcagaactattgcaactattgaacaaaaatttggcccactggcaatcaatcacctagctcaatttccctcagcaacattttctttcaacgttgccgaggatgcttctctcgaacaggcggtcaatgctgttcgtgatgccgcgcaattgatcaacatgcccaaagacatttccacccaattccaaggaacaacactggcatttgaaagcgcactgggtaatacattgtggctaatcgcggctgccattatcgccatgtatatcgtgctaggcatactgtatgaaagcttcatccatccggtgaccattctctccacattgccaacagcaggagtaggtgcactattagcgctgatgatggcaggtcatgaactggatgtcattgcgatcatcggcattatcttgttgataggtattgtgaagaaaaacgccatcatgatgatcgattttgcgttggcagcggagcgtgaacagggactatcgccttacgaagccatttatcaagcgtgcttattgcgcttccgtccgattctgatgaccacaatggcggcgttgcttggggcactccccttgatgctcagcaccggtgtcggtgctgaattacgtcgtcctttgggtatctgtatggtaggtggattgattatgagccagatcctgacactgtttactacgccagtgatctatttgctgtttgatcgtctggcccactatcgccgcaatcgccagctctcagtttcaaacacgccatctattgatcatcaggagccgcggtga

SEQ ID NO: 6094 - DNA, 1206 bp, Photorhabdus luminescens
atgaatcaaaataataaacaccgtaccctccttttccgtgcagcactggccgctattgccattgctgccgctatatttttctggtaccaacttaaaacccctcaacaatcgagcccatcggatcaatcctctggtttaagacattcccctttaccccctgtacaggttgccacagcaaaagagcaggcagtccctcgctttctggccgggcttggcaccattcaagccgccaataccgccacggtaaccagccgggttgaaggtcagcttatcgctttgcactttcaagaaggccaacaaattaaacaaggggatttactggcagaaattgatccacgcccttttcaggttcaactagcgcaagccaaaggccagcttgctaaagatgaagcaatattggcgaatgctcgtcaggatctcaatcgctaccagaaattggcaaacactcacctgatttcccaacaagaaatggataatcaacgtgcacttgtccgccaacacgaagccagtctgaaagttgatcaagccgcaattgatagtgcaaaacttcaactcacttacagccgtattacagctcccatttccggtaaagtgggcttgaaacagatcgatgtaggaaattttatttccagtggtaacagctcctctatcgtggttattacccaaaccgatccggtagatgtgctgttttcactccctgaaaacgatatcaatgctgttttacaagctcagaaaacgaatcatgacgtcgttgttagtgcctgggatcgcaataatcagcaacaacttgccgcaggcaagctgttgagcattgataatcaaattgatgccactaccggcacaattaagctaaaagcccgtttttccaatcaagaaagcatcttattcccaaatcagtttgttaatgtccgtattaaagtcgatacactggaaaatgcagtggtgatcccaaatgctgccctgcaaatgggtaatgaagggaattttgtctggatgttaggtaaagagaataaagtcagcaaacatctggtcacggtcaaattgcaggatacaaaacgtgttgttatcagtgccggcttagcagcaggtgataaagtggtcactgatggtatcgatcgcctgacagatggcgctaaagtggatattgtcacaccgatggtaaataagcctcaaccacaaaaacacgatcaaacggagaattcctga

SEQ ID NO: 6095 - DNA, 930 bp, Photorhabdus luminescens
atgagacatttcattattgatacagatacggcttccgatgatgcagttgcattatttatggcgctccgtgaaccctcagtttttattgaaggtattactattgttgctggtaattgtgctgttgcgcagtgcaggaaaaatgcattagttagtattgaaaaagcagggacatatattcctccggtatatgaagggatgagtaaaccattatttagagagcattatgcttcatatcatattcatggaaaagatggtatgggtaatatgaatttaccagagtcttcgttaatagtagaagataaacatgcagtagatgccattattgatatcgtgaaaaaatttcctggtgagatagagataatcactttgggaccattgacaaatatagcaatggctgtcttaaaagagccaaatttatataaatctgtcaaagtgatatatattatgggtggctctgggttgaagtcaggtaatattacgccattggctgaattcaatctctattctgatgctgaagcagcacatatagtattgaattctggattacctcttatattttgtggatgggagttaggtatggaggaggcttttattaatgaattcgatatggataaattaaattctttaggtgatcttggtcagtttgcagtgagctgtaatagaacattgattgaattcaatgcgggaagaacgaatagaaaaggatttgatctgcctgatcctataacaatggctattgctttatatccgaatgaaatgatagaggataaattagcggtgtatggttatgttgaatatcaaagcgcacgttcatatgggcatttagtgattgattcaaccgatcttctcaatcatccccataatatgagtgtggtgactaaaatcaagggtgaggtatttaagaataaactatttacattattatcgtaa

SEQ ID NO: 6096 - DNA, 1008 bp, Photorhabdus luminescens
atgaattttaatcctgatttactgagaaaggtagaattacatacacatcttgattgtgggttgagttatcatttcgttaaaaaattcattcctgatattacccgtaagtcattttgtgaaaaatatattgccgctgaaaaatgtcatgatttaggtgattttttaaataagatcattccttcactggatttactacaaaaaagggacgtaatcgctgatgctgtagaagatcttttcatacaattaaaaagcgataatgtagtttatgctgaaattagatttgcacctttacttcatcttcgcttaggattaaatgaacgcgatattgtagaaattgttttggaagcaatgaaaaattattcaatcaaatatggtatagcagcaggtttaatattatgtacattgcggaatttttcagaagatcaaagtttgagaaccgcatatcttgtcaatgaatattctaattacggcgttgttgctctcgatcttgctgccgatgaggcaagatatccacttagtgcacatttgaatgcgtttagaatggtgttggaaaatggtggaaatattattgcgcatgcaggagaagcgaaaggggctgaaagtgtgcgcgagactattaataaattaaatatttctcgtataggtcatggtgttagaagtattgaagatcgagatgttattgaactccttatagagagaaatatacatttagaagtatgcccgacgtgtaatattatttgtgatatttatgatatttatgatatttatgatatctatgaaaatcatccagttaattttttaaaagaggttggtgtaaatattgggattaatacggatgcccggacagttgcaaatatcaccttatgtgaagaatatctgaggattaatcgatattttggttggcaatatagtgattttattgaaacaaatttgaatgcattacatgcttcattttccagtaatgaactgaaaagtcgattggaaaaggaaataatgagattatcgtag

SEQ ID NO: 6097 - DNA, 663 bp, Photorhabdus luminescens
ttgaaagattatattgataaatatcatcttgatagtatttttccagcagaatttatgccaaagttagatgtggttgaaattaagaaaaatacctatcttacacatcagtcatcaatttttactcatctctatattttagttgagggtaaactaaaggttgagttttataatgttaatggaaaattttctgtttttgcctttgctacgcctctttttcttattggagatttagaactttttcatgcccaaggcgataacataattaatactgtctttgctcaggagcgatcagttctgctatcaattccgttagaaacggtaagaatatttggattaacagatgttggatttcttcaatttgtttgtaagcaactcagtaataagctttttgagtcttctttgtttcgaacggggatatttttaactgttgaggataagctaaagcgatttctttactatcattcgaaaagaaatggaactgtgttggtattagagaaaagggaagatttagcatctgttttaggtgtttcagtcaggcaattaaatagagctattaagagtttgaatgaaaaaggaataattgtatcgaagaataagagagttgacattattgattatgatttcttaaaaaaggatattgagtttcaatttgacgctaagtga

SEQ ID NO: 6098 - DNA, 1533 bp, Photorhabdus luminescens
atgtgtggaattggtggtgtttttaatacagaaaataggcttattgatgatattgaaaataagctacagactataatgtcaaaaatagcacatcgtggcgatccatctcgatttaatgagaaggttgtcagaaataacttttcaattgcaaccaacagacttgctattgtcgaacgcgattcagcctatcaacccatatcaaatcaggaacatgatcttcatcttgttctgaatggtcaaatttataattacaagtctcttcgaaatgaattaattaaacaaggttatcaatttaaaaatgggggcgatgcagaagttgccctaattgcctacatttgctatggcaagtcatttattaaaaaattagatggcatgtttagttttattctatttgataataagaataataaattcttattaggcagagatcacgtcggtataaaaccgctctattacacccaaaaagagggtaactggtatgtagcctcagaaataaaatcattaatcgaatttaactcagaaattaaacctgttgaacccggttcaattttcgacggattgactagtgagaaatatattagctacgacacaactatcccagcaagcagcgataacgtcgaacaggcaaaagaaaaaatctattcactgttagataatgccgtcagaaagcgggttgacacagacctgccagtgtcaattatgtttagcggcggcatagacagtactatcgtgctttatcttgcaaaaaaatatcaccacgatattacggcgatttcatttggattaccgggttcaaaagacattgaaattgcccaacgatattgtactgagaataatataaagcatattatatatacatttactcaggaagaattaatcaataatatccaagatgctatctattatggtgaatttttcgaacaaatcgatgcgattgattcaactattgctcactttggctattatattgctaaccgtcttggctttaaaattgctttatgtggagaaggtagtgatgaaatttttgctggttacgatctatttaaaacataccccgatccccatcacctctccctatatcgattaaataatcttcataggactgatttacaaagagttgatcgggcaagcatgagaaatactgttgaagcaagagttccctttatggattcagcactagtgccttatgttttaagcttggatttttcttacaaactcaataatgggatagaaaaatatattttacgcgaagcattcagaggaaaaatacccgaatatatcattgacagaccaaaaataagaatgccagatggcagtggtgtaaaaaatactatcattgattacgttaaagatattaaatgcaatctaccgagaaacatggttgacagccttaattctatcggattaacccatcaaagttcattatatttcgctgaaaagtatctctctttgggttatccactaccgaaagaacgttttaaagaatctggcaaagatttttcagaatcgggttactttaatttcatatcgtaa

SEQ ID NO: 6099 - DNA, 1356 bp, Photorhabdus luminescens
atgaattattatggtaataatcatccgccatttatcgaaataaacaaaaccaaatcattaaatggctcaataactttacctgcctccaaaagttcttcaactcgcgccattctgactgcatcattaacggaaggtacaagtaaaataaataacatggcatcagggaacaatacaacagcaatgaaattaaactgttcccgtttaggggcatcatttaatagtgatattacagggacaatcgtagaaggcatagatatcagacaaattgataaaaaaatcatctttaacccaggtaattctggcgttgtattacggctattaatgggagtagccggttatttaccggatactgaatttattacagaatacagttactccctgggtacacgatcacaattggaaatggtcaatgcactaaaatcactcaatattcagtgcaccgcagttgggcctgattcacttttaccgataagcatgaaatcagataaaaacatcggtaattacactgaaatttcatgcagaaagagctctcaattcctaagtgggctactttacttaggtgccattagcgaacgagatctgcaaataaaagtcatcgatacaattaccgcaccatcaatggttcacacgacaattaataatttacgcaaagcgggcattaatatcgaatatgatgataaattccgcaatttctttacgacaggaaagagtcgatttattccatcagaatttagcgtcggcgctgatccagccagcacggcggcaatccttgcactttgcgcctcactgaattctgatgtcaccctaaacggtttctttgaggaagaattaggtaatggcgcggtggtgaactatttaattaacagtggaacgaaaatcagcttcatcagggatgattgtctcaatattcgatctggcggcaccctaaaagcgcaagatttcgatggttcactggcaccagatgcggtgcctgcactggctgcattagctgcgtttgccaacggtaaaagcgttttctataacattgaacatatccgctataaagaatcagacagaatttctgattttcggcgggaattagacaaaataggaattagatcagaagagagactagaccaattaattatttatggcaatccatatggatataaaggcggtgttattgttgatggtcattacgatcatggattaatcatggcacttacaacaataggtttacattgtgatgagcccctgattatcagtgagccatatcatgttggtcaaacctatccagaatattttgccgaaatatctacattaggtgccaatgtgaacgaattaaaatattctgcccctatactagaagacgtttaa

SEQ ID NO: 6100 - DNA, 1305 bp, Photorhabdus luminescens
atgaataaaattagcgtgctccccggttccactcttaacggggaaatagtcataccatcatctaagcctcatatccaaagagcgctactattagcactattgaatcaagaaacaacaaccgtaaataatatatcgtggtgtactgaaaccgaagatctccttattgctttacaacaatttggtctgcaaattctggatagaagtgaaaaccacatcatattgaaaggggcacatccaatatatcattgtaatgggatcattaatgctaacggttctggcatgttatttagaatcagtgtcgctttagcatcactaacagaaaaggaagtttatataaaatgcaatgattcactgtttaacagagaaagtctgtatgatgaatcatttttttcatacctgaatgtatttgcagaaaagcgaaaagaaaatattgtcattatttccagaagaatatatccatcacaatcaccattaaacttcaataagagtactcaattcctatcattctctcttcttgtttcaccatttatgaaagggaaaagtattatcattaacaacaacggtgaaactaagaatggatatgtcgatataacaattaccatgatggcattattggggagtaaaatctctcgaacaggtagcacatttatttcaactgaatatcaaccaagggatattactattaacatcccttctgatttcacatcactaagctatattgcttcgtcaatattaagtattaatcgaccaagcaaaatcactatcagaagttattattttggtaataccattaacgaaagagtattatttgacatatataaaaaatttggtatgaatttaaactataacccaattaagaatgaacttaatatcagcctggaaaaggagcataacaccattaccgatgaaatctatttacatgaacttccttccgttgccactaacattatcgcggcagcgattaatggcaatggcgatatcacattttccggtcttaatgctataaataatcataaatgtcaacgcgcatttattatcaacgaaaatatacgcatgatgggcggaaaaagttatttaatttttaatgatactggggctttcaacaaaataaggatcaacagtaacggaccattaaatggaggcatcgaaatattcagttactatgatcatcggatttgcgcatccaatattattgcatcactaggggcaaaagaacgaacaacagttaatcatatacataaattagatgatggttttcctggatttatccaatccttaaactctctcggcgctagaataagttag

SEQ ID NO: 6101 - DNA, 399 bp, Photorhabdus luminescens
atgccatctcatgaaattaaaaaaacagtatttagcccctctccgtgggaaaataaaatgggatactcaagagggaaaagagttggtaatcagatctttattgcaggatgtgtcgcttcggatggtgatggaaatgttatgggggaaaatgcttacgagcaaactctatttatcatagaaaaaattgagaaatatttaaaagagcttgatgcagaactgactgatgttgtcagcacagtaacacatttaacagatttccaacattttgatgattattgtcgagcctttaatgagaaatttggcgatatacgcccggtcaatacgactattgccgttaaatcaatggtaaagccagaacattacgttgaaattacaactattgctatcgatagtaaatag

SEQ ID NO: 6102 - DNA, 1239 bp, Photorhabdus luminescens
atgagtgtttttatttttattgaagcaagaccggttgaatgctcggcaattgattatattagagatttggggttttctcccgtgttattgacttcaatggaatcaatgaataaaggattatatgatgatttaagaaaggaattatttgataatatttattatgttgatacgagaaatagtaccgatattattaatttaattaaagatacccgtattcctgttgctgcaatcctaggttgctatgatgattttatgattgtggcgtctgaagtagcattagaattcggtttacctcacccggatataaatggtttgaggaatgcatttagtaagaagaatgtcagggatattctggcacaacatggttatgagcaacctgcttacgcggttttttcttataataatattccagaaaatcctaaggttccttttccgtttgtgattaagccacttcgtgatgcgggggcttatggggtatcactttgtaaatctcaagatgattaccaccatgtgctttcagaaatttcatctcatggcacaatgtcaatgctcggtaaagtcaatgaagagttcttgatagaagagttcttgcagggaaatttttatggggcagaattaatttatagtcatgatgaatggcatttaattggtatcaatagaattttcgtttctcctgacgatgacctgtgtatgatcggtttatctcatcctgctgaactgcctgagtttgagtttgcaatggcttgtaagcttgttaaggagtggctagctgctttgggattacggggtggtgcaataaatgtagaatttatttatacctctcgtgggccaatattagttgaaatcaatttgcgcatagcaggtgccagagcggctcaacagatattcatgacctctgggattaatatggtcaaatacttggtcgattttgtttgtggtatcgaaagttctatatcaccagcgtcggaaatagtttatccatttgtcgctgatgcatttgttttttatcgtggtgagggggttgtcaatgatatcagaatagatgctgatatcccttatttcatctccgcagggtttaagaaaacgccttttgctatttcattaaaaagtaaaagttcatcgaaaaataaaaactttggttctattgtcggttatgttctggcttatggtgatagctgtgaggaagcgatggaaaatgcgacacgtattgctaatagcgttcagttaataacgaattaa

SEQ ID NO: 6103 - DNA, 792 bp, Photorhabdus luminescens
ttggcagggcaagtcgcaagaaaagtcggcgttgctaaatctttattctatagtcagctatttggtttttttgttttatcgttgttgctgtttttttattttgagatgtcgtttgttaatgcaagcttttttcaattgaccctctgtgttgttgcttcggtttgtaatttaatggcaatggtgtttctgcttaaagcattatcaatcggtaaagcttcgattgtcgcgccgattgtttcgctttatggtgcggttaccacgattttgtcactgataaatgggaaaccaatgaccgttttggttttgtttagtctatttatttgtgttattggtgcctgtctaaccagtatgccgaaatcaaaagatggacaacgagaatcatctggttcaattttctttgcacttttgtcttcactgatgtttgggttaggtttctggctgcaaggggaatttgctgttagagatctgggggttatcaatgcattatgggtttactatttaaccgctgtggtggttttatttctcacgctattaaaaaaaggaaatttatcattaccgccgatttcaattattgctctggttttttcaattagtttctttagtctgattgggtttgcttcattagcttacggttctgctacgggacatgttgccgttgttaccgttctgagttcattggcaagtggcgtcaccgcgttattaggtttttttattcgtggagagcggttgagccgcattcagtggatgggtattgtgataattatagccggtgtcattcttttgaaattatga

SEQ ID NO: 6104 - DNA, 1533 bp, Photorhabdus luminescens
atgccgctaacacatgacaagccgacgcccagaccaatagaaattgcggctattgatctaggttcaaatagttttcatatgattatcgcacgaattgtcaacgatgcatttcagattttaggtcgcttaaaacaacgggtccatctggccgacggtcttgataacaacaatcaattaagcgaagaagcaataacacgcggtcttgcctgtctggctttatttgctgaacggttacaaggctttcctgctgataacgtttgtctggtgggcactcacagcttacgtgaagccagcaatgccaaagaatttattaaacgcgctaaagaggttatcccctacccgattgaaattatttccggccatgaagaagctcgtctgatctatatgggggtagaacatacacaaccagaaaaaaaccgtaaactggtgattgatattggcggcggctccactgaactggtcattggtgaaaattttgaaccattattggtagaaagccgccgaatgggatgcattagtttcgcccaccaattctttcctgatgacgaaattagcgcagaaaaattccgccgagcgcggcttgaagctgcacaaaaactggaaaatctctcatggcagtaccgcatcactggctggaattcagcgcttggggcatccgggaccattaaagcggtgtatgaagtgctggtcgccatgggggaaaaggacggattaatcacccctgaacggctggagatgttggtcaaagaaatactcaaattcaagaaattaaaaaccctcgacttacccggactagcggatgatcgtaaacacttttttattcctggtttggctatcttatgcggtatattcgataccctgcatataaaagcattacaactctcagatggtgcgctacgtgaaggcgttttatatgaaatggaaggccgtttccgtcatcaagatatccgccagagaaccgcaagaagcctggctgagcactataatatcgaccgagaacaggcaaagcgtgtacttaatacgactgaaacactttaccaacagtgggcaatccagaaccctaaactagtgcaaccacaactcgaagcgattttacactgggcggcaatgttacacgaagttggattaagtattaacttaagcggattacagcgacactctgcctatattctgcaaaacaccaacttacccggctttaatcaggaacagcaattactgctggcaaccttagttcgctgtcatcgtaaaaccataaaactggatgatttgccaagattcaatttattcaagaaaaaacagtatctgccattaattcaaatcctacgtctggcaactttactcaataatcaacgccaatccacaaccatccctgaatcactcagactagttactgatgatagtcattgggcgctctacctgccttacaactatttatcagcaaacaccctgatgcagcttgatctggaaaaagagcaaggttactggcataacgttacgggttggcaattagaaatagccgaggaatcaatataa

SEQ ID NO: 6105 - DNA, 2070 bp, Photorhabdus luminescens
atgtcccaagacaggctctataccgataaagaacttagttggttatcattcaacgaacgtgtgcttcaagaagcggcggataagagcaatccactaatagaacggatgcggttccttggtatttactccaataatctggatgaattttacaaagtccgttttgctgatgtaaaacgacgaatattaattaatgaagaacgaggatcagccaccagcgcccgaaatgtattgaaaaaaattcaagctaaagtggctaaaaccgatcaagaatttgatgtgctctataatgaactgttattagaaattgctcgcaatcaaatttttctcatcaatgaacgacaaatttcacccaatcaacaaatctggttacgccaatattttcgtcaacatctgcggccacacattacaccaattctgatcaatccagaaaccaacctggttgaatttctaaaagatgactacacttatctggcagttgaaattgtccacagccagaatattcaatatgcactattagaaattccgtcagataaggtgccacgttttgttaacttgccgcccgaaatgccacaccgccgcaagtcaatgatcctgctagacaatattatgcgttattgtcttgatgaaattttcaaaggctttttcgattatgattcactgaacgcctattcaatgaaaatgacccgtgattctgaatatgatttagcaacagagatggaatcaagcttgctcgaactcatgtcatccacgctgaaacagcggctgacagcggaacccgtaagattcgtttatcaacgagaaatgccagatgaaatggtagaattactgcgtagcaaacttggcttgtcaaacaatgactcggtgattgctggcggacgctatcacaattttaaagatttcattaaattccccaatgaggggaagagaaacctactcaataaacctttgccaagattacgacacacttggtttgataatttccgcaatggttttgatgcgattcgtgaacaagatgtgctgctctattatccctatcacacctttgaacacgtattggaattattacgtcaggcatctttcgacccgagtgtactctccatcaaaattaatatttatcgagtagcaaaagactcccgcattattgattccatgatccatgctgcccataacggtaaaaaagtgaccgtcgtggttgaattacaggctcgatttgatgaagaagccaatattcattgggccaaacggctcaccgaagcgggtgtacatgttattttctcagcaccgggactaaaaattcacgcaaaactgtttgttatttcccgtctggaaggtgaagaaattgttcgctatgcccatattggtaccggtaattttaatgaaaaaaccgctcgcctctacaccgactactccttgctgaccgcaaatcccaaaattactaacgaagtgcgccgggtattcaactttattgaaaatccctaccgcccggtcaaatttgaaaacctgatggtttcgccgcaaaattcccgcgcaatgctcaaccagcttatttcacaggaaatcgccaacgccagcgcgaataagcccgcaggtattatgttaaagattaataatctggttgataaagagctggtggaccgcctatacgacgcttcggaagcaggggtaaaaatacgcctactgatacgtggtatgtgttcactggtgcccagccagccaggatttagcgaaaatattcagatcaccagtatcgttgaccgtttcctcgaacatgatcgggtttacgtattcactaatgacggagacgaaaaagtctttctctcgtctgctgattggatgacccgtaatatcgactaccgaattgaagttgcggtttgcctgcttgatccacaattgaaacaacgggtactggatattctcgaattacaattcaacgatacagtaaaagcccgttacgtcgataaagagctgagcaatagttatgtgctacggggcaataagcggaaaatccgggcacaactggctatttatgactatctaaaagccctcgaacaacctgaaccaagagcttaa

SEQ ID NO: 6106 - DNA, 567 bp, Photorhabdus luminescens
ctggtggttctcatacctcacctgttaggttacgtcccccttgagcgggaagatctcccttttgtccatcaattagataacaatgctagcgtcatgcgttactggttcgaagaaccttatgaagctttcgttgaactgtgcgatctctatgacaaacatattcacgaccaaagcgagcgccggtttattatcgccagttctgacgccaaagtgggtttggttgaattagtcgaaatcgactatatccatcgccggtcagaatttcagattattatcgatcccacctatcagggccaaggccatgcaaccaaagcggcaaaactggcaatggaatatgcattttccgtacttaatctgtataaactctacctgattgttgataaagagaatgtcaaggccattcacatctataataagctaggtttctatactgagggcgaattaatagacgaattctttattaatggcagttaccgcaccgccattcgcatgtgcgttttccaacatcaatattttgcctccaaggaagatgaaaaaatgagtcagcaactactgacgagaagatag

SEQ ID NO: 6107 - DNA, 639 bp, Photorhabdus luminescens
atgaaaaatatcgttgtactcatctctggcagcggcagcaatctccaagcggtgattgatgcctgccagcagaacagaatcaatgggcaggtttgcgcggtattgagtaatacagcaaatgcttacggtctgttacgcgctaaacaggcggatattcccacccatgttattagcccgaaaaactatgcagatcgtcagacttatgatgaagcgctaaaacacacgattgatcagtatcaaccagatttgctggtcctcgcgggttatatgcgtattctgacgccagattttgtgcaacattatcttggccgcctgttaaacattcatccttctctgttacccaaatatcctggtctgcatactcaccgcaaagcaataacaaatggagatacagaacacggcacttccgtccattttgtaacagaagagttggatggcggcccggtaatcttacaagctaaagttcctatttttgccggggatcaggagaatgaggttgtcaaacgggttcagactcaggaacacaacatctatccattagttatcaactggtttatcgaagggcgcctaagtatggttaatggcaaagcgtatctggatggaaagatcctccctccagaaggctatgccgcagaataa

SEQ ID NO: 6108 - DNA, 1041 bp, Photorhabdus luminescens
gtgaccaacaaaacctctctcagttataaagatgccggtgtcgatatcgacgccggtaatgccttagtcaaccgtattaaaggtgttgtaaaacagacccgtcgcccagaagtaatgggcggtttaggtgggtttggcgctttatgtgcattaccacaaaaataccgcgagccaattctggtttctggtactgatggtgtcggcaccaagttgcgtctggcaatggatctcaaacgccatgacactatcggcattgacttagttgcaatgtgcgtcaatgacctggttgttcaaggtgcggaacccctgtttttccttgattactatgcaaccgggaaactggatgttgatacggctgccagcgttatcagcggtatcgcagaaggctgtcaattatccggctgtgctctggttggtggcgaaaccgcagaaatgccgggaatgtaccacggtgaagattatgatgttgccggtttctgcgttggcgtggttgaaaaatcagaaatcattgatggcagtaaagttcaggcgggtgatgccttgattgccctcgccgccagtggccctcactcaaacggctattctctgatacgcaaaattctggccgtcagcaacaccgatccagaagcaaccgagcttgaaagtaaatcattggcagatcacctactcgccccgacaaaaatttatgtgaaatcccttttatccttgattgaacaggttgatattcacgctattgctcatctaaccggtggcggtttctgggaaaatattccgcgtgtcctgcctgaaaatacccaagcacagattaacgaatccagttggcaatggccggccatatttaactggctgcaacagacaggcaatgtcagccgtcatgaaatgtaccgtacattcaactgtggtgttggaatggtgattgccttaccaccaacagccgttgaacaggcgattgaattactcactgctgccggtgagaaagcctggcaaatcggcactatcgcgacactgaaagagggtgaacaacaggttgtcattcaatga

SEQ ID NO: 6109 - DNA, 156 bp, Photorhabdus luminescens
ttgcgagactcttgtttaggatctcggttctcggcaattagggctatgtttgatgaaaatcaacggattggtagtggtgttatgggtaaaagacggtataatctcgccgtttttttgtctgctggcgacatgacatacagtaggagaggtccatga

SEQ ID NO: 6110 - DNA, 627 bp, Photorhabdus luminescens
atgaagatcgttgaggtgaatcacccacttgttaaacataaactcggtctgatgcgagcgcatgatatcagcaccaaacgctttcgtgaactggccgcagaaattggaagccttttgacttatgaagcaactgctgatttagaaacagaaaaagtcactattgatggctggtgtggtccggtggtagttgagcagattaaaggtaaaaaaataactgtcgtacctattttgcgtgcgggattggggatgatggatggcgtattagagaatgttcccagtgcccggattagcgtcgtaggggtttatcgtaatgaagaaaccttagaacctgtcccttattttcagaagttggcttccaatattgatgaacgtatggcgctgttggttgacccgatgttggcaaccggtggttccatgattgcaactatcgatttattgaaaaaagcaggctgtcagtcgattaaagtgctagttttggtggctgctcctgaaggtattgccgcgttggaaaaagcccatcctgatgtggaactgtatacagcttctattgatgagagactcaatgaacagggatacattgtgcccggcctgggggatgcaggcgataagatatttggtacgaaataa

SEQ ID NO: 6111 - DNA, 348 bp, Photorhabdus luminescens
atgaaatatttaaaatataaaggttatttaggtacaattgaatttgacttggaaaacaatactctttttggtaaattggaatatatccgcgatttagtgacttatgaagcaaaaacaattgcagaattggaaaatgaatttaaaatctcggttgatttgtatttgcaagactgcaaggaattaaataagaatcctgatataccatataaagggatttttaatgttagagttaatccagaattgcatagaaaaattgcagaactagcacttgaagaagatgtgacgattaacgctttcgtgaatcaagcgctagaaaatgaagtcagtaaacattatgtagggccttaa

SEQ ID NO: 6112 - DNA, 105 bp, Photorhabdus luminescens
atgagcaaagcggagaaactgatagaaaagtttcttaatagccaaaaaacttttgaatggtctgaacttgttgtgttattaagcctattaaactatgagaaataa

SEQ ID NO: 6113 - DNA, 1308 bp, Photorhabdus luminescens
atgaaacaaatcaaaatagccattattggtggcggtagcagctacacacctgaattagtcgaagggcttattcaacataaaaaagagattccactatctgaactggcactagttgacattgacagtggaaaacagaaagtagaaattatcgccgcgcttactcgccgtatgttagctcgttacggcatggaacacgttattgtcagcgtccatttcacaccagataacgccattcgcggtgccagttttattttaactcaactacgggtcggtcagcttccagctcgcgttgcggacgagcgtctggggctaaaatatggcttgatcggtcaggaaactactggcgtaggtggctttgccaaagcattacgcaccatccccgtattgctagatattgcccataaagttgagcaacttgcacccgacgcatggattattaacttcaccaatccagccgggatcgttaccgaagcgatttcccgctatagcaaagcaaaaattatcggcctatgtaatgtcccggttaccatgcatcacatgatagcgaatatgctacaacgcccttatcaggacgtgcagttacactttgccgggctgaatcatatggtctgggtacatcaagtactggtttcaggtcaggataaaactcaacaggtacttgatatgctatgcaatggtgcaatcttaaccatgaataatattcaagaagcaccctggcccccgccgctactcaaggcactaggtgccatcccctgcccttatcatcgctacttctaccaaacccgcaatatgttacaggaggagcgcgaggctgcgttcgaacaaggcacacgagcagaacaggtcatgaaagtagaacaggaactatttgaactgtatgcggatccagaactcgatcacaagccagaacaactcagtttccgcggtggtgcattctattctgaggttgcactggatctgatttgcgccatccataacaatctcaatagtcaattggtggtcaataccacaaaccacggcgctattcgaggtttaccggacgatgctgtcattgaaactaattgtattattaatgcagaaggtgcccacccgctgacgttcggccgcctgcctgacagtatgtatgctctgacacaacagataaaaacctatgaacgcttaacgatcaaagcagcgattcatggcgatcgcaatgctgcactgttggcactgatcaccaacccgctggttgccgatatagacattgcttcaccactattggatgacgtattaacgataaaccgtgattatctgccacaatttcaatga

SEQ ID NO: 6114 - DNA, 360 bp, Photorhabdus luminescens
atggatttagaacaagctattgatttagaaaaaactattgatttagaaaaaactattgtagaactgctggtttatgccggaagcgcacgcagtcatgcactaatggcattacaacatgccagaaacggtgattttcaaacagcacaaacactgatggctgaatctcaacaggcgatcaaagaagcacacacgattcagactaccctcattggattagatgaaggctgcggtaaattacctgtcaatctcatcaccgtccatgcgcaagatcatttaatgaacgcaatggttattcaagatcttgccagcgatatgattgaactctatcgccgaatgtcatcacaagaggaaaaaacatga

SEQ ID NO: 6115 - DNA, 1329 bp, Photorhabdus luminescens
atgagtctctatacctcttttatgcgtgtcttagaaaaccacattatcccgtttgccgggcgaatcggtaaccagcggcatattacagcaatgcgtgacggctttatctcagccatgccatttttgatcatcggcagcatgatgttaattgtggcaaatccccccttcgatttacagactacatcctcattcggccaggcttggttatcctttgccaaaactcactgggacaccatcacaatgccttactttatgacgatgggattaatgagtgtctttgtttcggtcggtaccgcctacagtttagctaaatcctacggtctggacgggttaacttcggctttactatcactcatggcgtttttgctagcagcagcaccacaaatagaaaacaaaatagcactcgatttcctcggtggcgcaggtgtatttaccgcattaatttgcgctatctggtcagttgaactaacacgtttactaaaaaaatataacatcaccatccgaatgccaacacaagtgccaccagccattgcccgttcttttgaacttctatatccagtcataggtatcttgttaaccgtttatcctgccagcttgctattacagagtgaattcaatctacttattcccgcagccataatgcagatgttccaacccctcatttccgtcggtgatactctgcctgccattatactggcgctactcattgctaacttactgtggtttgccggtattcatggcgccaacattgtcactggcttgatggcccctatttttatggcaaatattgctaccaatgcaacattaatggcccacggtactgctgcaacacaaattctcaccgatccttactgggcgttttatatctgtattggcggctctggttctacgttggttctggcgattctgtatctgcgcagccgctctatacatttgcgtactatcggaaaattgagcgtggttccatccatattcaatattaacgaaccactgctgtttggttcaccgattgtgatgaatccgaccttatttattccactattggttgtgccactggtcaatgcagtattgtcctacagcgtcctgcatcttgatctggtacataaaatggtcgccatttcgccctggactacgccggcacccatcggcgcaatgatttccgccgcttgggattatcgggcggcagtgctagttatcatactcacgataatcgatctctttatctggtatcccttcttcaaaatttatgaaaaacaattgatcgacgaagaaaataaacagcaagaaaacacagcatccacaggtgtagaaactcaatcccaaccctaa

SEQ ID NO: 6116 - DNA, 306 bp, Photorhabdus luminescens
atgaaaaaaatcctattgtgttgtgcggccggtatgtccaccagcatgctagtacaacgcatgcaggcagaagtgataaaacgggcattggacattgagatcaaggctgttcccacggttgaattagaacacctgatagccgacgctgacgttattttactcggcccacaggtgagatatcaattggcccatttttccgctattgccaaaccactcggtaaaccaatagacgttattgacatgatggattatggcactcttcgtggtgataaggttctcgataaggcattgagcctgttggaataa

SEQ ID NO: 6117 - DNA, 627 bp, Photorhabdus luminescens
ttggcaactagtgatgaagcaatgcgaaagttaatctctgaatcagatttcgatatcaaacttaacatgacagagaaaaatgtagaacacacccaagctttcattgaacgcggggtgcaagacttttctctgcctggatttgttacgccatatggttaccgtttgctggcatctgtttctggcaatcaatatagattggtgactgatgcagatatgccggagacggtttacgtggtaaagctcgaattcatggaacatattgttccatcgaagaaaacatgcacacagatactggtgtggcgtacagttcttcctcaacatgacggggcagtgagaggtttgtcacaagagttttttaggtttttccttgaaagatactccatcattgtgtctgacagtgagcaaacgctagatggacgtaggttttgggaacgtatgattgcttgggctatcagtattaatggctatcatgtgtatgtttctgatagcaccaaagaggagcgtccactgagcctgattacctcatgggatgacttctatgtaacctgggctaactattgctggggccatgacaaggattatcactatcatcgcctttttgttatcagtaaagagcgattacattga

SEQ ID NO: 6118 - DNA, 702 bp, Photorhabdus luminescens
ctgaacacaccatcgcagctttcgttacctttgtatcttcccgatgatgaaacttttgccagtttctttccgggggaaaatgccaccctgttagctgcaatcaaattggccattaatcagccgcatggcagctatatttatttctggtcccgtgatagtgggggccgaagtcatttgttgcatgccgcctgtgctgaattgtccctgaaagatgaagctgtgggttatgttccgctggataaacgtgcctattttatccctgaggtgcttgatggcatggaacacttatcactggtttgtatcgataatattgagagtattgctggtgatgaagagtgggaaatggcgatttttaatctttataatcgcattctggagattggccgcacttgtttgcttattagcggcgatcggccacctcgccagattaatcttaagttacctgatttggcttctcgtctggattgggggcaaatttataaattacaaccgctttccgatgatgagaaattacaagccttgcaattgcgagcgaagttacgcggttttgaattgccggaagatgtagggcgctttttactgaaaagattagacagagaaatgcggaccctgtttatggcattgaatcagttagatcacgcttcgatagttgcccagcgcaagctgacgattccatttgtgaaggatattttgcacctttaa

SEQ ID NO: 6119 - DNA, 357 bp, Photorhabdus luminescens
atgcaacaggtgacgatttatcataatccccgctgctcaaaaagccgtgaaactttggcacttattgaagaacggggaattaagccacagattattctctatctggaggctcctctcgcggtagagcaattatccgttctgctagaacagcttggttttcacgatgcacgccaattgatgagaacgaaagaagatctatacaaagagttgaatctggctgatgaaaaactcactcagcatgatttactgaaagcaatgattgtcaatcctaaactgattgagcgcccaatcgtggtttgcggtgataaagccagacttgggcgcccaccggaaaaagtaaaagaaattcttgattga

SEQ ID NO: 6120 - DNA, 1464 bp, Photorhabdus luminescens
atgaaaataatgtctaatcaatctctgacagcaatattaatcagcacattattgctaacaagctcccctgttctcagcgcctctattgaagattcactgccggatatcggtaccacggcaggttcaatcctgagcatcaatcaggaactggcaatgggcgatttctacgttcgccagatacgtaacaacgctccgctgatttatgacccattattgacacaatacattaatgcccttggacaaaggctagtagctcatgcagactcagttaaaacgcctttccatttctatctgattgataacccgaatatcaacgcttatgctttctttggcggtaatgtcgtactccatgctgcactttttcgttatagtcgtaatgaaagcgagcttgcctcggtaatggctcacgaaatttcccacgttactcaacgccacctggcacgaatgatggaagatcagcaacgtacagcaccgctagcttgggcgggtacgttgggttctattcttttgctaatggcgagcccacaagcagggatggcagccctcagcggcactattgccggtatacaacaaggcatgatcagttttactcaatccaatgaacaagaagctgatcgtattggcatgcagacattacgtagagctggctttgatcctcaaggtatgccagattttatgcagatcatggtagatcaaacccgttacagttctaagccaccagaaatgttactcactcacccgttacctgacagccgccttgctgatgcacgtaaccgtgctaatcaatacccggcccaaaacattccacaatctcaagattttctgttcgccagagttcgtgttatgggcatgtacaccaccgagcaacgcggctatcttgagcaaattttagaaaactaccgtagaggcacagctaaagagcaacttgccgctgcttatggccgggcaatcttgctttctcaagataaaaaataccctgaggcacgggctattttagaaccactgttagcaaaacaaccggataatgtctggttcattgacacaatgactgatatcgacattgaacagaaccgaattgctcaggctatcacccggttacagaacgctttgcagaaacaaaaggacaatttggtattgcaaatcaatctcgctaatgcacttattcacgcaaaacaatatcaacaggctttaaaactacttcatcgctatacattcaataatccagatgatcccaacggttggcacctgatagccgaagccgccgccaaacaaggtaaacgccatgaagaattatcagcacacgctgaagaaatggcacttcgcggtcagtttgacaatgctatcaaatacctcagtagtgccagtgcactcgtaaaattaggtagttacgatcaagcacgttatgatgctcgtatcgatcaattacgccagctacaacagcgttacagtcaatacaaacgttaa

SEQ ID NO: 6121 - DNA, 1080 bp, Photorhabdus luminescens
atgctggatatgattatacagtggtatcgccgtcggtttactgatccgcaagttattgcgttatttgtcatcctgttggcagggttttgcattatttatttcttacatggcattttgacacctttgctggtggcgattgttcttgcctatttgttggaatggccaacggctaaacttgaaaaactggggtgttcgcgcacagtggctgtttgtattgtgctgattattttttccagtattagtttgttggtcatcttgattgtggcgccaactgtatggcagcagggaattaatctgttgtcagatatacccaatatgcttaatcggtttaatgaatatgctcagacattaccagcccgttatccggcgttggttgatgctggcattattgatatgatggccgaaaatttgcgcagtaagatttcaattgccggagagtctgtagtgaaattttcggtggcttcgctgattggtctgttaacgctggctatctatctgattcttgtgccactgatggccttcttcttgctaaaagataaaaaccagatgttgcaagcattgcaacgggtcctgccacgtaaccgcattttggccgggcaggtatggcgcgagatgaaccagcaaatcactaactatattcggggtaaagtcaccgagatggtgatcgtcggtatttgtacctacgcggtgtttgcatttcttggattggattattcattgctgctttctgttttggttgggctatcagtgttaattccttatgtgggtgcgttgattgtcacgattcctgttgtactggttgcgctatttcaatggggagtcggaacagatttctggactttgattattgcctatttggttgttcaggggctggatggtaacttgctggtgccgattttattctctgaagccgtaaacttacacccgttggtcatcattctctctgtgattacttttggtggtttgtgggggttttggggcgtattttttgctattccgctggcgacgctgattaaagcggtgatccaagcctggccggaagagatcgttataataggagacgatgaaataaaagagtaa

SEQ ID NO: 6122 - DNA, 471 bp, Photorhabdus luminescens
atgaacccattgaaagccggtgataaggcccctcagttcagccttcctgaccaagatggagaaacaatcaatttatctgatttcgaaggccagcgtgttttagtctatttttaccctaaagcaatgactcctggttgtactgtacaggcctgtggtctgcgcgatgaaatggatacattaaaggattcaggtgtagaagtgctaggcattagcacagatagcccaagtaaattgtcacgctttgtggagaaagaaatgctgaacttcacattattgtccgacgaggatcaccaagttgctgaacagtttggtgtctggggcaagaaacaatttatgggaaaaacctacgatggtatccaccgtatcagtttcctgattgataccaacggtaatattgagcacgtttttgataaatttaagaccagtgatcatcaccaaatcgtggtggattatctgaaactgcacccttaa

SEQ ID NO: 6123 - DNA, 546 bp, Photorhabdus luminescens
ttgccacaatcagaacaacattttctcgttataaccgctttaggtgctgaccgttctggtatcgtcaacaccattactcgtcttgtgagtgagtgtggttgtaacattgaagacagccgcttagccatgtttggcgaggaattcaccttcattatgctactttccggtagctggaacgctatcacaatgattgaatcctcactgccacagaaaggggccgagctcgatcttcttatcgtcatgaaacgcacaaagtgcgatacccacacaacatttcctgctacggtttccgttaaggttgatgttgatgattcatccggtattgttgagcagtttactaatctgtttactacacaggattttaatattgctgaactggtatcaaaaacacatccaccagaaggcaatatccctgctcgattgcaaatccaaattaccgcccacagcctattagaggatgatggcataattattaagcaggcgtttaataagttatgtacagatctaaatgcacaaggcagtattagtattcttgaaccactttag

SEQ ID NO: 6124 - DNA, 900 bp, Photorhabdus luminescens
atgtctagcgggagatttgaatttacaggtagcattgttgcgctggtaacaccaatggatgcgagtggtcaggttgataaggccagtttgaaaaagttaatcgattaccatgttgctagtgggacatcagcgatagtctcggtagggacaaccggagaatctgccacattgagtcatgatgagcacggtgatgttgttttgacaaccatagaattggctgatgggcgtattccggttattgccggaacaggtgcaaatgcgactgctgaggcaatatccctaacgaaacgttttgaaaacagtggcgttgttggttgcctaacggtaacgccttattataataagccgtcgcaggaaggtttatatcagcattttaaaacgattgctgaaaatacggatttaccacaaattttgtataatgtgccttctcgtaccgggtgtgatctgctgccattaactgtagcgcgtttggcgaagattaaaaatattgtcgcaattaaagaagctacagggaacttaaatcgtgttagtcaaatccaagaattggttaatgatgatagtttcatcttattaagtggtgatgatgcaagtgggttggattttattcagctcggtggtaaaggggttatttctgttactgcaaacattgcagcgcctgacgttgctaagttttgtgaattggcattaaacggccagtttgcagaggcgcgtaagttaaataatcgcctgatggatttacaccgtcagctatttgttgaacctaatccgattccagttaaatggggatgtcaaaaattgggtttgattgctgatgacaccgtgcgtctgccgatgacgccattgacggatgcaggaaaagtctcagttgaaaaagccttgaaaatggccggattattgtaa

SEQ ID NO: 6125 - DNA, 1050 bp, Photorhabdus luminescens
atggcaatattgttgcaaaaatcgaaggtgatgacggttgctggtatgtcacttgtcatgttattggcagcctgttccagcgaccagagctataagcgccaaatcaatgatgatgagacatatcttgaagcacctccccgaaaggcgttgaaagttcctgcgggtatggtattgccattgcagaatggtgaatatgatattccagcaatagcctctcaagggcaggttgggaaagcgcttgatattcgcccgccatctcaggcactagccctattgagtggttcccgtactgaaaacagtgcaaagagcagtaagttgctacttgaaagcactcctgagaatagtcatctgtggtcacagattaacaatgtgctattgaaaaaaggtttccaagttagccaacgtgatgatgctagccagacattgacaactgattggatcgattggctgcgtgcagatgaaaatgttccatatcaggctcgtcatcgtattagtgttgcacgccagagctatcagattgaattatccgttactaatgaagggctgagacaaggtgatcatcagataactgatcctcttgaaatccaacgttataacacactgatgctcaatgaattaattgaaggtgtgaaccagcagcgtgaacgtattagcgatgactctgtagcgcgtaatctaggttcattggatgtacagagtggtggtgatagatctggattacctcagatgattgttcgggcaccctataatattgtttgggatagattaccggcagtactggaaaaagtcggtatgaaagtgggtagccgcagtcgttcaacgggttctattactgtaacttataaaagtctcagttcatctagttggaaatcaatgggtgttaatgaaccatccattagtgaaggtgattacaaattacaggttggtgatttgaataaccggagcagcttacagtttattagtgataaaggtaagccgttgacccaatcacaaaatgatgaattggttgcagcgttgaaggcggctttcagccagaccacaggatcatag

SEQ ID NO: 6126 - DNA, 714 bp, Photorhabdus luminescens
atgcaaaaaaaagctgagttgtatcgtggaaaggcaaaaacggtgtacaccacggatgatcctgatttgctagtgctggagttccgtaatgatacatcagcattggatggcgaacgtattgagcagtttgatcgtaaagggatggtgaataataaatttaaccatttcattatgagcaaattggcagaagcagggattccgacgcaaatggaacgactattatcggacactgaggtattagttaaaaagttggatatggtgccggttgaatgtgttgtgcgtaatcgggctgcgggttcattggtcagacgtcttggtattgaggaaggtttggtattgaatccaccgctgttcgatctgtttctgaaaaatgatgctaagcacgatccaatggtgaatgaatcttattgtgaaacttttggttgggttagcaaagaacatttggctgagatgaaagaattgagcctcaaggccaatgaagtattgagcaaattgtttgatgatgcgggtttgattttggttgactttaaactggaatttggtttgttcaaagggcagatagtcctaggggatgaattctctcctgatggtagccgtttgtgggataaagagacattggacaaaatggataaagatcgcttccgccaaagtcttggtggcctgattgaagcgtatgaagaggtagcacgccgtatcggtgttattttggactaa

SEQ ID NO: 6127 - DNA, 1026 bp, Photorhabdus luminescens
atgaaaatattcattaccgatgaacaaaaagccgaacttgaacatctccatcacacctgccgtgataagagggagtgtgatcgcatcaaagcggtcctgctggcctctgaaggctggagttcagtgatgatcgctcaggccctgcgtcttcatgaaatgaccgttaaccgtcatatcagcgattaccttaatcaaggtaaacttaaatctgataatggggggtctgatagtttgctttctcaagaacaaactgattttttaatcaatcacttatctcaacatcttttccatcacacccatgaaatcgtggcctatgttgctcagctctggaatattacctttagcattcccggcatgaataaatggctacaccgtcagggtttttcttataaaaaaccttgtggcgtccctcataaattcgacgcagaaaaacagcgacaatttattgaatattatgagaatcttaaagtcacagcgaaagacgaacccatcctttttcttgatgctgttcacccgactcaaggcaccaaactcggttatggctggatgcgaaaaggcgagaaaaaaacagtaaaaacaacaggaagccggactcgcctgaatatattgggcgcgctcaacctgaatgccattggtcgtacggtgttccaggaatatcaaaccatcaatgactacaacatttgctgttttttcaatgaaataagaaagtcttatcctgactatcatcaaaaaattcatcttattgtggatggggcgggttacaacaaagctcatcttgttaaggagtgggcttatgttagcaatattgagttacattaccttcctccctatagcccaaatttaaacccaatagagcgattatggaaggtcatgaatgaacaggttcgaaataaccgttattttgcggataaacatgaatttcgagacaacgtcttcaaatttttcaccacaacgctaccggatatagcggactcgctgatgtctagaattaacgaccattttcaggtgctaaaaactgcatcttga

SEQ ID NO: 6128 - DNA, 1638 bp, Photorhabdus luminescens
ttggccttaaccgttacattatcgtgcgatctaagcggcccttatattatcaggaattatgttgataaggcgacatcaggaacgactgttgatcagcttatcatgttggcaatcatttatgtttttattgcgtcgattggtgttatcggtagtctggtaaccagttacatgagcaccaaggctggttggggtattgctgataccattagatataagctctttcaccatgtgatgacagttttacctgtattggaaatagaacggcgatcacagggagaattgctggaaaatatcgaaggtaatgctgatattataggaaaaacgatttctaaagcaggctttaaggctattgctaatgtagcgctgacattagggacattggtcattatattcagcgtcatgcctcaggcaggtattgccatagcaatcgtcgtcatactcgtggcgtatgtgttgattcaattaaccagactttctgttcgccgctggctaattgcgcgaaatgaaaaagcccgaatctttggttttgtcggtgattcattacatgcaatggatgatttacagccattgtcgcaagcgcattggcctgccattgcatttcgtaaaatgctgtcaatgttgctcaaatttgaacgcagtgcttatattggtggccgggctttttggccaattacccagatcttctttgcactctgtttcggtataggttttggttttgggcttcaattacttggtgagaacagcttaagcatcggcacattaacgatggtttatctttacgttgataaactgcgggagccggtggaggatatgtcatcggaaatagagctaatacagaaattatttgctgctttatcactttcagcaaaaatgttaaatgaaggcaccccagataaatcatcggataatttattgcctgatggtcctctctctatccatttcgataatgttgatttcagttataacggagaagaaactcaggttttgcacggtgttaatttttacgtcgctccggggagtaaaattggcattattggtagaacgggggcggggaaaagtaccattcttaatttgatgtgtggatttgcgcgacccgattcaggaagagtgaccattggcaatgtcgatgtttcaacgattaagccggaagagtttgcgaaaaagattgctgttcttagtcaacggtctcatctgttttccgcaacattgcgggagaatttaacgcttttcagtaatgaaatatctgacgatcaaatttgggaggttcttcaagaattagatgcgcttgaatgggttagagcactgccagatggccttgatacacaggttggtactaatggtctgatgctatcagcaggagaaattcaaatgatagcgggagccagagtgatgttacagcattgctcgttggtgattattgatgagggaacttctcaacttgatccccgaacagaagagagttggctgaaattgcttgaaaagttaagtcacaattgcacggttgtgatggtcgcacatcgccttcacacactttcggtcgttgatgaaattatcattatcgatgatgggcggattcaacagcgaatccctgaaacagaaatcgcaatgttaacgagtaatcatgggctcatggtatga

SEQ ID NO: 6129 - DNA, 1656 bp, Photorhabdus luminescens
atgactatatccaatgtatcaactaaagttaaaatgttaccggccttgactgagctgataaaaaagtttgctcctctctatttcattaccatgtttgtgtggacattgatgcatggttttcctctgttgattggttaccaaatcagcaaattactcgatagagcgatgaatgagccaactaaccctgtggtctggtggttgcttgcctctgcgattgccacaatggtcttgcgatcactatttctgttcttggggttaacctttgattttacgttaatcttcaaagtcagcgcttacctgaaagagcgggttttatggggagtaagccactgttcccgcaatcagagacagactttttctcaaggcgatattctgaaccgtattcgtgatgatagtgatgaaattgcggagtttctaagttggacctctgattttatttaccgcgcattacttttaattatcgcattggttgtgcttatcaacactgacataataaccacacttgctcttatgcctatgattgtgggcctttgggttggagcgatacttaaacgcaaggtagggaatttacagaagagtaaacgtcaatcgcaaggggatattgccggcaagattactgacgtcttaacgggtatacgcgacttgcgccttggcaacaaaatggaagggcagattgagcgattatcgcagaaatttgtcagtcgacgggcgattcaagccaaacatcaggtatttactgaccttctttctgggctgttcaaaaatattgtcatacttgggacgtcggctgttttattgatagtgagtaaacggatcgttgatggcagttttactgtagggaatctggcactatttttgacctatatcggttggatcagtgaacagatactcttctttggtcggtcagttgcctattataaaaatgctgatgtgtgttatgggcgaatcagacagtttctggcaaataataaagtagataaaaaagagaccaaagaatatgagccagatgaaattctgcataagttaagtgttaatcatctcgcttactcaaaaactcagcccccagtttcgtttgaggcaacggctaatcaggttattggcattgtcggtgatattggttcgggtaaaaccacttttttgcgttacttgattggtctggaaaaatccagttccggcagtgtactgtggaataaccgagaggttctgggcaatgaaaactggtggcggaatccacgtattggatatgccagacagaaagccggtttttttggtggaactgtaaggcaaaacctcgcgttgggtgataaggatatcgatgatgatgtcatggtacgggcgctggaggcggtaggtttgacgcccggctcatatgaattgccagacgggctcgatactgtcattaattctggctgtgccggtcaattatctggcggtcagcgtcaacgtttggcattggcccggatgttatgccgtcccgctgacgtttatattgttgataactgcgattcatcattagatacggatacggcccgtcgtttatggactgttttacctgagcattggcctggtttgtggattgttgtctcgcataatgccgatcttctcgctaaagcggatcatattgttaccgttcaacagcggagagaattagcataa

SEQ ID NO: 6130 - DNA, 201 bp, Photorhabdus luminescens
atggtaaaaatcgctgattatccacaaatgaaaaattatgcttggtatttggctgaggatattgagttaactgatcgtgatgcgcttgcattttacgaacgcaattggaaatatatcgaagaagataagcttggacttcaagagcgtcagctgattgaacgactcatccatgagcaggggaatggttttttgaatgtctaa

SEQ ID NO: 6131 - DNA, 207 bp, Photorhabdus luminescens
atgtctaattctcgtcttgaggcagcagaatatcgcccagcctgtgaactgatgtgtgaatatgtccagcgtcataaatatcgtgctttccttcaggaaaaggttgatatcgcacgccaatctgtaaaagagggtaatggtgttgaacatagcgacgtaaaagcgatttttgcggctcgaagagaacagtttaaggctcgtaagtga

SEQ ID NO: 6132 - DNA, 1176 bp, Photorhabdus luminescens
atgcttattaagaaattaattgccacattggaaggtgaaatacagatattaataaccacattgcttaatgagcaatgggaagccgctagggaattaatgaatgaatcattgcgtatggcggctgatgatttagctttaactgtattggcagacagtttgtgtaactcagatatcgatattatttatcagcagcaaggtgcttgtcatctgcggctaaatactctcaatggaaagttcaatctttatattgggattaaagatcggcaaattaattctctctcgttatctcgatgcccaatacctgatgcgtatgcaaaacagggtatttttatcgaaaaaacgttaaagacgtttggtcttagagatgtcccggatggtttggtctgtttgccatcaccacataatgatgccaaagcacttgtactattgcttgcaggttctggtcctcattcgatggattatgatgttgggcctaattcactgtttcgtatgctggcacatgaattaagtcaatatggaattgcgagtgtacgttttgacaaacgctattaccgtatccggcagagaaatatggaccctgaggttgtcgatctcaatacggaaattgttgacgatgcttgtaatatactgaccggtttaatgggacatattgaatttcacgatgtgccagtatttctggttgggcacagtttcggcggatatgtcagcccattaattgcagagaacttacagcaaaaatcgggtttaaatgttacgggtattgcgatgttggcggcgcctttccgtaatttactccgggtgattttatcccaattacccagtgggaaagagcaagatacgatatctcttgcgagctttttatcagtgccggatagttatctcaaacagattgagaattatcatgcatttgactgcttaaacagcttgcctgccatgccgttattttttgctcagggagatcaggattgccagattttgcataatgttgatttcacgatgtggaaaactgcactgcaaaataataggcaggcagagttcaaactctacactggattgaatcatattttattgcccacaatggggtgcgatggtggagaggattatctgcacccaggtcagatcccggcgcaggtaattgcagatttgactgcatggatcatccaccattcgtcatga

SEQ ID NO: 6133 - DNA, 231 bp, Photorhabdus luminescens
atgaaaaatcagcttatctatgaaattttacatcgagaaatcaaagcgcttcatccagaagcagagacaataccggaggatgaaaacctttttgatatcggtttcgattcggtaaaaatgctgatgctggttgatcggctaaatgatgtggggtatccaattaactttgcagatttagcccgctggccgacaatcaatgattgggtcaagctgctcgcaaaaaatgaatag

SEQ ID NO: 6134 - DNA, 1224 bp, Photorhabdus luminescens
atgagtaaaataactttaaaatttaatatttattcaaccgtcatcctatttaatctcaagatgacggtacgctctcttgccgcccataaaacacgagtcttcctgacgctattatgcattgccatcggcgtagcttcgattgtgatcatgcaagcaatcggcgaagaaaccaagcatcatattgttaagatggtctcctcaatgggaagtaatatcatttcagtaaaatataagggacaagaaaacggcgctttcgattcccatcatgattatctgacacaagaggatataacgtcactttcaggtaatccccatattagccacagcactctattttatactgcgccaggaacaatcgtttctccacaaggctctgctgatgttcaattaattggtgccaatgcagatatcgcgattatccgtaatctggtgattgatcgtggacgtttttacacaccacaagacaatactgccctagcaaatgtcgttgtcttgggagcatctctggccgagagactttttccgcaaaaagaaaccgcatttgggcagagcatcaagattaacgacatctcgatgcaagttatcggtatcctgacacagaaaggcgaaggtatggacgcaggggtagatgatgccgcatttttgccaagcaacagctatctggtacggctgttcggtcatacgccgcctagtggcatggtgttgaaagccaaagatgcctctcatattgaaccggttaaatacgctattgaacaacggttgtcacggtttaaacatcaacaaagttacgagatacgtaataccaccgaattgttgaaaaccttgcatgaaacccaatcaaaaattaaccttttcctcttatcaatatcatcagtgactctctttgttgcgggtgtcagtgtcatgaataccattctcattagtgttagagaacgtagaagagagattggtatacggcttgccgtaggagccagttattccgacattttttaccagtttcttaccgaagcatttttgatttcattattgggaacattattaggattgttattttcatttatcggtttcagaattttattactatttgatattacggttggcttctctttctattcctttttactcgcttcccttgcagcctgctttattaccgtcgtgtttggtgtatatccatcacatcgtgcagctgcatcagcgccaatcgaaggtatcagagaattgtag

SEQ ID NO: 6135 - DNA, 666 bp, Photorhabdus luminescens
atgataacgctaaataatatctgcaaaacctatggtaatgagggtaaacaacatcttgtcctgaaagatatttgcttaaccatagaccaaaatgattatgttgctattcttggtcgctccggttcagggaaaagtaccttattgaatataataggacttttggatatcgccagtgcgggagaatatcttattaatgatctcacggtaactcagcaaaagattcactcattggcgcttttacggcgaaaatattttggctttgtctttcaaaattataacctgctggaaaactaccgcattgatgaaaatatcttgatgcccatgtactacttaaaaagaaacttcgattatgacagagaacatttccgttacttaatcgatcgtctccaacttgacaatttattagataaatacccgcgccatctatcaggaggagaacagcagcgcgttgctgtcgctcgcgctttgatcaacaatccaaagtttattattgccgatgaacctaccggcgcattagataccactaatgcgaccaacctcatgcaactttttactgagttacatcataatggatgcggcatcattctagtaacacatgaccaagttgttgccgaatatgccaaacgccgactatatctggacagtggttctttggtggctcaatga

SEQ ID NO: 6136 - DNA, 1158 bp, Photorhabdus luminescens
gtgctggtcaaaaaaaagaaatgggttgttatcaccatcatcatgatcgcttttcttgccgtggcttataaccactttagccaaaaagagacatctacggtgatgacagaacaaatcgtcaccggaacgttaggtgatgttattactacggtcaatgctgccggtattgtacaaccaaccagtcaagtcaatgttggtagccaaatttcaggccagttaaccaagttatatgttgaagtcggggatattgttgaaacaggtaagctggtcgctagcattgatgatactttttatcgtactaaagttgaggcaagccgagcgcgactagaaaaattgcgagccatgttgcaagaagaacaatacgcttatcaacttctggtcatcacggaaaaacgccaaagagagcttaacctgcgttccgcaaccagccagcaactgctggatgaggctgcttttggcgtcaaaaaaagtcaggcaagaattgaaagtctcaaagcagacatcaggcaaaatgaacatattttgcacagtgaagaagtcagcctcagttatagccaaatctattcgcctattgctggcgtcgtgaccgcaattcatgttgaccccgggcaaacactaaatgtcaatcaacagacaccggttctcatgcaaattgccgacctcaaaaatatgacggtttatgcaaaggtttccgaagcagatattaaccaaatcgtgacggggcaaaaagcttccttcaagatctatagtacaaatcagcatatatggcacggtaatgttaagaagattatgtataaacccgatctcattaataatgctgtttattatactgtgctatttgatgtccctaatgataatttcctgcttaaacccagtatgagtgcggatgtcactattgtgacccacgaaagcaccggagtagtgactatacccagtgatatactgaataataaacggcatcaacctttgaacgatgatctaactacctattttttacgtgagatgaaagatggaaacatcgtagtaagacaattattgatcggtcataacaatggaaggcgttcagtcgttgtcagcggattgcagagtaacgagcagatcgttgtactttccaaacaagataatcttgggaagatccaaaatgataacgctaaataa

SEQ ID NO: 6137 - DNA, 4392 bp, Photorhabdus luminescens
atggaatataataacaactattggccgttgaattatacacagctccgcttagctattgctaatactgttgctgacgataagtctgtcttcaatgtcggtgaattcatcagcttcagtgataatattagtctggcaagattgaagcaggccattattaccattcatcaattcaatgatggtttttccttacgttaccgtattgccgaacacaatatttttcaggaaaagagctctacgccggtcgacgttataccaataaaactgtcagatccagcagtagaaccagcggcaaaagcggattttgcaaagagaacaactcaaccgctagcgcctgaaaagggtgtgacgataaggcattatctttactttaatgatgttgggtgctgtttctggggaatcatcgctcaccatattgccacagattattggggcataggtcagttgattcatgatgttttgtcttgctatgaacaacaaacattccacccaacatcagcaccgatctttacctatcaggcttatcttgacgaggttaaatataaagcaaacgtgcattatgctaacaacaaagagtattggaataattacctcaaccaactgcccaaattagaggattatacccgtaaacgtctatttccctcaaaagcaattaaagtaagccggccgctcaccgcaaacaaccatagttttactttcaatgataaattaatgatgatgttggctttatgtctgcaaatgagcaaacgaggccgcgtatcaacaaatatcatcaatttacctttctctaaccgacgtgataaaggagaataccgctattatcgtccggcaatgaacacgttacctctgatggtttctttggccccacaggcaaccataaaacagatcctcgtagcaatgcagtcgcaaattagtctgcatagcaagcatagccgtattgatataaatgatttgaatgatgaagcaatcaatcgggcagatcaattcattgccgccccctatgttaatttgctgcatgagcttgaacatgatcttatgaaagataatcgcgctatacgcggttgtatgacttctggcgcggtcaataattatggtattaacatccggttttctcctgatgggatatcagcattagtcgaattggatgtggggagccgcctgtatagtcattttgccgcccatactctgatcgacgattatttacatatttatagtacgattgcagaaaatattaatgaaaccgttgaggcatattgggtgaaatataaagaaattgaaccaacggataatattatatctagcctggataaccccaaaaatattgttattaatcatcctatcaaagagaatattattgcccgaatagcacaaatcgttgcagtatcgccggataaaaaatcagtcattcatggagatcaaacagaaataaacaccgtgcatcgccttaattacggtgaactttaccacaaattattcactttcagtcaattgctattatcctgcccactacaaaatcgaagggtagccgtattattacccagagggatggattccttattatctatattatctatccatactgcgggattatgttttgtcccaatcaatatgacatttggtcaagaagagataaataacatattaaatagtctgaatatttctttattaatcactgctcgtcattaccatgaaaaaataaacggtgttaataatacgcatattctctttattgaagatatagaaactcgcccttccgagatatttctggggcatgatataaaacgtccggcgactcaagaagacgaagcctatatctttttcacatcaggcaccacaggtgtaccgaaagcagtaccaataacgtttaaggggctttatgcctatttggctgcaatgacagagcagtatgatattaaacaagatgacgttattctcaatttcagcacacccgttttcgatgcttatattgaagaagtgttcggatgtttttatcaaggtgccacattagccattgccaacgataatatgatcgttgaacttgagacactgttttcattttgccatgcacaatcggtcactatagttaattttcctaccaattattggcatcaaattgtctttttcctacatgcagccattaaagaactcgcaccttcgattagaatgacaattatcggtggcgatctggcaatggataaagccattcatcattggttggaaaaagtcggatgtggtatttctctgattaactcttatggcccaacagaatgttgcgttgtggctagcagtcacaaaatagctgataaatttcaacccggtaatatcattggtaaagcgctagccaataccaatatcgttattcgggaatatggaactaataagatcattaatggcagtaatggagaaatatgcatccgtggcgattctatctgtagcggatatattaacgataatcagtcaacttcacgtaggttcttacagttgaacgatggagaaatctattatttaaccggagaccgtggattttatgatgcccaagggaatttaaatttcattggccgtctggataaagaacataaaattgacgggaaacgtgtcgatctggatgaaatgcaaaaattacttacggcggcgattaatattgatgacattcatttagcgataaaagaaaatgaaactggctaccaatatattaatatatttatacctgatagatcatgctcaattacacgtcacgaaatcgtctcattcttgcgtggatgttatccaaaattgcaggtaccttttattgtcgaattatcatcatccaacaattctgctccaatatcagaattgaataaagaagataatatttcgcagattaaaggagaaaaacgagaaatattttttactttatggcgggaagtttttggcgatagcgacggcattgttgatgaagagactaatttctttgatgccggcggtacttcgcttaaggcattattattaataaacaagatccagcaacgttttaattgttctattcacctggaagatttctatcacacccctagattaggttatctattacaatctgtcattcaacaagggcaaataccggttttaatcgataaaaatagttcttgcctgacagaacaacacgaccaatattattggattatcgatactatctctaatcgttccggcgctcataatatcccgctatattatcatctgatcggcgagattgatttaaagaaattacgttacgctttgctgtatatcatgcaatatttccctgctctctgccaaagagtcaccataatagatgggcagctctctttaaccttctcgcctgctattgaagagaacctgcctttcgaatatattgatttaactcatgctaccggcattaatattgaaatttcattccgcaaaatcttaaatgatatggcatttaagccgatggcgttacaggataatccaccggtatattttaagttattaaaaatagcagaacatgagcactaccttttattaaatttccatcatgcgttttgtgacgggatgtcgattgctcatgtgttgcaaaaattatcttccgcttacgcagataatgtaccgaagattgaagctgcgacggaaacaggcattaatgtcattaatcagcgcatgtcagacgaaacattaaatttttggacagaaaaattattcaacgtcctttcggttgtcggacagaataatgagtcatcggaaactcatcttagggcccgaggccgacgttattcaatgccgttgtctccacaattaatggccgaactatccagcacgcagaaaaaatatgcggtgactctggaacatattatgattggcgcatttctgatgaccattaattcattactcaataaagatgagattatcgtcggtattccttgtgccaaccgagctcctcccatatcgtttgacagtgttggtagcttcgcaaccacactactgctgccctacgttactgcggaaacttcgctgattaacctatccatatatgtccgcgaatttctggccgacgcgaatactcattccaatatctcactggcctatttaaaacaacatcttcatcaccatcacggtatgcaattgccagaagtcacttattatttttcttctcaaatagggtttgaaaccggtttatatcttggtgaaacccgttgcaccaaagaaaaaatcaaggggcttaagcctaaaggagatattgcgctcgaactgatcaatttgccaactggaataggtctggaatggctctacgatgatgatattttctctgaagatatcatcagcgacatggggctgtttttgattgatttattggattgcataggcactcagcataacttgatgcctggtgatacggaacgataa

SEQ ID NO: 6138 - DNA, 495 bp, Photorhabdus luminescens
atgaataatatcgtgggattaaatccagacttcaaagtcatattaatgaatgtcgctatgctcgtcctgatcgctttagtttttctgcctgtgccatactggctcagtaacagcaatcccaacaagctggcggcaagtattgcgacgactctctttatcatcattgccttatttgtaggctatcaactgttatcaaataaagccgtggccaaggaaggaaaattattgatgaagtccggggtatattcacacgaatgggttatttcctcattacgccgggaagcaggcgtttccttggaagattttagccgaagcaatggtatacatattatccattattcgtctggatactatcacaagggaaaaaataaatatttcattctgcgtgtaagcaaacgccctctgatctgctttaattcagaaggtaatattggattatgcatagatgaatctatttttgaaaaaataaagggcgagttgcaagataaaatatag

SEQ ID NO: 6139 - DNA, 1011 bp, Photorhabdus luminescens
atgaaaagacgtacatttattggcgtggctgccggtgcagctattggcagtgtcatacccaccgtcaatgctagcactgatagcaaccgcctgtttggcgtgccacgttcattactctctccgggagaggttgaagaaaataagctaaggttgtcaatgtcaaacgccaaactcccggttgaagtttgggaagagatcatcacctataaccgattctgggaaaccctacaacaacagcccaatttagcattagaataccgggagtcaccggaaaaagtgttagctgaatttggcatagacaaagatatcgttagccccggttccgcagaggaattactgttattcatcacttatgataaagacttaatgaatgcggtaaaaatcaacgactatgaagcgctcttttcccgcctaaaaacctatggtttaaacgaaaggggctcaagtctgagaagccgaatcaatcaccatctcaatcaagatgccagcctgttcgcacattttaaagaaaacatcgaatcctatcagctccaagatacaaacagtcctcctcttctccggctgaaagaaattctggaacccttaaacagtgaagatgataccagtattgaaattgctcgccttgccgtaggggccaatgtcgttgctgcggtcaacgtggctgtcggcacccgagttgtcgcagcagtgaatgcggcggcggcagttaacgtagtagcctacttaagcctcgcggtacaaacagcggtgactgtatgtatggcaaattatttacccaaacttgatcatagcgacctttcagccggcacggcttctcttcatcttgccagactctataacaaccaagaaatggtcgatacactggttaaagaagctgtcagaagggaaatcaccgcttgcctgtttgcggcgcaaaagtgtggttatatcaatctgcccgcaacacgtgaagaacgtaaagaagtgattcatctctttaccgaattatctttaggaatggcagcagcatga

SEQ ID NO: 6140 - DNA, 1065 bp, Photorhabdus luminescens
atgccatgcttccctcctggatattgggaacaatatccaaacaccgccaccgtgatcacaacctatacttgcaatgctgcttgcaaagaatgttgttttgaatgtaacccctcggtaaaagcgcgtttaagcctggatgaaattaaacaatttattgcacactcaaaagctaattttccagggctaaagttagttgttttcagtggtggggagtgtttcctgctaggtaaagatctgattgaagccattcgctttgcctcagatcacggcttattaactcgttgcgtgactaacggttattgggggaaaaatagagaaaaggcgcaaaaaatcgctcaagatttaataaatgcgggcatcacagagatgaatatcagtacagggaaagatcacagtgaatggattccccttgatagcgtagtgacagcggcagaagcattggccgaacaaaatattacaacactgattacagtagaacaggatacctttgattccgccattgcaacgcaaatcacccagaatcccgttattaagcgactgaaagagcaaaacaagattaatttacagcgaaatacctggatgccgttttatgacaccagcgaagaacgaaaagatattccaaaccgggatcagcaactggcaaaagggtgcgatcaggtctttgaaaatattgtactgacaccacacggtgaaatttccgcttgctgtgggctgacattagaacatatccccgaaatgaaacttggccgtttacaaggaggcgatgtatctcagctttttaaaggtcaggaagaagactttatgaaagtctggttaagaactgagggaccatacaacatcctaaaaaaatatcgcccgcaggatagcaatattaatctggaaaaaatcgttcatccctgccaagcctgtgctcatttgcataaagacgagaggacacgccggaatctgttagataattatcacaaagaaattattccggtaataaagaaatttaacgctaaagaacggctggatctcatctactactcagcagaaaaaaatgccgttaacttaattgaagaatga

SEQ ID NO: 6141 - DNA, 1620 bp, Photorhabdus luminescens
atgtctattgaatttacaccctggccggttgagttagcagagcgttatcgtgaaaagggttattggctgggtaaacccttaactgacatactttataaacaatgtcagcgacaacctgaagcaatagctattatctgtggtaaccgtaaatttagttatcatcaacttgatcaacaatcatctgcattagcctcaaatttaactttagcgggaataaagagaggtgatactgctatcgtacaattgccaaatatagctgaattttatattacattttttgcgctactgaaaatgggggtagtacctattaatgcattgtttagccataataaattagagttacttgcttatgcacaacaaattgatccaagtctgattgtactttcgtcagagcattcacttttacagaataatgatttcctggagcaattaaaaatacattgcccacggttaaggaatatcgtcgttgatggtcgaaaaatacaatataccaatgaattaaaatcgtggttagagtcaacaaatttacctttgaattttgaggcgacacgttcagatgaagtcgctttttttcaactttcaggcgggagtacagggacacctaaattaattccaaggacgcatgacgattactattatagtgtgaggcgcagtgtcgaaatttgtgagttgacacaacagacccgttatctttgtgctttgccggcgcaacataattatcctttgagttctccgggggcgcttggcgtattttatgctggtggttgtcttatattagcaacagatcctgggcctacgacctgctttccacttatacgtgaacataaagtaacaatgacctcattggtgccatcggctgttgcgttatggattcagacgatgaggaaataccaatattcactagaaagtcttcggctattacaagtcggtggagcaaagttaagtgaaagtgtggcgcgagtgataccgaaacttttttcatgtaagttgcaacaggtttttggtatggccgaagggttggtatgttatacccggcttaatgacgatgatgagcgtatatttaccactcagggatgcccaatgagtggagatgatgaggtacgtatcgttgatgataacggcaatatacaagcgccaggttcagcggggatgttaatcattcgtgggccatatacattccggggatattataaaagcccagcgcacaatgcgaaggtattcgacaaagaaggtttttattataccggtgatttagcctatatgacgaaagagggttatatatgtattgtcgggcgtgagaaagatcaaattaatcgcggtggtgaaaaaattgcttcggaagaaattgaatctttgctactcaaacatgaagatgttatccatagcgctttggtttcgatgcctgatcctttgatgggagaaaaaagctgtgcttttattgtggtggctgatccgaatataaacacgttgcaactgcggaaatatttaaggggaatggggattgctgaatataaattgcctgatcgtttcgagattattgatgttatgccggttacacccgtcggaaagattgataaattattattaagaaaactcattcgagacaaattagaaaattaa

SEQ ID NO: 6142 - DNA, 654 bp, Photorhabdus luminescens
atgaccattccatcattgaaaaattatatgctacctcagccaaaagattttccaggcaataaagcatcttggttattcgaaccccatagggcaattttacttattcatgatatgcaggactatttcttacagtttttcggtgataatagccctctaatcaataaattaattgaaaatatccatttgttgagagtcttttgtaaagaaaaagagatccccattatatatacagcacaacctaaaatgcaaagtgatgaagaacgcgcattacttaatgatatatggggggccggcttgaatagatcaccccatttacaaaatattaaccctgctttggcccctaataacgatgatattgtgatagttaagtggcgttatagtgcatttcaacgctcttcgttagaaaaaaatataaaagacttaggccgggatcaattaattatttgcggggtgtatggacatattggttgtatgattactgcggttgacgcattcatgagagatataaagccttttttagtgggtgatgcgatagcggattttacgctggaagatcacctcatggctttaaaatatgttgctgaaaaatcaggaatggtcatgagtactaaagaaataatttcatcggtaaatttcgataaactgaatttataa

SEQ ID NO: 6143 - DNA, 747 bp, Photorhabdus luminescens
atggattttagccataaaaccgtctgggtaactggggcggcacgtggtattggtgaacaaattgcccgtgattttaccgcgctgggcgctaacgtaataggtttcgatcgcgtatttgagcaagataatttgccttataaatgtatacaactcgatatcagtgatccagaaaaggtcgaaatgatctgttcccaacaactgtctgtctcagccgagttagatattctggttaatgctgccggtatattacaattgggaaatattgatgagctaaatattagtgactggcatcgttgtattaatgtgaatgcttctggggctttttatctatttcgtagcgtgattccccattttaaacgtcagcgtggtggcactattatcagcgtcagctctaatgcggcacgtgttccacgtatgcaaatggcggcttattgtgcatcaaaatcagcactgacaagtttaacgcattgtgttgggttagaacttgcgccgtttggtgtacgttgtaatgttgtatcgccgggttcgacggatacatttatgcagcgttctatgtggaaaaccgatgatgatgaaaaaaatacgattaacgggtatcctgagcgatataaattaggtattcccctcggtaaaattgcaagtgttaatgaaatttcacataccgtactgttcttgtcttctgatttggcaagccatataacgctacaagatattgtggttgatggtggtgcgacgttagcttgttaa

SEQ ID NO: 6144 - DNA, 453 bp, Photorhabdus luminescens
atgagtcatctcgatcctactttactggtgctgctcgtgttggcagcactgggtatcatcagccacaacatgaccgtcactcttgcaatgctgctgttgttggttatccgcataacgccactgaatcattttttcccgtgggtggaaaaatatgggttgactatcggtgtacttattttgaccgtgggagtcatggcgcctatcgccagtggaaaaattacggtacaagctgtcctcaactcgtttatgaattggaaatcgttgctcgcgatagtaataggtgtattagtgtcatggctgggtagccggggtgtttcactcatgtctaatcagccatcaacagttgctggtttgctggtggggacggtattaggtgttgctttatttaaaggtgttcctgtgggaccgctgattgcggcagggattttgtcattgttgattggtaaatcatag

SEQ ID NO: 6145 - DNA, 2049 bp, Photorhabdus luminescens
atgttgccagaattgagtgtgatacagactgaaatgcagcagcaagggttacgtcgtttgctggtgttgagtggagatgatcattggtgctatttacaggctaatgaattacagcggagatttatcggtgattggttatggatctctcatcgtaaacagcacgctgtgttgccagaaaaggcggtcagtttattaggtcaggaatatctgcacggaatatttgatgctaccgaaggttttaatgcggaagcactggcgatattggcaggtacattgaaagctggaagttggttggtgatgatggttccatcttggtaccaatggcgtgatcaacccgataaggatagcgcgcgttggaacgaacagttagaggcgattccaacaccgcattttgttcagcatattcagcagcaaattgttagcgatccccaagttttactatggcggcaaaatgatcccttatgcatccctgtatttccacaatacagcgcgtggcaactgcctaatggcagcccaacagccagccagcatgccattttggcgcgacttttgcgggcaagtcagggggtatgggttattactgcgccaagagggcgaggtaaatcgacacttgcaggtatgttaatgcagcaatggcaaggaaattgttggttaactgcaccggcgaaggcaacaacagcagtcattaggtgctatgcgggggaaaagggaaaattctgggccgtagataatttgctcaaatattgtagacaaaatagcgtgtcagatattgattggttgcttatcgatgaagccgctgctattccaatgcctcaattatctgaattaatcggctattttccccgcatattgttgaccacaacggtacagggatatgaaggcacagggcgcggatttttacttaaattttgcgttgggcttcctgatcgtcatgtcctgaacctgacagctcctgtgcgttgggcggaaaatgatccgctggaaaattggttggaaagcgctttactgtttgaggatgcaattcctgtcaacaattctgatcaggcgatcagttatcaggtctatcatcagcagcaatggattaaacagcctgaattactgaggcagttttacggcatattaaccagtgctcactacaaaacttcacctttggatttacggcgtttacttgatgctaaaggcatgcaatttgttgcggctcttggaaataatgccttgatgggggctttgtggatggttgaagagggtgggttgacgcttgagttagcccatgaaatatgggcaggcaggcgtcgtccaagaggaaatttggttgttcaatcgttagctgcccatagcggtttaccgcaggcggcggttttgaaatctcaacggatcagcagagttgctgtacaggctaatcatcgcaggcacggtattgctcagggaatgatcgcgtatcaacgggaaagggcagaaaaacagggggtggattttatttctgttagctttggttataccgcggagctctgggcattgtggcagaaatgtggcttccaattagtgcgaatgggaactcatttagaagccagcagtggttgttatacggcaatggctatttttcccctgagtgaacaagggattttgctggggattcaagctcagcaacagcttgcccgtgatgcatattggctggaattgcagattggatttagcttgcctgttgattaccaaactgaccatcatctcaatcaacatgattggcaggaactgtcaggttttgcatttgctcaccgaccattttctgcttcattaccgtccttgcaacggttgttgctgaacagtgatttgccgttgattgcgctgagaaatcatctccagcaggaaatgcgtgttgagcaatgcatcaccgtattgcagttgagtggatataaggcattaatgcgactctggcggcaagaaaccgcacaggcgttatcaagtctggataagaaacttgccaaagattggcaagagtggactacggctttttttgaggccaatcatcttcatcatcccacttgctattaa

SEQ ID NO: 6146 - DNA, 189 bp, Photorhabdus luminescens
atgcaatggttagctgattactggtggattattttaattttattggttggcgttcttctcaatgccattaaagagttacgccgactggatgttaaaaaatttctggacaataaaccggaactgcctcctcatcgggatcttaatagcaagtgggatgatgaagatgattggcctcaaaaaaagccgtag

SEQ ID NO: 6147 - DNA, 678 bp, Photorhabdus luminescens
gtgatcacagcaaatatgttaaccggtctggcgactggccacttgattgccctctttggcaatcaccgattacaaccagaagccgccaatgcttttttttccatgcagcaagccgctgaaaaggccggaattaatctgcaaccggccagcacgttccgtgattttcaacgtcagcaagctatctggaatggaaaattccgtggtgaacgcccggtgttggatgaaaacagccagccaatggatatcacccagttatcagaaggagaacgctgtaaggcaattcttcgttggtctgccctgcccggtggtagtcgtcatcactggggaaccgatctggatgtctatgatccaacaatgctaccggctaaccagatgttattactcgaaccttgggaatatgaaaatggtggttatttcgcaccattaactcattggttgaccgagaatatggctcatttcggtttttaccgtccttttgtcggtaactgtggcagtgtcgctgatgaaccgtggcatatcagctaccaaccattcgccaagcaattggaaaaattgctgactcagcaaatgttactggatgtatggcagcagcatgacatcgccggtattgactggttatctgctaacttaccctatatatttgaaaattacctccatgttgcgcaggagacaacctaa

SEQ ID NO: 6148 - DNA, 1128 bp, Photorhabdus luminescens
atgacttgccctgtcattgaacttgcacaacaactcatcagacaaccctctatcagcccggacgataaaggttgccaagatattatgatcgctcatttgcaaacaattggctttaccattgaacggatgccctttggcgatacaaacaatttttgggcctatcgcggcataggcccgacgttagcctttgccggacacactgatgtcgtccctgcgggcgatgaatctcagtgggaatatcccccatttgagcccactatccgtaatggcatgttatatggtcggggtgcggcagatatgaaaggatcattagctgccatgattgttgcggctgaacgtttcgttgccgcccatcccaaccataatggacgtctggcctttcttattacttcagacgaggaagcgaaagccacccacggcaccgttaaagtggttgaagccttgatgtcccgcaatgaacgattggattattgcctgataggtgaaccttctagccagcaccgtcttggcgatatggtgaaaaatggccgtcgaggttccctgacggcgaatctcactgttcacggtatccaaggccacgttgcctatccgcatttagctgataaccctatccaccgtgtccttcctgctttacagacattggtcaatacacattgggatgaagggaacgaatttttcccggcgaccagtatgcaaattgccaatatccacgcgggaacaggcagccacaatgtgatccctgggaatgtgcaagttcaattcaatttccgtttcagtacagaactgactgacagccaaatccgtgaacaggttgaaactatcctcaaaaatcacaatctcaattacacgattgagtggatactggcaggtcagcctttcctaacagccaaaggtgagttagtcaatgccgtcatccagtcaatagaccaatattgtggctatcaacctgaattatctaccagtggtggtacatccgatggacgatttatcgctcagatgggcgctcaagttgtcgaactggggccactcaactcaacaattcataaagttaatgagtccgtcagcgccgccgatctgcaacaacttagccggatttatcaacgtgttatggagcagttaatccagtga

SEQ ID NO: 6149 - DNA, 387 bp, Photorhabdus luminescens
atgatattggataaatcttctcaacccgcttttactctctatgggatcaagaattgtgacacgataaaaaaagcccgtcgttggctggaggaacaagaaattacttatctgtttcatgattatcgtgttgatggactcaatgccacacttttgcagtcatttattgacaaactgggttgggaatcattaattaacacccgtggtacaacttggcgtaaactgaccgatcaacaacgagcaacaattaataatgctgacgcagcaaaagcgttgatgttggaacaacccgctattatcaaacgtccactattaatttctgcaaaaggtgattacctattaggttataaagtggatgaatatcagcaattttttgctgaggcacgctga

SEQ ID NO: 6150 - DNA, 636 bp, Photorhabdus luminescens
atgtataaccattcagtgatgatagttgatgaccaccctctcattcgccatggcttgaaacagattgtagagctcgatcgggcgcttaccgtgacagcggaagctgacaatggtgaagaagcaataaatattgcatgcaagctgaaacctgatgtcattatgatagatctcaatatgaatggtctttcaggcgtggacacgattaaatctatccgtagaaaagggatcaattcctatgtactggtattatccgtttcagatgatcgaaatgatgtttacgcagccattgacgcaggagctaatggctacttacttaaagatagcgacttagactcgttattaagcagtattcgccatgctgctcgtggacaaactgtatttagtgaaaaaatataccaacatctcgctaaccgtcataaacatgttgatcctttatctgaattgaccaaacgtgagttagatgtattaaaagaagtttccagtggcatgaccaataaggaagttgctgatgtcctatttatttctgaagagacagtgaaggtacacatcagaaacttgttaaaaaaactgaatgtacgttcccgcctggctgcaaccatcatgtatttgcaacataggaaaaatggagtagcctaa

SEQ ID NO: 6151 - DNA, 2280 bp, Photorhabdus luminescens
atggatgaaaaattaaaacagagtgcattggattttcaccagtttccacaaccagggaaaatcacgattactcccactaagcctctgataactcagcgagatttggccttagcttattcaccaggtgttgctgcgccttgcttggaaattgcagaagatccattagcagcttacaaatatactgcgcgtggcaatcttgtggcagtgatatctaatggtagtgcggttttaggattggggaatattggtgcactggcaggtaagcccgtgatggaaggaaaaggtgtcctgtttaaaaagttctcaggtattgatgtatttgatattgaagttgatgagtctgatcctgacaaattgattgatatcattgcggcactggagccgacgtttggggggattaacctcgaagatatcaaagcaccggaatgtttctatattgagaaaaaactgcgggaaaaaatgaacattccggtattccatgatgaccagcatggcacagcgataatttgtaccgctgctgttttgaatggtttgcggattatgaaaaaagagatttcagcggttcgcttagttgtttctggtgccggagctgcctcaattgcctgtatgaacttgctggttgcgcttgggttgcaacgcaagaatattgtggtatgtgactctaaaggggtgatttatcgtggtcgcgataaaaatatggaagaaactaaagcggcctatgcgattgaagacaatggcagccgcacattaggtgatgttatccctggtgccgatattttcctcggatgttccggccctggcgtgttgactcaagacatggtgaaaatgatggctaaagatccactcatcatggcattggcaaaccctgaaccagaaattttgccacccttggcaaaacaagttcgccctgatgcaatcatttgtactggtcgttctgattatccgaatcaggttaataatgtgctctgtttcccgtttattttccgtggtgcgctggatgttggtgcaacaaccattaacgaggagatgaagctcgcctgtgttcatgcgattgcggatttagcgctagcggaacagagtgaagaagtggcttccgcttatgatgatcaggatctgttttttggcccggagtatattattcctaaaccatttgatccgcgcctgattgtgaaaattgccccggcagttgccaaagcagcaatggattccggcgtggcaacccgcccgattaaagactttggcgcatatattgagaagctgaatgagtttgtctataaaacaaacttgtttatgaaacctattttttctcaggctaagaaagcgaaaaagcgtatcgttttggccgaaggggaagaagtacgtgtattgcatgcgactcaggagctgatctctcttgggttggcttacccgattctaattggtcgccctagtgttatcgaaatgcgtatccagaaactgggattgcatattgaagcgggtaaagattttgaagtcgtcaataatgagaatgatccgcgcttcaaaaaatactggcaggaatatcatcacattatgaaacgtcggggtgtttctgctgaacaagctcgccgggcagttatcggtaatcccaccctgattggggcgattatggtactgcgtggtgaggctgatggcctgatttgtggtactgttggcagttacagtgaacattacgatgtcgtgagaaatgtatttggtttccgtgatggggttcatactgctggtgccatgaatgcattgatgttgccaagtggtaatacttttattgcggatacttatgtcaataatgatccaacgcctgaacaattggcagagattacccttatggcttcagagactatccgccgtttcggtattgaaccaaaagttgcgctgctttctcattcaagttttggttccacagattgcctctcagcgcagaagatgcgccagacgctggaattggtgaataaaatgtcaccttcacttgaaattgatggtgaaatgcatggtgatgccgcattggttgaaagtattcgccgtgacatcatgccagatagcccattgaaaggggctgccaatctgttaattatgccgaatatggaatctgcccgtatcagttataacttgctacgtgtcaccagttctgaaggcgttaccgttggcccagttctgatgggggttgccaaaccgatacacattctgacaccaatttcttctgtacgtcgtatcgttaatatggtcgctctggcggcagttgaagcacaaactcatccgctgtaa

SEQ ID NO: 6152 - DNA, 891 bp, Photorhabdus luminescens
atggatatggacatgatgaaatttctcacgactgtaaaatcttttctgattatctgtggcttactgatcttatctggatgtgtatctgtacaccaaaaaaccgctctccaggcactttcaccggaactgactcaacaaggggctattatcgatcttaaaaccggtcacgccctgacccctgatgaattgatcaatcggctggcatcacatcaacgggtaattgtgggtgaaaaacatgataatccatatcatcatcagatagagatttggttggttcagcaacttccgcttaaaagagaacagggttcggtcctgctagagatgattaatcctgatcagcagcaaaaagtgaataaggttaagagttggttgcaaactcagcctatcgtacgtgaaagccgcataaaagagcttctggcatggcaagatgggtggcggtgggagttgtatggtggattggtcatggagcttatgcatcaaccttatccgttgctgtctgcaaacttagatcgcagtgaaattaaagcggcttatcgtaaccctccggtcctccaggggaatatttctgttgctgaaaatgtcaaggctcagattaaagaggtgatcaaagatgttcacggtggtgaaataacggagcaacagttatctgccatgacaactattcagcaaatgcgggatcgcagaatggcggaacagttacttaaagcgccggctcctgccacactgattgcgggtggatatcatgcaacaaaagtaataggtgttcctctgcatgttaaagaattatcgccccaagaggactttgttgtgttgatcatggctgagaaaagcaatgtactggatagccaatatgctgattatgtctggtatacacccgtaaaaaaaccatag

SEQ ID NO: 6153 - DNA, 801 bp, Photorhabdus luminescens
atgttgacgctgacacactcggcctttcaaacgggtcattttaaaaaagggctcgtttctgctattgctgttcacctcattttggtcggctggattatctcccagccagaagaaattgctgttggtgaattgatgccaccaccggcggtgatgatggagctttcattgttgacagaagcgacacatcaggtacaaaaacaacctattggtcttgaacaacaactttctgttgccagtcgacagcaggaaagtgaggttaatgagattaagacgcctgagcttatgaaagatgaacaggcacagatcttggtacataaacctaaaaaacagaaaaagcaccacgaagagattaaaaaaacacccccggtgaaacgccagcaggtagaagaacaagagagtgaaaaatctcaaagtagcgcggctatggcaagcagtactgccacttctacgaatctgacttcgcgggttgccgctgcttatgacagtgattcaaaggccgttgctgatgcggatgcgttatggcgagcggaagttgtcgggcatttgaaccgctataaacgttatccagaggatgcacagagaagaaaccgcacgggtcgtcctacagtcagattcactattgataaacagggctatgttactaacagtgacttagttcgtcgttctggaacccattctttagaccgggaagcgaagcaaattctggcaagggcgcagccgttgccagttcctcccattgccgttttaaacggtaatgaaattacgatagaaattccgattgattttagtttaactaattaa

SEQ ID NO: 6154 - DNA, 2058 bp, Photorhabdus luminescens
atgccaccaaaggcaatgaaacaaccacaccatataactacccacggtgatactcgtatagatgattattactggatgcgggacgataatcgtaaagatcaaaaagtcattgattatctgacagccgaaaataaatataccgagcagatgctaaaacccggtgaacagctacgtgatacgttatacgaagaaatggttggcaggatgaagcaggatgatcaatcggtaccctatacttataatgggtatatatatcggacaacctatgaaacgggcaaagattttccgatttatcagcgtaaaccggttgatggctcatcagattggcagatactggtcgatggtaatgaaagggctaaagggcacgaatattaccaactgagtaattttgccatctctctggataataaacgtatggcgattgctgaagatacgcagggacgccgtaattatcagatctcttttaaagatattgctgataaacagtggaataatgatgtaataaaaaatacttctggcaacatggtttgggctaacgacaacaatacgttgttttatgtgcgcaggcattcacaaacgttactgccatatcaggtatttcgtcaccaatatggtagcaataccagtgaagatcataaaatatatcaggaagaagatgagcgtttttatttaagtatatctaagagcacttcccgcgattatattatgttggcgataaccagtaattcgacttccgaatatttgctgattgatgcgaataaaccacaagctgagcttcaactattctctcctcgtcaggaaggcagagagtattatattgaccatttccgcgatcatttctacatccgttcgaatcatgagaatgaaacttatgggctttatcagacggatgccatcaatataccgtggaaaatagtcattgctccgcggcaagatagtgatcttgaagatttcgatctgtttaatgactggttagtcgtacaggagcgaacaaaaggattaccgacaattcgtcagattaattggcagacacagcaagaaaaacagattaagtttgatgatccaagttatatggcatggattgattacaaccctgaacccaatactgattttgtccgttatggttattcatccatgacgacaccaagctcaacattccaatggaatatgaaaacaggtgagcgggaattacttaagcagcaggaagtaaaaggttttgataaacatcattatgagagccagcgtatttgggtgaaggcccgtgatggtgttgaagttccggtatctctggtatatcgtaaatcactgtttaaaaaaggccataacccaatactgatttatggatatggggcttatggtatcagtatggacccttcatttagctcaccgcgattgagtttattagatcgaggctttgtttacgcattagtacatgtgcgtggtggcggtgaattgggtaagaaatggtatttacaaggtaaagtcgaaaataaggaaaatagttttaatgactttattgatgtgactaaggcactgattgcgcaaaaatatggtgacagcaaacgaatttatgcgatggggggcagcgcgggtggtttgttgatgggcgctgtgattaatcaggcaccggaattatatcgcggtgtggttgctcaggttccatttgttgatgccgtgacaaccatgcttgacccttctattccgctgaccgtaggagaatatgaagagtggggtaatcctgaaaataaagaggattatttccggattaaatcatatagtccgtatgacaatataaaacatcaacgttatccgaacttattggttacgagtggattttatgattcacaagtgcaatattgggaacccactaaatgggtggcaaaattacgggatatgaaggaagataactctattttgttattagaaaccaatatgagtgccgggcatggtggtaaatctggccgatttagtcgattaaaagatactgcactggattacagttttattttgatgctggatgatgctaaaaagtattttccgcaattaaaagataactga

SEQ ID NO: 6155 - DNA, 2244 bp, Photorhabdus luminescens
gtggttttaattgggcttcaagggcttgcttatggtgaggaaaagcaagagagaaaatcagataaggtgatgaaattcggtagccttaaagtttctggttcacaggatgatgcggaagtgagggcaatggaaaggcccggttcatacagttctaaaggagaagatacaaaacttcaatcaacggatagtatattacgcagtatgcctgggacttatacgcaaatagatccggggcagggaacggtgagtgtaaatattcgtggattaagtggatttggtcgagtaaatatgatggttgatggtgttagccaaagtttttatggcacatctccgacgagtcctgctcacgggactacttataaccaattcggtacaatcattgatcctaattttattgtaggagttgatgtcaaccgtggtcaatctgatggctcaagtagtgttaatgcattagtaggtagcgctaattttcgcacaattggtgtagatgatgtgatatttgcagggaattcattgggagtacgcacaaagacagcttatggaaataatggtattggctataatggcatgatagcggttgcgggtaaaacccccgctttcagttctgaaggttcaataggcgctatgttggctgtcagcgggcattcaattgatgcacattataagaatggcgacggagtattaagcgatgagtttgttacagataaatcgtttaagcaaaaacctaattctcaattaatgaaaataaaaattgaacccaatgaatttcatgatatggaactaagtggccgtaactatcataataaatttacccgccgtcatattgatagtcgggatatttatttaaaatacaattacactccatttagtgaatgggttgatataaaattattggtcagtaccagtgagagtcgtcaacgctatgaaggtgattcactttttaaattgctcaatagtaatgcaaaaaataaatcagatgcaatagatatcagtaatattagtcgtttcgactacggtgatacaaattttgagttaacatttggcagtaagttaatggaaaccgaatatagcagaacaacgaatagtgtgtattctggtcgaggtaaagatgaaaaagaaaagcaagaatataacaagaaagacagtgaagtaaaagaaaataatgttttcgcgccaagtggtaaacaagatattgccagtatttatggtggattgaaaataaatcgtggaatttatcaggcagatattacgtttaattatatggattaccgtgtcaaaggctataaaccggcttgtgatctgcgaattccttgttttccccagggagcaaccgaattggatttgaaagaacatgggtttaatccaggtattttactatcagcagaaattattcctgagttccaaccattcgtcagttatgcccgttcaatgagagcacccaatattcaggagactttttatagtaatgaaggtggtgggtccatgaacccatttctgaaaggagaatcatcagacacttatcaaattggctttaacagtttccgcccagatttaattgtaaagggagatactttccgtctgaaagcggcctggtatcatactaaagtaaaaaattatattctcagtgatatctggcttatatgtggcaataggaaaaaatgtaaagccgatagttcgacagattacaatgaagtcgatcctaacatcaaaatgtatatctaccacaatagcttgactccggtaaaaatacacggatatgaaattgctgctgattatgatgcgggtatgttttatagcaaattggcttatagttggcaaaaaacgcgtcaaccaacttcggccgctaccgcgcattttggtgcggagccgttgtcacaactacctgatagctttatgacgttggataccggtgtttgtttatttaatgagaaattccgtgttggtgcgattgttaaatataccggtgattctcataggctggacccagatcaatataattttgatgaagatgggagggttgtgcagcaaaaagaacctaaaatcccaacgatagtcgatctttatagcgattatcagataaatcacaatgtgctgctgaaattctcagtacagaatttggcaaataaaaattattctgaagcacttaatcgtgcaaattcttctccattaatgactgagcaaacttcggctatgcaaactgcccggggccggacttatattgtcggcgcagaaattcgtttctga

SEQ ID NO: 6156 - DNA, 1374 bp, Photorhabdus luminescens
atgtcactaccttttaatactggaattttttctgtcagtcgtcttaatcagacggttcgacaactactcgaaatggaaatgggcagaatttggctaagcgctgagatatccaatttttctcacccctcctccgggcactggtatttcacgctgaaagatgagcgtgcccaagtgcgggcggcaatgtttcgcagtagcaatcaacgggtaacattcaggccacaaaatggtcagcaagttttggttcgcgcgataatcacgctttatgaaccaagaggagattaccagcttattgttgaaaatatgcaacccgctggtgatggcctgttacagcaacagtttgaattattgaaacaaaaacttgatgccgaaggattatttgaccaaagccacaagaagcccctgccatcccctgctcaacagcttggtgtcattacttcaaccagtggcgcagccctgcatgatattttgaatattttaaagcgtcgtgatccatcattacccatcatcatttatccaacatcggttcagggcgcagaagcaccattacagattatccgggctattgaattagctaatgagcgtcgtgagtgtgatgtattgattgttgggcgcggtggtggctcgctggaagacttatggagtttcaacgatgaacgtgtcgccagagccatttttcacagtgatattccgatagtcagtgcggtcggtcatgaaacagatgtcaccattgctgattttgtggcagatttacgcgccccaacgccatcagcggctgctgagttagttagccgtaatcagctcgaattattacgtcaaattcagtcgcaacaacagcggttggaaatggcaatggattatttctttgcccagaaacaacatattttcagtctgttatctcatcgtttacagcaacaacatcctcatctacgactagcgcgtcagcaaaacttactggtcaatttacgccagcgactcactgacagcttgcaacggtacttaaagcaaaacagcctggcttatgaaaaattacaacaacggctctggtacgctgaacctagccagcaaatccaccactatagtcaacaaattcagcaacaagattttcggttaagacaggcaattgaacggcaaatcagccgttccagagaaaaatttgccgtttcctgttcacggatggaagccgttagccctctggcaacactggcccgtggttacagcatcagtcaaacatcggatggaaaattactgaaacaaaccaaacaggtagatgttggtgatgtcttgaatacccgtttacaagatggttggattgaaagtgaggtgttgaaaatcaaaaaagaacggaaaaaacgatctgcaaatctgaaatag

SEQ ID NO: 6157 - DNA, 1467 bp, Photorhabdus luminescens
atgttacgaattaaaaaagaagctttaacctttgatgatgttctgttagttcctgcccactctactgttttacctaacactgctgacctgtctactcaactgacttcctccatttgtctgaaagttcctatgttatctgccgctatggataccgtcaccgaatccggtttggctatcgcgttggctcaggaaggtggaatgggttttatccataaaaatatgtccattgagcgtcaggcagaagaagttagccgagtcaaaaaacatgagagtggtgttgtgacagatcccgtcacagtggcacctgaaacaacgctgcgtgaagttaaagaattgacagaacgtaatggttttgcgggttatccggttgtcactgaaggaaatgagttggttggtattattactggccgtgatgtacgtttcgttaccgatttggatcagcctgttactgcggtaatgacgcctaaagcgcgtctggtgacagtaaaagaaggtgaagcccgtgaagttgtgttgcagaaaatgcacgaaaaacgtgttgaaaaagcgctggtagttgatgaaaactttcatctgcttggcatgatcacggttaaagattttcagaaagcagaacgtaaaccaaacgcctgtaaggatgcacgtggtcgtttacgtgttggtgccgcggttggtgccggtgctggcaatgaagcgcgtattgatgcattggttgctgctggtattgatgttctgctgattgattcctcgcatggtcattctgaaggggtgttgcaacgtatccgtgaaacccgtgctaagtacccgaatctacaaattattggtggtaacgtggcgactggagaaggcgcaaaagcgctggtagcggctggcgtcaatgcggttaaagtcggtattggtcccggttctatctgtactacccgtattgttactggtgtaggggtaccacaaattaccgctatctctgatgccgttgaagcgctggaaggcaccggcattccagttattgctgatggtggtattcgtttctctggcgatattgccaaagccatcgccgcgggagcgtcgtgtgttatggtgggctctatgttggcagggacagaagaatcaccaggagaaattgagctctaccaaggacgttcatttaaatcttatcgtggtatgggatcattgggggcgatgtccaaaggctcttctgatcgatatttccaaactgataatgccgcagacaaactggtgccggaaggtattgaaggccgtgttgcctataaaggcttgctgaaaaacattgtccatcagcaaatgggaggcttgcgttcctgtatggggctgactggctgtgcaactattgatgagttgagaaccaaagcagaatttgttcgcatcagtaatgccggtattcaggaaagccacgttcacgatgtcactatcatcaaagagtctccaaactaccggttaggtttgtaa

SEQ ID NO: 6158 - DNA, 1578 bp, Photorhabdus luminescens
atgacaactaatatccatcagcaccgcattcttatccttgattttggttcgcaatatactcaattgattgctcgccgtatccgtgaaatcggggtttattgtgaactttgggcatgggatgtcactgaagagcaaatccgcgaatttaacccaagcggcattattctttccggtggcccggaaagtaccacagcacaaggaagtccacgtgctcctgaatatgttttcaacgctggcgttccggttctgggggtctgctatggcatgcaaacgatgtcagtacagtttggtggtaaggtagaagattctactgagcgtgaatttgggtatgctcaggttgagattaaagcggaaagtgcattattccgtgggatccaagattcattaaatgagcaaggtaaaccatcattggatgtatggatgagtcacggtgataaagttactgcaattcccgaggactttatcactatcgccagcactgatacctgtccatttgccatcatagcaaatgaagaaaaacgtttttatggcgtgcaattccacccggaagtcactcatacccatcagggacagcgtatattggaacgttttgtactggatgtatgccaatgtgaagcgttgtggacgcctgcttctattatcgaagataccgttgtacgcctgcgtgaacaggttggtgaggatcacgttattttggggctgtccggtggtgttgattcctctgtcactgcattgttactgcatcgtgcaattggtaaccgcctgacctgtgtatttgttgataatggtttactgcgtttgaatgaagccactcaagtgatggaaatgtttgccggcaaatttggactgaatattgttcatgttcccgcagaagatcgcttcctgactgcactggctggcattaatgatccggaagagaagcgtaaaacaattggccgtgtgtttgttgaagtctttgatgaagaggcgagcaaacaggctcaggttaaatggctggcacaaggcactatttacccagatgttatcgaatcagcggcatctgcgaccggcaaagcacacgttatcaaatctcatcataacgtaggtggtttgccggaagagatgaaattgggtctggtggaaccgctgaaagagttgttcaaagatgaagtacgtaaaattggtttggaattgggattgccttatgacatgttgaaccgtcatccattcccaggcccaggtttgggcgttcgtgtactgggtgaagtgaagaaagagtactgcgatctgttacggcaggctgatgctattttcatcgaagagctgcacaaagctgatttgtacaataaagtcagtcaggcgtttaccgtattcttgccagttcgctccgtgggtgtgatgggggatggtcgtaaatatgactgggttgtttcgttgcgagcagtagaaacgattgattttatgaccgcacattgggcgcatttaccatacgatttcctaggccgggtttctaaccggatcatcaatgaagtcaatgggatatcaagagttgtctatgatgtcagcggcaaaccacctgcgactattgagtgggaatga

SEQ ID NO: 6159 - DNA, 315 bp, Photorhabdus luminescens
gtgttgtggcggctggatcgactcgggcgtagcctcgccgatctgatgcagatcgtggctgaccttgagcagcgcagcgggcagattggttttccatgtgttcgcggcactggccgagttcgagcgcggcttaatccgggagcggacgcaggccgggcctgtggctgcaaaccgaagctggacgaccagcaggtgcgcgagatcaaagccctgttgcgcgatcccgatattcaggtggccgaggtggcccgccgttatggcgtgtcccgaaccacactttacaagcatgtcggcgtcatcacgccgcgccaatga

SEQ ID NO: 6160 - DNA, 1650 bp, Photorhabdus luminescens
ttggcgacagagggcgggctcgaagcccgaggggccattttcacgcgctttgaggtggtggatttcattctcgacttggttggttacacagaggatcaaccgcttcacgaaaagcggcttttggagccgtcatttggtggtggcgactttctgttgccgatcattgagcggctactgagtgcatggcgggcagcaaggccgagcggttccgcgctcgacgaactaaccgatgcaatccgggcggtggaattgcaccacgagacctttaagagcaccaaagctgccgttgtcacactgctcaggcggcaagggatcgctgcgaatgctgcggtcacgttggctagttactggctgtcgcaaggcgatttcctgctggcaccgctggaggggcaatttgattttgtggttggcaacccaccctatgttcgtcaggagttgattccggcaccgctgcttgcagaatatcgtagtcgttacctgacgatgtatgaccgggcagatatctacattcccttcattgagcggtctctgtcggttttgtcggatggtggcagcctaggcttcatctgcgctgatcgctggatgaaaaaccgctatggcgggccactgcgcagcctcgtagccgagcggttccacctgaaagtctatgtcgacatggtggatacacctgccttccactccgatgtgattgcttacccagcaatcactatcatcagccgtgaagtgccgaggccaacgcgcatcgcttaccgcccggctattgaccctgcgacgctgaccgcattggcaggtttgctcaaagcaccctcgctgccgaaggaagtcggcccggcgcgtgaacttgcccaagtgaccaacggttcggagccgtggttgctggagtcattcgaccagatggcggttattcgccgtctggagggggactttcccctgctggaagaggcagggtgtaaggtcgggatcggtgttgcgactggcgcggacaaagcatttatcggggatttcgacgcgcttaatgttgagccagaccggaaggtgccgctggtaacaaccaaagacatcatgaccggcgaagtggagtggcgcggtctgggtgttatcaacccctttgctgagcagggcggactggtcgatcttgacgagtatccccgtctgcggcgctaccttgaggctcgacgagaggtgatcgctgggcgtcactgtgcgcagaaagctccggccaactggtatcgcacaattgaccgcatcacgccgtcgttggctgcgaggccaaagctcctgattccagatatcaagggacaggcgcatatcgtctatgaaaatggtgaactgtatcctcaccacaacctctactacgtcacgtcagacgactgggatttacgggccttgcaggctgtcctgctatccgcggtcactcgtctgtttgtggcgacctattcaacgaaaatgcggggtggattcctacgcttccaagctcagtacctgcgccgcattcgcattccgcactgggctgaagtgtcagaaccgctgcgccgtgagttagccgaggctgctatcaaacgggacttgcaagcttgcaaccgggctgtgttcaggctctacgacttaagccaagaagaacgatctgccctcgggggaaatggagaataa

SEQ ID NO: 6161 - DNA, 741 bp, Photorhabdus luminescens
atggcgctcgatctcgtcgactacgaacagaaagcccgcgaagccgtgaaggcgttttggggcaaccgcgaagcagcaagacaaaaacaaatagagtcgggcaaggccgaccaaggtgaacgtgccggagtcaccgctggcaagaacatggacgggttcttggctttggtgctcgacatcatcaaggccaatgggctagcccatgctgagattcaccagaaccgggcgatgctgaccctgcccggatattttcgtccgactaaactgtgggatcttttggtgctctacaagggacaattaatcgcagccatcgaactgaaaagccaagtaggcccctcgttcggaaacaactttaataatcgaactgaggaagcaatcgggacggctcatgatttatggacagccttccgtgaagaagctttcggcaagcaaccgcgtccatttgtagggtggatgatgatggttgaggatgcgtcggagtctcgtaaatccgtccgcgactcgtcgccacactttcctgtgttcgaggaattcaagggcgcgtcatatctcaagcggtatgacctgctgtgtcagcgactggtgcaggagcagctttacactaccgctgccgtcatcgcggcggagcgcagtgcagtgaataccggcgatttcgcggagctgtcttcaatgaccagcctcaagacgttcgtggcagctttagcaggccacgttgcggcagaagcggcacgattgggctga

SEQ ID NO: 6162 - DNA, 813 bp, Photorhabdus luminescens
atgtccgatcttagcggaagtgaacgtcggaaactggaaaggctgctcggaatgagcggcgggtacgtcctcaatttttccgaccgaaccttcggcgactttttcgtcgaataccgggtggaaattgatgctgaatgctaccgagcgcgcggcacgtcgaaggctaaccgtatgcgcaccttctgggagttggaggcgaactatgtggtgggtcgagttatcggcggtttggtcgactacgccagcgaaaagcagtgctttggtgacagcaacccagtgctgattgacgattgccggaagatcgctcagcggcttctcagtgaccagccggttgctgagctagatgcgctgatagccatcgcggatgaacgagatttcgaggtggtggcggagcacgttcgcgaagctatcgagaaaaatcaacctgagggcgggttagatcggcttcatacgttcgtcaacaagtttatccgtgtaacatgtgcgcctcacggcatcacgatcacccgtggcaaaccgttgcatagcgtctttggcgagtatgtgaaggcgttacgtgatggaggtcatcttgagtcagcgatgaccgagcgtatcttaaagtccagcatctcggtgcttgaagcctttaacgatgtgcggaacaacaagagcttagctcacgacaacccaatcctgaattatgaggaaagcctgttgatcttcaatcacgttgcggcctcggttcggtttatcaagtcgctagaggcgaggataaaagctaaagtgacacaggcgaaacacggtggttgggacgaaagtatccttttctag

SEQ ID NO: 6163 - DNA, 171 bp, Photorhabdus luminescens
atgaaagatagatcgcatgatgaggtcatggccgagcacttccgcgctgatcgacttatgcagcggagctgcttgccgaagtccgtcgcgacggtgacccggccgaactggccattctgttgcggcagatggcctcggagcaggatgcgaggcaagatgcaaccgatgtag

SEQ ID NO: 6164 - DNA, 261 bp, Photorhabdus luminescens
atgagctcaatttactcagaagaataccagcgtgttatccgattattacgcgaaacacgcctagaaaaaggcattacacaggaaaaattggcacaagcatttggccgtcctcaatcatttatagccaaagttgagaatggtgaaagaagactagatgtcgtggaatttgtgcacatggccggtttgttgtcattaaatccagcccagattctagacaaaataaagctgaaaaaaccaagtcttaacagcaacctaaagtga

SEQ ID NO: 6165 - DNA, 294 bp, Photorhabdus luminescens
atgataaatgaacagtttactcgttgggattcagcagaatacctgaaaaccaaagtagatatggctgcgtatttgaatgcctgtattgaagaagcgggtgatgatcctgcctttattgtgcgtgcgttaggtacaattgcgcgtgcgcatggtatgactcaggtggcaaaagatgccggtctgtctcgtgagagtttatatcgggcgttatctggtgacggagaccctgagtttggcactattctgaaagtcgttaaagcattaggtttgaaactccatgtgacagaggaataa

SEQ ID NO: 6166 - DNA, 3879 bp, Photorhabdus luminescens
ttgcggtttattcaagatggaccacttattcctgatgaattattacttgcccgtgatcaagggcacgtggttttcttttgtggcgcagggatatcgcttgccaaagctaagcttcctaatttttttcaattggcgcaaaaagttattgatttactcggaacgactaatgatagccaagctcgtcaactttatgattttttgaataaaggattaaaagataaggaaggaaatgaagttgcattaccttcttatgcatcaactcttatttcaacagatcggatatttagcttattagaacaagagttcgaaacgaatttaattgaaaaaactgtagctcaagtactgaaaccatcggacacagttgacacatctgcacataaattattgttagaccttgctactacatccgaaggtcgagtgcaattaattacaactaactttgatcgtttattcaatgattgttccttgacagagattccgtgttttctacctccaaatttaccagatttatccaaaaatgaattaattgatggactggtatatcttcatggaagatctaattccgattacattggtgcagaaggcaatggttttgttttatcaggttcagagtttggaagagcctatctttctgatggttgggcaacgaactttattcgagagattttttctaaatatacagttgtatttattggctattctgcaaatgatcccccaatgcaatatttgctcgaaggacttaataaaaatctgataaaagcaaaaaatgtatatgcatttcaatctggaaccatagaagaagcaagaaaactatgggaacataaaggtgttcaagcaattgcttacagtcctgaagataaacatactgctctttgggagacattagatgcttgggcgaaaaaagcgaagaacgtagagcaatggtatagcgaaactatagagatagctcgacgtggcccaaccaatctcttaccccacgaacgtggacaagttgctcatattgtatctacttcaaaaggtatgaagaagtttgcacttattgataatccacctcctgcagaatggttatgtgtttttgatcgtaatatacgacttgctacacactctaataaccactggcctttgagatgtaacacttcccctgaacctttcactttatacggtttagactttgataaaacacctgatatttatcaaaagaataatgaagatatagataaagaaatagctaaaaaggcatgggatgcgtttcaaccacatcatgatgatattaaagagttaaacaagaaacattttgcttcattcagaacaacatctgaatatggaaactcaaagttatctaatagacaatggtttcttggtgtctggcttgcaaaagtagctcatcagccgacagccatatggtgggcaacgaaacaaaattatcttaaaccagctatccaacattatattttacagaaactcaaagagaataaagtagatagtgaaattcgcaaaatctggcaatacctaattgagtcgtggcaatatgaatataaagatgaagattttgaacgccactggtatagtctatcacacgaaattaaaacatacggttggaatgaagtgacgttccgtcaatatataaaactgacgcgcccatatttagctgtatctagcaaaataaatagccttctccctccaattaatacgataactgagcttcgtaaatttctggaattagatgtacgatatatagaaaaacaccattttgatgcaattaatattccaaattctttactaattaaagtgattccagaactgaggaaaaatattgaatacgcttattcgttagaatcagagaaaaggacacctcactcagtgcgtttgttatcaccaattagagaggacagcagtatagaactaggtttaagtataagagatgtcgggctggaaggatatgtattgcgatacgtacatttgtatgaaaggttaattcaactagacctgtatgaagcaagaaacgaattcttgagttggcccagaaataatcctatattttcacaacttcgtatatggattgcatgtaagcctgaaatcgtcccctcttccgatttttacccacttatcaatgcattaagcgatgatgaattttggaatgaacataatcaaagagacctgatgctaacacttgcagatagatgggatgaattaagagagaatgagtgcattgaaattgttgagcgtttattaaaaggtaggctcattcctgcatgtatagatagtaatctaggcgataaatggcaagctgatagtatcctaaatcgaatattctggcttaagaataaaggctgtcatttttatattgatataaaagagcgggttagagaacttcaaaatatatatcctgaatgggaaattgggctagcagataatgccattacttctatggaacccaaaggtgggtatataagtattgaatctaactgtaatgaattattgggtattcctataagggatattattccgcaagccttagaatttaattctgttgaacggatcgtttcagagaggaacgacccttttaaaggattatcaaagcaatatccattaagggctttttctgcactaagacattgggctaaagagaaaaaagagtatcctaaagaaatatgggaaaagttcctgtcgtctgaatcgcgaaaaaatgataaaaaaaagttcatttattttattgcaagacaaatgatgtcttattctaacaaagatttagtctcaattattgatcctgttttatgttggatttcgtctataaatgaaaagttagcttctatagatattgacatctatgacacattattaaagcatcttattgacactatagggataatgccaactcctattactaccatcgaaattaaaagagaacggcgcgattggattccagaagctgaaaactctcccatgtcatcaatcgcacatatattgtttaaagaccctcgtctaaaaaatttccatttagaagacaaattatctcaacaatggctttctaatattgaacgtttgaatactttatcaggtgattccaggaaatacgctttagtatatttagtcaaacaactaatttggttacatcaccatattccagtgtggactaataataatttgttacatgttatcaaaaatggtgagccagacgagaaggaagcattctggaatggctatttctggggagaaacctaccccagaagctctcagttgtatgatactttgaaaccatttttactaggctttttacgtaatagcgtgtcatttcactctgagcatcaaacaaattcagtagcaaattttttattatttggttgggctagtaaattgtatgaaaaatcaaagcaatttatttccgattctgaatttagagatgctcttttttatggtgatgagaagttacgccataaaatcctatggttgctatggaggctttcttcaaaagatgaacctgataataaattttttttacaatggcgagatttaataattcaattttttacccatgtttggcctcgtcaaaaggcaataaaatcaccagaaacaacagaaaatatttcccgtcttttattttctcaagaaactatgtttccaaagttagtagatattgttatgcctttcttaacatgcacgaacaatggtgcatccttgatgtattatattaaaaacgaagcaatagttaaaaaattccctaaagaaacaatagcggttttatccaatactttacctgaggatgtaaagaaatggccttatgattttgagaaatggcttgaaaaaatggaaaaagctgatgccagcttaggttctgatagcaaattcattgagcttaaatataagtgggagtatcgctag

SEQ ID NO: 6167 - DNA, 183 bp, Photorhabdus luminescens
atgcccaacacaaactattgtgaacttatctcacagaaaagtgacgttgaaactctagcagatgatctggataaagtccgtgcagactttgctacggtattaaaacaattcaatgatgaaatcatattatctacagggaaagagacgatatatgagcaaaatagtcatcggaaaacaccctaa

SEQ ID NO: 6168 - DNA, 819 bp, Photorhabdus luminescens
atgtcttaccaatgtcccttatgtcatcaatctttattgctcattcgacagcaatggcgctgtgagaataatcatcagtttgattgtgctaaagaagggtatgttaatctgatgcccgttcagcataaaaggtccaaggaaccgggggatagcccggagatgatgcaatcaagaagagtgtttttggattcagggcattatcaaccattacaacgacgggtttcggaattactggaaaagtatctgccagaaaatgcggagagtttgttggatataggatgcggtgaaggttattacactgctgcggttgaagcacagttaagcaagagacgtaattttaaaatctatgggttagatgttgctaagattgcggttcgttatggcgctaagcgctatccggttgttagcttttgtgttgcgtcgagccatcgcttgccatttgccgatcaatcgcttgccggggtgttaagaatttatgcgccttgtaaagcggaagagttggcaagggtagttaagccacagggaattgttttgacagtcactcccggtcctcgccatctttatcagctcaaggagttgatttatcaaaatattcatcttcatccattgaaggcggaactgttggaaggatttgaattgataaccgatgaatcgttatcttatccaatgaaattagatggcctgcaagcgtatcatttattacagatgaccccatttgcctggcaagcaacagaagatgtgaaaaataagttggcagatagagcgctgtttgaatgtgaaactgattttatattgcgggtctatcaacgccttaattga

SEQ ID NO: 6169 - DNA, 582 bp, Photorhabdus luminescens
atgaatatgtacgcaaccctcatcctagctttagcactttcaatggatgcctttgctgcttcaatttgtaaaggggccgcactacatagaccgcattttcgtgaagcaatccgtaccggtttaatatttggtttggcagaagcctgtaccccattgattggctggtctctagggctttatgccagccaatatattatagagtgggatcactgggttgctttcactctgttattcattctgggttgtagaatgattacagagagtttcaaaacaaagcaggaaaaaaagtgtgagtcaccctgccgccataattcaattgtgttgataacaacagccattgccaccagcctggatgcaatggcaattggtattgggttagcgttccttgaagtcaatatcgtacatactgcgatggctatcggaatgatgacaatgattatggcaacattgggtatgttaattggccgttatattggcccacggttaggcaaacgcgctgaacttattggtgggctgattctaattgcaattggcttcaatatcttgtttgaacatctagaattatttatgtacgcaaaataa

SEQ ID NO: 6170 - DNA, 459 bp, Photorhabdus luminescens
atgaaccttaatgatatagcattaactggtttaatcgtactcatgctagcttttgctgtttatgatgaattcgtggtgaattttctaaaagggaaaactcacttacaaataaagctaaaaagaaaacataaaattgatgcactcatctttattatcctgatacttattgttgtttataataatattactgtttatggtagccgtttaaccacatatttattgctgtttactatcttggtgactatttatattgcctatatacgttcgcctaaattattttttaaaaataacggtttcttctatgcaaatacctttatttcctatagccggataaaaaccatgaatttatctgaagatggcattctggttattggtttagaaaacaagaaattatatatatcagtaagccaaattgatgatttagaaagaatttataaatttctcatcgaaaacagatag

SEQ ID NO: 6171 - DNA, 867 bp, Photorhabdus luminescens
atgttagatacaacaaaaacgactgctcagacagcaggccagaaaaaactgacacccagtgatatccgtggtgtatttctccgttctaatgtgtttcaaggttcatggaactttgaacgtatgcaggctttgggtttctgtttctctatggtgccagctcttcgtcgtttgtatccagaaaataccgatgagcgtaaacaggcactcaaacgccaccttgaattctttaacactcacccttacgtcgtcgcacctgtactgggtgtcaccctggcaatggaggaacagcgtgctaatggcgcaacgatcgatgatggtgcgattaacggtatcaaagtcggtctgatggggccattggccggtgttggtgaccctattttctgggggacagtccgcccagtatttgctgctttgggtgcgggcttggcaatgagcggtagctggcttgggcctgtcttattcttcttcttattcaacctagtacgcctgttggttctttattcaggtatctcttatggttataagaaagggatcaatatcgttcaggatatgggtggtggcttcctgcaaaaaatgaccgaaggagcatcaatccttggtctatttgttatgggggcgttagttaataaatggacgaaagtcaatatcccgctggttgtatcagaaattcctaaccaacagacaggtgaaaagacaataaccacggttcaaaatatcctcgatcaattgatgccaggcttggtaccacttttactgacatttgcttgtatgtggttattacgacataaagtcaatgcgctgtggatcattattggcttctttattctggggattattggtgccagatttggtttccttggtctctag

SEQ ID NO: 6172 - DNA, 801 bp, Photorhabdus luminescens
atggaaattaccgttgttcaaattgcattgatattcatcgtagcttgtatagccggaatggattccattcttgatgaatttcaattccaccgcccactcgtggcttgtaccttaatcgggatcattcttggtgacatgacaaccggtatcattatcggcggtacactagagatgatcgctcttggctggatgaatatcggtgctgcaattgccccggatgcggccttagcatcaatcatctcaacgattttggtcatcgcgggtggtcgtgatattggtgaaggtatcgctttggccattccactggcagcagcggggcaagtgctgactatcattgtacgtaccatcacagtcgcctttcagcatgctgctgacaacgcggcagaacgtggcagcctgcgtgcgattagctttatccatctatccgcattactgctccaggctatgcgtatcgccatccctgccctgatcgttgcactatcggttggcaccaacgaagtccagcagttacttgcttctattccaaaagtggtaaccgatggcttgaatatcgctgggggaatgatcgtcgttgtgggttacgccatggttatcaacatgatgcgtgccggttacctaatgcccttcttctatctcggtttcgtcacagcagcattcactgattttaacctggttgcattaggcattattggtattgttatggccgtgctgtacatccagctaagccctaaatataacaaatctcaggtagcggctgcccctggacacaccaataacgaccttgataacgaattagattaa

SEQ ID NO: 6173 - DNA, 984 bp, Photorhabdus luminescens
gtgagtatagccattatgattggcacacacggagctgcggctgagcaactgcttcataccgcagagatgttaattggagagcaagaaaatgtctcttacattgacttcgttcctggtgaaaatgccgataccttatttgaaaaatacaacagtaaactggaaacgcttaatacagagcaaggtgtactgtttcttgtcgatacatggggaggaagtccattcaatgcggctagccgtatcgccgtagataaagagaattatgagatcatcaccggagttaacgttccaatgttagttgaaacctttatgtgtcgagatgatgacccatctctggcagaactggtttccgttgctctggaaaccgggaaagaaggcatccgggccctgaaaacagaagaacctcaaatagctgaacccgccaagcccgtggcatccgttgcggcaccttcatttgcaccatcagccggtggtcatatgaaaattgcactggctcgaattgacgaccgcctcattcatggtcaggttgctactcgttggacaaaagaaaccaatgtcaaacggatcattgtcgtcagcgatgaagttgctgctgatactgtccgtaccaccttgctaaaacaagttgctccaccggggctcagtgctcacgttgttgatgttgcaaaatgtgttcgcgtttataacaacccgaaatatgccaatgagcgtgtcatgttgctgtttacaaacccaacagatgttttgcgtttagtcgaagacggtgtcgatatcacttctgtcaacattggtggaatggctttccgtcaaggaaaaacgcaagttaacaacgcaatatccgttgatgaaaccgatattgcagccttcaaaaaactaaatgaacgaggcattgaacttgaagcccgcaaggttgccagtgacagccgcttacaaatgatggatctactccagaaggttaaaaacgaaaatcagatcagagcaatttaa

SEQ ID NO: 6174 - DNA, 1365 bp, Photorhabdus luminescens
gtgattagcgttttcgacatgtttaaggtcggtattggcccatctagctctcatacggttggcccgatgaaagccggcaaacagtttgtcgacgatctggtaaaccagggattaatgccttctatcacgcgtgtagccgtcgatgtttacggctcactctcattaaccggcaagggtcatcatacggatatcgccattatcatgggtctggcaggtaatttacccgccaccgttgatattgattcgatccccggttttattcgtgatgtagagcaaacacagcgtattaaactagccaacggtttacatgaagtcgatttcccacgtgatagcggcatggttttccgaagtgataatctgtcattacatgaaaacggcatgcaaattcacgcattcgcgggggacaaaaaagtttatagcaaaacctactactcgattggtggtggttttattgttgatgaagagcactttggtaaaccctctcaggataccaaaccggtttcatatccattcaattcagcaaaagaattactgatgaattgtaataaaaccgggttatctatttccggtttaatgatgaaaaacgaactggatctccacagcaaagaagaaattaatgcctattttgccgatgtctgggataccatgcaggcttgtattgaacgtggtttgaacaccgaagggattttacctggcccactgcgtgtaccacgccgggcagcggcattacatcgtatgctgacctcatcaaacaatttgtctaatgatccaatgaatgtcgtggatttggtgaatatgtttgccttggcagtcaatgaagaaaatgctgcgggtgggcgtgttgttaccgcaccaaccaacggcgcttgtggcattgttcctgccgtactcgcttattacaaccattgtattgaacctgtaacaccagagctctatatccgctatttcctggcttctggcgctattggcatcctatataaaatgaatgcatcgatatctggcgctgaagtgggttgccaaggggaagtaggtgttgcctgctcaatggccgctgccggccttgctgaactgctcggtggcagcgctgaacaggtctgtattgcggctgaaatcggtatggaacataacctcggccttacctgtgacccggtggcaggccaagtacaagtaccttgtattgaacgaaatgccattgcttcagtaaaagcaatcaatgctgcacgcatggctttgcgccgtaccagcgaaccgcgcgtttctctcgataaagttattgaaaccatgtacgaaacaggcaaagacatgaacgccaaatatcgtgaaacatcccgcggtgggttagcaattaaggttcagtgtgattaa

SEQ ID NO: 6175 - DNA, 564 bp, Photorhabdus luminescens
atgatatcactgtctgatttcgttaacagatttcagttacaacttccaccaccacctaaacggctttcagataacaaccgccatgctgcggtgttattaccaatcatctgcaaaccgaagccaacgttattattgacccgacgctcagccactttacgatcacatgccggtcaagtcgcctttccagggggcgttgctgatcctaaagataaatcaataatcgcgacagcactacgggaagcggaagaagaagttaacatacctcatcagaaagttcaggttctgggacaactcgcccctttaaatagcagcggcggctatctggtaacgcctattgtcggattattgccccccggattatccctccacagcaacccggcagaagttgccaaaatattcgaagttcctctatctgaagcactttcactttcgagttatcattatcttgatgttagtcgccgtggtcagcagcatcgtgtctatttttactggtatcagcagcatctcatttggggattaacagcgacaataattcatcaattagctcaacaagttcaggtttga

SEQ ID NO: 6176 - DNA, 1371 bp, Photorhabdus luminescens
atgagcatttcactacaaaaacggcaattaccctatcaaccagacgctgccatcaactattttgcgccgatttcaaatcagtcttgggcaatgctgctccattctggtgctgccaaccatcctcataatcggttcgatattctggttgcagaaccacggataacactgcttagtcataataaatcaactgaaataaatgaagatggcgatagctatattactgaggaagatcccttttacctgctaaaaagacaactagaaaaattaaatattacagcaaagcgtgatcctgatttgccatttcagggcggtgcgctaggtctatggggatatgatcttgggcgttaccttgaagagttaccattacaagccaaaaatgagttgtcatttccagatatggcaatcggtatttatgactgggcgctgattgttgatcatcacaaaaaagaggtgattttattcagctacagtgatgttgacacgcgcctgaactggcttacttctcaccaagtttcgccaaaaatggcttttacgttgaccagtgaatggcaatcaaatatgagtgccaaacaatatcatgagaaaattaactgcattcatcactatctgttaagtggtgattgttatcaagttaacctggcacaacgattttgcgctgattaccaaggagatgaatggcaagcattcataaaacttaatgagaacaaccgtgcacctttttccgcctttattcgtttaccggaaaacagcgttatcagcgtctctcctgaacgttttttactcctggagaataaacaaattcaaactcgcccgattaagggaacattaccgcgcttaagtgatacagaaaaggacgtactgcaagctgtaaaactggccgcctcgaaaaaagaccaggctgaaaatttgatgatcgtcgatttattgcgtaatgatattggccgggtagccacaccggggtcagttaaagttcctgaattgtttttagttgaacaattccctgccgttcatcatctggttagcacaatcaccgcaacactgccaaatgaacaacatgctacggatttattacgcgcctgctttcccggtggttctattaccggagcgcctaaaatcagagcaatggaaataatagaagagcttgaacctcaccgccgacatggatattgtggttcaattggctatattagtttctgtggcacaatggacagcaatatcaccatacgtaccctcttaactgagaaagaaaaaatatattgctgggccggtggcggaatcgttgccgacagcactgctgaaaaagagtatcaggaaacatttgataagttgaatcgtatcttaccgcaactagggaaaataaaagtaatatga

SEQ ID NO: 6177 - DNA, 180 bp, Photorhabdus luminescens
atgttttcagcgatgccagctttatcccatgaggaacagcaacgagcagtagaaaaaattcagcaattgatggttgaaggaatgagcagtggcgaagcgattgcgttggttgcacaagaacttcgtgagcggcatcgaggaaaagagcaggttaatgtggtgtttgatgatgaaaaatga

SEQ ID NO: 6178 - DNA, 324 bp, Photorhabdus luminescens
ttgctcactgtttcattcacagtatctgctgtgtcggagaacaaacgtgttgataaatttatttcttgtgacaatttaactaaatcgcaaattgccgctcaagtaaagcgtgattttctgcaaaaccgcattaaccattggtcagaagatagaaagcaattgggaacttctaaaccagtggtgtgggtaaaggcggaaaatatcactggcgataaagagatattaaaaattccgctgactgttcgtggttctaagcgtgacaaagattaccgtgttgtcgttgattgtcagcaaaatacgattagctatagtgaattgaaataa

SEQ ID NO: 6179 - DNA, 954 bp, Photorhabdus luminescens
atgtcagaattgaaaaaattatatccggcttgtgaagcttatcgttcggggtatttggatacaggcgacggtcatcaaatttattgggaattgtgtggtaatcctgtaggtaagccggctgtatttattcatggtgggccgggcggtggtattgcctcttatcaccgtcggttattcgacccaaagaaatatcatgtcatgttatttgatcagcgtggttgtgggcgttcaaaacctcatgccagcttggaaaataataccacttggcatttagttgaagatattgagcgtttacgtcaattgatgggagtcgaaaaatggctggtatttggtggttcgtggggttcaactttatctttagtttacgcccaaactcatcctcaacacgtttctgaattaattcttcggggaattttcttactgaggccacaagagttgcactggtattatcaggatggtgcttctaatttcttccctgacaagtggcaacgaacggtatctattttatcggaggaagaacgaaaggatgtgatcaaagcgtataataagcggctgactaatcatgatcttcgggtgcaattagaagccgcgcgtctctggagtttgtgggaaggagagacggtaacattgcttccttcaaatagtgtagagtgctttacggaagatgagtttgctttggcatttgctcggattgagaaccactattttatcaatgagggttttatgaatgaggagcagcaactgttgaataatattgacgttatacgggatattccggcagttatcattcatggccggtatgatatggcttgccgggtgcaaaatgcctgggatctggcgcaggcatggccggaagcggaattacatattattgaaggagcagggcattcatttgatgagccgggtattttacatcagcttattagtgcaacagataggtttgccgctcagtaa

SEQ ID NO: 6180 - DNA, 231 bp, Photorhabdus luminescens
atgaaacacaatctggccgaactttctacagagaatatggacaaagtgaatgttgatttggcagcttctggcgtagcctttaaggaacgttacaatatgccagtacttcctgatacagttgaacaagaacaacccgaacatctgcggcaatattttcaacaacgtttagtccattatcgccaattatccaaacaactttccaatttaccctacgaacccaaaggccgctga

SEQ ID NO: 6181 - DNA, 504 bp, Photorhabdus luminescens
atgttaaatcaagaagtggttaataaattaaatgagcagatgaatctggagttctattctgcgaatttatatctgcaaatgagtgcatggtgtagtgaacaagggttaccaggtgccgctgcgttttttaaatcgcattctcaggaagagatgcagcatatgcatcgcttgtttgagtatctgagtgatacaggcacaatgccacgtttggggcaaattgatgcaccttcggccgattatgaatctatatctcatgtactcaatagaacttatgatcacgagagatttattactgccgaaattaataaacttgctcatttggcgataaccacgcaggattattctacttttaattttctgcaatggtatgtagcagaacagcatgaagaagagaaattgtttaaatctatccttgataaactggatatggttggtgaggatggtaaagcgcttttcttattagataaggatctgaaaggtctggctgctgcaaatcctgtctaa

SEQ ID NO: 6182 - DNA, 387 bp, Photorhabdus luminescens
atgaccattagcacaatccgctcttttggccgaaaactatctgctttaattgtcctttttgttgccatatcttgccagcaagctttggcccatgcgcatttaacagaacaaattccggcagaagatactacagtagaaaatacacctcaggtgatcacgctaagcttttcggaaggtattgagctgagttttagtaaagtaaaagtgattggtcctgaaaataaacccattaaaacgggaaagttaaagcttgatccggcaactaatacaaaacttattcttcctatcgaagataaactgacgacagggagatatgatgttaactggagcgtggtctctgttgatgggcataagactaaaggtgtctatagctttacagtgaaataa

SEQ ID NO: 6183 - DNA, 894 bp, Photorhabdus luminescens
atgtctctagcggcgctgtatgttctttgtcgcttcacgcatttcgtggcagttatgttagtgtttggctttagcatatttactgccatattggttcctgagcgtttatctgttctgattgatgcgcgccttcgtttaggggtaattatcagtacagttgtgacattagtaacaacaattggatggttggcaattcaatcgggaataatgggtgatggttggcaggatatttgtaatctagaaatctggttggcagtattgggaacaacttttggtaaagtttggcaatggcaaatactggtttcaatagttgctacagggtttttgtttatcagtaaacaaaaagtcagaaatattttgatgttaatcagttctgctgttttactctcctgccatgcctttatcggccattcggtgatgcatgatgggataacaggtgttttttctcagattaatcaggtaattcacttagtgagtgttggatactggtttggtggattatggccgtttttgttatgcttgcaatttttacggatacaaaatgaattggctatagggttggataaacagattatgatctctatgatgcgtttttccacatatggtcacgttgctgtaaccctgattatcattactggcattataagcagcttaattttgctgccgaactggccgaaatatagcggtagtgaatatcaatccatgctatggctgaagatagcattggtggtgggtatggtgatgcttgcattaattaaccgctatatcttggttcctaaactgaagcaacctggccgctatcaattgttgattatcaatagttgggttgaaattattcttggggcattggttctattatgtgttgctgtttttgctacttatcagccgatttga

SEQ ID NO: 6184 - DNA, 354 bp, Photorhabdus luminescens
ttggtaactattatgaaacgtttacttttattactttccttattttgtctctcttttcaaaatgttgctgcaccgattgaaacggtgagtaagctacaatttggtgataaatgggcatttacgcgggaagaggtgatgttggattgccgagcaaataaggctctgtttgtgattaatccaagtacgttagtgcaatacccattgaatgatatagccacggatatgatgaaggtagggaaagtgaatgctaagtctttggatattattctattggctgatagcaaaaatccgactcaaaaaatgagcatagagccattccaacaagccgctttagcattgtgcgataagagataa

SEQ ID NO: 6185 - DNA, 243 bp, Photorhabdus luminescens
atgaaccagacaaaattaagaatttccagctacgaaattgatgatgctattctctcttcaccttcccaagaagacgatatcaccattagtattccttgtaattccgaccaggaactttgtatgcagttggatggatgggatgaacataccagtattcccgccttactcaacgataaacacattcttctctaccgaaagcattatgatagacaaaaacatgcatgggttatgagggtggtctga

SEQ ID NO: 6186 - DNA, 498 bp, Photorhabdus luminescens
atgaataaaaatgagttctatcgggagcttacgggggacctaaaagctctgttgtctggtgagtatgacttaatagcgacgctggctaatgccagtgcattgttgtatgaacgtttgcatgacgttaactgggttggcttttacttgattgatggtaatacgttggtgttaggcccatttcaaggaaaagttgcttgtgtcagaatacctgttggcaagggggtatgcggaacggctgtattggaaaagcgtatccagcgtgttgatgatgttcatgcgttccctggtcatatcgcctgtgatgttgctagtaacgctgaaattgtgttgccgttgatcgtaagcgatagaattatcggtgtattggatattgatagtacggtctttaataggttcgacgagaaagacgaatttggcttacaagctcttattgatgggctttgtgctcatttagaacagtgcgttgtgccgaaatatgttgaattgaatgtaacttaa

SEQ ID NO: 6187 - DNA, 720 bp, Photorhabdus luminescens
atggaaaatcaacctaagttgaatagtagtaaagagattattgcttttttagctgagcgtttcccgctctgtttcgtagccgaaggtgaagctcgtcccttaaagatcggtatttttcaagatatcgttgaacgtattcaggacgaagagtgtttaagtaaaacacaactgcgctccgccttacgtctgtacacatcaagttggcgttacctgtatggtgtgaaagaaggtgcccagcgtgttgaccttgatggtaattcatgcggtgaattggaagcggaacacattgagcacgctctccagcaactgactgaagccaaagcacgggttcaggcacagcgtgcagagcaaagagctaaaaaacgtgaagctgaaaatgtggctgctggtgaaaaaaatgaacggcccacagccaagaaacccgctcctcgtcgccgtgctaataatactgagggggaaaagcggcagccaccacgcccgcaaaagcgccctcagcaagcacgtaaaccagttgctaaacctgttcaagctaaacctattcaagctgcaccgattcagattgtcgatgtttcatcgctgaaaattggtcaggaaattaaagtaagagtgggtaaaagttcagtggatgcttctgtgcttgaagtcgccaaagatggtgtacgggtacaattgccttccggtttggcaatgattgtacgcgcagaacatttacagttctga

SEQ ID NO: 6188 - DNA, 2052 bp, Photorhabdus luminescens
atgaacaaattcgtcagactggcttttgtcttaggtgtttcaatttttggtacttgttatgcaaatacaaacagtccagtggctgttcctgttggtattgaacaattacctatattgaagcaagaacctcagcattcaacagttagcgagcgggtaacatcccgcttcactcgttctcattatcgccaatttgatttaaatggtgatttttcggcaaaaatatttgaccgctatctcaatatactggattacagccataacatattattggcgtcagatgttgctcagtatgccgataagaaaaagttgttaggcaaggaattggaaaatgggaatctggaaattccgtatgacttgtttaatttgttacagaaacgtcgctttgagcgttatcagtacgctttatcgcgtcttgaacagccaatgagttttgatggtaacgatacaattgatgttgatcgttccaaagccccttggccacagagtgtggaagagctaaataaactttgggatgctaaagttaaatatgattggctcaacctcaagctcagcggcaaagaggacaataaaatcaaagagatgcttaccaaacgctatcaatccgcgttaaaacgtctgacacaaagccagagtgaagatgttttccaattgattatgacagcgtttgcccgtgaaattgatcctcataccaattatctttcaccacgcaatactgaacagtttaactcagaaatgagtctttccctggaagggattggtgctgttttgcaaatagatgatgactacacggttataaattctttggttgctggtggacctgctgctaaaagcaaagcactaaacgtaggtgataagattatcggcgttgcccagtcaggaaagtctatggtggatattattggctggcgtttggatgatgtggttgcgctgattaaaggacctaaagggagcaaagtacggcttgaggttgtttctgataccaaaggggcaaaaccacgtactgttattttaactcgcgaacagatccgtttggaagatcgggctgtgaagatgtcagttaagacaatcggtcaggaaaaagtgggcgtgcttgatatccccggtttttatgttggtttgactgataatgttaaaactcaattacaaaaactgaccaaacagcatgtcagtgctattgtcattgatttgcgtagcaatggtggtggtgcactgacagaggcggtttctttatcaggcttgtttctgccaagtggcccggttgtccaggttagagataataatgggaaagttcgtcaggattctgatactgatgaagtggtgtactataaaggacctttggttgttctggtggaccattttagtgcttctgcttctgaaatttttgccgcagcaatgcaggattatgggcgagcgttgattgttggtgaaccgacttttggtaaaggtacagttcagcaataccgttctttgagtcgtatttatgatcaaatgatgcgccctgattggccatcactggggtctgtccaatatacgattcagaagttttatcgtgtggatggcggtagtactcagcgtaaaggggtgactcctgatatcgtaatgcctacgggggttgatccggcagaaaccggcgaaagtttcgaagataatgctttgccttgggatagcattcctcctgcccgttatacagggtctaaagttattgctgcattggttcctcagttgaatgttgttcacaatatccgcattacaactgatccagaattcaagtatatcaatgaggatattgctcactataaggcgctgaaagagcataaaaatattgtttctctgaactatgcacaaagagaaaaagaaaataaagaagcggatgctctgaagttgaatcgcataaatgatcgctttaaacgcgaaggtaaaaaaccgttaacttcactggatgatttgcctaaagattatcaggggccagatccctatcttgatgaatcagtgaagattgcacttgatttagcgcaccaacctgctgagaaaatgttggctaaatctaagtaa

SEQ ID NO: 6189 - DNA, 888 bp, Photorhabdus luminescens
atgatgcgaattgttttgttcctcctcactaacctcgctgttatgttggtgttcgggataatactttctttgacaggaattcaggggagtagtgtacaaggtttgatgattatggctggcctgttcggtttcggtggggcgtttgtttctctgctgatgtccaaatggatggccctgcgttctgtgggtggtcaggtcatcgaacagccagcaaacgaagttgaacattggttagttgaaactgttcgcagtcaagcggaacaagtcaatattgccatgccccaggttgcgatttatgccgcgcctgatattaacgcattcgctaccggagcgcgtcgtaatgcttctctggttgctgtcagcagcggtctattggataacatgagtagggcagaagcagaagctgttattgctcatgagattagtcatattgctaatggtgatatggtgacgatgaccttgttgcaagggatagtaaatactttcgttatctttatttcccgtctactggctcaagctgtatcaagtttcctgtctggcaatagtgacgaggaagagagtaactcctctggcaatccgattgtttacatggttgcttcaatggtgttggaaatagtatttggtattctggcgagcattatcacgatgtggttctcgcgttatcgcgaattccatgcagatgcaggttctgctaagttggtcggtcgtgagaaaatgatcgctgctttacagcgtctgaaaaccagttatgaaccgcaggaagaaggcggtatgatggcgttctgtattaatggtaaatcaaagacattcagtgagctgttcatgtctcacccgccattggacaaacgtattgaagcactgcgtagtgggcaatacctgaataaataa

SEQ ID NO: 6190 - DNA, 1392 bp, Photorhabdus luminescens
atgaatttaccactcatttcgaatgtgctcgtcttcgtagcactgcttttgctattgtcaaaagccagttcacggcaatggaacctgtcgaaaaaggtttttgcgggccttgccattggcattatttttggcttagcactgcaactagtttatggttctgataataccatagtgaaggaatccatatcatggttcaacattgtaggtaatggctacgtacaacttctacaaatggtcattatgcctctggtatttgcctctattttgagtgcagttgccaaattacacaaagcatcttctctaggaaaaatcagctttctgactatcgggacgttgttattcacgacaatgattgcagcgcttatcggtatcatgattatcaacctgttcggcctgactgctgaaggtctgattcaaggtccccaagaaacaacacgtctgtctgctatcgaaaacaactatgtcagcaaagtctctgacttatctgtaccacaattgattttatcttttattcctaaaaatccgttcgcagatttaaccggcgctaacccaacttctgttatcagcattgttatttttgcaaccttcttaggtatcgctgccctgcaaatgttgaaagatgatcatgagaggggtgaacgcatattagtcgctattgacactatacaggcatgggtaatgaaactggttcgtctggttatgcgcttaacaccgtatggtgttatggccctgatgaccaaagttgtcgccaactctaatatctatgaaattgcaaaactgggaacctttgttatcgcatcctacattgcactagcactagtatttgttgctcatgggtttctactttctctcttcggcatcaatccacttagatttttcaaaaaaacttggccagtgttgacctttgcattcagcagccgttccagtgctgccagtattccactgaatgtcgaaacccagacactccgtattggcgtaccagaatcaatcgccagcttttcagcatcttttggagcaacaatcggtcagaatggctgtgccgggatttatcccgccatgttggccgcaatggttgcgccaacagtgggcataaacccactcgacccgatgtggattgcaacactcgttggcattgtcactatcagctctgctggcgttgccggtgtgggtggcggtgctacgtttgcagcactgattgtcttacccgcaatgggattacctgtaacgttgattgctttattgatttctgttgagcctctcattgatatgggccgtacggcactgaatgtaagtggttcaatgactgctggcactattaccagccaactgatgggacaaactgataaaactatcttcgatcaggaagaacatgttgaattaagtcagctataa

SEQ ID NO: 6191 - DNA, 549 bp, Photorhabdus luminescens
atgaccgcagaagggcatcttttattttcagttgccagcattatcttggcacacaagctagaaataacaccagagatagctaatggagattggctgcatatgctaccaggggtactgcttactgccttgttacccgatatcgatcaccctaattcaaccttgggtagattattcagatttatctccattcctattgccaaactctgtggtcatagaggctttactcacagtttacttgctctcatattagggattactttattttggctaaaaatccccgaagagtggctaatcccaactgattttttccatgccatgattgttggctatttgagccatctgattgcagatatgctaacacctgctggtgtgccgttattatggccaatcaaaatacgtttctgtctacctgtgcttggcaagcaaggaaataagaaagcagaaaggtttatttctgccttattaattgtcattgccgtttttctaccagaagatattgaatcttctatacttttttatataaatcgcatcaaagatctctatttctaa

SEQ ID NO: 6192 - DNA, 666 bp, Photorhabdus luminescens
atgtcttttcatttaccaataaaagcggccattttcgatatggacggcttactgattgactctgaaccctattggacccaaggagaaaaagaagtatttagtgaattaggtctggatttttctttagcagaaaaactaccagatactcttgggttgcgaattgatcaagttgtggaactttggtaccaggcttctccctggcaaggggtatcaaaatcagacgtggaacagcgaattaccgaccatgttatcgatttggtaaaagaaaaccgtcccttactcccaggtgttgaatatgctttaaacctttgccgcaaacaaggactgaaaatcggcctggcctcagcttctccacaatatatgctggaacaagtactcgaaatgttcagtcttaatcactattttgatactgtcgtttctgctgccaaattacctcacagtaaacctaatcccgaagtttatttacgcgctgctgaacaattggatgtcgctccgataaattgtgtggccctggaagattcattcaatggaatgatagcaacaaaagctgcaagaatgcgttcaatcgttgtgccatctgctcatcactttgatgatccacgttgggttctcgcagatattaaactgcattctctcgaacaactcactgtcatgaacatcacctga

SEQ ID NO: 6193 - DNA, 543 bp, Photorhabdus luminescens
atgacttaccaaaaagccggatacatcgctattattaagcgagttttaggttggatgatttttgttccggcacttttatcgactattgtttctgtgattaaccttgcctggttgcacggtattaaaggtgatggtatcaatgctgttttggatgatttcctgaaaatgatggctgaagtggtgcgttttaataccccatttctggatttcttctggaaaaattcaccaacacctgatcgtctggctggttttaccggatcaacgcttggtttcctgattatctattttcttatttttttcggccttgctatgaatgcgtcaggtcaacggatatacagacaagtgaagtttatacgagaaaacattgaagatcagcttattattgaaaaagctaaaggcaatgatagcctgacaagagaacagattgaattaaaaattaaacttcctcgtcatacattgttcagtcagatttatatcttatatatttcaccggtaattatcggtgcaattttttattttctattgaaaatcttaggctggtag

SEQ ID NO: 6194 - DNA, 870 bp, Photorhabdus luminescens
atgtggcagacagtaaatcgtttgttaaacgaacatttcggtgttgctgaaattcacgataaaactgagttagccggaggagacatccaccaagcttggcgagtcacacatggaaaacaacaagtttttgtcaaatcaaatctgcgcgaaatgctccctgtcttcaaagcagaatcagaacagcttgaactcctggcacgcagccaaactatccgtgttccaactgtttatggtattggcaacactcgtgaccatagctttctattgcttgaatttctgcctttaaaatcttttgaccttcacagtgcctattgcttcggtcaacaactggcaaaacttcatcaatggagtgaacaacctcaattcggctttgattttgacaatatgctggcaacaactccacaacctaatagctggcaacgacgttggcatcaattttatgcggaaaagcgggttggttggcaattacaaatcgcggcagaaaaaaacatgatatttggtgatattgacaatatcgttcaagctataagtaacaaacttcaacaccatcagccacaaccctctctgttacatggcgatctctggcctgctaattgtgcttcgctggatgaccaagccgttgccttcgacccagcctgttattggggggatcgtgaatgtgatttcgctatgttaccgttataccctgatttaccaatgcaaatttttgatggctatcagagtatatggccactccctaccaactttattgaacggcaacctgtatatcagctctattatttgcttaaccggtgtaatctatttggtggtgataatcttattacggctcaaaatattatcgataatattttgactgaaaatagccaatag

SEQ ID NO: 6195 - DNA, 888 bp, Photorhabdus luminescens
atgaatgagttgacacagttactcactgagccgtttatgtttccatttatgcaacgggcaatattcgcagcgattgtaacaggcgcggtatgtgcaatactctcttgttatctggttcttaaaggctggtcgttaatgggggacgccatttctcacgcggtattaccaggtattgtgctggcttttgctgccggtataccgctggctattggcgcattcctttccggtatcttttgtgctgttgcaacaggatatctgaaagaacatagccggataaaagaagatactgtcatgggaattgttttttcaggcatgtttgcctttggtttagttctttttgcccgcatagataccgaccaacatctgactcatattctgttcggaaatatactagggatcactaaagatgagttgcatcaaacattatggattacctgcatcactatggcggtgatactgctaaagcgcaaagacttcatgctttattgcttcgatccgaaccaagcacgcgtagtaggattgcctgttaaacttttgcattacggtttgctttgcctgctgtccatgaccatcgtcgcttccctgcaagccgtgggaatgattttggttatcgcaatgttgatatcaccaggcattatcgctttcatgttatgccgcagttttgaccgaatgttaattgtcgctatcattgcatcagtcagttccagtgtcctgggtactctgatcagtttccacattgatggtgcaacggggccatgcattgttattgttcaggctatcttctttacactggcactggcttacagtcagataaaacttgtaagagcaaaatccaaacgtaaaacgtatcaagcagccctacaaatctctaacgagcccaatcaataa

SEQ ID NO: 6196 - DNA, 879 bp, Photorhabdus luminescens
atgacagaacttttgctgcaaccttttcactataattacatggtaaaagccatctgggttagtgccatcgtcggtgctgtctgtgccttcctttcttcctacctgatgttaaaaggctggtcattgatgggagacgcgctctctcactcagttgtgcctggcgtcgctggtgcttatgcgctgggtcttccttatgcaggtggtgctttttttaccggaatgctggcagctctatctatgactttagttcgtcatatcactcggttacgtgaagatgcagtaatcgggttcattttttccactttctttgcggccggcttattaatcgtttccctcaatcctacatcagttaacgtacaaactattattttcggcaatatccttggcatcgcggatgaagatgttctccaagttgaaatcattattgcgatttcatttatcgtgctcatgtttatctggaaagatttgctaattgtattttttgatgaaacgcatgctcgctctatcggcttatctcccttgcggatgaaaatcattttttttactttgttgagtgcttgtactgtcgcagccttacaaactgtcggcgctattctggtgattgcaatggttgtcactccaggcgcaacagcttacttattaacagatcgttttaagcacctgctgatcattgccgttactattggttccctgaccagtgcatttggcgcttacctaagcttcttccttaacggcgctactggtggtgtcattgtcacgctgcaaaccattattttcctactagcattcttctttgcaccaaagcatgggctattcgcttcacgtatacgtgccagaaaagaatcctcagccttggctcaggagacaacacaattatga

SEQ ID NO: 6197 - DNA, 897 bp, Photorhabdus luminescens
atgaatagcaatatactgttcgaacgtcctcatttagtcgttgatgacgccactgtgacttataacaacggtcacacagctatttatgatgcaagtttttctatcaccggtggaactatttgtgcgttggtgggcattaacggtagtggtaaatccacattgtttaagactatcatgggactggtaagtccatctcagggaaaagtaacgctgagtgatatgccagtcaaaaatgctttgaagaaaaatattattgcatatgtccctcaaacagaagaagtcgactggaactttccagtattggtttctgatgtcgttatgatgggccgctatgggaaaatgggattcctgagaatcccaagtaaaagagatcaccaagctgttgataaagcacttgaacgtgtcggcttaacggccttacgcaaccgacagattggcgaactctcaggcggacagaaaaaacgggtttttcttgcaagggctctggctcaggaaggtaaagttctattactagatgaaccttttactggtgttgatgtaaaaacagagaatgccatcatcgacctgttgtgtgatttacgtgatgagggccatctagttctggtttctacacataacctcggtagcgtgcctgaattctgcgatcatgttatcctcatcaaccgaacggttctagcaagtggcccaacagaaacaacgttcacccaaaaaaatttagagatgacttttggtggcgtgcttcgtcatattaatctatccggtccggaattacatgatgatgatgatccacgctccttgactgttattactgatgatgaacgcgcagccgtattttatggtcgtgatcatcatgttccgccaaggcagggtcagcataaggagaagcgtcaatcatga

SEQ ID NO: 6198 - DNA, 921 bp, Photorhabdus luminescens
atgaagaaaaaactttctctgctgttactttcgcctcctgttctgggaattatgttgattctcttatctgtcattctatttagtcatccggtatccgccgccaaacaatttaaagttgtcacgacctttactatcattcaagatatcgcacaaaatgtagcgggtgatgcagcaattgttgaatcaattactaaacctggtgccgaaatccatgattaccaacccactcccaaagatattataaaatctcaacatgctgatttgatcctttggaatgggctaaatctagaacgctggtttgaacgcttctttgaaaaccttaaagatgtacctgccgttgttattactgacggcattgaaccactccctatccgtgaagggccttacaacgggaaccctaatccccacgcctggatgtcacccacaaatgctttaatctatattgagaatattcgccaagcatttgtgaaatacgatcctaaaaatacagaaacttataataagaatgccaaagcctatgctgaaaaaatcgcacaactggattctccactgagagaacgtctttcccgtattccacaggatcagcgttggctagtcactagtgaaggggcttttagctatttagctaaagattaccaattcaaggaagtttatctatggccaattaatgcggaagaacaaggttcaccacaacaagttcgtcatgtcattgatactgtaagagcaaacaaaatccccgttgtatttagcgaaagtacaatttcagataaaccggctaaacaagtcagtaaagaaacagatgcccgttatggtggcgttctttatgtagattcactctccggcagtagtggcccagtaccaacttatattgatttactgaacaaaactgtagatacaatcgcaaaaggatttaatcaatga

SEQ ID NO: 6199 - DNA, 672 bp, Photorhabdus luminescens
gtgaaattaaaactgagctttgtggcactggtcgtgctgttagtcggttgtgctgagagaaatgttcagcaaacaaatgttggcaaacagtccggtcagcaacgtatgcttagcaatactgccaacgcagctagaatttcttcttctttctcgccgacgccttttgatacctttattcaacaagcatccaatcggtacggtgttgatgaaacgctgatcagagcgattattcaagttgaatccggttttcgtcctaatgcagtcagtaaatcgaatgcaattggccttatgcaaattaaagcatcgacagcagggcgggatgtgtatcgacagaaagggcgttctggtcagccaacaacacgtgagttgaaagatcctaaaactaatattgatcttggcacggcttatatcagtatcctgaaagagcagcatctggcaggtattgataaccctgaaactctctactacgccactattgttgcctacgtaaatggtgcgggtgctcttttacgtacttttaatgcagatcgtcaattagccgttaataaaataaaccgcatgacgccggatgagttttatcagtatgttcaggataatcatccagcccctcaggctccacgctatttgtggaaggtgaaaaaggcttatcgttcgttagtaatggtagattga

SEQ ID NO: 6200 - DNA, 31737 bp, Photorhabdus luminescens
atgaaagacagcattactaaaaaagcggaaagtatccttaaagccgaacttctctctcagacaccagaaaatataaccaataacgtaaagaatatacctgctctgccacgtagctgcatcatagtcgggggaacgactcttgcggtgttctgtgccgaacaaattcaggcggctgggcatacgatacaagcaatgctgactaccgataccgttctgcaaacatgggctgccgggcaagggatcgtttgtgtgaattccgtcgaagcattacaagcacaaattgcgcaacaccctgtggactggcttttctcaatcgttaatccgattatcctgcctgtatcactgattgggcagattcgcggcggcgcttttaattatcacaatagcccactaccacgttatgcgggcagtcatgcaacttcttgggcgctgttagcacaggagacacactatgccgtttcgtggcattgcattgaggagggggtagataccggtgatatcgccgtgcaatggccagtatctattgaggagcacgataatgcgttttcattgaatctgaaatgctatcaggcggctcaggaagggtttattaagttgcttcgggatcttgatcagggtgagttggtgactcatccgcaagatctgacacgacggagtttttatactcagtctcgtcgtcccgatggtgggggatatttgtgttggcagcagccgggtgaggcactttcagctttagtacgcgcgttagattttggcgaaaattatttaaatccactgggttgcccgaaactgttactgaaatggggcacagtacggatttcctggcttcaacggctgaatcactattctgggggggcacccggtacgttgattgctgtagaagaggatgcttggcaggtaacaaccggaagtgaggatgtcaggatcggagggtttgccgcacttgagggtaaattactctccgccggggagcttgccgatatatcagaactcaagccgggcaaacagttgcctctgctttcttcgcaacaggctcagaatgtaaaagatatcctccaggcacttgcacccagtgaatcattctggcgtgagcgtcttgcctctttgataccgctgcaattacctttcgaaactgccggaaaatcagcagcccctaaatgggcattaagtgcctggcaatctccgctattagaaaatagtgaaaagttaaaaaatggtgaaaaagccccattgccgatactgttacagacattcgctatttatcttgcgcgtttgactcatcagaccgaattccaaatcggctggtgtgtggatagggtgaaaaatgaaccagacctgttgtctggtttggcgccggtggtgccaatgactgttaaggtggagtttgatcagccatggtgtacggtagcgaactggatgaatgatgagtttgcacggctggtgcagcatcgtacattttgccgcgatctcctttctcgttctccttcactgtgtgctatctcggcattaacaacaagccgcccgtggcgagttgcggtctctttcataccggatgacaagccgtgggagcagaatgcgttaggtgaattgttgacactccagatgaatactcagggtggttttcgctggatctacgatacaaaccgtttgagtgcggaagtggttcagcggatgagtgaacatttacaggtgttgtcatcatcggcggaagaaaaggatgatattcccgtctggcaacttaatttgttgcctgaagctgaacgcacgctgctactggaaacctggaatgcaacccaaacacgataccctgaccaaacatgtattcaccggttgtttgagcaacaggcagagaaaaccccggatgccacggcgctggtgtatgaagaacacattctcagttatgccgaattaaatgcccgtgctaatcggctggcgcatcaactgataacgttgggagtcgcaccagagcagcaggtggcaatttgtgtcgcgagttcaccggcgcggatcgtgggactgctggcagtactgaaagccgggggggcctatgtaccgctagatccggcttatccgggggaacgtctggttcatattttaaccgatgctgtgccagctattgtgctggcagataatacgggacgtgccgcgttaggcgaaaaagtgctggcagcgttaactgtactggatccgaatagtttgcctgatcagccggatagcaacccgcaagtatcggcattaaccccacgccatctggcgtatgtgatttatacctccggttcgaccggcataccaaagggcgtgatggttgaacaccgtgggctggttaacctgattcaggaaaaaatcgttcagtttgagattcatccgggtagccggatgttgcagtttgcctcatttggttttgatgcgggtgtctgggaaaccatgatggcattgtgcagtggggccactttggcgatcccggctgatacggttcgtcaggagccccgttatctctggcattatctggaagagcaggcgataactcacgcctgtctgaccccggccctgctccgggaggggactgatttaccggaaatgacgataagaccgacgctgatactcggtggtgaggcacccagcgcaacgttgcttcaagccctgagccgtcgggcaacggtgtttaatgcctatggcccgacggaaatcacggtgtgtgcgaccacctggcgttgtccgtcagactacactgagggtgtcattgcgattggacgtccgacagttaacacacaggtttatttgctgaatactgacggccagccggtgccgttaggggcagtcggagagctctatattggtggtatcggggtagcgcgaggctatctcaaccggcctgatttgacggcggaacgttttctggccgatccatttagcgataagccggatgcccgtctgtaccggaccggggatttagcccgctacctgccggatggcaatctggaattcctgggccgtaatgaccagcaggtgaaaatccgcggttttcgcattgaaccgggggaaatcgaagcccgattaatggaacacccggcggtgagcgaagcgctggtgctggctttgaacgatggtcaggataaacggttggtggcttatgtgatggcagaagcggatgaccagttggttaacagcttgcgtgcctatctgagtgccattttaccggattacatggtgccgacagcctttgtacgcctggataccttcccgttgacgccgaacggcaaactggatcgccgggcactgcccgcgccgggggaggaagcttttgcccgtcaggcttatgcagcgccgcaaggggagacagaatctctgttgtctgctgtctggggtgagttgttgggcattgaacaggtgagtcggcatgacagcttctttgctctgggggggcattcattgctggcggtgcggatggttgaacgtttgcgtaatgcggggttaacgttggcggtacgtgatttattccaatctccagtgttatctgaatttgcccaaacagtagggcagtcacaggcggtgatagtgccggcaaatatcatgactcctgcgatcacagcactgacacccgagatgttgccgttgattgatctcactcagtctgagattgaccatattgtggcgcaggtaccgggtggggttgccaatattcaggatatttatggtttgtcaccgttgcaggacggcatcctgttccaccatctgctggcgaataaaggtgacccgtatctatttgttagcaagatggtttttgctgaccgcgccctgttggatagctatttagtggcagtgcaacaagtggttaatcgccacgatatcctgcgtaccgcctttgtttggcaaggattatcagcgccggtacaagtcgtttggcgtcaggcgcaattatcagtcactgaattgacattagacccggttgatgggccggtccgtgatcagttagctcagtattttgacctacatcaccatcgcctcgacttgaaccaagcacctttgttgcactttggggtagcgcaggaggaggatggtcgctggagcgtactgcaattgctgcatcatctgattggcgaccatacgacgctggaagtgatgaacggtgaaattcaggcttatcttgccggacaggaagggaacttacctgtgccgatccctttccgcaatctggtggctcaggcccggttgggggtgagtcaagccgaacatacccgcttctttactgagatgttggctgaggtggatcaaccgacgctgccattcgggttgatggaggtacatcgggatggttctcaggtgacggaatcgtaccggatgttacccgctacattgaatgaccgtctgcgcagtcaggcccagcgtctgggtgtcagtttggcgactttgtgccatttggcctgggcacaggtgttgtcacataccagcggacaggagaaagtggtgttcggcaccgtgttgtttgggcggatgcaggtagggcaaggcgctgacagcggtatggggctgtttatcaataccttgccgttacgactggatataaatgatgcttcggtacaggacagtgtacaggctgtgcatacccggctggcggaattgctggatcatgaacatatgtcactggcattggcccagcgttgcagtagggtgccaggggaaattccgctcttcagtgctttgctgaactatcgacataatgatcaaccgacattcccaaataaagaggtgccaggtattgaattcctaggcgcacaggaacgaaccaactatccgtttgtgctgtcagtagaggacggtgggtctactttgggattgactgctcaggtagtgcagccgtttgagtcggaacgagtatgcggttatatgcaacaggcgctggaaagtctggctgaggcccttgaacagcgtccggagacaccggtacgaacactgaatatcttgccggcagcagagaaaaagctgttgctggaaacttggaatgcaaccgcaaccgaaacgtcgtatccagatcacagttgtattcaccgactgtttgaacaatgggcaaagaaaagtccggatgccacagcactggtgtatgaagaacagatcctcagctatgccaatctcaatgcctgcgccaaccgtctggcgcatcaactgatcgcgttgggagtcacaccggaccaacgggtggcggtttgcgtgtcacgttcaccggcaatggtggcgggggtattagccgtgctgaaagcgggtggagcttatgtgccgctagatccagcttatcctagtgcgcgtttggcacatattctgaccgatgctgccccggctgttgtgctggcggataaggccggcaaggttgcactgggtgaggaagcacttactggactaacggtactggaccccaatattttgcctaaccaagtagacagcaacccgcagatatctggactgacttcgcgacatctggcttatgtgatttatacctccggttccactggggtgcccaaaggggtgatgattgagcaccgcaatacggttaactttctgtattgggcccagcaggcttttgaaacggaagagatccgggaggtgcttttctcgacgtcaatgaatttcgacctgtccatttttgaatgttttgtgccgttgtcccaaggggcgacaattcatctggtggaggatgccctgtcattgatgcagcatgccctgccggtgaccttgatcaactcagtcccgtctgcgatgaaaccgttattgcaggctcaggcgctgatggcgtcggttcataccgttaatctggcgggggaaccgcttaaaggtgccttaattgaacagattttcgaaaaaacgcaaatacaacggttgtgtaatctctatggaccttctgaaacgacaacctattctgcctggttgccaatacagcggggtgacaggattattgaaagtatcggccgtccgatagccaatacccgcctttacttactggacgagaatggtcagccggtaccgttgggcgtggtgggggaaatttatattgggggggcgggagtggcacgtggctacttcaatcgccctgatttaacggcggaacggttcttgattgatccgtttagtgatgtgccggatgcccgtatgtaccgtaccggggatttggctcgttattttccagacggtaatttggagttcctgggccgcaatgaccagcaggtgaaaatccgtggtttccgcattgagccgggggaaatcgaagcccgattaatggaacacccagcggtgagtgaggcggttatactggcactggatgatgatcaggataaacggttggtggcttatgtggtggcagaagcggatgaggtattgattaaccgtctgcatgcgcacttaagtgcggttttaccagattatatggtgccagccgcttttgtctgtctggatgccttcccgctgacgccaaatggcaaactggatcggcgggcattaccagccccaggggaagaagattttgcccggcagatttacgctgcaccgtcaggggagatggaaaccacattggcggctatctggcgtgaattactcggtgttgagcggatcagtcggtatgacaactttttcgcactgggtggtcattcgctgttggcggtgaggatgatgaatcggatagccgcgttggggattgaattaccgctgtccacactgtttacattcccgtctttgatagcttttgctgaagtgatgcgtacccagtttgatgagtcaggcgcggcattgcccgctatcgttccgctatcccgtgaggatcaccaattgccgttgtcatttgcgcaacaacggctttggttcctggcccagcttaatggagtgagtgagacctatcatattccattggccctgcgtttgcgtggtcgattggatatcaccgcttggcaacaggcgcttgatacgctgtttgcccgccatgaagcattgcgttctgtttttgttgctgttgacggccagccacaggtggaattgttgccggcggcatcaagcttgctgatgaaaaaatatgatctgcgtgacacgcctgatgtggatgaccagcttgcgtttctctctgctcaggaagccagtgcgccgtttgatcttgcccgtggcccattaattcgttccagtctggtacaactggctgacgatgaacacgttttcttgctgacccagcatcatattgtttccgatggctggtctttagggatactaaaatcagaattggaggcgctttattcggctcacttgaatcaacagccggatccgttgccaccgttgacaattcagtaccctgattacgccgcctggcagcgtcaatggttgtcggctgaacgcatacagtcccaatctgattattggcgcgcgaggctggttgatgcaccggttctcctggatttgccgactgaccggccacgtccgcctcagcagtcgtttgccggggccttattgcccgtcaatctggatgcggagttaacccaatcccttaagcgcctgagtgagcaacagggtgtcacgttgtttatgaccctgttggcggcctggacagcagttctatcgcgcctgtcaggtcaggaagatttggttgtcggtacgccaagcgcgggccgtagtcggcaggaagtagaatctttaatcggtttctttgtgaatacgctggcgttgcggatggatttatccggtgcaccgaatgtgacggaattgctggcgcgcgtacgacaaactgcactggcggcacaggaacatcaggatctcccgtttgaacaggtggtggaaattgtgcaaccgccgcgccgactagcgcatactccgctatttcaggtgatatttgcctggcagaacaatgaaaacatagaatggcggttgccagggttggcggtttcacttgcggatcaacctattgatatcgctaagtttgatcttgaattgagcctgtctgaagtggacggcagagttgtcggttatctgaattatgctacggcgctatttgatcaagcgaccattgagcggcaggtgggctatctccataccgtattgcgggggatggcaactaaccctcaacagccggtcgggaaaatcgatatcctgaccgtgacggagcgcaagttgttattggaaacttggaacgcgaccaaaacgtcgtatccagatcacggttgtattcaccgactatttgagcaacaggcagagaaaacccctgatgcgatagcgctggtgtatgaaaaatacattctcagttatgccgaattaaatgcccgtgctaatcggctggcgcatcaactgataacgttgggagtcgcaccagagcagcgggtggcaatttgcgtcgcgagttcgccggcgcggatagtgggactgctggcagtactgaaagctgggggtgcctatgtaccgctagacccggcttatccgggggaacgtctgattcatattttaaccgatgctgcccccgctattgtactggcagataatacgggacgtgccgcgttaggcgaaaaagtgctggcagcgttaactgtactggatccgaatagcttgcctgatcaaccggatagcaacccgcaagtaccggtattaaccccacatcatctggcgtatgtgatttatacctccggttcaaccggcataccaaagggagtgatggttgaacattgtgggctggttaacctggttcaggaaaaaatcgttcagtttgatattcatccgggtagccggatgttgcagtttgcctcatttggctttgatgcgggtgtctgggaaaccatgatggcattgtgcagtggggccactttggcgatcccggctgatacggttcgtcaggagccccgttatctctggcattatctggaagagcgggcgataacccatgcctgcttgacaccggccctgctccgggaggggaccgatttaccggaaatgacgataagaccgacgctgatactcggtggtgaagcacccagtacaacgttgcttcaagcactgtgtcgtcgggcaacggtgtttaatgcgtatggcccaacagaaattacggtgtgtgcggccacctggcgttgtccgtcagactacactgagggtgtcattgcgattgggcgtccgacagctaacacacagatttatttgctgaatactgacggccagccggtgccgttaggggcagttggtgagctctatattggtggtatcggggtagcgcgaggctatctcaaccgacctgatttgacggcggaacgttttctggccgatccgtttagcgataagccggatgcccgcctgtatcggactggggatttagcccgctatctaccggatggcaatctggaattcctaggccgcaatgaccaacaggtgaaaatccgtggtttccgcattgaaccgggagaaatcgaggcccgattgttggagtacccagcggtgagtgaagcgctggtgctagctttaggtgacggtcaggataaacggttggtggcttatgtagcagcagaagcgaatgaagagttggttaaccatctgcgtactcacctgagcgccattttgccggattacatggtaccggcagcctttgtacgtttggatgccttcccgttgacgccaaatggcaaactggatcgccgggctctaccagcgccgggggcggaagcctttgcccgtcaggtttatgcagcgccgcaaggggagaccgaaaccctgatggctgctatctggagcgagttgttgggcattgaacaggttagtcggcatgacagcttctttgccctaggtggtcattcattgctggcggtgcggatggttgaacgtctgcgtaatgcggggttaacgctggcagtacgtgatttattccaatccccagtgttatctgaatttgcccaaacagtagggcaatcaccggtggtggtggtgccggcaaatgtcattaccccggcgctcacaacacttacacccgaaatgttgccattgattgatctcactcagtctgaaattgaccatatcattgaacaagtaccgggtggggtggccaatattcaagatatctatgccctgtcaccattgcaggacggcatcttgttccaccatttgctggcgaataaaggtgacccatatctattggtcagccaaatgatttttgctgatcgttcgttgttggatcgttatctggcggcagtgcaacaggtggttaatcgccacgatattttgcgtaccgcctttgtttggcaaggattatcagcgccagtacaagtcgtttggcgtcaggctcaattgtcagtcacggaactgacattagacccggttgatgggccggtccgtgaccaattagctcaacattttgacccacgccatcatcgcctcgacttgaaccaagcacctttgttgcattttgcgatagcgcaggaggacgatggtcgctggagtgtactgcaattgctgcatcacctgattggcgaccatacgacgctggaagtgatgaacggtgaggttcaggcttatcttgcaggacaggaagagagcttgcctgcgccagcccctttccgcaatctggtggctcaggcccggttgggcgtgagtcaggctgagcatacccgcttctttactgacatgctggcagaagtggacgaaccgacgctgccgttcgggttgacggaggtatatcgggatggttcgcaggtgacagaatttcaccgaatgttacctgctacgttgaatgaccgcctgcgcagtcaggctcggcgtctggacgtcagtttggcgactttgtgccatttggcctgggcacaggtgttgtcgcgtaccagtggacgggaacaagtggtgttcggcaccgtgctgtttgggcggatgcaggctgggcaaggcgctgatagtggcatggggctgtttatcaataccttaccgttacgattggatatggatgagacctcggtgcaggacagtgtgcggttagcccatacccggttagccggattgctggagcatgaacatgcttcactggcactggctcaacgttgcagtggggtattgggggaagtgcctctctttagcgcgttactgaactaccggcatagtacgcagccggttaccacggatgcaatcatcagcggtattgaattccttagcgagcaagagcgcactaactatccgtttgtcttgtcggtagaggattttggtcatgcactggggctgacgacgcaaattgttcaaccgattgatccagagcgaatatgtggttatatgcaacaggcgctggaaagtttggtggaagcacttgaacaggcaccggaaacaccgatacgggcattgaatatcttgccagcagcggaaaaaaggttgttgctggagacttggaatgcaactcaggcgccatatcctgaccaatgttgtgttcaccagctatttgaacaacaggcaggaaacacgcctgatgcgatagcgctggtgtatggagaacacattctcagctacgccgaattaaatgctcgtgccaactggttggcacactggttaattgggcaggggatccagccggatgaccgggtcgctgtgcagttagaacgttctattgaactggtggtggctcaattggctatcctcaaggccggggctgtttatgtaccgatcgatccccgcgtaccggatgaacggaagcactggctgataagcgactgtgcagccaaattattgcttacggatatcccggttgacttggccgataagatcggcgctatcagtggggaagattaccccaatcctgacttgccccgcatcagtactgagctggcttatattatgtatacctccggctcgactggtaccccaaaaggggtgttggtaccgcatcgtgcggtggcccggctggtcatcaataatggttatgccgaaatcggaccagatgatcgggtcgcgtttggagctaacccgtctttcgatgccagcacctttgaagtttgggctcctttgctgaatggtggtacgttggtggttattgatcatgccactgtgctaacgcccaaagagtttgccctggcattacagacttatcgcattactgtgttgtggttaagtgtcgggctatttaaccggctggtagcagagttgtccccggttctcccgcagctcaaaatcctgattgtcggcggtgatgtgctagatcctcatgtgatggcgcaagttctacgtgataacccgccgcaacagttattaagtgcttatggacccagtgagggcaccacctttaccaccacctactgtattacagcgttaccgtcggtagtggcgagaatccccattggccggccgatagccaatgcacgcatttatctgctggatacttacggtcagccggtaccgttgggtgcgatcggtgagatttatgtggggggagatggggtcgcttgtggctatcttaatcgtcctgaccagactgctgagcgtttcctgacagatccatttagtgatcaaccggatgcccgtatgtacaggactggggatctggcccgttatctaccagacggtaatttggaatttctgggccgtaatgaccaacaggtgaaaattcgcggtttccgcattgaaccgggggaagttgaagcccgattgctggaacacccggcagtgcatgaagcggttgtgctagtggtggatgacggtcaggacaaacggctggtggcttatgtggtggcagaagcggatgagatgctggttaaccatctgcgtgatcacttaagtgcggtgttgccggattatatggtaccggctgcttttgtctgtttggatgccttcccgctgacgccgaacggcaagctggaccgtcgggcgctaccggtaccgggggaagaagattttgcccggcaaatttacgctgtaccgtcaggggaaatggaaaccacattggcggctatctggcgtgaattattgggtgttgagcggattagccggtatgacaactttttcgcactgggtggtcattcgctgttggcggtgcgaatgataaaccggatagcggctttggggatcgaattaccgctgtctacgctgtttacattcccgactttgatggcttttgctgaagtgatgagtgcccggtttgatgagtcaggcgaggcattgccagctatcattccgctatcccgtgaaggccaattgccgttgtcatttgcgcaacagcgtctgtggctcctggcgcagtttgagggggtgagtgaaacctatcatattccgctggctctgcgtttgcgtggtctgctggatatcgccacctggcaacaggcgcttgatacgctgtttgcccgtcacgaagcgttgcgctctgtttttgttgctgttgacggccagccgcaggtggaattgttgccggcggcattaggttggccgatgaaaaaatatgatctgcgtaacacacctgacgtggatgcgcagcttgcctctctctctactcaggaagctggtacgccgtttgatcttgcccgtggtccattaattcgttctgctctggtacaactggctaatgatgaacatgtcttcctgctgaccctgcatcatattattttcgatggctggtctgtcagcgtattgatgtgtgaattgaacgccctttataccgcttttcttaccgggcaaccggatccgttgtctccgttgacgattcagtatcctgattacgccgcttggcagcgtcaatggctatcggctgaacgcatacagtttcaatctgattattggcgcgcgagactggttgatgcaccggttctactggatttgcctactgatcggccacgtccacctcggcagtcatttaccggaaatatcttgcccgtcagtctggatgcggagttaacgcaatcccttaaacgcttgagtgagcaacaaggtgtcacgttatttatgaccctgttagcggcttgggcgacggttttatcgcgcttatcaggtcaggaagatctggttatcggtacgccgagtgccggtcgcagtcggcaagaagtggaatccctgattggtttctttgtgaatacactggcgttgcggatggatttatccggtgcaccgaatgtaacagaattgttggcgcatgtgcgacaaactgcattggcggcccaggagcatcaggacctaccctttgaacaggtggtagaaatcgtgcaaccgctgcgccgattagcgcatactccgctatttcaggtgatatttgcttggcagagtaatgagaatgcggaatggcaattgccgggactgacggttttacctgccgatcaactcatcgatatcgctaaatttgatcttgaattgagcctatctgaggtggacggaagaattgtcggttatctgaattatgccactgctctatttgatcaggcgaccattgagcggcaggtgggttatctccataccgtattgcgggcgatggtggctaaccctcaacagccagtcgggaaaatcgatatcctgactgtagcggaacgtaagctgttattggaaacctggagcatgaccgaaacgtcgtatccagatcacggttgtattcaccgactatttgagcaatgggcagagaagaatccggatgctacggcactgatgtatgaagggcaagccatcagttatgccgaattaaatacgagtgctaatcggctggcgcatcaactgattacgttgggtgtggtgccggatcagcgagtggcgatttgtgtggcgcgttcaccagcaatgatagtcggattgttagcggtgctgaaagcgggtggtgcttatgtgccactggatccggcttattcgggcgagcgtctggggcatattctggttgatgccaaaccggctattttgttggcggataatactggacgtgctgcgttgggtgagaaagcacttgcagacttgattatgctcgatccgaatatcctgtttgaccaagcggacagtaatccgctgatacctgaattgactgaacgacatttggcctatgtggtttacacctcgggttcgactggcacgccgaaaggggtgatggtggaacatcgtggggtagttaacttggctctggctcaaattacccggtttagcgttgatgaaaccagtcgaatattgcaatttgcctcatcgggttttgatgccagtgtctcggagatcatgacagcgttaagtggcggggcctgtttggttattcctaccgatattatccgccaggacccgcgtcgtctttggtcttatctggaaaaacaagcagtaacgcacgctttcctgccaccggctctgttccgggaagagagcgatttaccggtaataacgataaagcctacgttaatatttgcaggagaagcaccgggttcaaccctgttccgggcgttgtgtgatcgggtaaatttgttcaatgattatggcccgacggaaattacggtttgcgccacctcttggtcttgcccatcagactatacggatgcatgggttcctattgggcgcccaacaaccaacacacgggtttatctgctggatacttatggtcagccggtaccattggggacggtgggggaactgtatatcggtggcgtaggtgtcgcacgtggttatctcaattatcctgagttgactgctgaacgtttcctaactgatccgttcagtaatgaacctgatgcccgcttgtatcgcaccggggatttggctcgttacctgccggacggcaatctgatattcgttggtcgtaacgatcaacaggttaaaatcagggggttccgtattgagccgcaagaaattgaagcgcggctgatggagcatcctgcggtaagtggagcattggtactggcgttaagtgacgggcaggacaaacggctggtggcttatgtagtggcagagccagatgacggattgacggcgagcttgcgtggatatctgagtgctattttgcctgattatatggtgccggccgcttttgtacgcctgaataccttcccgctgaccccaaacggcaagctggatcgccgagcattacctgcgccgggggcggatgcttttgcgcgtcaggtttatgccgcgccgcaaggggaaacagaaatcctattggccactatctggagcgagttgttgggtattgaacagattagtcggcacgacagcttctttgccttgggcggccattctctgcttgcagtgcggatgattgaacgtctgcgtaatgcgggattaacgctggcggtgcatgatctattccaatccccggtgttatcggcatttgccgaaacagtagggcagtcacaagcggtggtggtgccggagaatgttattaccccggcgaccacggcactcacacctgagatgttgccgttgattgagctgacccaaactgagattgactatattgtgcaacaaatgccgggtggaatagttaatattcaggatatctatgccctgtcgccgttacaggacggtattctgttccaccacttattaaccaatgaaggcgacccgtatctgttagtcagccagatggcctttgctgatcgttcgttgctggatagttatctggtggcggtgcaacaggtggttaatcgccacgatactctgcgtaccgcctttatttggcaaggattatctgcaccggttcaggttgtttggcgtcaggcaccgttatcagttgtggaactgatattagatcctgctgacggaccggtttatgagcaattggctcaacgttttaatccgcgtcagcatcgtctcgatctgggccaagcgccactgttacgttttgttattgcacaggaaatggatggtcgttggattgcactgcaattacagcatcatttgattggcgaccatacgacactggaagtgatgaaccgcgaagttcaggcgtaccttaccgggcaggaagagagcctgcctgtgccggcccctttccgcaatctggtggctcaggttcgtctgggggtgaatcaggccgagcatacccgcttctttactgacatgttagctgaggtggatcaaccgacgttgccattcggattgacggaagtacatcgggatggttctcagatgacccaatcgtaccgaatgttgcccgccatactgaacaaccgcttgcgtagtcaggcccggcgtctgggtgtcagtctagcagcgctgtgccatctagcctgggcacaggtattgtcgcgtaccagtggacaggagaaagtggtattcggcaccgtattgtttggacggatgcagacagggcaagggactgacagcagtatggggctgtttatcaataccttgccgttacggctagatatggatgataccccagtacgagggcgtgtacaggcagcacacgcccggctagccgagttactggagcatgaacatgcttcactggcgatggctcaacgttgcagtgggatacaaggtgaagttccactctttagtgctttgttgaattaccggcatagtgcgttatccgcgacttcgaatgaaatcatgaatggtgttgagtttcttggcgcgcaggaacgtaccaactatccgtttactctatcggtggaggattttggtaatgcgttggggctaacaacgcaaattgtccagccatttgatccggaacgggtgtgcggttatatgcaacaagcgctggaaagtttggcagaaacacttgagctggccccggaaacgccggtacggacgttggaaattttgcccgaggctgaacgcactttgttattaaaaacctggaatgagacagaaattgcctattctgacccgctgtgtatccatcaattatttgaacaacaagtggagaaaaacccggacgccacagcactggtgtatgaagaacagacgtacagctatgcggaactgaatacccgcgctaaccgactagcccatcaactgattgcgctgggtattgtgccagaccagcgagtagcgatttgcgtgacacgttcaccgacgatgattgtgggcttgctggcggtgttgaaagcgggtggtgcctatgttccattggccccggcttatccaggggaacgtttggcacatattttgaccgatgcagcaccggctattttgctggcggacaatgtcggatgtgccgcattgggtgaggaagcactgtcaggactcacggtactggatccgaatacgctgcctgataagccggacagtaacccgcaagtgaccgcactgactgcacagcatctggcgtatgtgatttacacatcaggttcaaccggtacaccaaaaggtgtgatggttgagcatcgtgggctaatcaatcttgtccgggataaaattgcccagtttgacattcactcagatagccggatattgcagtttgcctcattgagctttgatgccagtgtttgggaaatcatgatggcgttgggaagtggggcctgtctggttatcgcagtcgatatcgtccggcaggacccgcttcgtctctggcattatctggagcaacaggtagtgacccatgcctgtctgaccccggctctgcttcgggatggaggagatttaccggcgctaacgataacaccgacagtgatattaggcggtgaagcacctagcgcagcactatttcagacactttgtcgccgggcggcgctgtttaatgcctatggcccgacagaaatcacggtgtgtgcggcgacttggcgttgtccaccagactacacggatacgttagtgcctatcggccatccgacggcgaacacccagatttatttgttgaatagcgacggccagccagtgccgttgggggcagtaggtgagttgtatgtcggtggtgcgggggtggcgcgtggctaccttaatcgtcctgaactgacggctgaacgctttttagctgacccatttagtgagatgccgggtgcgcggatgtatcggaccggcgatttggcccgttatctgccagatggcaatttagtatttgttggtcgtaatgaccagcagattaaaattcggggcttccggattgaaccgggtgaaatcgagacccggttgacagagtaccctgcggtacgtgaagcggtagtgttagcgcggggtgaggagcatgataagcgtctagtggcttgggtggtggcagaagaaaacgatgaattggcgaatagcctgcgtactcatctgagcacaattttgccagattatatgatgccggcggcttttgtccgtttggatgcactaccgttgacgccgaatggaaagctggaccgtctagcgttaccggcaccggacgaagaagccttttcccgccagatttacgaagcgccacaaggcgaaacagagatagcactggccgctatctggcgtgagttactggggattgagctggtgggacggtatgacagtttctttgctctgggcggccattcgttattggcggtgaggatgataaaccgaatggcggctttaggcattgaattgccgctgaccacgttgtttaaatcaccgacgttggcagattttgctgaggtaatgagggctcagcttggtgaacagaacaatagtgtgtctgctatgctgccgatatcccgagagggtgcattaccgctgtcatttgctcaacagcgtctatggctcctgacccaatttgaaggggttagccagacttatcatgtcccaatggctctgcgtttacatggtcagttggatatcgctgcttggcagcaggcgctgaatcgcttgtttgcccgccacgaggctttgcgttccatctttatctcggaggatggtcagcctcaggtcgaattgttgccggctgaattgggtttgccgatgagcaaacacgatttgcgtaaagtgtttgatgcagataaacgacttgagcgtttatgtgtacaggaagcggaggtgccgtttgatcttgctggtggtccgttaattcgagcgggtttgatacaacgtgctgacgatgattatgtctttttgctgactcagcatcatattgtgtcagacggctggtcggctggcgtgttgatgcatgagttgagtgccctctataccgctttttcaatggggctgccagatccgttacctccactggcaattcagtatcctgattatgctgcctggcagcgtcagtggctgtcggcggagcggttacaaatccaatctgactattggagaatgagtctggcagatgcgccagttctactggatttgcctactgatcggtcacgtccatctcagcagtcgtttgccggggctttattacccgtcaatttggatgcggagttaacccaatctcttaaacgtttgagtgagcaacagggagtcacgttatttatgacgttgctggctgcttgggcaacagtcttatcacgcctatcaggccaggaagatctggttatcggtacgccgagtgccggtcgcagtcggcaggaagtggaatccctgatcggcttttttgtgaatacactggcgttacgcatggatttatccgattcccccaatgtggcggaattgctggcgcgagtgcgacaaactgcgctggcggcacaggagcatcaggatctcccgtttgaacaggtagtggaaattgtacaaccaccacgccacttggcacatactccgctgttccaggtgatgtttgcttggcagaacaatgaaggcatggaatggaagatgccgggactgacggtttcacctgccgagcaacgcattgatatcgctaagtttgaccttgaattgagtctgtctgaagtagacggccgaattgtcggttatctgaattatgccaccgccctgtttgatcaacttaccattgagcggcaggtgggctatctccataccgtactacgagagatggcggctaaccctcaacagccggttgggaaaatcgatatcctgaccgtggcggaacgcaaactgttgctggaaacctggaatgcaacccagacgcgatatcctgaccagacatgcattcatcggttgtttgaacaacaggaggagaaaacccctgacgcagtagcgctggtgtatgaagaacacattctcagctacaccgaattaaatgctcgcgctaaccgattggcgcgccagttaattaagtgggggatacggtcagatgagcgggttgctgtgctgttagaacgttccattgagctgatcgtggcccaattggcaattctcaaagccggggccgtttatgtgccaatcgatccccgtgtgccggacgaacggaaaaactggctgataaacgactgttcagccaagttattgcttagcggtatcccggttgatgtggcgatcccccggttttctctaactgatgagatgatcactatcgaagaagaagatcaccgcaatcttgacttgcctcgctccagtaccgacttggcctatatcatgtatacctctggctcgaccggtacacccaaaggggtaatggtgccgcatcgtgcggtggttcgactggtcatcaataacgggtacgctgaaatcgggccggatgatcgggtggtgtttgaggccaacccggctttcgatgccagtacctttgaagtctgggcaccattgctcaatggcggtacgctggtggtgattgatcacactacgttactgacgcctaaagaatttgttcaggcattacagacttatcgcattaccgtactatggctgagtgtcgggctgtttaaccgactggcgacagcgttgttcccagtgctgccacaaatcaagaccctgattgtcggcggcgatgtgctggatccgcatgtgatggcgcaggttctgcgtgatagcccgcctcaacagttattaaatggttatggaccgagtgagggcaccaccttcactaccacctaccgcatcacggcattatcaccggaagtgagccggatccccattggtcgaccgatagccaatacgcgggtttatctgttagatacctatggtcagccagtgccacagggggtaactggtgagatttatatcggtggagatggggttgcctgtggttatctcaatcgccccgaactgaccgcggagcgttttctgccggatccgtttagtgataaaccggatgcccgcctgtatcggaccggggatttggcccgttacctgccagacggcaatctggagtttctgggccgcaatgaccagcaggtgaaaatccgtggtttccgtattgaactaggggaaatcgaagcccgattgctggaatacccgttcgtgagtgaagcggttgtgcaggtgatgggcgacggtcaggacaaacggttgatagcttatgtggtaacagaagcggatgaggagttagttaaccgtctgcatacccacctaagtaccattttaccggattatatggtgccgacggcctttgtacgtctggatactttcccgttgacgccgaacggcaaattggatcgtcgggcattaccggcaccgggggaggaagcttttgcccggcaagtttatgaagcaccgcagggagaaacagaaatcctattggctgctatctggagcgagttgttggggattgaacagatcagtcggcacgatagtttctttgccttgggcggccattctctgcttgcggtgcggatgattgagcgcctgcgtaacgtggggttaacgctggcggtacgtgacctatttcaatctccgatgttatcggcatttgcccaaacagtaggccaatcacctccggtggtggtgccggcgaatgtcatcaccccggcgaccacggcacttacacccgaaatgttgccgctgattgagctgacccagcttgaaattgaccatatcgtgggacaagtgccgggtgggatggctaatattcaggatatctatgccctgtctccgttgcaggacggtattctgtttcaccatttgttggccaatgaaggtgacccgtatctattggtcagccaaatgacttttgatgatcgcgccttgttggatcgttatctggcagcagtgcaacaggtagtgaatcgccacgatattctgcgtaccgcctttgtttggcaaggattatcaacgccggctcaagtggtttggcgtcaggcaccattatcagtcactaagctgacattggacccagttgatgggccggtccgtgaccagttagctcaactttttgatccacgtcgctatcgtattgatctgcaacgagccccattgttgcactttgtggtagcacaggaggaggatggccgttggagcgtactgcaattgctacatcatctgattggcgaccataccacaatggaagtgatgcatggcgaagttcaggcttacctagtcggacaggaagagaacttgcctgtgccagttcctttccgcaatctggtagctcaagttcgtttgggggtgagtcaagccgaacatacccgcttctttactgacatgttggctgaggtggatgaaccaacactgccatttgggttgacggaggtacatcgggatggttcgcaggtgacggaatcgcaccggatgttacctgttaggttgaacgatcgtctgcgcaatcaggcccggcgtctgggtgtcagtttggctacgttatgccatctggcttgggcacaggttttatcacgtaccagcgggcaggataaagtggtgttcggtaccgtgctgtttgggcgaatgcaggcagggcaaggaggtgacagcagcatggggctgtttatcaataccttgccgttgcgactggatatggatgataccccggtgcaggaaagtgtacgggcagctcattctcggttagctggattgctggagcatgaacatgcgtcactggcgctggctcaacgttgcagtggaataccgggggaagcgcctctctttagtgctttgctgaactaccggcatagtgcacaaccggttaccacggatgcaaccatcagcggtattgaatttctcggcgggcaagagcgcactaactatccgtttgtcttgtcggtggaggatgttggtcatgctttaggattgacggcgcaaattgctcaaccgattgatccggaacggatatgtgattatatgcagcaggcgctggagagtctggcagtggcgcttgaacagcatccagagataccggtacgaacattgaatattttgccaacagcagagaaaaagctgttgctggaaacctggaatgcaactgaaacgtcgtatccagatcacggttgtattcaccaactgtttgagcaatgggcagagaaaagtccagatgccacggcactggtgtatgaagaacagagtttcagctatgccgagctcaataaccgcgccaaccgtctggcgcatcaactgatcgcgttgggcgtcataccggaccaacgggtggcggtttgcgtgtcacgttcattggcaatggtggtaggggtattagccgtgttgaaagccgggggtgcctatgtaccgctggatccggtctataccggtgagcgcctgacacatatcctgaccgatgctgcccccgctattttgctggcggataatgtcgggcgtgatgtgctgggagaggacgcactggcagggttaacggtacttgacccaaatagcccgcctgatcaaccggacagtaacccacaagtgccggcattgacggcacagcatctggcgtatgtgatttacacctcgggctcgaccggcacgccgaaaggggtaatggtggaacatcgccatatcctgcgtttgtttgaggcgactgaattttggtatcactttaatcggcaagatatttggtgcctgttccactccattgcgtttgacttctcggtgtgggaattatggggggcgttacgttacggtgctaaattagtgctggttccgcacgcgattgcccgttccccccaggagctgcatcaattcgtgtgtcagcatggcatcacagtgttgaatcagacccccagtgcctttaaagcctttattgccagctatatcgccaatccgttaccggactgcttgcgctatatcatctttggtggggaagcactcgatccgagtattttgaagccgtggtatgccctgcgtgaggagacgttgccgcagttggtgaatatgtacggtatcacagagaccacggttcacgtcacttaccgggcactggctcgccatgatgtagaacagataacgagtcctattggcacacggatcccggacttaactctctatctgctggataagtatagtcagcctgtaccgttaggtgccgtgggtgagttatatattggcggggccggtgtggcacggggttatctcaatcgtcctgaactgacggcggagcgttttctaccagatccgttcagtagtgagccggatgcccggatgtaccgcaccggggatttggcccgctatttgccagatggcaatttggcgttcctgggccgaaatgaccaacaggtgaaaatccgcggtttccgcattgagccgggggaaatcgaagcccgattgacggaacacccggcagtgcatgaagcggttgtacaggtgatgggcggcggtcaggataaacggctggtggcttatgtagtggcagaagtggataaggagttgattaatcgtctgcgtactcacttaggtgcgattttaccggattatatggtgccggcagcatttgtctgtatggatgccttcccattgaccccgaacggtaaactggatcgtcgggcgctaccggtgccgggggaaaatgcctttgcccgtcaggtttatgcagcgccgcaaggggagacagaaactctgctagccactatttggagcgagttattgggtattgaacaggtgagtcggcatgacaacttctttgcattgggtggtcattcgctgttggcggtacggatgattgaacgtctgcgtaatgcgggattaacgctggcggtgcgtgatttattccaatccccggtgttatcggcatttgcccaaacagcaggacaatcactggaagtggtggtgccgacgaatgtcattaccccggtgaccacggcactcacacctgaaatgttgccgttggctgatctgacccaatctgagattgatcatatcattgcacaagtatcaggtggggttgccaatattcaggatatctatggcttatcaccgttgcaggacggtattctgttccaccatttactagcgaataaaggagatccgtatctgctggctggtcagatggtctttgctaaccgcgacttgttggacaactatttggcggcagtacaacaggtagttaatcgccacgatattttgcgtaccgcctttgtttggcaaggattatcagcgccagttcaggtggtttggcgtcaagctcaattatcagtcactgaactgacactagacccggttgatgggctggtctgtgaccagctagctcaacattttgatccgcgtcgctatcgtattgatctgcaacgagcaccactgttgcattttgcggtggcgcaggaggacgatggccgttggagcgcactgcaattgcagcatcatctgattggtgaccataccacaatggaagtgatgcagggcgagattcaggcttatcttgccggacaggaagagaacttgcctgtgccggtccctttccgcaatctggtggctcaggcccggttgggggtgagtcaggccgcacatacccgcttctttactgacatgttgtctgaagtggatgaaccgacgctgccgttcgggttgatggaggtacatcgagatggttcacaggtgatggaatcgcaccagatgttaacgcctgaactgaatgatcgtctgcgcagtcaggcacggcgtatgggtgtcagcttagcaactttatgccatctggcctgggcacaggtcttgtcgcgtaccagcggacaggtaaaagtggtattcggcaccgtgctgtttggacggatgcaagcaggacaaggggctgacaatggcatggggctatttaccaatactttgccgttgcgactggatatggatgataccccggtgcgggacggtgtacgattagcccatactcgattagccgaattgctggagcatgaacatgcctcactggcgctggcccaacgttgtagtgaggtgccgagggaaacacctctctttagcgcgttactgaactaccggcatagtgcacagccggttaccacggatgtaaccatcagcggtattgaattccttagcgggcaagagcgcactaactatccacttgtcttgtcggtggaagattttggtcacgcactggggctgacggtgcaaattgttcaaccgattgatccgaaacgcgtgtgtggttatatgcaacaggcgctggaaagtctggcagcggcgcttgaacagcagccggagacaccggtacggttgctgaatatcttgccggaagctgagaagaggttgttactggcaacttggaacgcgactcaagcaccatatcctgaccagagttgtattcaccggctgtttgagcaacaggcagaaaatacccctaatgcgatagcgttggtgtatggaaaacatattctcaactatgccgaattaaatgctcgcgctaaccaactagcccactggttaattgggcaaggggtcaagccggataaccgggtcgctgtgctattagaacgttctgttgagctggtggtggctcagttggctatccttaaggctggggctgtttatgtgccgattgatccccgagtgccggatgagcggaagtattggttgataagtgactgttcagccaagttattgcttaccgatactccgattgacttggcgatcccccggttttgcctggccgatgagatgggtgctattaggcaggaagataaccgcaatcctgacttaccccgttccagtactgaactggcctatatcatgtatacctcaggctcaacgggcacgcccaaaggagtgatggtaccgcatcgggcagtggttcggctggtgattaataatgggtacgccgaaattgggccggatgatcgggtggcgtttgaagctaacccggcttttgatgccagcacctttgaagtctggtcgccgttgcttaatggcggcgtgctggtggtgattgatcacgccacgttgctgatgcctaaagaacttgttcaagcattgcagactcatcgcattaccgtgctgtggctaagtgtcgggttatttaaccgactggcggcagagttgtctccggctttcccccagctcaaaatcctcattgtcggcggtgatgtgctggatccacatgtaattagacaagttctgcgtgataacccaccgcaacagttattgaatggctatggaccgagtgaaggcaccacctttactaccacttaccgtattacagcgttatcgccagaagtggtgagaattcccattggtcgaccaatagccaatacgcgggtttatctgttggatacttatggtcatccagtgccgcagggggcaatcggtgagatttatatcggcggagatggagttgtttgtggctatcttaatcgtcctgaactgacgaaggaacgttttttgccagatccgttcagtgatgaacccaatgctcgcctgtatcgcaccggggatttagctcgttacctaccagacggtaatctggaattcctgggccgcaatgatcaacaggtgaaaatccgcggtttccgcattgaaccgggggaaatcgaagcccaattgctgaaacacccggcagtaagcgaagcgttggtgctgactttgggtaacggtcaggataaacggttggtggcttatgtggtggcagaagcggatgagatgctggttaaccatctacgtactcacttaagtatgattttaccggattatatggtgccggcagcctttgtgcgtttggatacctttccgttgacgccaaacggcaaactagatcgccgagcattaccggtgccgggggaagaagattttgcccggcagatttacgccgcaccgctaggggagatggaaaccctattggcgactatctggtgtgaattactcggtgttgagcgaattagccgatatgacaactttttcgttttaggcggccattcgttgttagcagtgcgaatgatgaaccggatagcggcgttggggattgaatggccattgtccacgctgtttacattccctgttttgactacttttgctgaagcgataagtgcccagtttggggaatcggacaggatattacctgctatcgttccgctatcgcgtgaaggccaattgccgctgtcatttgcgcaacaacgtctgtggttcctgactcagtttgacggggtgagtgagacctatcatattccgctggccttacgtctacatggtcggttggatatcgccgcttggcaacagacacttgatacactgtttgcccgccatgaagcgttgcgctctgtcttcgttgctgtcgatggtcaaccgcagatagagttgttgccggcggcatcaggcttgctgatgagaaaatatgatctgcgtgacatgcctgatgtagatgcgcagcttgcgtctctctctgctcaggaaattgaaacactgtttgatcttgctcgcggcccattaattcgttccagtctgatacaactggctgatgatgatcacgttttcttgctgactctacatcatattgtttttgatggttggtctgtcagcgtgttgatgcgtgaattgagctccctttacaccgcgtttctggcgggacagccagatccgttgccaccgttgacgattcagtaccctgattacgccgcttggcagcgtcaatggttgtcggctgaacgcatacagtcccaatctgattattggcgcgcgaggctggttgatgcaccggttcttttggatttacctactgaccggccacgtccgcttcagcagtcgtttgccggggccttattgcctgtcagtctggatgcggagttaacccaatcccttaagcgcctgagtgagcaacagggcgtcacgttatttatgaccctgttggcggcttgggcgacagtgctgtcacgcctgtcaggtcaggaagatctggttatcggtacgccaagtgctggtcgtggtcggcaggaagtggaatctctgattggcttctttgtgaatacgttggcgttgcggatggatttatctgatgcaccgaatgtgacggaattgctggcacgtgtacgacaaaccgcactggcggcacaggaacatcaggatctcccgtttgaacaggtggtagaaatcatgcaactgccgcgccaactggcgcacaccccgctgtttcaggtgatgtttgcctggcagaacaatgagaatacggaatggcggctgccggggctagaggtttcaccagtcgagcaagtttttgatgtggctaagtttgatcttgagctgaatttgtttgaagttgaaggccagattgtcggttacctgaattatgctacggcgttatttgatcaagcgaccattgagcggcaggtgtgctatctccataccgtattgcgggggatggtagctaaccctcaacagccggtcgggaaaatcgatatcctgaccgtggcggagcgtaagctgttactggaaacttggaacgcaactgaaatgccgtatcctgctcactgttgtattcaccggctgtttgagcaacaggcagaaaaaagcccggatgccacggcgctgatgtatgcagggcaagttctcagttatgccgaattaaatgcccgtgctaatcggctggcgcatcaactgataatgttgggagtcgcaccagagcagcgggtggcaatttgcgtcgcgagctcaccggcgcggatcgtgggactgctggcagtactgaaagccgggggggcctatgtaccgctagacccggcttatccgggggaacgtctggttcatattttaaccgatgctgtgccagctattgtgctggcagataatacgggacgtaccgcattaggtgaaaaagtgctggcagcgttaactgtactggatccgaatagcctgcctgatcagccggatagcaacccgcaagtatcggcattaaccccacgccatctggcgtatgtgatttatacctccggttcgaccggcataccaaagggcgtgatggttgaacaccgtgggctggttaatctgattcaggaaaaaatcgttcagtttgagattcatccgggtagccggatgttgcagtttgcctcatttggctttgatgcgggtgtctgggaaaccatgatggcattgtgcagtggggccactttggcgatcccggctgatacggttcgtcaggagcctcgttatctctggcattatctggaagagcaggcgataactcacgcctgtctgaccccggccctgctccgggaggggactgatttaccggaaatgacgataagaccgacgctgatactcggtggtgaggcacccagcgcaacgttgcttcaagccctgagccgtcgggcaacggtgtttaatgcctatggcccgacggaaatcacggtgtgtgcgaccacctggcgttgtccgtcagactacactgagggtgtcattgcgattggacgtccgacagttaacacacaggtttatttgctgaatactgacggccagccggtgccgttaggggcagtcggagagctctatattggcggtatcggggtagcgcgaggctatctcaaccggcctgatttgacggcggaacgttttctggccgatccatttagcgatgagccggatgcccgtctgtaccggaccggggatttagcccgctacctgccggatggcaatctggaattcctgggtcgtaatgaccagcaggtgaaaatccgcggtttccgtattgaacctggggaa

SEQ ID NO: 6201 - DNA, 1929 bp, Photorhabdus luminescens
atgcctgttgttactcttcctgacggtagccaacgccagtttgaccatgccgtttctgtaatggatgttgcctgtgatattggtcctggtttagcgaaagcatgcattgctggccgcgtaaatggtgagctagtggatgcttgtgaattaatcgattcagatgcaaatcttgccatcatcacaagtaaagatgatgcagggctggaaattatccgccattcatgcgctcatctgctgggccatgcgattaaacaattatggccagatacgaaaatggctattggtccgattattgataatggtttttactatgatgttgatcttggccgtgccctgacgcaggaagatattgaactgcttgaaaagcgcatgttggaacttgccaaaaaagactatgacgtcatcaagaaaaaagtgaactggcaagaagctcgtgataccttcgttgctcgtggtgaggattataaagtacaaattttggatgaaaacatcagtcgagatgatcgtcctggtctctataatcatgaagaatatattgacatgtgccgtggcccacatgtgccaaatatgcgtttctgccatcattttaaattgcagaaagttgcaggggcatattggcgtggggatagcaacaataaaatgttgcaacgaatatacggtaccgcgtgggctgataagaaacagctcaatacttatctgcaacgtttggaagaagcggctaaacgtgaccatcgtaagattggtaaacaattagatctataccacatgcaggaagaagctccaggtatggcattctggcataatgatggttggactattttccgtgagctggaaacttttgtccggaccaaactgaaagaataccaatatcaggaagttaaaggtccgtttatgatggaccgtgttatgtgggaaagaacgggtcactgggaaaactacggtgagcatatgtttaccacttcttcagagaaccgtgaatattgcgttaaaccgatgaactgcccggggcatattcagatttttaaccaagggttaaaatcctatcgtgatttgccgttacgtatggctgaatttggtagttgtcaccgtaatgaaccatcaggggcattacatggcttgatgcgggttcggggttttactcaggatgatgctcatatcttctgtacagaagagcaaattcaccgggaagtcagtagttgcattaagatggtgtatgacgtttacagcacttttggttttgaaaaaatcgtggttaagctgtcaacccgcccggaaaagcgcattggtactgaggaacaatggaatcaagcggaagaatctctggcggcagcactacaagaaaatggtgttcaatttgaatatcagccaggtgaaggtgccttctacggaccgaaaattgaatttactttgcatgattgtttggatcgtgcgtggcaatgtggtactgtgcagctcgacttttcactaccaggtcgtttgagtgcgtcctacgtaggtgaaaataatgaacgtaaagttcctgtaatgattcaccgagcggttctgggttcactggaacggtttatcggcatcctaactgaggagtatgcgggtttcttcccaacatggattgccccacagcaggtagtggtgatgaatatcaccgatagccaagctgattatgtacaggaattagtaaaaaaacttcaagatgctggcattcgtgcaaaagcagacttgagaaacgagaagattggctttaaaatccgtgaacacactctacgtcgtgtgccctacatgcttgtctgtggtgaaaaagaggtcgaatcagggaaagtttctgttcgtacccgccgtggtaaagatttgggcagcattgatgttaacgggttcatcgaaaaactgctgatagaaatacgcagtcgcaatcttcatcaattggaggaataa

SEQ ID NO: 6202 - DNA, 426 bp, Photorhabdus luminescens
ctgggaaaagcgcttgaaaaagctaaggaagagggtgttgatttagttgaaatcagcccgaatgctgagccgccggtttgccgtcttatggattacggcaagttcctgtatgagaagagtaagtcaaccaaagaacagaagaaaaaacaaaaggttactaaggttaaggaagttaaattccgtcctggtacagaggaaggcgactatcaggtaaaaataggcaacctgaagcgttttctggagaatagcgataaagccaaagttaccctgcgtttccgtgggcgtgaaatggcgcaccaacagattggtatcgaaatgcttgacaaagttcgcaacgatctggatggactggcggtagtcgaatccttcccttcgaagattgaaggccgtcagatggtaatggtgctcgctcctaagaagaaatag

SEQ ID NO: 6203 - DNA, 198 bp, Photorhabdus luminescens
atgccaaagattaagacagtacgcggcgccgctaaacgctttaaaaaaaccgcaagtggtggttttaagcgtaagcgtgctaaccttcgtcacattctgactaagaaatcaaccaagcgtaaacgtcatttacgtccaaagggcatggtctccaaaggtgatctgggcctggttgttgcttgcttgccgtacgcataa

SEQ ID NO: 6204 - DNA, 357 bp, Photorhabdus luminescens
atggctcgcgtaaaacgtggtgttgtcgcccgtgcacgtcacaagaaaattttaaagcaagcgaaaggttactacggtgcccgttcgcgcgtttaccgtgttgccttccaggcagtaattaaagcagggcagtacgcttaccgtgaccgtcgtcagcgtaaacgtcagttccgtcaactgtggattgcacgtatcaacgctgctgcacgtcagaatggtttgtcttacagccgtttcatcgatggtctgaaaaaagcctctattgaaatcgaccgtaagatcctggctgacatcgctgtgtttgacaaagtggcatttgctgctttagttgaaaaagcgaagagcgctctggcataa

SEQ ID NO: 6205 - DNA, 984 bp, Photorhabdus luminescens
atgccacatctcgctgaactggttgcaaacgcaagagcagccatagaagatgcccaggatgttgctgcgttggatttggtgcgtgttgaatatttaggcaaaaaaggccatttaactctccaaatgtcatcgctgcgtgatctgccggtcgaagaacgtccagcagcaggggcggttattaatcaggttaagcaagaagtccaggaagctctgaatatccgtaaagaaaaactggagactgaccttttgaacttccgtttagcagcggaaaaaattgatgtatcattgccgggtcgccgtatggaaaatggtggactacatccggttaaccgcacaatagagcgtattgagactttctttggtgaattagggttttctatagaatcaggccctgagattgaagatgattatcataatttcgatgcgttgaatattcctgctcaccatcctgcacgtgctgatcatgatactttctggtttgatgccaaacgtctgttgcgtactcagacttcaggtgttcaggttagaactatgcacagtcaacagccgccaattcgcgtcattgcaccgggtcgcgtgtatcgtaatgactacgatcagacacacacgcccatgttccatcaggtagaaggtttgattattgatcgtgatatcagttttaccagcctgaaaggaacgttgcacgatttcctgactaacttttttgaagaagatttgcaggttcgtttccgaccttcttactttccatttacagaaccttcggcggaagttgatgtaatgggtaaaaacggtaaatggctggaagtgttgggttgcggtatggttcatcctaatgtattgcataatgttggtcttgatcctgaaatttattctggttttgctttcggcatgggagtggaacgcctgacaatgttacgttacggtgtaactgatttgcgtgcgttcttcgaaaatgatctgcgttttctcaaacagtttaaataa

SEQ ID NO: 6206 - DNA, 2388 bp, Photorhabdus luminescens
atgaaattcagtgaactctggttacgcgaatgggtaaatccagccattagcagtgaaacattatctgatcaaattaccatgataggtctggaagttgatggcgttgaagccgttgccggtcaatttcatggtgtggttgtcggtgaagttgttcaatgtgctcagcatccaaatgcagataagctacgggtaacaaaagtgaatgtaggcggtgaacgactgctggacatcgtttgtggtgcaccaaattgccgcttggggttgaaagttgctgtagcaaccgtgggtgctgtattaccgggtgatttcaaaatcaaggcggcaaaactgcgaggtgagccttctgaagggatgctatgttctttttctgaactgggtatttctgaggatcacgacggtattattgaattgccaattgatgctcctttaggtgttgatctgcgtgaatatctgaagctggatgataaggtcattgaaattagtattacgcctaatcgcgctgactgcctaagtattataggggttgcgcgtgatgtggcggtcgctaataaaatgccactatctgagccacaaattgaggcagtaaaaccgacaacagatgctattttccctattcgtgttgaagcaacagaagcttgtccacgttaccttggacgggtaattaaaaacattaatgtgaaagcggcaacaccccaatggatgcgtgaaaaattacgtcgtggtggtatccgttccatcgacccgattgtcgatgtgactaactatgtattgcttgaattaggccaaccattgcatgcgtttgatttggagcgtttgaatggctcaatcactgtgcgcatggcgaagcaggatgaaaaattggtgctgctggatggtacagaagccaatctttctactgataccctagttatttctgatgaaaaacaagctgttgcaatggctggtatttttggcggtgaacattcaggtgtgaatgaagaaacgcaaaatattttacttgagtgcgcattttttgctcctttagcgattgctggccgtgctcgtcgttatggtttacacactgatgcttctcatcgttatgaacgtggagttgatcctcagttacaacacaaagcaatagagagaacaactcaattattgattgatatttgtggtggtgaagctggcccgattattgatgttactgatgaatctcaattgcctcaatctgcgacaatcacattgcgtcgtgaaaaactggatcgtttgattggtcactatatacctgatgaacaggttggtgacatcctgacccacttaggttgcaaagtcactattcaggaaaattgttggcaagcggttgcaccaagctggcgttttgatgtggagattgaagaagatttggtggaagaggttgcccgtatctacggttacaacaatattccagatgtaccgattcgcgcagatcttatcatgaaaaaacatcgtgaaacggatctttccctgcaacgtgttaaaacggtgctcgttgatagaggttatcaagaagcgattacttatagctttgttgatcccaaaattcaggcgctgttacatccacagcaacaagcgttgatgctgcctaacccaatttcagcggatatgtcagcaatgcgtttatctctgctgactggtttgttaacaacggtggtatataaccagaaccgccagcaaaaccgtgtgcgcttgtttgaaactggcttgcgttttgttcctgatgaaaatgccgatcaggggattcgtcaggagctgatgctagggggggttattacgggaaatcgctttgaagagcattggtcactggaaaaacagtccgttgatttcttcgatatgaaaggcgatttggaagccgttctagagttaactggaaaattatctaagatttcttttagagcagatgtaaatccggcgttgcacccaggtcaaagcgccgggatttatttggaaaatgaatacatcggatatattggtgtggttcacccagaattggaacgcaaacttgatttaaatggccgcaccgtggtattcgaagtactctggaacaagctggcaagccgcgtggttcctgatgcgaaagagatttcacgtttcccgtcaaaccgtcgtgatattgcgatcgtggtgcctgaaaatgttgctgtagaagatgttttggctgaatgcaagaaagttggcgtaaatcatatagttggcataaacttgtttgacgtgtattgtggtaaaggtgtagcagagggtcataagagccttgctataagttttatcttgcaggataccgcgcgtacactggaagaagaagagattgctgcgacgattaataaatgtgttgcagtgctgaaacagcgattccaagcatccttgagggactga

SEQ ID NO: 6207 - DNA, 297 bp, Photorhabdus luminescens
atggcgcttactaaagctgaaatgtcagaaaatctgtttgagaaactgggaattagcaagcgtgatgctaaagatctggttgaattattctttgaagaagtgcgtcgttctttggagaatggtgagcaggtaaaattgtctggatttggcaactttgatttacgggataaaaaccaacgtccgggacgtaaccctaagactggtgaggacattccgattacagctcgccgagtagtgacattccgtcctggtcagaagttaaaaagcagggttgagaaagccacacctaaagaataa

SEQ ID NO: 6208 - DNA, 1008 bp, Photorhabdus luminescens
atgcaatccactcattccatcgctgaattagtgactcgtcagaaaagacatgattatcgttttctggcaattctcacgtgtttatttttactcgttttttttctctcgctttgtgctggggaaaattggatctggcctaataaatggttttctgaaacaggtcaattgtttgtgtggcagttacgttttcctcgtgtattagctgtcgttgctgtaggtgcgagcctgactgtggcgggtgcagtaatgcaggcactgtttgaaaatccgttggcggaacctgggctattgggggtcagtaatggtgctggcgtggtggtggtgtttttggtgttgatgtttcatggcattgcgccgttctggttattaagtattggcgctgtgctcggtgcgctgaccgtcacaatgatattgctgaccttttcaagaaatcgttatctgaataacgcccgtttgttattggtgggggttgcttttggtgttgcctctggtgctttaatgacctggatggtttattttagtactagcttggacttgcgtcagctaatgtattggatgatggggagttttagtggaatagactggcggcatcaatggttggtagtcgctttgtttcctttgattatttggttgagcagacaaggaaaagtacttaattttctttcactgggagaaacacaggcccaacagctaggtatctcactttattattggcgtaatttatttgtctttgctgttgggttgttggtagggttaagtgttgcacttgctggaacaattagctttattggtttggttattccacatattttgcgtttatgcggcctaacagattataaaactctactgcctgcctgtgttctatccggcggttatggattattgctggctgatctgctatctcgtcttagcttgaataatgcagaagtaccgattggtgttgtaactgcaacattgggtgcgccagtcttcatttggttattattgagggttagagactggagttaa

SEQ ID NO: 6209 - DNA, 777 bp, Photorhabdus luminescens
gtgaataatgtgcaagtgactaatcagttgatggctctcaatcaggtatcagtacgaaaccgattaatgccgctgacagcgttggtacaacaaggtgaacagatacatatcattgggccgaatggttcaggaaaaagtacactattagcctgtatggccggtattttaccctatagtggtgcaatcgatttgcaacaaaagtgccttagtcaatatagtcactgccaattagcacgctacagagcatggcttagccagcaaatttcttctgtgccaataatgccggtttttcaatatttgcaactgcatttagcagctcatcttgttaattgtgacggtgtgttgtcagaactctgttccttttttaagttgggaaagtttctagagacacctgtaggcaatctatctggtggtgaatggcaaagggtgcgattaaccggagtttttttacaagtctggccatcaatcaatttggaaggcaaattattgctcttggatgagcctacgaataatcttgatatcactcaggtcgcggcacttgatctgttgataaagaaattctgtgaacttggtggaaccgtagtcatgagtggtcatgatctcaatcatagctatgataaagctgatcggatctggttgcttgctgatggatcactggttgcgaatggaaagccggatgaggtaatgaaagaaaatacgctctccagagtttttgccgctgatatcaaatgcgtgccagaaaagacagataaatattggcgggttttcttaccataa

SEQ ID NO: 6210 - DNA, 1146 bp, Photorhabdus luminescens
atggatagctttcttccattttctcgtcctgcaatcggtgatgaagaaattcaggcagtagagaaggttcttcgttcggggtggattacaacaggcccgcaaaatcatcaattggaacaggacttttgccgcatgtttggttgcaaacatgcggttgctttagcctcggcaacggcgggtatgcatctgacactaatggcactgggaattggccctggtgacgaagtgattacaccgtctcaaacttgggtttccacaataaatatgatctgtttgcttggtgctgaaccaatcatgattgatgttgatcgtcatactttaatggtcgacgcgcagacagtgaaaaaagcgattacttccagaaccaaagcgattattccggttcactatgccggtgcgccttgtgatttagatatattgcgtggaattgctcaggaggcgggtattcccttgattgaagacgccgctcatgcattaggaacccgttataagaatgaatggattggtgagcatggcacagcgattttctcttttcatgccataaaaaatgccacttgtgcagaaggggggttaattgctactgataacaatgaacttgttgaacgaattcgatgtctaaagtttcatggattgggtattgatgcttttgatcgtcagattcaaggcaggagaccacaggcggaagttgtagaaccgggttacaaatataatttatctgatattcacgctgcgattgctgttgtgcaattaagtaaattggaatcaatgaatattcgccgtcggcaaattgtcgcccgttattcaacggcattaaaagattctcctttgcagatgttaagtgtgcccgattatgagcatattcatgcacatcatctatttatggtgcgggttaataaggatgtttgtggcattgatcgcgacacattaatggaacgtttgaaaaacaagaatattggcacaggtttgcatttcagagctgcacatacacaaaaatattatcgagatcggtatccgcagttgtcattacctgaatcagaatggaattcagtaacactctgttcattgccactctttcctgatatgagtgatgatgatgtagatcgtgtcactgatgctttacaagaaattatttcggagcacagataa

SEQ ID NO: 6211 - DNA, 978 bp, Photorhabdus luminescens
gtgtcatttgaacaaattaaaaaagtttctgttgttattccaatttataacgaagaagaaagtttgcctcttttattggaaagaaccttagcagcctgtaaacaattgactcaggaatatgagcttattcttgtcgatgatggtagtagtgataaatctgcggaaattctgattcaggccgcggaacaacctgaaaatcatattatcgcaattttacttaatcgtaattatggtcagcattcagcgattatggcggggtttaatcaggtcaatggtgatttaattattacgcttgatgctgatttacagaatccgccagaagagatcccccgtcttgtgaaaacagctgaacaaggttatgacgttgtgggtactcgccgagctaatcggcaggattctctgttccgtaaaacagcttcaaaaatcatcaatgcgatgattactaaggcaacaggccgttctatgggcgattatggctgtatgctccgtgcctatcgtcgccatattgttgaagccatgttgcagtgccatgagcgcagcacctttattcctattctggcaaacacttttgcccgtaaaaccattgagattgatgtcgctcatgcagagcgtgaatttggtgattccaaatatagcttcatgaagctgattaatctgatgtatgacttgctaacctgcctgacaacagcacctttgcgtttactgagtgtggtaggaagcgtgattgcagtttctggttttttgctggctgtattattgatggttttacgtctgattttcggtgccatatgggcagcagaaggggtatttaccctgtttgctctccttttcatatttattggcgcgcagttcgtcgcgatgggcttattaggtgaatacataggccgtatctataacgatgttcgtgcacgcccacgttattttattcaaaaagtggtcggagataacaagaccaacgacaaccaggaagagtactaa

SEQ ID NO: 6212 - DNA, 1983 bp, Photorhabdus luminescens
atgaaagcaattgtatttgcctatcatgatatcggctgtgtcgggatcaatgctttaaccaaagctggttttgatattcaggcggtatttacccatacagatgatcctaatgaaaaccattttttctcttctgttgcccgtttaagtgcagatttggcgctgccggtttttgcgccagaaaatgttaatcatcctctttggattgaacgtatccgggaactgaaacctgatgtgattttctctttttattaccgagatatgttgagtgaagatattttatcgctggcgagtacaggtgcattcaatctgcacggttcactgttgccaaaataccgtggtcgtgccccgattaactgggcgattttgaatggtgaagtggaaacaggtgtaaccctgcataaaatggtgttgaaacctgatgcaggggatattattgctcagtataaggttgctattgcagagacagataccgcgttgactttgcacggtaaaattcgtgaagcagcggaaaaactgtttgatcaagtattaccccagatcaaagcgggaatttatcctgccatacctcaagatgaaagtcaggcaacttactttgggcgtcgtactgccgtggatggtgagattgactggcacaaatcagctactgaaattaacaatcttgtcagggcagtaactgagccatatcctggggcatttactttcttaggtgagcgtaagattactatctggcgtgcctgcccgttgaatgagacgcatgacaaacagccgggaacagtattatcggtagatccgttaattattgcctgtggaaaaggcacgttagaaattatcaatgggcaaagtgaatcgggtttgtatgttcagggccaccgcctggcagtagatatgagcatggtgactgatgtacgtgttggcccaaaggcaactactcaaattaaccaccggaaacgtgtattaattctcggtgtgaatggcttcatcggtaatcatctaacagaacgtctattacgtgatggcaactatgatatttatggtatggatatcggttcttccgccattgagcgttttattagtaatccgcgttttcacttcattgaaggtgatatcaatattcatactgaatggatcgaatatcacattaaaaagtgtgatgtcgttttgccattggtagccattgcgactccaattgaatatacccgtaatccgctgcgtgtatttgaattggattttgaagagaatctaaagattgtccgttattgcgttaaatacaataaacgaattatattcccgtccacatcagaagtttatggaatgtgtgatgataaagaatttgatgaagatgactctcgtctgattgttggtccaatcaataaacagcgttggatctattctgtatctaagcaattgttagatcgtgttatctgggcatatggcgagaaagaaggactcaaattcacactatttcgtccatttaactggatggggccacgtttggataatttgaactccgcacgtattggcagttccagagcgatcacacaattaatattgaacttagttgaaggttcaccgatcaaactagtagacggtggcgaacagaaacgctgttttactgatattaatgatggtattgaggcgctgtttcgtattattgaaaaccgagaggggctatgtgacggtcaaattatcaatattggtaatccaactaatgaagccagtattcgccaattggcagaaatattacttgatagctttgaagaccatgaattgagagatcattttcctccatttgctggatttaaaaaggttgaaagtggcagttactacggtaaaggttatcaggatgttgaacaccgtaagccaagtattaaaaatgcggagcggttactcgattggaaaccaaccattgacatgaaacagacgataaatgaaacactggatttcttcttgcgtggcgccgtggaagaattagggaaaaattaa

SEQ ID NO: 6213 - DNA, 894 bp, Photorhabdus luminescens
atgaaacaaattggcttgagagttgatgtggatacttatcgaggaaccgttgaaggagtaccgaagctgctcaaaattttggcaaaacatcagattcaggccagttttttctttagtgttgggccggataatatggggcgccatttgtggcgtcttttacggccaaaattcttatggaaaatgttgaggtcaaatgcagcatctctgtatggtcttgatattttactggcggggactgcatggccgggtaagaagattgctaaagatttaggctacttgatgaaacaaacgctgaatgcaggccatgaagtgggtctgcatgcctgggatcatcagcgttggcaggcgaaagttggccgttggtctgaagctcagttaacagagcaggttaaattgggcgtggatgcattggtacaggcaattggtcaacgggtaacgtgttctgctgttgcgggttggcgggctgatgaacgcgtactcgcggtaaagcaacagtttggttttgattacaacagcgattgtcggggaactcatccattcaggcccatcttgcctgatggtactcttggtaccgtgcaaattccggtgacgttgccaacttatgacgaagtgataggcattcaggttaaagatgaagattttaaccagtttatcttggataagatgaaaaacagccagggagttccggtatataccatccatacggaagttgaagggatgtccaagtccacagagtttgcaacactgttggaaatggttcatcaggaaaacatacaattttgtgcattgagtcatctactacctgaaaatatacaaagactacctgtcgggagaattgttcgttctgaatttcccggtagagaagggtggttaggatgccaacaagaggcttaa

SEQ ID NO: 6214 - DNA, 1662 bp, Photorhabdus luminescens
atgttgaataaccgggcgtgtaaggttggggcctttttgatggctcttttttttgtcattacctatttattacccctgaatggccgcctattatggcagcctgatgaaactcgttatgcagaaatcagtcgtgaaatgctgcaacgaggagactggattgttccgtatttgctggatattcgttattttgaaaagcctgtagcgggttattggatcaataatattagccaatggatttttggtgataataattttgctgtccgttttggatcggttttctgtatttttatcagcgcaattttattatatcgacttgctatgatgatgtggcataaccggcatattgcttttgccactagccttatctacatctcaatgtttctggtatttgccattggcacttatagcgtactcgatccgatgttttctttgtgggtaacggctgccatgatgtgtagcttctgggggctaaaaacagactgtaccagacggcggataatggcatatttggtgctcggtttgtgctgtggtatgggttttatgactaaagggtttctggcattggctgttccggtcattgtgatgttgcccattgtcatttatcagaagcgggtcctgcaaatagtctgctttggcccacttgccattatttcggcgatagcaatcagtttaccgtgggtgattgcaattgccctacgtgagcctgattattggcactatttcttctgggttgaacatattaagcgtttttcttccgatgatgcacagcatattgcaccgttctggtattacatacccattcttattcttggtgtgatcccgtggttgggattattacctggggcagtgatgaaaagttggaaagaaagaaaatccaatcctgaaatgttttttctactttgctggtttgtcgtgccattgttatttttcagtattgcgaagggaaaattgccaacttatatcctgccctgtatggcgccattggcaatgatgatggctaaatttggtgtcgattgcgttaaaaatggcaagatggagttacttaagatcaatggaatggttaacgtatttcttggtctgctggcggtaatagttctgtttgctatggaagtagtgacaaaacacgctttatatcagccatcagaatggcttaaatgggttttagcgattgttgcttttggtatttggggaattatcggttatctgtgttttgcgttgaatgggaaatactggttattggcggcattttgctccattgttgtcagtttagtgataggtcatgctttgcctgaaaataccgttaattccaaattaccgcagaactttattaagttacaccatcaggaacttgcaggcagtcgctatatcctgtcggaaagtgttggtcttgcgaccagtgtcgcttgggagatgaagcgtagtgatatttatatgtttgaacgttggggagaactggaatatgggttgaattatccagatagccgatatcgatatatcagctataaagattttccgcaatggttagcgaaagcacgtaaagaagggcgggtatcagtactctttcatttatataaagatgaaaaattacctgatttgccaaaggcagatcaaattagtcgcaattatcgctttgctattttggtttatgagaagcaaccatga

SEQ ID NO: 6215 - DNA, 324 bp, Photorhabdus luminescens
ttgttgctgattagcttgctgacatgtgctggtcagttatgtcagaagcaggctgtgatgtgttggcgcagtgatgtttatcagcgggcatctgcgctgaaatggttaataggggctgtgattctattggctgttggcatgttattttggcttcgtttattacagatattgccgttaggaattgcttatccaatgttgagtataaattttattatggtcactttggcggggaaatttttctatcaggaaaaagcgggcataaaacattggagtggggttgtgtttatcatgttgggaattttgctgatgagcttgaatgaatga

SEQ ID NO: 6216 - DNA, 345 bp, Photorhabdus luminescens
ctggtgacaatagcccagttattactgaaatggggtgttgtcaatttgccagcgttgaatcttggtttgcattggtttgatattgagtggctatggagtcatcgccattctctggtggcggtaatggctggtctggctggatatctattatctatgttgtgttggttatttacgctaaaatatttaccattaaataaagcttatccattaataagcttaagttatgtctttgtctatttaatggtggctttattgccttggtttaatgaaaccatcacattattgaaaactgcgggcgtgatttttattttgtatggtgtctggttgattagccgtccagaatga

SEQ ID NO: 6217 - DNA, 486 bp, Photorhabdus luminescens
atgataataagaataaaagagttactcttattgttcagtctgttacttattggctgttccagtcatgcccccaggactccggctcctgtgttaaagacggcgctttctgatccaatcatggtgattgctcagcttaaggagcagcttaatcaatggcgtggtacaccatatcattatggtggaatggatcgccggggggtagattgttctggttttgtttaccgtactttcagtgatcggtttgatattcaattacctcgtactaccggtgggcaaataaaattagggacccgtattgataaaagcgatttaatgccgggtgatttggtctttttcagaacagctagtggcgaacatgggttacatgttggcatttatgacgccaataaccagtttattcatgcatcaacccataaaggtgttactcgttcatctatgaataatgtttactggaagaaagctttttggcaagcccggagaatttaa

SEQ ID NO: 6218 - DNA, 930 bp, Photorhabdus luminescens
atgacagataaacaaccttattttccagaaataaaatattctccgtggggacctaatgatgccccattatttatcatacttggacaatcaaatagttatggacatggaacacaattaccacaagatgaagaaattacacaaggtttaaaaaatatattcacattatctctatcagaagtttacagcgttgactttcccgcaatcaactggacggggctgactagctttggtgatgccaatattggcgctcctgtcggtttatctcgtggcaatcaggatcactcagtcaatgccgccaaccgttttgccaaactctggcaagaccatattaaccggggtaatgcacttaatttacctgatctttatgtcattttaatggggtggggcggtcagggcatgtatctggataatccgccggataaccgttgggctcctgaacgagatccttgcgatgtggaatcgctctatccgcgtgcgatcagaaccttgcgcatggcagttgaatcactgcgtaaactaggaaaaaatccttgcattttggctgttcattggaaccagtgggaagcagagaccgagagtttattggcggcacaggcatcagagcggaattttacccgtatcattactggtatcagtgatgctttgggttctcgcagtataccgtggagattgtattatccactttcagttgcgtttgatcccatcaacacccgctatgtgctcaaggcaatcaataatgttatcgctgatgatccccaatatcgaacgctaattgatgcacggaattcgcccgactataccggaaaggcgactgagtttggtgtttttctacctgatagtcttcattatgatggcaaagcccagacatggtttgcccaacgggaatgggagttgattttatctggttataagggggttgaactgccatag

SEQ ID NO: 6219 - DNA, 327 bp, Photorhabdus luminescens
atgtttatatggactaaaaatgcagatgaaatcatggctactaatacagaacgtaaagagacccgtttagttgcaagaacttccatagagattcaagagatcatacaaagggcggctgattactccggcgcaacactttcacagtttcttattgaatcggcaatggagagagcgcgtaacgtgattgaacgaactgaaaccttacatctttcgatagagggggctgatgctttgctggcagctttggaaaacccgccaaaagcaaatgctaaactacttaaagccgcaaagcactataaggatacagtgaatgtcggtaatcattaa

SEQ ID NO: 6220 - DNA, 411 bp, Photorhabdus luminescens
gtggcctgccgagattccgtgcccacgattataatcggatatcacacacttaccggatattcggtgacaactccgcttgcctatagggattacaaaaaatatcctcatccacttagtgcggtaaaattggcccgacttgctgtggattgttcacatcaggggcaaaggataggtgaacagctattgattgatgccatttatcggacagtgttggtcgcacagcaagtttcagcgattgggctgtttgttgatcctatgacctcagaagttattccgttttatcagcaatatggatttttgccagccgatcctaacgataattcacgtctcgaaatgtggctacccatcaaaacttgtatagaagtcacgagtaccttcaaaataagtcagaattgccgcctatcatgctga

SEQ ID NO: 6221 - DNA, 423 bp, Photorhabdus luminescens
atggctatgaaattaaaaaaaatatttggtattggtggcgctttattgttaactatattctcacagacagtacctgcggcaagtggcagctatcactcttcagttgttttgcccacactatattctaaaaatttcttagaaactgttaacgttcctattgtcggttctcctcctgcaacaggaaagattaacaatgtatcttggacttggaatgttgttggatggcctcagaatttatcggtttatctttgtcagggagataccagcagttgcatagatatatcacgcacacgaagaatgtcgacagacgcatttaataagagaagcccggcacaacagttccttttcgccttaaaggttggaaacggtaacgttatgccgatagcaggtcaaaccggagaaattactgtcagttggcaataa

SEQ ID NO: 6222 - DNA, 612 bp, Photorhabdus luminescens
atgcgcggacaaagttgtgctattgtcggtgcttccggttcgggtaaaagtactttactcaatattcttggtttactggatcaaccctcttctggatattttcagtttagtggcgttaatataacaaatgttactcctaatgaacgggcgagaataagaaatcaggaaattggtttcgtgtttcagagttttaatttacttcccagaatgcaggcgttggataatgtagcgctaccattgttatatcgtggatattctcgttctctagctcggcaggaagcgaaataccagcttgagttggttggtctggcgggtcgtatttaccatcgtccggctgatctctccgggggacagcggcaacgtgttgccattgccagagccttggttggtaagccttctttgattctggcagatgagccgacaggcaatctcgatagtgctacagcacgtgatattatggcacttcttctgtcattgaaccgtgagcaaggcgttacgctcgtcatggttacacatgatgaagccatagccaaaaatatgcagcgctgcctctatgttaatggtgggcggctttccgaaactgatctgtggctggatagcctcgatgcttaa

SEQ ID NO: 6223 - DNA, 1206 bp, Photorhabdus luminescens
gtgaattctggtcgctacggtttttccttcgcgcaggccctgtgtgaatcactgggtagtctgcgtctgctaggaaggcgctccttgcttgctttgcttggtattgcagttgggtgtgcttctgtcattgcacttttaaacatcggtcataatgctgttaatgaagctatcagcacttttaaaagtatgggaagcaatattttagttgctcatttcagttttactccaggtaccgatgtcaaacccgcgccatctacgctggatactcaggcgctgactcgtacaataccgactatcacacatgctgcgcccctcacattgcactcaacccgtatacgctttcaaggacaagggatcgatacgaatattactggtacatcctctgatctggctgcggtgttggatttacaaatcgagcaggggcgttttctatcggactatgatcgccaaacgacctatgccgtgctcggagcgaatattgccaaacaattaaaagtcgctaatcaacctattcggataggtaatcaattgcagattggggaatatctatttgaagtgataggaattctcgctgttcagggaccgaaccctttactccccggttctattgatgattccgtcatactgcctatcgaagcaatgcggcggttgcggcctgcgccagaaattggaagcgttattgccagagcacgtgacacaacaacgctaaacagtgacgcggtgtcgttacgtgactatcttgtctcattatcaaaaggtcgtcaggttgaagttgatatcccgaaacaattgcttgatggattgacgcgtcaggcaagaacattttcctatttgctcgcgggcttagggggaatttcgttgctggtgggaggtgtgggcgtgatgaatgtcatgctgatgaatgtttcggaacgtaggcgtgaaattggtgttcgtatggctttgggagctcggcctatggatattggtatactgtttatgttggaggctgccattctggcaattgctggtgcaatggttggttcattattgggggtagtggcgggatacctatttgtaaaattttcgggttgggtatttacgttatccctattctctttgcctctgggtattgctagttcattagtgattggtctatttttcggtatcaatccggcattagcggctgccagattacaacctgtagaggcacttcgtgatgattag

SEQ ID NO: 6224 - DNA, 1479 bp, Photorhabdus luminescens
atgattagccaagtttttcaacgtgctattggcatcatcattgccttgataatagttgcatctgtcaaaccagcgttagcggagccgttgaatccatcacaggcaaccatgcctgcaacggatacaatttcgcttaatcagaaaactattggtctgacactcagcgatgcaatctatttagggttacgaaataatcgttcgattcgcagtgcttatctggatcgaattgcacagaaattcgatttacgcgttgctgaagatcgttttacgccaaaattactgattaatagccgttatattgctgctcgtaatcaaagcgatcgctatcgccagagcgagattacacccacatctacgctgcttggagaatatggtactcgattcagtctatcttggacgaatcggacgacatgggcagacaatgcaggtcgtagccgtaatgatggtgtttcattctcagttattcagcctttgttgcgtggtgccggcaaagatgtggccacagcacctgtacgtcttgctcaattgatggagcaaacaaatcgtttgaacctaaaagcgacggtatcccagactatcacgcaagttattatggcttatcgtggattgttgcgtgctcaagaacaattacaaatcgcacgtgatgctcttgaacgttcgcgtcaactgctggaggttaacaaggctatgatttccgcaggcagaatggcagcttttgagattgtccagacggaggctgatgttgcaatgcaggagctggctgcggaggaagcggctaatcaattggataccagtcgtttagaattgctgcgattgctcgccttagacttacaaactcaggtaaaggctactgacagattggaagctaagcgcgtagatattaacctgctccaagcgcaacatttggcacaagagcaacagccatcgtatctcactcaattgattacggcggagcaggctgcaattaacctgaccgttgcccgtaacgaacgtttatgggatgtctctttagtgggtggtgctagtcaggtacgtgatcgaacaggatcaaaccgttctcgtaattgggaaaattacgccggtgttcaggtagagatacccattggcgatttgagtcagcgccaggcggaagtgcgggcgcgggttgatgttcagaaccaggacattcgtcttgctgaggcgaaacagtcactagaacgtaatgtgggtaatgcggtacgcgatattggtacgcgttggcgtcaatatgagatcgcccagcgtgccagggatctatctctgcgcaagctggagattgaacgtgaaaaattgacggtgggccgctccagtaactttcaagtcttgagttttgaaaccgatttgcgtaatgcagagaatgttcgtctcaatgcgttgatcacttacttaaatgcacaagcggagttggacgaaacgttgggtactacgttagggagttgggatattgcacttaatgactaa

SEQ ID NO: 6225 - DNA, 1278 bp, Photorhabdus luminescens
atgactaagatcaggggacttgcccgtttcagatataagactcgttggctcgtgacacttgctgttgcattagtcattggggctaccattgcttatgttttgttttcttcttcaattgatacatcatcaccgcaacggtgggtgcatgttgaacctcaacgactcgaaaatcgtcttgggttagttggccgtattcaggcggcaaccagtttgacgattgccgcgccatttgatggtgttattgctgaagtgatggtaactgaaggccagcgcgttaagcgtgggcaacccctgttgagccttgatacgacacaattggacattcagttgcggcaggcgctcacggaactgttgaaagcccaaaaaaccgtacaagatttggtggggtgggagaacagtcaggatgtcgctagggtacgtagagctttaacgaatgctcagttaagtttgagcgataccgaacgtaagctaaccgatacccgggctttgttcgagcgtggcattgttccccgtatggaggttgatatactggagcagcaggtcagagttcaacagctcgatcttgccgccgctaaggcggaactgagtgttgctctcgataaaggcacaggggagaatcgccagattgctgatatggaattagctaatgctcaatcgcgttatcaggcgcttcagatccagcaagcccaacgtgaattggtttctccttttgatggcattgttattcgccctcaggtaccggaatcagataagggggtatttattcaaaaggggacacgtgtcactcagggaacacctctgttaggggtaatcaatttggagcaaatccaggcggtagcgcgtattgaagaggctgacctttatcaggtgtatgaaggaatgccggttgagataaccggggatggttttgccgggctatctctacgggggcaaattaagacaattggtgtacaagggagttcaaaggagatgcagggagcgggtgtaacctatgatctattagtggcaattgatcctcttactcccgaacagcggcagcgtatccggctgagtatgagtgcgaaactggctattgtcacctatcgcaatgaacgtggattggccttgccagccgaggcattacataccggccctgatggacgaactttcgtcacttatcgccgtgaattaaacgcacaaacccagcagattgtcgtgacaccggggcatgccgttcttcaaggtgtggaggtgatcgggttggaggcaggctatgttgaagttcctgcgcggaaataa

SEQ ID NO: 6226 - DNA, 1800 bp, Photorhabdus luminescens
atgcccggcgaattcacatcttcaacgcaagagaaaaaaaatagcactgataacacactaaccgataacacactaaaagttgaaaagtgcaaaattgtaaaccactccactagaaaagctcgatcttgtgtcgtcatcggtggtacaacacttgcgatacgttgtacccaacaacttcaagcggccggatacataattgtggctatttttcccacggaatctctgtttttcgaatgggcaacttctcaaaatatacactgtgttgaagcactagaagatctcttgacgctctccaaaactgagtcaatatgctggcttttttccatagtcaatccagttattctccctactctattaatcaatcagttctctcaaggtgctttcaactaccacgacgcccctctaccacgctatgccggcagccatgccacttcttgggctatccttgccggtgagtctcagtatgctattacctggcatttaatcggatctatggtcgatagcggcgatattgttgtgcaacgtcatattgatcttaaaaataccgacaccgcactttcactgaatcttaaatgttatcaggctgctgccgaaggatttaccgaactattaaacaacctagagaacggtgatataccccgccgacaacaagatcctgataaccgcaattttttctcaagacgtcgccggccagacgctgctggctgtctattgtggaataaaaaagctcaggaattgtcatctttggtcagatctttaactttcggagtttactatcctaatccactcacattacctaaagttctgctgagagatcgcctggtatcgataagcacactacaagtgatgtatacacgttccgatcataaaccaggtacattgttgggtattagcgaggaccattggctaatgactacaagtagtgaagatatacgtatttcgtttgttaatagccgtggcaacccaataaatgcactcaccttagccaatcaatgcaaacttgacattggtgatcaactccccacaattgaaagatcagatattaagacgttaacagatatacatgaacaacttaccgaacaagagctattttggcaaaaaagactagagcgtttttcaacactaatgctgccttttaaattgcgggcaacgatagataaaataccggattggcatgtgtctgaatggaaaacagtactcaatcatagttcttttatttcaactgagctcgttcaacatattatatgcgcttggtttatctatttggctcacacatcaaatgatactcaatttcaagtcggatgggcgcaagcaggagatgctgttcattcttcaaaatggtcctcctttttcgccatgatcgtcccaatggaggtccatatcaatttacaacaacgtcttacagagattttaaattcaatatcgtctgaacagcaattgcttgaacaacatagagtttatccccgcgatatggtctccagacagccagtattacgcacaatcaatctattacataacaaccgtccgtggccgattggtatttctgtcatctctggttacagtaaagatctaacgaacaaaaatgccatacaggaacatgcaattgtcggagaaataatgacattacagattgatcaaaataaaggaaatttccgcttcatatataacagcaaattagttgcagtaaataatattgaacatgtggcatctgatctggcgctattgtcgaatgtcattgcagacacgaaaaatttaaatatgactgcaaatgaacttccaatatacgcattttcacggtga

SEQ ID NO: 6227 - DNA, 1200 bp, Photorhabdus luminescens
atgattaaagaaaaaactgccactcatgcgggcagtaccaattttcctttcgttgctctactcgcgttagcaatgacgggattccttgcactgctcacagagacattcccggcgggcattctatcccaaataagtgacagcttggccgtttctgaagcattagctggtcaattcgttacactctacgcaattggctcacttgtcgctgcgattccactgacgacagcaacacaaggttggcgccgtcgccgattactcttgatggcacttacgggtttgttagtctttaatacgctcaccgcgttaacgtctaactatatagtggcacttgcggccagacttctttcaggcatggcaggcggcttaatctggggaatgttggttggctatgcccgacggatggtacccgatcatttaaaaggacgtgcattggctgtagccggtgtcggggcaccactggcactctctcttggcgtgccattaggaacattcattggtggaattgttggctggcgtacaacttttggtttgatgtctattctaacattggtcgttatcgcatgggtcatgttgaaagtccctgactacccaggacggactgccgaaaaacgtataccgatcaaaaaagttatcatgatccctggagtacgaccggtattaagcgttcttgtttgttgggtactggctcacagtattctttatacctatgtattgccttttgtgacacaggcggggcttgctaccaggattgatcttgtgttgttagcctttggtgtggcgtcgttgcttggaatatggatgacagggctgttaattgacaagatgttacgttcgttggtactgataagtcttgccctatttacattcgcctctctcatacttggtgttatcggtactcttcctgtctttgtttttcttgccgtgatcttatgggggctaaccttcggcggtgccgctgccctacttcaaactgcattggccgaatctgccggggaaggtgcagacgttgctcagtcgattcttgttaccttatggaatttagccattgcagccgggggcattattggcgggatattacttgaaacacttggtgccagctcgttcccgtggaccttacttgttctgttagtgctagctttgttgatcgtctggaattcaggcaactatggcttccctcataaaggaatcaaaggtaagtga

SEQ ID NO: 6228 - DNA, 2751 bp, Photorhabdus luminescens
atgcaatcaactctcccaataataaaatggcgcaatatattaaaaacaggacagtatcgaaaatacgatatctccagcgctcaaccggcaaatgaaaattggataacgttaaacaacattaagttaccagcgagttttcaacgaaaagagtgcctaccgggattactcttttcacacgtcagatcaactccctgggctacagcagtcattcacggtgaagagcaactcagttatttggaaatggcaattggcagtgtacatctggcctgctatctgcaaaacctgggatgtttagcgggtgattgcgtcggtatatttgttgaaccgtcgattgagcagatgatcggagtttggggaactctttttgccggtggtgcatatctgccattgtctcatgattatccagaggaacgacttcgttacatgatccacgatagcaatctgaaaatgatatttacccaagaaaaattaaaggaaaaattggtcaggttggttgcagaaaatatccatatcgtgactcttgaagacgtagagaaatcatttgaatccagtgccattaccaacaacaccctccatgactaccttagcccagataacttggcttatgtcatttatacctctggaagtacagggaaaccgaaaggtgtaatgattgagcaccgcagtatcgttaaccaaatgtgttggttaaatgaaaaatgcgatttaaatattgaaaaaacaattattcagaaaacgcccatcagctttgatgctgctcaatgggaaatattatcagtcagttgtggtagtcgggttgttattagctcatctggaacacacaggaatattccccaactcattgacctgattattcgccacaatgtgaccacgttacagtgtgttcccacgctattacaagcactgatcgataatcatcaattccgggaatgccacacccttcggcaaatattcatcggagcagagagcctatcaagaaaactcgccactcaatgtatccatacactaccaaactgtctactgattaatatgtatggcccggcggaatgtacaattaatgcttcagttttccttgttaatcactacccaatatctgacgaagttaattcagtccctattggtaagccggtatccaatacggaattttttattctcgatcaccactatcagctcgcctcagaatatgaaattggagagatttatattgcgggcactcaagtcgcaagaggatatctgaatcgtcaggatctcacagaaaagcactttcttgaaattgcaataccaccaaatacgcaaaaaatccggctttatagaaccggagacctggcttattgggataaagagggtaatgcccactttgctggtcggaaagataatcaaattaaagtgagagggatgcgggtcgaattagaagaaataaaaaatgcaatagaggttatcgatcaagtgaaacacgctgcaattttggcagaaaaagaccctcaacaccgttcgacacgattaaccgcctgtattgaattagccgatgaaacaatacgccagcaagcaaagtatgacattacttcaattctgcggagtgaacttagcaaaacattaccggactatatgttacctgacagatttttgttcctggataccatgccgctaacttccagtggaaaaatcgatttcgacacattacaagtactggtcagcacagtatcacacagtccacaggtactcccaagcacctcgacagaaacacagatcgtaaagatatgggaagaagtgctaacgcgagaaagcatatctaccgaagatgacttctttgctttaggtggcaattctctgatagccgtccatctgatacaacgtttaaatgaagaatttgcgttatcgctacctctccatactctatttgaggccgcaacggttaaacaattggcaaaaatcgttgaaggtgaagtaaccagattatcttcacgattggcctgtttacaggaaaaagatgctggattacctgtcttttgctggccaggattgggtggatacccaatgaatttacacctgctggctacacagatctgcactgatcgatcattttatggcatccaagcttacggaattaatgaaggagaggttccatactccaccatagccgaaatggtgattcaagacataacagaaatcaaaaaattacaacctactggcccatacacgctatggggatattcttttggctctgtattggctttcgaagcggcttaccaattagaacgagccggagaacatgtcgaaaaggtggttctaatcgctccagggctctcgaagataaaatatcacgttaattccacgggaacagaaaacgggtctacttaccaaaacaatgagttgatatcactattattctctgtatttgcgggcacttctcacagttcagcgttgaatgaatgcctggctaacgttatcgatgagcaaagctttgtctcttttgttcataagcactacccaactctggcccctacgttaattgttcgaattgccaggatagttattcaaacctacggacagaaatattcagcaacagaactgcaagaacgaataatcaaggcgccaattacggtgtttaatgcacgtgacgatgccgtttcttttatcgaagaagcaacaccctacctaaaacatcccccagaaaatatcaatcttaacgttgatcatttcgaggtacttaaggaatcaggtgttaacgaattagctcgattcttgagttga

SEQ ID NO: 6229 - DNA, 888 bp, Photorhabdus luminescens
atggatagtttgggatcattgaacgtgttcgttcgggctgcggatgcccgtagcttcacagttgcaggtcaacaacttggcatctcttcgtcggcggttagtaaggctattgttcggttagaagagcgtctgggaatacgccttttccatcgatctacgcgaaccgtcacattaacgcttgaagggacattattctttgagcggtgcaagcgaatccttgatgaggttgaggctgctgaaactgaactatcccagatgcagaaaatgccaagtggaaagctaaaaattagcctaccgtcagttggtatgctgtttatgccgaaatttgctgcttttactcgcctttatccagagattaaacttgatataagttgttccgatcgaatagtggatgttattgaagagggatttgatgctgtactccgaaccggtgatccacgtgattctagattaatgtctaggatgcttggttcttaccgccaggttattgtcggctctcctgcctattttgcggccgcaggttttccagaagagcccgaagatcttgttagccatccgtgcttattatatcgctttccaacaaatgggaaattaaacgtatggcctttgaatcgtgatggtaagaaaattgagcttaacttaccgtgtaatatggtaacggatagtttagaaccgcaagtctgttttgccgagcatggtcttgggatagcttgtgtgccgaatatcgctgtttaccgacagttgaaagaaggttctttggtcactattttggataaatataacgaaagttccacaatttttcgtatactttggccatcaagccgtcatttatcccctaaggtcagggtatttgtagattttatggcggagaacctcttaccttcttaa

SEQ ID NO: 6230 - DNA, 456 bp, Photorhabdus luminescens
atgttagtacgtaaatcgttgttggccctgtttgcaactacttccctaactgccgcgggtatcgcttatgcaggtccgcctgtaacggttacatttaagcatcttggtgcgtctggtagcgcagatgctgtttataccatcattactaataatgaatccggtacctatgccaatgcaacacctaaacctagtgcaagtgtagcgccaggaggagtcaatagttatcaggttcaaagcccgctttcacctgacgtaaattatgcaatggtgcgatataaaatagggggtaaaacctgcgaatttatgaccacttttgtgaacggatatgttaatggcgttaaaattccgaaatggaataaaggagcaacgccgagtggtggtgctgtttgtaatgcaaccatcacctatactaattattttacctacgcatggtcagttgaatttacgatgaagtag

SEQ ID NO: 6231 - DNA, 183 bp, Photorhabdus luminescens
gtggtggaacaggcggtggaacaggcggtggaacaggtggcggaacaggtggtggaacaggtggtggaacaggtggtggaacaggcggtggaacaggaggcggtgcaggaggtggaacaggtggcggtgcaaaaggtagtgcaggaggtggaagcgggggatgataaggacggtagaaattag

SEQ ID NO: 6232 - DNA, 366 bp, Photorhabdus luminescens
atgtcagaaagtgtagtaaatgatattgtcagatggctcgaaactcagcttcaacgtaacgaaggtataaaaatagcgaccattgctgacagaagcggttattcaaagtggcatctacaaagagtgtttaaagaagtgaaaggctataccttgggtgaatatgttcgtaagcggcgtttacacgaagcagcaagatctctgtgtgaagaaaacctaccaatccttgatatcgccttacagtatggtttcagttctcaggcaacatttacccggatcttcaaaaaacactttgataccacgcctgctagatttagagaaaatggtaatctacctgaattaaagtacttcttagggcataagcaataa

SEQ ID NO: 6233 - DNA, 615 bp, Photorhabdus luminescens
atgcaatcggacttggcttttttaactaaaaagttggcattttttgtactttatgctctgattttagccacggttataggtttactctttattgatgttatctatttgcagaatgcagtgaaggagaactcattaactgaaattgctcaggagagtatactgtttgttatttctgctgtatttctgctggaagcaaaaaagaatagtcaattacgtcctgcattagtcttgatatcaggtttttttgcttgtttattgataagagagctggatgctatatttgatgaaatatttcatggtgcttgggcgtggattgctattccgttagcactaatttgtattttttattctgcttataaaggcagggatacgttggctgggcttgttcattttacgcgccatcaaagttacagcatgatggttgcaggtattttatgtgtactcgttttttcccgtttgtttggtatgggagaattatggaaaggtttgatgctcgaacattttgatcgaacagcaaaaaatatggttgaggaagggtgtgaacttctgggttattgcttgtgcctgatttcaactttttggtatttgcctgatgcaataaaacttcgtaagtaa

SEQ ID NO: 6234 - DNA, 795 bp, Photorhabdus luminescens
atgaatgccataaaaaataatatttctctgcaagcgcagaatttaagctattcaattggcaaccagaaaattattgataatgtttcgctctcggtaaataaaggtgagattgtcgccattattgggccaaatggcgcggggaaatccacattattgcggctattaacgggatatataaaacctgagcatgggcaatgtgatttacacggcacacctattgagcaatggcctgctgaacaattagcccgcactcgtgccgtcatgcgtcaacatagctcactctccttccctttcagtgtggaagaagtggtcgctatggggcgctctcctcatggtattcatcataaacaaacagcaattgataccgttattgaacaaacggattgccaagcgttacgtcaccgcgactaccggcaactctccggtggtgagcagcaaagagtacaactcgctcgtgtccttgcccaactttggcatccaacaccaatagaatgctgtttgtttcttgacgaacccacatcagccttggatctctatcatcagcaacacactttgcgtctgctttaccgactgacacgggagcaacctatggctatgtgttgcgttctacatgatttaaatcttgctgctctctatgcagataaaatctttctattacataaagggaagttagtcgctgcgggtacaccagaagaagtactgaatgatcatactctgagaaaatggtatcaagcagatcttggcattacccgccatcctgagactcaacagcctcagatttatttgaggcagtaa

SEQ ID NO: 6235 - DNA, 1002 bp, Photorhabdus luminescens
atgagccgtatgaagtctccgggtttgggcttggcgtttctttgtttgttactgtccgggttggctattggttctgctaatcttggcgcattatcattatctttcaagacattatgggaatcttccattagtgaaccccagtggcaaatctggctgaatatcagattaccaagggtgctattagccatactggttggctgtgctttagcaacttccggggctgtaatgcaagggttatttcgcaatccactcgctgatcctggcctactcggtattagcagtggagctgcattgatggtggcaatggcaattgttctgcccgttagcctgccatctgtcattactgtgtacggacatattatcgccgcttttattggcagcctgttaatttcattactgattttttcactcaataaatataactacggaaatctggcccgcttattactcgccgggattgctatcaatgccctttgtatgtctgctattggtctcctgagctatatcagtgacgatcaacagttacgacaattctccttatggatgatgggttcactcagccagatagagtggccgacgttggcaattacagcttctttaattattcccactattatcctaacgttcagccaagcccgtaaactgaatctgctgcaattaggagatgaagaagcccactatcttggtataaatgtccaacgtactaaattccagttattactactcagcgccctgctgattggcagcgctgttgcattaagcggtgttattggatttattgggctagttgtcccacatttgatcagaatgcgatttggtggtgatcataattggctacttcccggcgcggctttaggcggagcttctctcctgcttaccgcagatacactggcaagaacattagtctcaccagcagaaatacccgttggcctaattactggtttaatcggcggtccatattttctatggttgatactcaaacaaccagggagccgcacataa

SEQ ID NO: 6236 - DNA, 819 bp, Photorhabdus luminescens
atgaaacaatggcttctaacatttgcccttgcggtatcgttcagtgctttctccaccgaacggatcgtcactatcggtggcgatgtatctgaaattgtttttgcacttggtgaaggtgataaagttgtcgccagagacagcaccagccagaaaccaaccgaattgcttaccttacccgatgtcggctatatgagaatgcttaaccctgaaggtattctctctatgaatccgacactggtgctaaccagtgaattggcaaagccttcactggcacttaagcagctccaggattctggtgtagaagtgattcagataaccggaaaagcagcgttagaagccgttcctgaaaaaattaagaccgtcgctaaggcggtcaatcaggctgaacgtggtgcacaactgattcaacaatatcaaaaagcactggcagaaataccaacaaccaccttgccgacccgtattctgtttgtgatgagtcacggcggtatcatgccaatggctgccggccaaaaaaccgcagcggacaaaatgattcgcgctgttggtgccactaatgccatgcaaggtttcaacaattaccgcccactttcccaggaaggtgttattgccagcgcacccgatctgttattggtgacggaggatggtattaaatcaatgggcggtttggataaaatctggcaattacccggattgaaacacacccctgccggccaaaaacaacgggttttaattgtagatgatatggggctactcggttttggcctcgaaaccccctcagtgatgaaacaactcagacaggcggcggagaagactcaatga

SEQ ID NO: 6237 - DNA, 1074 bp, Photorhabdus luminescens
gtgaattcttcactttatgaacgttatctacaagccaaatctgataacaaagccaaatatgcccgtgatctggcagcctatctgaatgtcagtgaaggcgaattattacatagccgcgttggtatcgatgccaaacgcctcaatgttgacgccccaactttactggaagagttagctgttgttggtgaaattaaagcgatcacccgcaatgattttgctgttcatgaacatattggccggtatgtaaatacccatttcagcagccacgcagggctggtcttgaaccctcgtgaactcgacttgcggatattctttggacactggagtagtgtattttatctggttgaacccgcaaaaaatggtatgcgccacagcattcaattttttgatcatcagggtgacgcattgcataaagtttatgcaacaggtaatactgatatgacagcctgggaagcactgatcgaaaaatatcagacagaagacaaccccgcactggtcatcaaacctatagaagaaatcacctattcaactctaacaaatgaactgaaagcacagcttgatgaagaatggcgagcaatgactaacgttcatcaattcttcacgttacttaaaaaccataatctgagccgtcaacaggttttcaacgcggtacatgatgatctggcttacaaggtggaaaattccgcactgaatgaacttatcaacaccgcttataacgatcagaatgaaatcatgatcttcgtcagcaatcatggttgcgtacaaattttcaccggaaagctggaacgcctgatgccccatcaggaagaaaactcagatcagaaatggattaatatctttaaccgcaatttcacactacatttaatagagagtgctattgctgaaagctgggtaacccgtaaaccaacagaggatggttttgtcaccagccttgagctatttgatgctaatggcgatcaaattgcgcaactgtttggtcagcgtacagaaggcactcctgaacaaactcagtggcgtgagcaagtggctgctctgccaaaactgcaatcaatacaggaagagcgtgtagcatga

SEQ ID NO: 6238 - DNA, 2022 bp, Photorhabdus luminescens
atgtctcaatctgcaagatcaacactcaaattatcagcattaagcttggcaattatcagtaacattccggctgtttatgcagcaacaaaatcgcccgatgctaacagtgataaatcatcccgcgaggtgataacggtttatgccacaggcaatgaaagggacagtttcgaagctcccatgatggtaacggtgataaatagtcagtcaccacaaagtcagacagccggtaatgctaacgatctcatcaaaaaaatacccggcattaatatagccggtataaaccgtgctaatgggcaagatgttagtctgcgtggttacggtccaaaaggtgttttgacgttgattgacggtattcgccaaggtaccgataccggccatatcaatggtacgttcctggacccagcactcattaaacaagtcgaagttgtacgcggcccttctgccctactctacggcagtggtgccttaggcggtgtgatcgcttatcaaactgtcgatgccgcagaccttttgcaagcgggtcaagatcacggattccgcgtttttgctcgcggtgcaacaggtgaccatagtatgggttttggtggtgcaacttttgcaaaatcggaatccctggatggtgtatttgccttcagtacccgtgattcaggtaacatccgtcacggtggtggtgtggttggcgataatgatgaatttatcagtaacttaatggcaaaaggcagttggaaaattgatgacaaccagtccctgagcagtcaattacgctattaccgtaatgaggctaatcaacctaaaaatccacaaacactcaccggaaaaaataaaaatcctagcacttggactgaccgcacgacaactcaacgtgatgcccaactcagctaccaattaaatccagcagaatatgattggttaaatgccaaaactgacctctattattccgatatcactattaatgctcgtactaaggcgaagggtttcgaaggccgtaaacagaaaacctatggcgtaaaattggaaaaccgctcccgcctgtggacagacagcccgctggcacatcaatttacttacggtggtgaaacttacaaacagaaacagaccccagatggtaatacagatagctttcctgacgcggatatccgcttttattccggctggttacaagatgagataacgctgcgcgacctgccagtctctattgtcgcgggtacgcgctatgacaactataaaggaaacaattctaaagatgaggctgtcagcgccgataaatggtcttccaaaggggctatcagtatcacaccaactgactggtcgatgctgtttacctcttacgctcaagctttccgtgcaccgacaatgggagaaatgtataacgattctatgcactatcctggaaacttctggacccctaatccaaatctccgcccagaaagcaacgaaacgtgggagtctggttttggattacgtttcaatgatctactagcagataacgacgagctgaaatttaaagcgagttactttgatactaaagccaaagattatattaagtcagatatagtcaaccgaggaaggaacacaacatctgttaatatatccagcgccaagatctggggatgggatgcttctataaactatgaatccaatctgttctcttgggaactggcttacaaccgcacagaaggtaaagatgaaaaaagcggtggatctcttgataacctcagcccagatactatcactagcatactggaaatccctattgcacaaaccggtttctctgtcggctgggtaggtcaattcaccaatcatactgacttcaaaggtaaagatgctagaggtagagatcctaaacaacaggcaggttatggcgttaatgatttctatgtcagctatcaaggtgaaggaatgctcaaaggtgtgactactacggcagttttaggtaatgcttttgataaagaatactactcaccacagggaacaccgcaggatggccgcaatgccaaactgttcgtcagttaccagtggtaa

SEQ ID NO: 6239 - DNA, 198 bp, Photorhabdus luminescens
atgactaaaatatgtcaccaacattcttgcattgcacttaaaaaacaatgcaacacttatcctgctgaaattgtagaaattgactacattgacagtaaacaactattaggtgagctaggaattaccagaattcttcaccaaggagaattctaccaattgcgccaaactaaagccggtaagctgatactaactaaataa

SEQ ID NO: 6240 - DNA, 1047 bp, Photorhabdus luminescens
atgtacaaaacagatggtttaaggactcaccgtgtcgatagtttagtcacacctcaaactcttgcaattcaatttcctgtatccgaaaaaatcgtcaataatgtgacagcgtcacggaaacgtattgccgatattctcagcgggaatgatccacggcttatggtaatcatcggtccttgttctattcatgatattgatgctgctttagattatgctcagcgactgaacaggttacgtgaaaaataccagcacagactggaaattattatgcgcacctattttgagaaaccacgcacagtggtgggctggaaaggtttaatttcagacccctatctcgacggttcttgccaggtaaatcggggtattactttggcccggaaattattggttgatgtcaatgagttgggtttacccacagcaaccgaatttctggatatggtgaccggccaatatattgccgatctgatcagttggggcgcgatcggagccagaacaacagaaagccagattcaccgagaaatggcatctgccctctcctgtccagttggctttaaaaatggaacggatggcaacatccgtatcgccatagatgcaatccgcgcagccggggtctgtcacacattcctctcgccggataagcgcggtcagatgaccatctatcaaaccgaaggcaacccatacggccacattattatgcgtggaggcaaacagcctaattacagtgccaaagatattgctacagcttgtactcaactacgtgaatttaatttaccagaacatttagttatcgatttcagtcatggtaattgtcaaaaaattcataaacgccaactgactatagcaaaagaggtgggtcaccagattcaagagggttctaccgctattgtcggtgtaatggttgaaagttttctggttgaaggcacccagcaagtcattcagggacaaccgctaaattacggtcaatcgatcaccgatccttgtctaaactggcaagatacagaacagcttattgacattctcgccgaagcagtaagttaccgtttctga

SEQ ID NO: 6241 - DNA, 882 bp, Photorhabdus luminescens
atggcaaaattcagattagaaacatcagcagaacgtaatggtcgtaatagtgttgaaggcgttgaacgcactgtcttttttatttcagatggtacggcaattaccgcagaagtattgggccatgctgtcttatcacaatttcccatcaaaataacttcttatactcttcctttcgttgccagtgaaacccgcgcagaagaaataaagcaacaaataaatcagatatatcaggatacgcggataagacctttagttttctattctattatctcttctggagtgaaaaatattattaccagtagcgaaggattttgtcaggacattgtacaaacactggtcgccccattacagcaagaaaccgggttagagccaaaacccgaacttaatcgcactcacggtctgactgaaaagaatctcagccagtacgatgcacgtatagcagctattgattatgccctggcacatgatgatggtatctctttacgtaaccttgaccaggcacaggttatcttattgggcgtatcccgctgtgggaaaacacccaccagcctctatttagccatgcaatttggtattcaggctgcaaattatccttttactgcggatgatatggacaatttacaattacctgcgacattaaaacaatttcaacataagttattcggtttaactataagccctgaacggctggcagctattagggaagaacgtcgagaaaatagccgttatgcatcattgaggcaatgtagaatagaaatttccgaagttgaagctttattccgtaagaataagattaattatcttaacaccaccaattattctgttgaagaaatctcaaccaaaataatcgacatgatgaagctaaaccgccgaatgttttaa

SEQ ID NO: 6242 - DNA, 2379 bp, Photorhabdus luminescens
atgcccaataatgacctcaccccgcgtaatgtgctttggtataaccaattaggtatgcatgatattgaccgggttggtggtaaaaacgcctccctgggagaaatgatcactcacctgtcagagttgggggtttctgtcccgaatggtttcgccacgacagcacaggcatttaatgatttcttggaacaaagtggtgtcaatcagcgtatttatgacttgctggatgaaacggatgttgatgatgtcaatcaactggctaaagcaggtgcacaaattcgccaatgggtgattgatacgccatttacgtcacaactggaaaaagatattcaggatgcttatcaacagttgtctgaaggagagcctgaagcctcttttgctgtacgttcttcggcaacggctgaagatatgcctgatgcctcttttgccgggcagcaggaaacttttctaaacgtgcaaggcattgatgctgtgatggttgccatcaagcatgtgtttgcttcattgtttaatgatcgcgctatttcctatcgtgtccatcagggatatgaccatcgaggagttgcactatcagcgggtgtacaacgtatggtgcgttctgatctcgcttcttccggtgtgatgttcactattgatactgaatcagggtttgatcaggttgtttttattacctctgcttacggattgggcgagatggttgttcaaggcgctgtgaatccggatgagttctatgttcataaatcaactctgaataagggtaaaccagcaatcgtgcgacgcaatctgggttctaaaaaactgcatatgacctatgctgacaataaagaacatggcaagcaggtacgtatcgaagatgtaccagcatcacaacgcaatcgtttctctttagctgatgaagaagttgaggcattggcgcgtcaggcgttattaattgaaaaacattatggccgaccaatggatattgaatgggctaaagatggtcataatggcaagttatacattgttcaggcgcgtcctgagactgtccgctcaaaccagcaagttatggagcgttaccaactgaatgaacaaggtcaggtattggtggaaggacgtgccataggccatcgtattggtgcaggtcgagtaaaagttattcacaacttgaatgaaatggatcgcatccaaccgggtgatgttttggtcactgatatgactgatccggattgggagcctattatgaaaaaagcggctgcgattgtaactaatcgcggtggccggacctgtcacgcagcgattattgcccgtgaattgggcattcccgcggttgttggatgcggtgatgcaacggaacgtttgcaagagaatcagtcggtgacagtttcctgtgcggaaggtgatacgggttttgtttatcagaatcaactgaattttactgtacaaagttcccaagtcgatcagttacctgaacttgatgtaaaaattatgctcaacgtcggtaatccagatcgtgcatttgattttgcccgtttgccgaatgatggcgtaggtcttgctcgtttggagtttattattaatcggatgattggtgtacatccccgtgcattactggagtttgatcagcaaactcctgagttgcagcaagagataaaatcgctgatggctggttatgacaacccggttgagttctatgttgggcgtttgacggaggggattgccactctggcggctgcattctggccgaaacgggtgattgtccgtttgtctgattttaaatccaatgaatatgccaatctggtggggggtgacatttatgaacctgatgaagagaaccctatgctaggtttccgtggtgcagggcgttatgtttctgacagtttccgtcgctgttttgcattagagtgcgaagccgttaaacgtgtacgtaatgatatggggttgaccaacgttgaaattatgatcccgttcgttcgtacggtagcgcaggctgaagcagtgattgctgaactggcatcccaagggttgaagcgcggtgaaaacggattgaaagtcattatgatgtgcgagattccgtccaacgcaattctggcagaacagttccttgaacattttgatggtttctctattggttctaatgatatgactcaactgacgcttggtttggatcgggattctggggtggtatctgaactatttgatgaacgtaatgatgcggtcaaagctctgctctcattggctatccaagcggctaagcgtcaaaacaagtatgtaggaatttgtggtcaggggccttcagaccatcaggattttgctcattggttgatggaagaagggattgatagcctgtcattaaatccagataccgttgtaaaaacttggttaggattagcgaaagtgagttaa

SEQ ID NO: 6243 - DNA, 1110 bp, Photorhabdus luminescens
atggacaaatctcaaccgtattatgacctgccaaaactattatttactttaattttcctgtcactgttaattgttaccagcttttgggtgataaaaccctttatcttcggttttgtctgggccggcatggttgttatcgccacctggccattattagaaaaactacaggacagcttgtggggtaaacgctggattgcggtctccatcatgacgctactgctaattctattattcgtgatccctatcgcattactggttagtagcttattggaaaacagcgcgccattaatccagtggactaaatccccctctcattttcaaataccgacaatgacctggctgaatagtatccctctggttggcgataaactttacagcgcttggaactcacttattactgacggtggcaatgttctgatagctaaagtccagccttatgttggagaagcagcaacctggttctttactcaagcggcaaatgccgggcgttttgtattccatctctgtttgatggtgctattcagcgtgctcttatatctaaaaggcgaacaggtgacgatgagtattcgccattttgccattcgcctggcaaataaacgcggagatgccgccatcctgttggcagcacaatccatccgtgccgtcgcgctcggcgtggtggttaccgcattggtccaagccattatcggtggtcttggcttggctgtttcgggcattccttatgctacgttgttgacagtactcatgtttgtctgttgcgtcgctcaactcggcccattactgattttagttcccgctgttgcctggctttattggacaggtgatacaacctggggaaccgtgctactggtctggagctgtatcgtaacgacaatggatggatttcttcgcccatttttaatccgtctgggcgcagatttacctatggcgctgatattaataggcgttattggtggaatactctcatttggcatgattggcttatttatcggccccgttgtattagccgttgcttaccgtttattaatcgcatggatgaatgaagtcccagaacctgaaaatgatttagccgaaactgaaaaatatctggaacagaaattttcagaataa

SEQ ID NO: 6244 - DNA, 3060 bp, Photorhabdus luminescens
atgatcccacgcatatcacaagcaccgcacgtcagtgaggtggcgcagaagttcttggatacattgaaggaacaaggatttaccggagatgttgccagtagttatgccgatcgtctgacaatggcgacagataacagtatctatcaactcttaccacaggctatcgttttccctcgatccagtgcagatgtggttttactggctcgtgtcgcaggtgaaaaagagtatcagaatttgacatttacgccacgcggtggcggtacaggcacaaacggccaggcgcttaatgacggcattgtggtggatatgtcccgttatatgaatcgcattcttgagattaacccggcgcaaggttgggtcagagttgaggcgggggtgattaaagaccaactgaatcaatatttgcgtccatatggttatttcttttcaccggagctttcaaccagtaaccgtgcaacattgggcggcatgattaatactgacgcatccggtcagggttcattagtctatggtaaaacttctgatcatgttcttagcctacgggcagttctattagggggggaattacttgacacccgcgctatggatatagtccaggcggaatcgattgcgcaagaggattcggttaccggtcgcatttataacacggtgcttagccgctgccgtgaacaacgtgaacttatcgttgaaaaattccccaaacttaatcgctttttgaccggttatgatttgcgccatgtgttcagtgatgacatgcggaaatttgatttaggtcgtatcttaactggttcagaaggaacgctagcttttattaccgaagcggttttggatattaccccgttgccaaaagtcaggcgattggtgaatgtgaaatatgattcatttgattctgcactgcgtaatgctccttttatggtggaggcaaaggcattatcggttgagaccgtggattccaaagtgctgaatttggcgcgtgaggatatcgtctggcactcagttaaggaattgataacggatattcctaacaaagatatgcaggggttgaatattgttgaattcagtggcgatgatcagcctttgatagaccggcaagtagaaacactttgccagcgccttgatgaactgatggatggcaatcaagctgggattattggttatcaaatttgccgagagttagctgatattgagcgtatttatgcaatgcgcaagaaagcagttggcttgttgggtaacagtaaaggtgcggcgaaacccattccttttgtagaagatacgtgtgtaccgccacagtatctcgctgattatattgtggaattccggcagctattggatagccatcatcttaattacggtatgtttggtcatgtggatgcgggggtgctgcatgttcggccggcgctggatatgtgtgatcctcagcaagagatactgatgaaacagatttctgatgaaattgtcagtctcaccgcacgttatggtggtttgttgtggggagagcatggtaaaggatttcgagctgaatacagcccggcatttttcggtagcatcttgtatgaagaattacgccgaattaaggctgcctttgacccggataaccgtttgaatccgggcaaaatttgtccgccgatgggggttgatgcccctatgatgaaagtcgatgctgttaagcgaggaacgtatgatcggacaattccgataaatgtcaggaatacattccgtggtgctatggagtgtaatgggaatgggctctgttttaatttcgatgtaaaaagcccgatgtgtccatcaatgaaagtgagtcagcaacgtatccattcaccgaaaggacgcgcgacactggtgcgtgaatggctgcgtcttttaactgaacagggggtagatccgacgttactgaaacagggattagaacaaaaacgaccaagtttgcgtgggttgattgagaagactcacaatagttggcaggcatggcgtggggagtatgacttttctcacgaagtgaaagaggcaatgtcgggttgtctggcatgcaaagcttgctcaacgcagtgcccgattaaaattgatgttccgtcatttcgtgcacgttttcttgagttatatcatggccgctattttcgccctttacgtgatcatattgtggcgagtgcggaaagcagtacaccattaatggctaaggtccctcgggtcttcaatttcttcctgaaacaaccgtggatacaagaattgagtcgccggactatcggcatggtggatttacccttgttatccagcccgacgctgccccaacaactggcgggtcattatgcactttcgaccacactggaacagcttgaaaaaatggaacaggctcatcgtgacgaacatgtgttgattgttcaggacccgttcacgagctattacgatgctaaagttgtggctgattttgcctatttggtagaaaaattgggatataaacccgtattgctgccattttctccaaacggtaaagcacaacatatcaaaggcttcttatcccgttttactaaaacggccaaaaagacgtcagactttctgaaccgggttgcggagttgggtattccaatggtgggtgttgatccagcgctggtgctgtgctaccgggacgaatataaagaaattttgggagaacagcgtggaaagtttgaggttcagcttgttcatgaatggttgattaataccttaccggagaaaagtgaccatgaagaaaaatccggtgataaatggtatctatttggacattgtaccgaagtgactatgctaccgggcagtagtcaacaatggggaaaaattttccatcggttgggtagcaagctggataatatcagtgtaggctgctgtggcatggccggaacctatggtcatgaaaacaaaaacatagaacactctattggtatctataagttatcctggcaacctgccttgcagaaattaccattggagcgttgtttaagctccggttattcctgccgaagtcaggttaagcggatagaagggcaagtacttaagcatccgttgcaagctttattggagataatcccatga

SEQ ID NO: 6245 - DNA, 417 bp, Photorhabdus luminescens
atgatttggaaacgtgatattggactggatagcctgaatcaagtaaatagccaatgtatgatgggccatctgggcataaaaatcacgcatatcggtgatgactatatcgaaggcacaatgccggttgattatcgcacgcgtcaaccatttggtttattgcatggcggggcatctgttgtgctggcagaatcactcggttctttagctgggtatctctgttccgaaggtgagaaaaaagttgttgggctggaaatcaatgctaaccatattcggtcggttcgtagtggtgaagtgaaaggcgtatgtaaacctcttcatattggccgcaatcaccaggtgtggcgaattgatatttttgatgagcggcaacatttgtgctgtacctctcggttaaccacatcagttttgcctggataa

SEQ ID NO: 6246 - DNA, 1083 bp, Photorhabdus luminescens
atgatagattatagagttcgctcagtttctttactaaatttagtgaatgatattcgtagtaaaaaattaatacctgacgcatattttcaaagaaatttggtttggcgagaaaaacataaagtagattttattgatacaatattgtctggttatcctttccctcagatatttatatcgaaagggaaaattgatgtggatagaatgataacagtttcttgtattgttgatggacagcaaagaacaaatgcgataatggaatttattgatgataagtttcctgttaggaataaatattttaatgaattagatggtgatgagaaggctaattttctaaagtatgagatagcagtcattgagcttgatcttgaaaatgacgatcctaaggttaatgatatatttcagagaattaatagaacatcaaattctttgacaaatatagaaaaattagcatctcaatattctacatcagattatatgcttgttgcgaaattattgactgatcagatcgatatatcttggatagaagatggggaagctatgttcaaagaagatccaaatattcctgtagaattctattcttgggcaaaaactaaggaagttaataattttagaaaattaattttagagaaaggtatttatacatcaagcgattttattagaaaagtacatttaattcatatattgaatattatgtcaacgtatttatattcattttttcataggaatgaaaaaacatatgattatttgaatagttattcttatgtgtttgaagaaaaagacgagcttattgataattttgaaaaaacagcttatattatattaaaaatgaaatttactagtaaatcctattggttgaataaagctaatttttttactttattcttgtctattgtaagtaatgttagaaataaaaatattataaatatatccttacttaaggaaaaactgaattatttttcagatcatcttcctgatgattataaattggcggctagtgaggctgttaatgataaaaaagaaagacagttaagggctgtatatatagataaaatagtttctgaatgtgttagctgtcagctttga

SEQ ID NO: 6247 - DNA, 381 bp, Photorhabdus luminescens
gtgaggtcaactatgacaaacagtgttgaaaccttttctctgaatgaaaccgcatggcaaggaatcaccatcaccgcgagagccgcagcgcagatcttaaagttgatgcagcaaaacccacaaagcaaagggttatatctgggggttaagcaatcgggatgtgccggctttggctatgtgtttgagatggttaacgatcccgcacctgatgatctgaggtatgaaaatgaaggtgcatgtttatatgtccctctgaaagcaatgccatttattgatggtacggaagtggatttcgttcgtgaaggtttaaatcagatatttaaattcaataatccaaaagcacaacatgcctgtgggtgtggtgaaagctttggtatataa

SEQ ID NO: 6248 - DNA, 1497 bp, Photorhabdus luminescens
atgtctcagagcaatgtagaaatcagtgatgatgtgcagacttggctcagcgatcatcgctataaagaaggcttctttactcaggtagcgacggatgagctagctaaaggtttgagtgaagatgttgtgcgggctatttccgcaaaacgcaatgagcccgaatggatgcttgaatttcggttggaggcttatcgccattggttaggaatggaagaaccccattggttgaaagcgaattatcctaatcttgattaccaggactacagttactattcagcaccttcatgcggtgcttgtagtgatagttgcaattcacaatctggtgctgttcaagggacagggtcggagcaagctaatagctatttaaccgcggaaattgaagaaacatttgataagttgggtgttcctgtacgggaaggtgaagctgttgcggtagatgctatttttgactccgtctctgtttcaacgacctatcgggataagttagcgaaagaagggattattttctgttcatttagtgaagcgatacaggaatatcccggattggtccgtaaatacctcggcagtgtggttgcaagccacgataatttttttgccgcgttgaatgccgcagtggcttctgatggtacttttgtttatgtgccaaaaggcgtccgatgtccaatggaactgtccacctattttcgtatcaacgcggcgaaaacgggccaatttgagcgtactatcctgattgctgatgaaggcagttatgtcagctatatagaagggtgttctgcaccggtgcgtgatagctatcagcttcatgctgctgttgtcgaagtgattatccataaagatgccgaagtgaaatattccactgtccagaactggttttccggtggtgacagtgctgggggaattctcaactttgtcactaaaagggcattatgtgaaggcgaaaatgccaaaatgtcttggactcaatcggaaacaggttccgcaattacttggaaatatcccagtgtgatcttgaaaggggataattcgattggcgaatttttctccgtggctttgactaacggtactcagcaggcagataccggtaccaaaatgatccacattggccgtaataccaaatcgaccatcatttcaaaaggcatttctgctggccgtagtcagaacagttatcgtgggttggtcaaaatattaccgggagcagaaaacgcccgtaactatacccaatgtgactccatgttgattggtacagaatgtggtgcacatacattcccttatgtggaagtacagaacaatacggcgcaactggagcatgaagcgacaacctcccgcattggtgaggatcaattgttctattgtttgcaacgtggcatcagtgaagatgatgctatttctatgattgttaatgggttctgtaaggatgtgttctctgaacttccccttgaatttgccgttgaggcacaaaaattgctggcgatcagccttgaacacagtgtcggatga

SEQ ID NO: 6249 - DNA, 747 bp, Photorhabdus luminescens
atgttaagtattaaaaacttacgagtcagtgttgaaggtaatgaaatcctaaaaggattaaatcttgacgttaaaccgggtgaaattcatgccattatggggccgaacggttccggtaaaagtacattatcagcaacgttagctggccgtgaagagtatgaaatcgatgatggtgaaatcacttttaaaggaaaaaatttacttggatttgagccagaggagcgagctggtgaggggattttcctggcgtttcaatatccggtggaaattccgggtgtcagtaatcaatttttcctgcaaaccgcagtgaacgctgtccgccaatatcgccatcaggagccgctggatcgctttgattttgccgattttatcgaagaaaaaattgaattgttagatatgccaccggatttgctgacacgttcagttaatgttggtttttccggtggtgagaaaaaacgtaatgatattctacaaatggccgcgctggagccgacactttgtattctggatgaaacagattcagggctggatattgatgcattgaaaattgtggctaatggtgtgaattctctacgtgatccaaatcgttcattcattattgtgacccattaccaacgtattttggattatgtgaaacctgattttgtgcatgtgctttatcagggaagaataattaaatccggtgatttcagtctggcgaaaaagttggaggagcaaggttatggctggcttattgaccaacagtga

SEQ ID NO: 6250 - DNA, 1317 bp, Photorhabdus luminescens
atggctggcttattgaccaacagtgaacgaactgaaaaggtgcggcaagttgcagaacgtaaccagcaagcattagcacgttttgctgatttgtaccactgccgtcatggtgaggattcatttcatgccagtttgcattggcagacagccattaaaaccggttttcctcaattcagacatgaagattggcgttatacgccgctggataaattgttaaatcagcaatacagcagcaaaacttgggaattgacagtagcacaatgtgaacagctagcgatttcaatggattgttggcgtgtcgtgatggtgaatggttgtttttcaccgttactgagttcctgtgaatttgggccatatcagctcagtttactggataacaaaagtgggcttcctgcaccgatacaacagggtgagatttttctgcatttgacagagagtttggcccaacagcctttggttattacgttaaaggctgggcaagtggcagaaaagcccctttacctgctgaatataaccagtagtcactgtagtgaagcgttgaatagcagtcattaccgctaccacattgctgtaggcacgaatgcgagcgccagcgtgattgaacatttcgtcagtattgatgggcaacaacctcatatgacaggaggccgattaaccgcggaagtgggggataatgctcatttcacccatataaaactgggggttgagaacagcgcaagctatcactttgcccataacgatattgtgattggtcgtgatgctcaagtaaaaagtaccagctttttattaggctcagggcttggccgacacaataccagcgttaagttgaatggcgaaggggccaatttgtcgttgaacagcttactgttgccgcaaggaaaagaggttgccgatacgcgtacttatttggaacatcataagggacattgtgaaagccgtcagttgcataaaaccattgtgatggatcagagcaaagcggtatttaacggcatgattaaagtggctcctcacgcattgaaaaccgacggacaaatgaccaataacaatttgttgttaggcaaacaagcagaagtggataccaaaccccaactggaaatttacgctgatgatgtgaaatgcagtcatggtgcgactgttggtcggatagatgaagagcaactgttttatctgcaatcacgcggtatcagccgacgcgatgcagagcatatgatggtatttgcttttgctgcggagctgactgaatctattgaagatgaatccctgaaggctattgttatgaaccacattaagcaccgtttagcgagagtggaaagatga

SEQ ID NO: 6251 - DNA, 1239 bp, Photorhabdus luminescens
atgactttttctgtaaaaaaggtgcggcaagatttcccggtattaactcaacaggttaatgggcatccactggtttatcttgatagtgctgctagtgctcagaagccggtttcggttattgaacgagaaagtgaattttgtttgcaccagtatgcggcagtgcaccggggaattcataccctgagctctgcggctactcgaatggttgaaaatgtgcgctaccagatagcgcaatttattcatgctcaaagtcatgaagaaattgtcttcgtcaaaggtacgacggaagggattaacctgattgctaacagttatggccgcaagtttatcaataatggcgataatattgttattactgaaatggaacatcacgccaatatcgttccgtggtatatgctggcagaacagattgggtttgaaattagagtatggccattgaatgagaatggcgaattggatcaagcaattttagcttctttgattgattcacggactaaattgctttcttttactcatctctctaatgtgcttggcaccgtgaatcctgtacgtcaaatcataaaacaggcaagaaaactggctgatgagcaggaagggcggttacatattctggtcgatggcgctcaggccattatgcataagcaaattgatgtgcaggatctggattgcgatttctatgttttttccagtcacaaattatatggcccaacaggcattggtgtgctttatgggcgcaaatccctgctggatgctatgccaccttgggaagggggtggcgcgatgataaaacaggtcagcctgcaaaaggggataacctatgcagaaccaccgtggcgatttgaggcgggaaccccaaatattacgggaattattgggcttggtgctgctgtcgattatgtcacttcacttgggctggatgaaattcagcagcatgaacaggcactgatggattatgcaatggcacggctgaaagaggtcaaaaccctgaaattgtatggtcctgagcaacgtcagggggttattgctttcaaccttggccgacatcatgcttatgatgtgggaagtttcctcgaccaatatgggatagcgatccgtaccgggcatcattgtgcccttcctgtgatggaacattatcacgtttccagtatgtgtagggcctcattggcgatttatactacgcaagaagatattgatgcacttgttgttgcattgcaacgaatagaacagttactgggttga

SEQ ID NO: 6252 - DNA, 417 bp, Photorhabdus luminescens
atggcaagtttgcccgacacaaataagttgttacgtaatttttcccgttgccggaattgggaagaaagatatctctatatgattgaactgggggcgaagttgcctcctcttactgacgaacaacgccaacctgagaacttaatcgcaggttgccagagccaggtgtggatattactgagaatgaatcaccaaaacaaagtggaatttattggtgatagtgatgctgcgattgttaaaggattggttgcgattgtctttattctgtttcaaggtaaaacaacccaggagattctggatttggatgtgactgaatattttggaaaattgtctttggagcaacatctgacaccctcacgcacgcaggggctgcacgcgatgatacatgccatccgaaataggacaagtaaaatggtttag

SEQ ID NO: 6253 - DNA, 1083 bp, Photorhabdus luminescens
atgaaacgagttttaacgtttattggcgtgttattgttcagtgggctaactaacacagtcagtgccacagaatatactttgccagcggccaatagtcgtttaattggcgaaaatacgacattggttgtacccgatgatggacgttctttagaggccattgctgctgaatataaaattggtttactggcaatgctggaagctaatccaggtaccgacccttatttgcctgctcagggttctgaactgattattccatcacaaatgttgttgcctgatacaccgaggcagggaattgtgattaaccttgcagaacttagactctactattttcctaaaggaaaaaacaacgtcatcgtgtatcccattggtattgggcaactcggtcgtaatacgccagtgatgacaacatctgtgagtcagctaattaaagatccaacttggacgccgactaagaatatccgtaaacattatgctgaacagggggttattttacctgcggttgttcctgctggtccggaaaacccaatgggcgcatttgcgttgcgcttagcagccgggcgtggagaatacttgatccacggcacgaatgctgattttggtatcggtatgcgggtgagttccggttgtatccgtttacgtcctgatgatattgaaacgttattcaacgccgttcctcgtggaacacgagtacagattatcaatgaagcggttaagtattctgtagaaccaagtggtaagcgttatattgaagtacatcagccattgtctaaaaaagaggatgataatccacagacattacctattgtccgctcagccgatttgaacaagttcattgataataacaagacagataagaatattgttgaacaagcgatggtacgtcgttctggtatgccagtgctggtaagtaaaggtatagagcctgaaacacaacaggatttaccagaagagaatccagaagagaatatcgtgccgatggaagatgatgttaaaggtgcagaacaggcagtgaataacgatgtatctgaatcgtttaaattaccgccgttatatcagcctgggccaatctatcgggaaaattaa

SEQ ID NO: 6254 - DNA, 237 bp, Photorhabdus luminescens
atgaatcgtactaaaattgtactgggtgcagtagttctggcttctactctgttggctggttgttcaagcactgctaaggttgaccaactgacttctgatattcagactctgaatgcaaaagttgatcaactgagcaatgacgtgaacgcagtacatactgacgttcaagccgctaaagacgatgcagctcgtgcgaatcagcgtctggataatcaagttcgttcctacaaaaaataa

SEQ ID NO: 6255 - DNA, 852 bp, Photorhabdus luminescens
atgttaagtgatcaatctaacgaatattttaacatcagcattgacaacggagtcgctcatttacaactcagtcgtcccgaaaaggcaaatagtttggcgcttgggttttggaaacggtttcctgaaacagtagaacaactcagtcgttcaggtgaagtgcgggcaatggtgatatctgcacagggaaacacattttgtggtgggcttgacttgcaaatctttgcctctagcaaagaggctaatacggctaatcctaatgagcgggaagcgatgcagttcagcttattgcaaatgcaagaggcgataagcgtattggaacatgcccgattccccattattgccgcagtacaaggcgcttgtcttggtgcaggttttgatttaattgctgcgtgcgatttttgttttgctgctgaaaatgcgaagtttcgtatagaagaaaccaatattggtatgatggctgacttaggtattcttcaacgtttgcaacatttgatcccaagtggtatagctcgctatctcgcgctaactggggatacgttgagtgcggttcaggctcatgatttggggctggtggtaaaagtgttcccttctacggaaacactaatcgaaggtgctctcgcgactgcccggcgtattgctgatcggccaccaattgctattaacggggttaaacgagccatgctttacagccgtgatcatggtgtttacgaatcattgcaacaaatagcacttttgcaagcttcgatttttagccgtcaagatatcctgtgctcgattcaagcgaaagcgaccggaacaaaaagtgagttccaaaatttaagtgaagtcggtaaagctttcgatgagccatga

SEQ ID NO: 6256 - DNA, 1410 bp, Photorhabdus luminescens
atgaaaaaaaccaaaattgtttgtactatcggaccaaaaacagaatccgaagaaaaactggccgaactgttgaatgccggcatgaatgttatgcgcctcaacttttcacacggagactatgaagagcacggccagcgtattcaaaatatccattcagttatgactaagacaggtaaacaagccgctattttgctggatactaaaggccctgaaattcgaactatgaagctggaaggcggtaacgatgtctctctaaccgcaggtcagaccttcacttttaccactgacacttccgttatcggtaataaagaccgtgttgctgtcacttaccgcggtttccccgcggatctggctcccggtaataccgtgctagttgatgacggcttgatcggcatgacagttaaagaagtcactaagtcagaggttatttgccaagttttgaataacggtgatttgggggaaaataaaggtgttaatctgccgggtatttccatcagcctgcctgccctggctgaaaaagataagcaagatttgatctttggttgccaacaaggtgttgatttcgtcgccgcttcttttatccgcaagcgctccgatgttctggaaatccgtgaacatctgaaagcgcacggcggtgaaaacattcaaatcatctctaagattgaaaatcaggaaggtctgaacaattttgatgaaattctggaagcttctgacgggatcatggttgctcgtggtgatcttggcgttgaaattccggttgaagaagtgatcttcgcccagaagatgatgattcaaaaatgtaatatcgctcgcaaagttgttatcactgcaactcaaatgctcgattctatgattaaaaacccgcgccctacccgtgcggaagccggtgacgtcgctaacgctattttggatggtactgatgcagttatgctttctggcgaaagtgcaaaaggcaaatatccaatagaagcagtgactatcatggcaacgatttgtgaacgtacagaccgcgttatgccaagccgtatcgaagccgtccattgccgtaacctgcgcgtgaccgaagcggtgtgtcgtggtgccgttgaaacagcagaaaaactggaagcccctctgattgtggtcgcaacctatggcggtaaatctgccaaatccattcgtaagtatttccctgacgcgcccattctggcattaacgactaatgaagtgactgcccgccaattactgcttgttaagggtgtttttacccaaattgttaaagaaatcgcctctaccgacgatttctaccgcattggtaaagaagcggcgctagcaagtggcctagcgaagaaaggtgaaatcgtggttatggtatctggtgccctggttccaagcggcacaaccaacacgtcgtctgttcacgtcctttaa

SEQ ID NO: 6257 - DNA, 336 bp, Photorhabdus luminescens
ttgaatggtttcagcttattgatttgccgaacactgaaaagttacagattaatcgtatgtataccctatggatttcaagatgcatcgcgaatccccggtcacataggtaactatgtgaccgaggtgagtgagtacagccaacaaagaggcaacttgaaagataacgggtatataagctcgcataattacatgtgcctaacctcacacgaaaagcaccgcatgtcttccacgccacttgtccttaatgatgttgcgcaacgttcaacaccacatggtatctgcgcaaaccataaagttggcgactcactattttatccaattaaaacctgtagatag

SEQ ID NO: 6258 - DNA, 111 bp, Photorhabdus luminescens
ttgctcattgcgcaaactgtttgtaaacaaacaacagtctattttgacgtgggaaataaattaagcacaaccaagagaaaagataataaaaacaggaagatttatttgtag

SEQ ID NO: 6259 - DNA, 1374 bp, Photorhabdus luminescens
gtgcagaagtatttaaaagaagcgcgtagtttgctcgctctggggattcccgtcattattgctcaattttcacaaactgcaatgggggttgtggacaccgttatggcgggtagcgtcagtgcaacagatatgtccgcggttgctgttggcacctcgatctggctgccagttatcttatttggttacggcttactattagctttaacccccattattgcgcaaatgaacggttctggtcgcaggaatctcattgctagccaaactcagcaagggttctggctagcgatttttctctccattatcattattgctattctatacaacagcaagttcctgattgacaggcaacacaatatagatccaattttggcagaaaaagccgttggatttatccacgcaataatgtggggtgcgccgggctatctgttttatcaggtactgcgtaatcaatgtgaaggtttatcgaaaaccaaaccaggcatggtgattagttttttaggattattgattaatattccgattaactacatattcatttatggtaaatttggcgcgcccgctttaggtggtgtcggctgtggtgttgctaccgccagcgtttactgggtcatgttcctgctaatgcgttggtatgtgaaacgtgcatcatcacagagggatatccgccctaaacatcgctttgccgcaccagaatggcatattttgaaacgcatttcagccctcggcttgcctattgcgatggcggtatttttcgaaattacgttatttgccatagtggcattattgatctctcctttaggcgttactgctgttgcagggcaccaaattgcccaaaattttagttcattaatgtttatgttcccaatatctttggccgcagcaaccactattcgtgttggctataatttagggaaaaaatctatcgagaatgcccggatatcagcctataccggaattatggttggtttggtatttgcttgtttaaccgcaaccttttctattattctgcgagagccgatcgccttgatgtataacgacaatcctgaagttatcaccatggcatcacatctgatgctatttgccgcgctttaccaattatctgatgccatacaagtggtaggggctggcgttttacgtggatataaagatacgcgttctatcttttatatcacttttatcgctttctggattctggggctaccaagcggttatatcctgggattaaccgactatattgtacccgcgatggggccacaagggttctggatcggctttattattggcctgactgcatcagcagtgatgatatttgctcgtatttcatggacacaaaaacaaccagatgaggtaattttacaacattcaacccactaa

SEQ ID NO: 6260 - DNA, 678 bp, Photorhabdus luminescens
atgttcacgggcattgttcagggaaaagcacccttggttgctattgatgaaaaaagtaattttcggactcatgttgttaaattcccggctgaattattgccaggtattgaaacaggggcgtcagttgccaataacggttgttgtctgacggtaaccaaaatagaaggcgatgagattagtttcgacttgatgaaagagactctacgtctgactaatcttggtgatttacagctaggggattatgtgaacctggagcgggcggctaaatttggggatgaaattggtggacatttgatgtccggtcatatcatcacggttgctgagatagctaaaattttcacttcagaaaataatcatcaaatatggttccgtatccatgataagcaattaatgaaatatatcttacataaaggatttatcggcatcgacggaatcagcctgacaattggcgatgttgttaataatcgtttttgcgttcaccttattcctgaaacactggaacgtacgacattaggtaaaaaacgtcttggtcagagggttaatatcgagattgattcacaaactcaagcgattgttgatactgtggagcgtgttcttgctcagaaagagcgggaacgggttgcctctcagcaaccggagacattgatggaagaatgcgcaataaatgaggagcgatag

SEQ ID NO: 6261 - DNA, 114 bp, Photorhabdus luminescens
atggaaaacccgattgagttagatgaatggcttgaagaacctacacatgatgatgctgttgaaatgatgaatgcacaagctgtcgtaccttttggtaccgcactttggccttaa

SEQ ID NO: 6262 - DNA, 978 bp, Photorhabdus luminescens
atggataaaagtcttgaaaatatgtattgttgtttatcacatcatcccgcaatttcggataaagtaagaaatggtgaatgtataaaaatatttatcggatctgatactgagcatagcgatattgcgcagaagatgtatatgtataagaagaatttcgatgtaaagtctgattttgcttttttagaaaaaacatcaccggacgatataaaacaaaaaatatctgattgtgatttgtttatttttctttacgcatcatcaacattaaagaatgcatctccacaagggccagaatatctaaccaaaataagaagctttattactgaatcatggaagaaatctgtattgtttaaagattatggcccacatttcattgaagcatttagcgagccaccagcatcaataacagaaaggaacaaaaaacttattgaattatcaaatcgatcacagaagattcaatatacagataataaagggaactcaattgtaggttatttagaaaaagaccataagtggacttccattgatggcagtggaaatcttgatgttattcctggggaaatagcaagccatataaagcgccttaacggtagtgtcagctttagtggcacttttttgagtacggcaccctttgccataaagtatggggttgtcaatgatatgatgactataaatataaaagagggtgaaattattggatttgattgtgaacatgatgaatttagtcgggattttaatttatacctaaaccataatcacggaaaccgaattgttgaagagtttggtattgggactaacaggggtgtgaaagcgctttatggcagaaatgctggttttgaagaacgacatcctggtttacatcttggtttgggtggtggtgtaaaagggagtcatcatttagatttgatattttctggtggaaaaatagcatttgatcaaacggtcttctttgataatggttatgtgaatgatttccgttag

SEQ ID NO: 6263 - DNA, 1152 bp, Photorhabdus luminescens
atgagttcatcttgtattaaaaacccgaaaacagccattaactcctggcagagaatgaccaatgagatgctagaagaagcaggtgttcaaattaatggtcacaacccttatgatatccagataaaaaacgctaatttctataaaagagttttacaacaaggttcgatgggattaggtgaaagttatatggatggctggtgggattgtgaacggttggatattttcttttatcgcgttttacgcgccggattagaaaataaaatgcccaataatctcaaagatatagtgagaatcgcaataacccgcttacgtaatctgcaaacgccaaaacgatcatggattgtcggtcatcaacattatgatttaggcaatgatctttttacccatatgcttgacccttatatgcaatattcctgcggatactggaaacaagctaaaacactggaacaggctcagcttgataagttgaaactcatctgtgagaaattggcgctttctccaggtatgactctgttggatattggctgtggttggggtgggctatcagcttatgcggctaaaaattatggtgtttccgtcacaggtatcactatttcagccgaacaacagaaatatgcacagaaacaatgtacaaatctggatgtaaaaatcattctgaaagattatcgggatttacatgaacagttcgacaaaattgtttctgtcggtatgtttgaacacgttggacctaaaaattatgcgacttacttcgacgttgttcaacgaaacctgaaacctgatggcttattcctgctacataccgctggttccaacaaaactaaaaccagtgctgacccgtggatcagcaaatatatttttcctaatggctgcctgccttctattgagcaaatagcccacaccagtaaaagccgttttgttatggaagattggcataactttagcgcagattatgaccgcacattgatggcctggcatgaaagatttattacctgctggcctgaaatagaaaataactatagtccaacatttaaacgcatgtttagctattatctgaacgcctgtgcaggtgcatttcgtgctcgcgatatccaattgtggcaaattatattcagtctaaaaggtattgaaggtgggttacgagtagcccgataa

SEQ ID NO: 6264 - DNA, 1299 bp, Photorhabdus luminescens
gtgaccggggtgagcgagtgcagccaacaaagagacaacttgaaagaaacgggtatatcactgcaaattatttcaatcatgatattcaaagagagtaatcaaatgaaaaactcaagtcagttcatgttctaccttgcaggcttgagtatgctaggttatctggccattgatatgtatctgccagcattcggcactatgcaacaagaattagcgacatcggcagaagcaatcagtgccagcctaagcatctttcttgcaggtttcgccttcgctcaacttttgtggggacctctttcagatcgctttggccgaaagccgattatcatcaccgggctatccctgttttctattggctgtctgggtatgatgtgggtaacagacgccacccaacttttagttttgcgttttatccaagccgtaggtgtttgttcagccgccgtctcatggcaagcattagttattgatcgttatgaagccaatcgtaccaaacgtgtttttgcaacgattatgcctctggttgcgctctcccctgccttggcacctttgatgggagcctggctgttacaacatggcggctggcgcataattttcctagtcttactggcaattacattattactgttgttttttactctgttcttgcaagaaaatcgcaacaaccgtgaaactcaagtgcaaacaaataatgtctctttccttacgctattaaaatcaccgctatttagtggcaatgttctgatatttgcatcatgcagcgccggcttttttgcctggttaacaggctcaccttcaattctcggtgagatgggatataccccggacgacattggtctgagttatattcctcaaacgctagcctttatcgttggaggttatggatgccgcagtattttagccaaaataaaaagtgatattattttcccttatctgttaattggctatgctatcagtatgattgtgctctatttaattgcaaaatttgacgagccaacgctattcactattctggtacctttttgctttatggctgcaatgaatggcgcgttatacccaattgcagtagcaaacgctttatccgcttatccacaagacagtggaaaagccactgcattacaaaacacgcttcaattaggactctgttttattgccagtctgattgtatcagcatttatcaacaatccacttatatccacaaccactgttatggtttctaccgttgttccaatggcattaggatattttatacagtggaaaaaaaacgctgatcgctgcattcaaacagttgaacaaaattcctga

SEQ ID NO: 6265 - DNA, 909 bp, Photorhabdus luminescens
atgtggtcagaatattcacttgaagttgtggatgcggttgccagaacaggcagttttagtgcggctgcattggagcttcatcgtgtcccttctgcgatcagttataccgtaagacaactggaagagtggcttgctgtttcgttgtttgagcgtcgtcatcgggatgtagaattaactgaggcaggcgctatgtttatcaaggaggctcgctctgttatcaaaaaaatgattgatactcgtcatcagtgtcaacaaattgcaaacggctggagagggcaatttagtattgctattgatctcgttgtcaaaccagagcgtagtcgccagcttattcttgatttctaccaccattttcctgatatagaactttttattcatcaggaagtgtttaatggtgtgtgggacgcgctggtgaatagtcgagttgatgttgcaattggtgcaacccgggtagctccagtcggggaaaggtatagtttccgagatatggggtttatgccttggctatgtgtggttagcgctgaccatgcgctgactcagttgccgggtctgttatctgatgaccaaatgcggccttatcccagtttgtgccttgaagatacatcccgtaatttaccgaagcgtgacacctggaatctggataatcagcgccggttggtggttcctgattgggaatccggtttgtcttgtctaaacgagggattatgtgtgggaatggtgcctaaacatagggcaatgccgcttattcggcagaataaactcgccgtgctggaattggaacagcctttaccagacagtccatgttgtttggcatgggttcaaaacagccattctccagcattaagttggctgcttgactatcttggcgatagtgaaactcttaatgctgaatggcttcaagatgaataa

SEQ ID NO: 6266 - DNA, 1026 bp, Photorhabdus luminescens
atggcaacgatcaaagatgtggctaagcacgctggcgtctcaaccactactgtatcccatgttattaataaaacccgcttcgtcgctgaagatactaaagctgctgtttgggctgctattaaggcactgaattattcacccagtgccgttgctcgcagtctgaaagttaaccacacaaaatcgatcggattactggcaacgtccagtgaagccccctattttgctgaaatcattgagtctgttgaaaacagttgttatagcaaaggctatacgctgattttatgtaactcacacaataacattgataaacagaaagcctatctcgccatgctggcccaaaaacgtgtggatggactgctaattatgtgttcagaatacccggaacagctattgggaatgttggaagattatcgcaatattccaatggtcgtcatggattggggacaggccagaagtgatttcaccgatacgattattgataatgcattccacggcggttatctggctggtcgttatcttatcgaacgtggtcatcgtgatattggtgcgatccccggccctctggcacgaaataccggcggtggccgtcatcaaggattcttaaaggcgttaaaagaagccaacattccgatcaaagaagagtgggttattcagggggattttgaaccagaatcgggctataaagccatgcatcaaatcttgaatcaaaaacagcgcccgactgcggttttctgcggcggagatgttatggctatgggggcgatttgtgctgctgatgaattaggactgcgcgtcccacaggatatttctgtcatcggttatgacaatatacgcaacgctcgttatttctctccggcattgaccaccattcatcagccaaaagaacgactggggcagatggcgttttccatgttactggacagaataatcaataaacgtgaagatgcacaaactattgaagtacatccacgcttggttgagcgacgttctgtcgtggatggtccatttgtcgactatcgtcgttaa

SEQ ID NO: 6267 - DNA, 135 bp, Photorhabdus luminescens
atggcaatcatcaccaacgtgctgacagcagtaaataaaccaagcttcaaatcggtattcatagagcctcctcagaataaaaagtttatagtgacaaaaaccaatctattgagatggttaattgcccttacataa

SEQ ID NO: 6268 - DNA, 351 bp, Photorhabdus luminescens
atgacgactactattgagaagattgagcgccaaattaaagaaaacccgattttattgtatatgaaaggttctcctaaattgccaaattgtggcttttctgcgcaggcggttcaggctttatctgcgtgtggtgaacgttttgcttacgtagatattttgcaaaatccagatattcgtgcagagttgccaaaatatgctaattggccaacttttcctcagctttgggtggaaggtgagttgataggtggatgcgatattatcattgaaatgtatcagcgtggtgagctacaaacattaatcaaagaaactgctgataaatgtcgttctcagggcgaaaacgcgacagagtaa

SEQ ID NO: 6269 - DNA, 654 bp, Photorhabdus luminescens
atgtctgacaaaaaagcgccaaacgtccttagtggacgttttagaggttattaccctgttgttattgatgttgaaactggcggttttaatgccaaaacagatgcattacttgaaattgccgccgttacactggaaatggatggtgaaggttggcttacgcctggcgaatcacttcacttccatattgagccatttgaaggagccaaccttgaaccagcagccctggaattcaccggcattgatccattaaatccgctacgtggagcggtgagcgaatatgaagctctgcacgctatttttaaaatggttcgtaaagggataaaaaataatcattgtaatcgggcaattatcgttgctcacaatgctaacttcgatcacagctttgttatggctgccacagaacgcaccggactaaaacgaaatccgtttcatccgtttgcaacttttgacaccgctgctttaggtggtctggtattaggacaaacaatcttagcaaaagcctgcatcacagccggtatcccattcgataataatcaggctcacagcgcgttatatgatactgatcgtaccgctgaattattctgtgaaatggtcaaccgttggaaacaacttggtggctggccattaacaacaacagcagaaaaaactggataa

SEQ ID NO: 6270 - DNA, 414 bp, Photorhabdus luminescens
atgcgtttactccataccatgatccgtgttggtgatctacaacgctccattaatttttacactgaagtgttaggcatgcgcctgttgcgcaccagtgaaaacaccgaatataaatactcactcgccttcgttggctacgctgatgaaagcgaaggagcagtaatcgagttgacctataattggggagttgaccattatgaaatggggaatgcctttggtcacatcgcattaggtgttgatgatgtcgcagccacttgcgaatctattcacaaagcaggtggtagcattacccgtgaagcgggtcctgtaaaaggcggaacaaccattattgctttcgttgaagatccagatggctacaaaattgaacttattgaaaacaaaaatgccagcaacgctctgggtaactcaatctga

SEQ ID NO: 6271 - DNA, 243 bp, Photorhabdus luminescens
gtgatggctgagcaactcgaattttttgctattcctagcccttgtcgaggaatttgtcaggcgaatgagcggggcttttgtctggggtgttatcgcagccgggaagaaagatttaattggatgaaaatgtcagatgggcaaaagcgtgaagtattgcgactgtgccggcaaagatatttacgtgtattgagagcagaaaatcagacagatgaagaaccacctgaacagccatcactgttttaa

SEQ ID NO: 6272 - DNA, 432 bp, Photorhabdus luminescens
ttggaatctacattgggatcagatctggcacggttagttcgtatttggcgtgctttaattgactaccgtttaaagccgttagaattaactcagactcattgggtaacgttatacaatattagccggttacctcaggagcaatctcagatacagttggcgaaagctatcggtatcgagcaaccatctttagtcaggacattagatcagcttgaggaaaaaaaacttatcacccggcatacttgtgccaatgatcgtcgtgcaaagagaatcaagctaactgaagattctgcatcggttattagggagttagatggtgttattgaatccacaagaaatgagattctgggaggtatttcacgcgaggaacttgcttttctttccactttagttcagaagttagagcaaaatattatccaattacaaagtagatag

SEQ ID NO: 6273 - DNA, 471 bp, Photorhabdus luminescens
atgtttaagcactttttagttagcgcggttgccgttgcttcattatcaggctgtgtcaacaccgattctctttctggtgatacctacactgctggacaagctaagcaggtccaaaccgtctcttacggcacagttgtttctgttcgtcctatcaatattcaggcgggcagcaatgagaatgtattaggcgcgattggtggtgcagttctaggaggacttgttggtaatactattggtggtggcagtggcaacacattagccactgccgctggtgcaattgccggtggtgtcgcgggccaaaatgttcagggagctcttaacacaactaaaggtgtagaactcgaaattcgtcgtgacagtggtgaaagcatcattgttgttcaaaaacaaggcaaaacagcctttcataaaggccaacgtgtaagaatcgcaggccaaggtagtaatattactgtttcacctcgacaataa

SEQ ID NO: 6274 - DNA, 1119 bp, Photorhabdus luminescens
atggttatgaagtcaggtcgttatattggtgtaatgtcgggtacaagtctggatggcgttgatgtggtgcttgccgcaatcaatgataaagttgttgctcagcaagccagttattcgcatccattcccatacgaattaaaacagaaaattctcgcagtctgtcaagggcagcaaacgacattatcggcaatcggtcggttggattatgaacttggttctttattcgctgaagctgtacaaggcttactgattaaaacagggttaaccgcgagtgacattactgctgtgggatgtcatgggcaaaccgtttggcatgagccaaatagtcatacgcctttcacgatgcaacttggcgacaataaccgtattgccgctttgactgggataactgtggttggtgattttcgtcggagggatatggcatatggtgggcagggcgcgccattagttccagcttttcatttcgccgtattaggccatctgacagaacgaaggataattctcaatatcggtggtattgccaatataacgacgctattacctggatcacctgtcaaagggtatgacacaggtccgggtaatatgctgatggatagttgggtatggcgtcatcagaaaaaaccttatgataaagatgcgcaatgggcgcgagaaggtgttgttaataacaaattgcttgggcaaatgctttctgatcactatttttcacgaccagctcctaaaagcacaggccgcgagtatttcaatatgagttggttggaggcgcaattagttaattttcctgacataccacctgtcgatgttcaggcaacgctggccgagctgacagcagcgtctgtatcacagcaaattatgttgagtggtggatgtgaacgtctgctggtttgtggtggtggcgcacataacccgcagataatgagccgactttctgccttattaccggggacggaggtttgcccgacagataaatatggcctaagcggtgatgatatggaagcactggcatttgcttggttagcattccgtacaatgtcaggtgcgccagggaatttaccctctgttactggtgcgagtactgaaactattttaggggcgatttatcctgttattaatcaataa

SEQ ID NO: 6275 - DNA, 654 bp, Photorhabdus luminescens
atgtcagaacataacgaatttgatgttgcagaattacgccgtgaatatattcgtggtgggttaagacgtaaggatttgactgaagaacccatcgagctttttgagcgttggctcaatcaagcatgtaacgctaagttgagtgatccaacggcaatgtctatagcgacggtcgatgagaatggtcaaccgtatcaacgtattgtgttattgaagcattttgattcaaatagtctgattttttatacaaatttaggcagccggaaagcaaaacatttggcgcacaataacaaaatcagcctccatttcccttggtatcctctggaaaggcaagtctcttttcttggtaaagcggaacgtctttctcctgttgaagtggtgaaatatttccatagtcgtcctagggatagccagattgctgcatgggcatcacaacaatcttcccgtatttccgcacgtggtgttttagaagggaagttccttgaattgaaacagaaattcttgaatggtgaagtgcctttacctagcttctggggaggattcaaagtgacctttgattctgttgagttttggcaaggtggtgcaaaccggctccatgatcgttttatttatcaacggcaaggcgatagctggcatgttgacaggcttgcaccataa

SEQ ID NO: 6276 - DNA, 1275 bp, Photorhabdus luminescens
atgtctagcaataacctgataaaacaactgcaagagcggggcctcattgcccaggtgacggatgagaatgcgttagcggagagactggcgcagggccctgtctccctctattgtggtttcgatccgaccgctgacagcttgcatttggggcatctggttcccttgctgtgtttaaaacgattccagctagccgggcataaacccgtggcgttagttggtggagctacggggctgattggtgatccaagttttaaagccactgaacgtaaattgaatactgaagctaccgttaaagagtgggtggagaaaattcgtagacaggtttcacctttcctcgattttgattgtggcgaaaatagcgctaaaacagccaataattatgattggtttggcaacatggatgttctggctttcctgcgtgatatcggcaaacatttctcagttaatcaaatgattaataaagaggcggttaaacagcgtttgaaccgtgatgatgtgggtatctctttcactgaattttcttacaatctcctgcaatcctatgactttgctcgcctgaatgaagtccatggtgttgagttacagattggtggttctgaccagtgggggaatattacttctggtattgatttaactcgtcgtatcacccagaaacaagtatttggtatgaccgttccactgatcacgaaatctgatggcactaaatttggtaagacagaaggtggcgctgtttggttagatccgaagaaaaccagtccatacaaattctatcaattctggattaacactgcggatgcggatgtttatcgcttcctgaaattctttacttttatgaatcttgaagatattgatgctttggaagaagaggataaaaatagcggtaaagctcctcgtgctcagtacgtgttggcagaacaagtcactggtatggtgcatggtgaagaggggttagcagccgctaaacggattacagaaagtttattctctggcgctgctgctgatttgaccgaagcggattttgctcaattggcacaggatggtatgccggtaattgagttggaaaaaggtgcagatttgcaacaagctttggttaatgccgggttggtaccttctcgtggtcaggcgcgtacgatgatcagttccaacgctgttgcaattaatggtgaaaaacaatctgaacctgaatatctgtttactgacagtaaccgtctgtttgatcgttacaccctgctgcgtcgtggtaaaaaacacgattgtttgatctgctggaaataa

SEQ ID NO: 6277 - DNA, 864 bp, Photorhabdus luminescens
gtgaaaaatattctttcaattcaatctcatgttgtttttggtcacgctggtaacagcgctgcggaattccctatgcgtcggatgggggtaaacgtatggccgttgaacacagtacagttttcaaatcacacccaatatgctcaatggaaagggtgtgttatgccggctaaccatcttactgaaatcgttcagggcattgaagaaattgaacagctcaaatcttgtcatgcagtactgagtggatatatcggttcagcggagcaagggggccatattatcgacatagtaaaacgggtaaaagcggtgaatcccgatgcttggtatttctgtgatcccgttatggggcacccagaaaaaggttgtattgttgtgcctggggtggctgaatttttgtgtaaagatgcacttcctgtaagtgatatcattgcgccaaatttgctggagcttgaaacactcagtatgcagaaagtgactaatgtagaacaggctgttatggctgctcggacactatgtgataaagggccggatattgtactggttaaacaccttagtcgcgcgggttatcggactgatcgttttgaaatgctattagtgactaaagaacatagctggcatgtgagtcggcctttggtggactttggcgaacggcagccagtgggtgttggtgatttaaccagcggcttgttattggttaatctattaaaaggtgagtctttacaaaccgccctcgaacatgtcgctgctgcggtttatgaagtgatggtaacaaccaaagagatgggcgaatacgaactacagattgtggctgctcaggacagaatggtggcacctaatcataaattttgggcaatacagttagattaa

SEQ ID NO: 6278 - DNA, 606 bp, Photorhabdus luminescens
atgaaactttattaccaacctggagcttgttctctctcacctcacatcatactccgtgaagcagggcttgatttcagcgtgattaaagttgatctgaaaaccaaaaaaacggagaacggcgacgatttcttcgcaatcaatccaaaaggccagatacccactcttctgttagataacaatgagatcctcaccgaaggctctgttattgtccaatatattgccgaccagaaaccggacaaaaaattaattgcaccagccggaacgatggaacgatatcgtcaacttgaatggcttagccatatttccagtgaaattcataaaggattttcacctctgttttttccaggaacaccagaaaattatcgtcctgttgcggttaataatctactgagaaaattcaagtacatagatgaagtattagcaaaacagccatacattgccggggagcattttactgttgctgacgcttacttattcactctcagtaattgggcacctttagtgcaattggatctatctgatcgggttcatcttaaagcttatcaagagaggattgcagaacgtccaaatgttcgtgatgcactgaaagcggaagggttaatttga

SEQ ID NO: 6279 - DNA, 759 bp, Photorhabdus luminescens
atgaaaaatgattttttaattatatccaatatgtttaaatcaattaccaatataaaattaccagaatgcctgaaaaattatgatctatcccaagaaattgcagcttcttggaatgaatttagtggatcattatatcgctggccatccacattggaagattatgaatatgcatataattccgatgaacaagatattgatagaattattaaaaatatacacaaagcaacaacttatttaggttcacttagcagtggatatttaggtcatggttatattgccagagtcaatcatgcattgaaagaaattcaatcagattttagtaagctagacggtttcatctcaaaattgccacaaccctttgaaatatctcaaattgattttgaaagtaagaaaaacttcgcagaaaaaacacatataaaaatacaacaattattaaaaaatattccagatggcgaagataaaaaacaaatatataaactctctttattgatggaagaaatcactttaaacataccagatatttcatttagtcttagaaatataaacaattcagtcaataaacttaatggacaaataaaagcaattaataatatttacaatgagttagtcgaaaactttaatgaagaaaataaaaaagatattttcacgagaaactataggcaatgcatggtctattttagtgattttacaaataaattcaatttattttcctatgattacaaatcatttaacaaaaataatatattaattatcttataa

SEQ ID NO: 6280 - DNA, 789 bp, Photorhabdus luminescens
atgggttttatgaccggcaagcgcattctgatcactggcgtcgccagtaaactctccatcgcttatggcgttgcaaaagcaatgcatgaccagggagctgagctggctttcacttatcaaaatgacaagttgaaacctcgtgttgaagaatttgctgcttccctaaattctactatcgttctgccttgcgatgtagctgaagacgaaagcattgaagtcctgttcaccgaactgagcaaaatttggccgaaattcgatggttttgttcactccattggctttgcacctgctgatcaactggatggtaactatgtcagttccgttacccgcgaaggctttagaatcgcgcacgacatcagctcttacagctttgttgctatggcaaaaacttgccgtgaaatgctgaacccaaattctgctttactgactctcacctacctgggagcagagcgctcaatccctaactataatgtaatgggtctggcaaaagcatctctggaagctaacgttcgttatatggctaacgccatgggcgctgaaggtattcgtgttaacggtatctctgccgggcctatccgtactttggctgcgtctggtatcaaagatttccgtaagatgctggctcactgtgaatccgttaacccaattcgccgcactgtaacaactgaagatgttggtaacgccgcggcattcttgtgctcggatctgtccggcggtattaccggtgaaatcctgcatgttgatggtggtttcagcattgccgcaatgaatgaactggaattgaaataa

SEQ ID NO: 6281 - DNA, 810 bp, Photorhabdus luminescens
ttggttaatactctgctagaagttaggaatttggctaaaacttttcgctatcgaacaggtttttttcatcgtcaacatctcaatgcggtaaaacccgttagttttaccttaaaagctaaacagacgctggcgattattggtgaaaacggttctggaaaatcaacactggcaaaaatgctttcaggcgtcatcgagccaacttccggcgaaatcatgatcgaaggccataaactcacttacggtgattacagttatcgtagccaacgcattcgtatgatatttcaggacccaagtacgtcgctaaatcctcgtcagcgtattggtcaaattcttgatattccccttctgcttaatacagcgcttaatacaatggagcgggaaaaacggatcaaccagacattgcgacaagttggcctgctaccggaccatgccaattattatccacatatgttagcctcaggccagaaacagcgggtagcactggcgcgcgcattgatattacaacctcagattattattgctgatgaggcattagcatcactcgatatgtctatgcgatctcaaatcattaatctgatgttggaattacaggaaaaacaaggtatttcttacctctatgtcacccagcatcttggcatgatgaaacatatcagcgatcaggtgctggtcatgcatcaaggggaagttgttgagcggggaaatacagcagaagtgttggcttctcctctgcacgatatgacccgccgtttaatcgctagccattttggtgaagcactcaccgctgatgcctggcggcaggatattccttaa

SEQ ID NO: 6282 - DNA, 993 bp, Photorhabdus luminescens
atgccattactcgacattcgcaatctcactattgaatttatgactgccaaagggccggttaaagcggttgatcgcgtcagtatgtcactgatagaaggcgaaatacgcggtctggttggtgaatccggctcaggtaaaagcttgattgccaaagcaataagcggagtcactaaagataatctcaaagtgacggctgaccgttttcgcttcgatgatattgacctgctccgtctgactccacgtcagcgccgaaaagtgatcggccacaatatctcaatgatttttcaggagccacaatcctgtcttgatccttctgaaaatattggtcggcaactcattcaagctatcccctgctggacttacaaaggccgttggtggcaacgtttcaaatggcgaaaacgccgggctattgaattactccaccgtgtgggaattaaagatcataatgacatcatgagtagcttcccttgcgagttaacggagggagagtgccaaaaggtcatgattgctatcgcattggcgaaccaaccacgcctgctgattgcagatgaaccaaccaatgcgatggaaccgaccacacaagctcagattttccgtctgttagcacgattgaatcagaacaataacaccaccattttactgataagtcatgacttgcaaatcatgagcaaattggtggatcgcattaatgttctgtactgtggtcaaacggtcgaaagcgccgttcccgatgaattactggtaacaccacaccacccttacacacaagcgttaagccgcgctatccctgattttggtagttctttgccccataaaagcaggttaaacaccttatcaggcgctattccatcccttgagcatttacccattggctgccgtttaggtccgcgttgcccttatgcgcaaaaaacgtgtattgaaacaccacggttgcgggtgattaaaaaccacgcttttgcctgccactttccactaaatctggaggaacagtaa

SEQ ID NO: 6283 - DNA, 891 bp, Photorhabdus luminescens
atgcccttagataatttttatcgtgaaaagaaaatgccgtcaccgataaaggtcatctggcgctttttctattctgacatgttggcaatgatgggattttatggggtgctgattctgatcgccctaagtctgtttggtggctatctggccccctataagctcgatcaacaatttcttggtcatcagttgctgccaccttcatggtcatatcacggtaatatcgcattttttctaggtaccgacgatcttggacgcgacattctcagccgattactaataggtaccgcctctacattcggttcagcgctgttagtcactttggccgccgctttatgtggtctgattatcggctgtctggcaggcatgacacgaggactgaaatccgcggtgctcaatcatattctcgatacattactctctatcccatcactcttgttggcaattattgtcgtcgcctttgtgggtgccagtttgcagcatgcaataatcgctatttggttggcgctattaccacgtatcgttcgcacagtttacagcgctgttcacgatgagctagataaagaatatgttattgccgctcgcctggatggcgcttctaattaccacattctatggtacgccgtattacccaacattaccgccgccttggtcaacgagctaacacgcgccatttctatcgccatacttgatatcgcttcactgggttttctcgatcttggtgcccaacttccctcacccgaatggggggccatgttgggcgattcactggagctaatctatgttgcgccctggaccgttatgttgcccggcgcggcaattatgttctgtgtcttgttagtcaatttattaggtgatggattacaccgagcaattaattccggggtggaataa

SEQ ID NO: 6284 - DNA, 966 bp, Photorhabdus luminescens
atgattatttacactctccgccgtctgctattgctgattattaccctgtttttcttgtcactgataagctttagcctaagttactttacccccaatgcgccactcagcggggcatccctatttgatgcttatatcttctatttcaacagcttattactatgggattttggcgtatccagcattaatggtgaacttatcagcgaacaactacgggaagtgttccctgccaccatggagctctgtattctggctttctctaccgccttactcgtcggcatccccctcgggattattgcgggagtatggcgtaacaaacccgcggatactgttatcatctccattgctttggtcggattttccatcccgattttttggctagcattattactcacgctatttttctctctttatctcggctggctacctgtctccgggcgctttaatctgctatatcagattgaacctgtaacaggtttctcattaattgatgcctggttatcaaaatcaccctatcgtaatgagatgatcattagtgccatacaacacttgctgctgcccgttattacactcgccgttgcaccgacaaccgaagttattcggttgatgagaaacagtacagaagaagtttttggtgaaaactatatcaaagccgccgcaacccgcggtttatcaaggctgacaattatccgtcgtcatgtgttacacaatgcattgccccctatcattccgaaactaggattacaattttccaccatgctgacactggcaatgatgacagaactggtatttaactggccggggcttggtcattggttagtcagtgccattcgccagcaagattattccgccatttctgccagtgttatggtgattggcacactggtgatttctgtcaatgttctgtctgatattattggcgcaatgactaaccctctgaagcataaggaatggtatgcccttagataa

SEQ ID NO: 6285 - DNA, 1665 bp, Photorhabdus luminescens
atgcgcagtttgatttattggatcatattatccctttcagcaccggctattgcagaaacaataactacgcctgaaaaaaatccccacgttccgactgacattcagcaacaagggttcatttattgtgttaatggcaacctgaacacctttaatccccaactggctagcagcggtttaactgtcgatacactggcagcacaactctatgagcgtctgctagatgttgacccttatacttatcgcttactccctgaattagcctcccattgggaaatactggataacggtgctacctaccgtttttatttgcgccataatgtctcatttcaatcaacagactggtttactccgacccgtaacatgaatgctgatgacgtcattttcagctttaagcgtctgtttgataagcaacactattatcacaacgtcaatggcgggcattacccctattttgacagcctccaactggccgattctattcaaagtatccgtaaacttaatgaatatacggtggaatttcgtttgaacgaaccagatgcttcttttctttggcatttggcaacccactatgccccaatactttcacaagaatatgggcaacaattgcatcaaatgaatcgccatgaacaaattgactggaaacctgtcggcacaggcccatttatgttggaagatcatcggaccagacaatttatccgtctggttcgtcatgataaatactggaaaggcaaaccacaaatgcgccagatagttattgacgtcggtgccggcggcaccggcaggatgtctaaacttttaaccggtgaatgtgatgtattagcgtatcccgctgccagtcagcttactgttttacgagatgatcctcgcctgcgtctaactttacgcccaggaatgaatatcgcttatctggctttcaataccagcaagccaccgcttgataagctacaggttcggcaagctattgcttacgctattaataaccaacggctgatgcaatccatctattatggtacggcggaaaccgcctcatcaattttacctagagcgtcatgggcttatgataatcaaactgaaattacggaatataacccagaaaaatcccgtaaaatacttaatgatctcggattgaatggcttgcaattgagtttatgggtaccttccgcctctcaatcatataatccaagtccactcaaaatggcagaactgattcaggccgatttagcccaagttggtattaccatgagcatcaaacctgttgagggccgctttcaggaaaccaaactgatggataaatctcacgatatgacattatcaggctggtcaactgacagtaatgacccagacagttttttccgtccactattaagttgtgcggctatcgcttcacaaacaaatttcagccattggtgtgagccaacatttgataaaattttgcgggaagctttgattaaccagcaattattatcccgaattaaatattatcatgcggctcaacaagtccttgagcagcaattacctatattaccattagcctattctctgcatttacaggcctaccgtcatgatattaaaggactagtactcagtccatttggtaatacctctttcgctggcgtttatcgggaaaaagagactaaccaaatcaatcagaagggtagcaaatga

SEQ ID NO: 6286 - DNA, 1023 bp, Photorhabdus luminescens
ttgtcggtgaaaataaccatgaatgacgccacagaaaacctattgggtgaagcaaacagctttcttgaaattctggagcaggtatccgcgctggcaaaattaagcaaacccgttatcgtgattggggaacgcggaaccggcaaggagctgattgcccgccgtttacattatttatctccccgctggcaaggcccatttatctccctaaactgcgcggcgctgaatgaaaatttattggattcagagttatttggtcatgaagctggcgcatttaccggggcacaaaagaggcaccaaggaagatttgaacgtgctgatggaggaacgctatttcttgatgaattggcaaccgcaccaatgcaagttcaggaaaagctattgcgtgtcattgaatatgggcatcttgaacgcgttggcggcagccaatcattacaagtcgatgctcggctgatatgcgcaaccaatgataatctgcccgcaatggcagctaaggggcaattccgcgctgatttgctcgataggctggctttcgatgtggttaatatcccaccattgcggcaacggcagcaggatatcatgttgttagcgcaacattttgctattcagatgtgccgcgaacttgatttacccctatttcccggtttcactgaccaggcaaggcaacagttacagaattacacgtggcccggtaatattcgtgaactgaaaaatgttgtggaacgatcggtttatcgtcacggcgaaaattctgctcaacttgataatattattattaatccattcgcctccacaccacattttattgccaatgttgatgatagtcatgatttatctccacaacttctgccttcattgcctgttaatttgaaacagtggcaacatgacagcgaacgacaattaatagcgttatcattaaaagagagcagatttaaccaaagaaaagcagcagagaaactacgactgacctattatcaattacgaggcttaatgaagaaacatgatatcaacgtcggcgagaagtaa

SEQ ID NO: 6287 - DNA, 675 bp, Photorhabdus luminescens
atgagtattttttctcgttttgctgatatcgtgaatgccaatatctcttcattactggataaagcggaagatccgcagaaaatgattcgtctaatgattcaggagatggaagacactttagttgaaattcgctcaacttccgcccgtgctctggcagagaaaaagcagttatctcgccgcattaccgcaggtgaacaacaaatgcacgattggcaggaaaaagcggaactggcgttgaataaagagagagaggatttggcgcgggccgccctgcttgaaaagcagaaagtggctactttagtggatacattgaaacacgaattgaccatactggaagagacacttgagcgaatgaaaggggagattgttgagcttgaaaacaaacttagcgaaacccgagcaagacagcaggcgttggctttgcgtcatcaggcggccgcctcttcccgacaggttcgtcatcagctagacagcggtaaaattgatcaggcaatggctcgcttcgaacaatttgagcgccgtatcgatcatatggaagcggaagcagaagccgtgggcatgggaaaacaaaaatcgttggatcaacagtttgctgaattaaaagcagacgatgaaatcagtgcgcagttagcggcaatgaaggctaaaataaatgctaataaagaacaacattaa

SEQ ID NO: 6288 - DNA, 219 bp, Photorhabdus luminescens
atgggctctatatttcttggcattccgctgactatttttgtactttttgtgttacccatctggttgtggttgcattataacagccggaattccaatcaaagccagttagatcagaatgaaattcagcgtctggcagagcgtgttcaacatatgcaggcacgaatcaaaacattggaagatattctggatgcggaacatcctgattggaggcaatcataa

SEQ ID NO: 6289 - DNA, 354 bp, Photorhabdus luminescens
atgtcgaatggtaaccgccggaaactgtatcgaatacccgaaaagggtaaaattaaaggtgtttgtgctgggttggcctattattttgatgtaccagtacgtttaattcgagccatcgcggtattgtcgctcttctttggcctgtttggttttgtggttgttgcttatattgtactggttttcgtccttgatccggcaccctcggaatataccgaagaggcccatttttcagcacaaaacttgctgaatgaaatcgactatcaattgaaatcgggagagattcgtctgcgccaaatggagcgttatatcacctcagaaacgttcagcgttcgcagccgtttcaggcagctttga

SEQ ID NO: 6290 - DNA, 1398 bp, Photorhabdus luminescens
atgaaacggctacaaaatgaattaactgcgctggttaatcgtgggatggatcgccatttacggctagctgtaacaggattaagtcgtagtggtaaaacagcgtttatcacatctttggttaatcagttacttaacctccatagcggtgctcgattgccgctattttctgctgtacgcgacggtcgcttgttgggtgtaaaacgggttcctcaacgtgatttaggcgttcctcgttttacttatgatgaagggttgaccgcactttacggcacaccacctgcctggccgaccccgacgcgaggtgtcagtgaaatccgtctggcacttcgttaccgttctggcgattctctgctgcgccattttaaagacactgccacgttatatctggaaattgtggattatcccggcgaatggctgttggatctaccgatgttggcgcaaagctatttggcatggtcacatcagatgaatagcttattgcagggacaaagagctgaatgggcaaaaccttggttggaactttgtcaacagtgcgatccactggcacccgcagatgagaatctgttggctactattgctcggtcctatacggaatatttgattaaatgcaaagagcaaggcttacattttattcagccggggagatttgttctgcccggcgatatgatgggcgctccggctttacaatttttcccgtggccggatatcaaccctatcactgagtcacgatttgctcaggcagatagacacacgaatatcggtatgctgcgtcagcgctttgaatattactgccagtcggtggtgaaagggttttataaagcgcattttctacgttttgatcggcagattgtgttgatagattgtttacagccattaaacagtgggccacaagcatttaatgatatgcgtttggcgctggcacaattaatgcaaagttttcattatggtaaacgaacgctcttccgccgcctgttttccccttgtattgataaattaatgttcgctgccagtaaggccgatcacgttaccgcagatcagcatgctaatttggtttctttactccagcaattggttcaggaagccagacaaaatgcggtttttgaaggtatcagcatggattgtgttggcctggcatcggtacgggcgacagaaagtggcatgattgaacacaatggtgaaagtattccggcgttgaaaggatatcggcttacagatggtaagccgctgacattttttcccggagaggtgccacggcgtttacctgaggataacttctggcaaaaacagggtttctccttcgaggagtttagcccttgtccggtaaatgttgatacaccattgcctcatatccggttggataccgtgctggagtttttagtgggagataaagtgaaatga

SEQ ID NO: 6291 - DNA, 1065 bp, Photorhabdus luminescens
atgacggagcctttgaagccaagaattgactttgcagaatccttatcggggccacaagagccggtcttaaagcctgcccagatctttaatgaaaaagagacagcgaatttttgtcctgcttcaccagaacttgaggctgaagaacgcgaaggtcaggtagaagggatagttaatgcagcactgaaacctaagcgtagtggctggcgtaaaatggtatatggttctctgatgttattggggctgagtgcggttgctcagtttgtgcagtggatttatcaatcatggcagcaacaggattggagcgcattaggtgtagcggccgccgggagcatgattgtctttgcgggaataggttctcttgtcagtgagtggcatcgtctttatcggctaagagtgaggtctgaggaacgtgatactgcgagagcgttattgcaacatcatggcgtgggtaaagggcgggaattttgcgagaagttggcaagtcaagcgggtatcgaacagcataacccggcgttacagcgctggcgggctgctttacatgatacacataacgatcgtgaagtggtggtgttgtacagtaaatgggttcaacctgttttggattctcaagtcagggctgaaatcagccgctgtgctgcggaatcagcattaatgatagcagttagcccgttggccattgtcgatatggcatttattgcctggcgtaatatccggctaattaatcgtattgcagctctatatggtattgaactgggatatttcagtcgtattcggctcttccgccttgttttgctgaatattgttttttctggtgcttcagaagtggtgcgggaagtgggtatggattggttatcgcaggatatcgctgcgcgcctttctgtcagagctgctcaagggatcggtgtcggtttactgactgcccggttgggtatcaaagcgatggaattatgtaggccattaccttggatagaaggtgataaacctaaattaggagatttccgtcgtcagctaatcactcaacttaagaatatcctgccaaataagtctaagaatatagttaattaa

SEQ ID NO: 6292 - DNA, 1584 bp, Photorhabdus luminescens
atgcgcttagaagttgtttgccatgatcgaattgggctgacccgtgaactgctcgatctactggtattagagaatattgatttaaaagggatagaaatatctcaaatcggccggatttaccttaatttttcaccagttgatttcaatgtatttcgtaaattgatggcagaaattcgccggattaatggtgttattgatgttcgtaccgtctcttttatgccttcagaaagagaacacaaagcgatgtgtgcactgttggaatccttgcctgagcctgttttttcagttgatctgaaaggaaatattgagcttgctaactctgcggtgtttaagctatttggtgttagtgaagaacaaacttatcaaaaacctatcgggcagtttatcagcggttataatttttcgcgctggtttgaaaataaaaatatccagcaacgtgtggaaaggataacgctcaaaggtctggactacctgatggatattacgcctattcaactgatggatgaaaagcagaaaatgcaatgtgttggcacagtgattatgctcaaatctgctgctcgaatagggaatcaactgaaaaaactgactgtcaatgatggtagtgagtttaaggcgattatcgctgttagcccaaaaatggctcagattattgagcaggcgcgtaaaatggcgatgctggatgcgccactgttgctgattggcgagacaggaacgggcaaagatattctggcaaaagcctgtcatttgcacagcttacgcggaaagcagccctttttggggttgaactgcgcatcgatgccggatgatgtagtagaaagtgaactgtttggctatgctgctggcgcttatcctaatgcgattgaaggaaagaaaggtttcttcgagcaggctaatggtggcacggttttactggatgaaattggtgaaatgtcgccacagatgcaaattaagctgctacgttttcttaatgacggtactttccgccgagtaggggaagaaaatgaagtcaaagtgaatgtcagagttatctgtgcgacacaaaaaaatctggttgaattggtgcaacgaggggaatttcgcgaagatctctattatcgccttaatgtgttggcgattacgctcccgtcgttgcgtgatcgtaaaacagatattatgccgctggtggagtattttattgagcgtttttctgaagaacagggagtaccgaaaccgaaattgtcccctgaactttcccactttctgacgagttacagttggcccggtaacgtaaggcagttacaaaatgccatctatcgggcgctgactcagcttgaaaatatggagttgacgccgcgggatatacaactgccagagtttgaaacagaggtttcttttagtgaagatgtgttcaatggttctctggatgaaatcagtaaacgttttgaacgttcggtgttaacgcgtctttatcggcactatcccagcacgcgtaaactggctaaacgtcttggggtatcgcatactgcgattgccaataaattgagagaatacggtctgagtagcaggaagcatgctaccgaatatgagccggatggtgacgaataa

SEQ ID NO: 6293 - DNA, 504 bp, Photorhabdus luminescens
atgacacaaacagtaaaatttcaaggcaatgatatctccgtaagcggccagttcccaaaatcaggggaaaaagcgcaagattttactctgacagccaaagatctctccgatgtctctcttagccactatgccggaaagcgtaaagtgctgaatattttcccaagtatcgataccggtgtttgtgcggcatcagtacgcaaatttaatcaggtagcgagtgatttggaaaataccgtcgtactgtgcatttctgccgacctgccttttgctcagtcccgtttctgtggtgcggaagggttatcaaatgtcgtcacgctgtctaccctgcgtggcggtactttcagtgaagattatggcgttgccatcagcggtagtcctctgagtggtctcacagcccgtgcagtcattgtgcttgatgaaagcgataacgtgatttatagccaactggttgatgaaatcactaatgagccagattacgatagcgcactggccgcactgaaataa

SEQ ID NO: 6294 - DNA, 1623 bp, Photorhabdus luminescens
atgcgctatttcaatttgatttcttgtgcactacttatcaatagttctcttatcaccgtttctgcttttgctgcggaagttccttctggcactcagcttaatgacaaacaggaactggttcgtcacctaaaagacgaaccggcatccttagacccgattaatgccgtgggtttgaccgaggcgcaagttcagcgtgatctgtttgaagggctggtgaatcaggacgcgtatggcaatgcgattcccggtgtagcaatagcgtggaaaacagcagacaacaaaacttggttttttaccctgcgttctgatgcccgttggtcaaacggcgaacccgttaccgcgacagattttgtatatagttggcagcggttggtcactccggctaatacgtcatcttttgcttggtttgccgcactagcaggtattgaaaatgctcaggaaattattgacggtaaactgctaccagcaaaactgggtgttgaagccattgacaagcacacattaaaggtgacgttaaaccggcctgtgccttattttcccaacctgactgcgaatttcagtctctatccggtcaataagaaagtagttgaaaaatatgggaaagagtggataaaggttggtcatttggtggggaatggggctttcgaattacatgatagaattgttaatgagaaaatcgttctgacatcaaacccttattactgggatcataaaaaaaccgtcctgaccaaagtcacattcgtacccattaatcaagaatcgcacgcgactaaacgctatctggcggatgatttggatatcaccgaatccttcccgaaaaatatgtataaaaaattgcagcatgaattatctgggcaagtctatacgccggatcagttggggacctattattacgcttttaacacccaacgtgcaccaacgaatgatgccagagtgcgtaaagcgctttctatgaccattgaccgtaaaattattgcggaaaaagtcttggcgacaggggagaaacctgcctggcattttacgccggatgtgaccgcgggtttccatcctgtgatcagtgacatggaacaacatacgcaagcagaattggaccaacaggctaaagttttgttacacgcggcgggttacggtccgaacaatccactgaaactttctctactctataataattccgaaaatcaccaaaaaattgcgattgcgattgcttctatgtggaagaaaaagttgggtgtacaagtgaatttggtgaatcaggaatggaaaacgtatattgatagccgtaacacaggcaattttgatgttattcgtgcatcttgggtgggtgattataacgagccctcgacatttctaagcctgctaacttcaacgcatagtggcaatattgctaaattccatcaggcaaattacgacaaactactacaatctgctagtttgcgaacagatgatggcttaagaaacgatgactataacaaagcggagcaaatgattgctgaacaggcacctattgcaccgatttatcagtacactaacggcaggttgataaaaccttggttaaaaggatacccgatcaccaatccggaagacgtggcatatagtcatactatgtacataattaaacactaa

SEQ ID NO: 6295 - DNA, 984 bp, Photorhabdus luminescens
gtggaaaccatttatggctcatcattgaaagaggctgatgcagtctatgcttgtcagtttgatggtcaaggcggcatgacaccaattgacatgaatggagtagccacaccagttcaacctttttggcaacatttggattaccgtaaccccaagagctaccgctggctaatggacactgatttgttaccagaaacggttaaagcggggttggctggagagagtcttaggccgaaaataatgcgtaccggcgatggtacgatgattacatttcgaacaattaataacagtgagagtgaacgccctgatcaattagtggtatttcgtatttatattaattctcagatcgtcatttccagtcgccatcgtaaagttcattcgcttgaacaggtactgagtgatttacaaaatggtataggtgcgaaaacgaccgggcattggttggttgaaatggttgatgcaataaccgatgaagtgggtaattttattgaagatcttcatgacaatctgattgagcttgagaatatgattcttgagcaacggatacctgggcggggtgggttagctttgttgcgtaaacaattgattattctgcgtcgttatatggcacctcagagagatgtatttgcccggcttgcgagtgaaaaattactttggatgagtgatgaagatcgttaccgaatgcaggaaatatctgatcgcttgggaagagaattggatgatttggatggttgtattgctcgcacggcaattatttcagatgaaattacatcgatgatggcggatgcgatgaatcggcgtacttatactatgtcattacttgctatgatttttttaccgacaacattcctgaccggattatttggtgtcaaccttggtggtattcctggcaatgaatattatttaggttttgctatcttttgcttattgttattcgggttggttttatttgttgcgtggtggttaaagaaaagtaaatggttgtga

SEQ ID NO: 6296 - DNA, 225 bp, Photorhabdus luminescens
ctgcttctctttcactttcgcctcgatttttttattttcctaaaacaacaaatgaaaaataaaaaaagccgatattataaaataatatcggcacaagaatgggcaattattctgtataaagacttatgtgagaaaaactacaattacggagaacaacgttcatcgcttaacgttgttttcacctgcgagagctatcatgcctcaatgatgtctagtgaatattga

SEQ ID NO: 6297 - DNA, 921 bp, Photorhabdus luminescens
gtgtccgtggtggatcaaaaacaacaatataatctgaacaaattacagaagcgtttacgccgtgatgtcggtcaagcaatcgctgatttcaatatgattgaggaaggcgatcgtattatggtctgcctttctggtggtaaagacagctataccctgctatctatcctgcaaaatctgcaaaaaagtgctccggttaatttttcacttgttgcagttaatctggatcagaaacaacccggctttcctgagcatatccttcccgcttatctgggtgaactgggtgtcgaatataaaattgtcgaagaaaacacttatggcatagtgaaagaaaaaatacccgaaggtaaaacaacttgttcactctgttcccgcctgcgccgtggcattttatatcgtacagccactgagttgggcgcaacgaaaattgcattaggccatcaccgtgatgatattttgcaaaccctatttctcaacatgttttatggcggcaaactaaaaggtatgccaccaaagttgatgagtgatgatggtaaacatattgtcattcgccctctcgcttattgtcgcgagaaagatattgagcgctatgcaaccgccaaagcattcccgatcattccttgtaatctctgtggttcgcaacccaatctgcaacgccaggttatcaaggatatgttacgggaatgggataagcgttatccgggcagaattgaaaccatgtttcgtgcagtgcaaaatgttgttccgtcacatctcagcgattttaatctgtttgattttaagagtatcactcacggcagcgaggtgattgatggtggtgatctcgcctttgaccgcgaggaattacccatgcaacccgttgttgatatagaagatcaacccaattatcaatcagaacggttggatattattgaagtcaaatag

SEQ ID NO: 6298 - DNA, 183 bp, Photorhabdus luminescens
atgaggatcgctcatactctaaattctgttgataaccgatatcagaatggagatgaaaatcaaattacggtgttgcaattcaatcatggtctggctgttattcagaatgtcaattatcagccggtaaactttattaaactattagataaatcttccctattgctaatgatagcgggttgttag

SEQ ID NO: 6299 - DNA, 465 bp, Photorhabdus luminescens
atgctatggattagagaagactatgggatttttcgcagatctatttatagagcatttattatgaaaatattagacctaataaccatcatttccgttatttttctcttcttttttttcattatatcaataactatttacaaaataaaccaaagtaaaatggataaaattattgaatcatatataggaaaaggactttatttatcagcaggcgtaaagctgggccgttttttgggtgtttatggtcagtatcaggttgcgatatttttttatatgctactcactggaagaagaatgagaatcaatgaaaaggatagaaaatatatgtatcaagaatcttataactttattcaaaacctaccttccagtttaactcattggataaagatatatttcatcaccattaatataagtggtgtattcttcttcataacaatgataacatttctattcagagaatacgcttaa

SEQ ID NO: 6300 - DNA, 414 bp, Photorhabdus luminescens
atgagcatattagatttgataatgacaaaatgtcttttcttatctcttttatttttggttatatcaatagccatttataaaataaatcaaaaaaagatggataaaattattgaattatatatagaagaaggattttatttaccaacaggcataacaatacaacgcttcggaaggatgcgtgatcagtttcaagtcgttatgttcttctacaggctgttaactggaaaaaaaatgaagataaatcagcctgatagtaaatatatgcaccaagaatcctataactttattcaaaatctacccttcagtttaacgcattggatgaaaatatgtatcattaccacttatataggtgcagcattttctctcatatcaacaataataatcttaattcaaaagtattatttttcgtgctaa

SEQ ID NO: 6301 - DNA, 1008 bp, Photorhabdus luminescens
atgaaaagaaacattcaacccggtttctgtgtcgtacagcaacctggaggattaagttttcaagccagtctgttattcagccattcaaatagcgaagcggctcgctattttatggcattaaattcaaattaccgattcctgaaaccggggcaaattctgctggtggcagatccagactcttataatccgccccacatgatacagctattaagacaatctcagtatcaggtcaaccaatccgtttcagctctgcctaatgaatccgcagcatttttgcatcgtcattttggtctgtttcactatgtactggatcagggaggaaccttagttggcaccgcatcgtcactgggtgatacttatttctcccaaatcaaaaaaaatctgtcaaagttacagaagctttatcaaagagaatatcggttaaatgggctaaaccgaaaatttgccagtcccgagttttatgtagaaagacaactgattatgggtaacctaaagggattattaaataaagttggccgactctctttgaaaatcgatcaacatcctaatttaaaacatgcgctaaagttatcaaccaaagccattgctcaccaatgggataaagcagggattggcgcaataaagggatatagtcaaacaattttacaaagtgaaaaaatgattaaatggatgaaatatggtggccgggttgccattggtctggattttgttgataccaccgggcaggttattgatgcctgtaattatgggcaagcaggaaaatgtgaaaaagtaaccatcaaggaatatagtaaatttgctggtagaacaggaggtgggatagccgtaggatatggtggcagtatagcagcaggagcagcatgtgttgcccttgggtttgcaactgaaggattagctgttggaatttgcatggcgggcggcggtttaactggtggggctataggtagctatggatttgagaagactatgggatttttcgcggatatatttatagagcattttttatga

SEQ ID NO: 6302 - DNA, 480 bp, Photorhabdus luminescens
atggcaaatatgatttatgtgacgataaaaggtgaatctcaggggcttatttctcaaggatgttcgactttggattccattggtaatcggtatcagcatggacatgaaaatcaaattatggtgttgcaattcaatcatggtctgacagttgctcagaatgttaattatcagccggtaaacttcattaaactattagataaatcttccccattgttaatgatagcggcagctaatcatgaaagactggagttgacatttgatatttatcggacttctcaaataggttcacaggaacttttttattccatcttgctcaccggggcaaaaatttgtgatttaaatgttaattgtccgcatgttattaatgataataacggccagccggaggaagttatttcagttcagtatgttaatattacttgtcggcatcatatggcgggaacatcaggatattgcatttgggatgagatggtttattga

SEQ ID NO: 6303 - DNA, 135 bp, Photorhabdus luminescens
atgttgtccaacgttgagccaacatatgttactcttggcgcaacaactgaaagattagctgctgaaatttgcatggcgggtggttatatggatagtaaaggaggaaaatggcttattaaacttattgttgaataa

SEQ ID NO: 6304 - DNA, 333 bp, Photorhabdus luminescens
atgaatggatttgtatatttagcaatggcaattgttgctgaggttatcgcaacggcttcattaaaagcctctgatgggtttagtaaattattcccttctatactggtcattgttggatacggtatcgctttctgggggttatctcaggtggtcaaagttgtgccattaggaattgcttacgccatatggtctggcttgggtattgtgttggtttctattgccgcgatatttttatatcaacagaagctggattgggcggctattttaggtatggctcttattgttgccggtgtaatggtaataaacctgctttctaacagcagtgcacattaa

SEQ ID NO: 6305 - DNA, 318 bp, Photorhabdus luminescens
atgttaaatgccagtaataagaaaggattccagacagtgttattaggagtcctctttagtattgctgtattagcgggttgtagtcgccagacagggaaaacagcgactcaatatcaggggatacaatactctcaaccggaaaattctcaaccggcagttgctcttagggataatgccagagcaatctgttcttatgtaggtggcatgcctgcattagcaatacaattaaatggtgcgcaaatacctgtttgccagttggcaaatggtaagcgttgtgatgaaagggcattgttgcaaggttcttgtgcgtcaagttga

SEQ ID NO: 6306 - DNA, 510 bp, Photorhabdus luminescens
atgatgcgatttttgaaccactgttctcaaggacgaagcgcatggctgttaatgattttgactgccctgatactagaaagctcggcattatattttcaacatgtgatgaaattacaaccctgtgtgatgtgtatttatgagcgggttgctctgtttggtgtgttgagcgctgggatattaggtgtaatcgcaccaaaaacgccgttacgctggctggctattattttgtggatctacagtgcctggggtggcctgcaactcgcatggcaacatactatgatgcagttgcacccttctccatttaatacctgtgatttcttcgtaaacttcccttcatggttggcgttaaaccaatggcttccttctgtattcgaagctacaggtgattgttcagtaagacagtggcaattcctgacattagagatgccacaatggctagtcggtatttttgctgcttacctagtggttgctgcattagtattaatcagccaattttttagccgtaaataa

SEQ ID NO: 6307 - DNA, 1548 bp, Photorhabdus luminescens
atggaaaccagtatcctaaaaacagcggtaaaaaactttctcggcaactcgccagattggtataagctcgctatcatcatctttctcatcatcaacccattgatattcttttttattaatccatttgtcacaggctggctgcttgttatcgaatttatctttacgttagcaatggcacttaaatgttacccgttacaaccgggtggcctgttggcaattgaagcggtcatcatcggcatgacctccccgcaacaagtcggtcatgaaattgctaataacttggaagttgtactgttactgatatttatggtcgcaggaatttactttatgaagcaattactattatttgctttcactaaactcctgctctccataaaatctaaacgtatgcttgccttagcattctgcctagccagcgcattcctgtcagcatttcttgatgctctgacagttatcgcggtagttattagtgtttcccttggcttctattctatctacaacaacttcattactgatcagaatgatgtcattaacgctaaacatgacaatcacattgatacagcaaaaaagaaacaaactcttgaacagtttcgcgcttttttgcgcagtctaatgatgcatgcaggggtaggcactgcacttggtggtgtgatgacgatggtaggagaaccccaaaatctgattatcgccaaaaacgttaattgggattttgtcaccttctttattcgcatggctccaattaccctacctgtctttatctgcgggctactagtctgttttctggtcgaacactttaaactgttcggttatggtacagaattgccagaacgcgtccgacaggtattggaagattacgataaaaaaaccagcgcaaaacgaacacataaagaaaaagcacagcttattgctcaagcgctaatcggtatatggctcattgtcgcgctggcgtttcatctggcagaagttggtctgattggcctttccgtcattattctaaccacgtcgttctgtggtattaccgaagaacatgcactgggtaaggcatttgaagaggcactaccgttcacggcattactgactgtattcttttctatcgttgccgtcattgttgaccagcaactgtttacgccatttattcagttcgtattacaggtttctgaaacttctcaactttccctgttctatctgttcaatggcttactctcatcagtatcagataacgtatttgtcggtacggtttatatcaatgaagcaagaactgcgatgcaagagggcctgatttcacataaacaatttgaatatctggctgttgcgattaataccggcacaaacctgccttccgttgccacacctaacggacaagctgcatttctattcctgttgacgtcgacattatcgccattgattcgtttatcttatggccgcatggtgataatggcactaccttataccattgtcatgacgctggtcggtttgctgtgtgtagaatttctgctaattccagtcactgacatgatggttcattggggcctaattgctttgccataa

SEQ ID NO: 6308 - DNA, 720 bp, Photorhabdus luminescens
atggtcattaaggctcaaagtcccgcaggttttgcggaagagtatattattgagagtatatggaacggccgttttcctccaggctctattcttccggcagaacgtgaattatctgagttaattggtgtgacaaggaccaccctgcgtgaagtattgcagcgtttggcacgtgatggatggttaacaattcagcatggcaaaccaacaaaagtgaataacttttgggaaacatcgggtcttaatattttagagactctggcccgtcttgatcacgatcgcgttcctgagttgattgataatctactggcggtgagaacgaatattgcagcgatatttattcgcacggcttttaagcataatccgggtaactcattggaagtactggcagaaaaggagcatgtggaagataattcagagtcatttagtatgctagattatgatattttccgtggtttagcttttgcttcaggtaatccaatttacggccttattatcaatgggttgaaagggctatatacccgtatagggcgttattacttctctaatcctgaggcgcgtaaattggcgctgaatttttatcagcaattggtgatattatgtcgtgatcaatcttacgataacgtcatggaatgtgtacgtaactatggtaaagagagtggtgtcatttggcacagtatgcaaagtacgatgccaagtgatttgtctgaagtgtatcgctga

SEQ ID NO: 6309 - DNA, 1314 bp, Photorhabdus luminescens
atgatgaaaatccttattttaggtagtggtgttattggtgtaaccagtgcctggtatttggtacagcaaggtcatgaagtcactgtcattgatcgccagggaagtgctgctgaggaaaccagtgcggcgaatgccgggcagatctcaccgggatacgcaaccccgtggggagcgccgggtattccattgaaagcgattaagtggatgtttcaacgtcatgctccattggctattcgtccggatggatcgctgtttcagttacgctggatgtggcagatgttgcgtaattgtgatgcaagtcactatgcgataaataagagccggatggtacgattggcagagtacagtcgtgactgtatcaaacagttgagggctgatacgggtattcaatacgaagggcgtcagagaggcacgcttcagttattccgcaccaataagcagtttgataatgcggtgaatgacatcgccgttcttgaacaggaaggtgttccttacaatttattaacggcagataaactcgcgacagtagagccggcattggcgcatgccgctcacaaactgacggggggcttacaattaccgaacgacgaaacgggtgattgccagctttttaccaaagagttggtaaaaatggcagaagcggcaggtgtaacgtttttgtttaataaacaggtcaaacagttattggtggaagggcatcggattatcggcgtccagtgcgaagatggtgttatgacagcagacaactatgttgttgcaatgggagcttattccactgaattactgaaaggtcttgtcaaaattccggtatatccactgaaaggttattcattaactatgcctattgtcgatgcggaacgggctccggtatctactgcattggatgaaacatacaaaattgcgattacccggtttgataaccgtattcgtgtgggtggaatggcagaagttgtcggtttcaatttgaatctgcttaaagcacgtcatgaaacattgaaaatggtggtgcaagacctttatccaggtggtggcgatattactcagactcatttttggacaggattacgtccaatgacgccagatggtacgccaattgttggtccgactgaatatcacaatctctacctaaatacagggcatggtacattgggatggacaatggcatgcggttccagtcaattactggcggatattatttcgggtaaaaagcctgctattgcatctgatgatttatccgtatttcgttatgttaatggttttaatacaaaattggtgccatttagccatcaattacacactgaactgagaggctaa

SEQ ID NO: 6310 - DNA, 1089 bp, Photorhabdus luminescens
atgccacgtccgatttcggcaacgatccatcttgatgcattggaaaataatttggcgattattcgtaataaggtcggtaatagtaaaatctgggctgttgttaaagcaaatgcttatgggcatggtctgcattgtatatggcggtctcttgatcaggctgatgggtttgctttacttgattttcatgaagcgattttattgcgggagcaggggtggcagggtgcaatcttactattggaagggtttttcaaacccgaagatttgccaataattgatgaatatcagttgacaacggtggtgcatagccattggcaacttgaagcaatagaagcggccaatttgagtaaacccatcaatatttatctcaaactcaacagcggtatgaatcgattgggatttcctgcggatcaatatagcgcggttttatcattagcaagagggatccggcaaattgggcaaataacgttaatgtcacattttgcgaatgcggataaggataataaggagatcagcgttactgaacaacttaacgttattcattcggtgagtcagggattggatatttctcaatgtttggcgaattcagccgcttccttgtggtatccacaaactcatagagattgggtacgtcccggtatcgtgctttatggtgcctcacccagtggaaagtggaaagatattgccgatattgggttgaaagcggtgatgagtctgcaaagtgagattattgctattcagaatctcaaggcaggagataaaataggttatggcagtgaatatacagcgccaggccctatgcgagtcggtaccgtcgcctgtggctatgctgatggttatccccgttgtgccatgacgggaacaccgattattgttgatggcgttaggacccaagtattaggtacggtatcaatggatatgttatcggtggatttaacgccttgtccgcaggcccaaattggcagccctgttgaattgtgggggcaaaatttaccggtggatgatgtggcggagagctctggaacaattggctatgaattattgtgcgcattggcaaatcgggtcccggtatctataccctatggattttga

SEQ ID NO: 6311 - DNA, 753 bp, Photorhabdus luminescens
atgatcaacaaagctaaaattttagccacagtcgccgctttttgtctttcttcatctttagcttatgcgggacagtggtcaattggtgcctctgttttggctgaggcatcaccttataagggggtaaagaataaagataaagtgttgtttgttccaatggttaattatgaaagtgacaatttctattttcatactttagccgccgggtattatttgtggaatcaaccaaaagatcagctatctttagatgtctattactatcctcaaaatttccgcccaaaagataatgaagataagcagatgaaaaagctggatcgtcgccatgatactatgatgggcggctttagctatcgtcatattgaagattggggaacgttgcgtagctcttttgctgcggatacgttgggtaaaagtaaaggcataacgattgacctggcttatttatatgaatttaaaagtgatgattggtcattacaaccaggattaggtgtggtttggaatagtaaaaaacaaaatcgttatgaatatggcattaaagatagtgaatcacgccatagcggactagaaaaatataccccagatgatagctgggctccttatttggaattatctgctaattataaatttaaccaagaatggtctgtatttatgatggggcgtgttgagcgtttaccgagtgaaattaaagatagtccaatggttaataagtcatattcaagtattgtttggacaggtgttacatatagtttttaa

SEQ ID NO: 6312 - DNA, 996 bp, Photorhabdus luminescens
atgactatcaaagtaggtatcaacggttttggtcgtattggccgtattgttttccgtgctgcacaagaacgttcagacatcgaaatcgttgcaatcaacgatttgctcgacgccaaatacatggcttacatgctgaaatacgattcaactcacggtcgcttcaacggcactgttgaagtaaaagacggccacctgattgttaacggcaaagctatccgcgttacagcagaaagagatccagctaacctgaaatggaacgaagtaggtgttgatgttgttgcagaagcaacaggtatcttcctgactgacgaaactgcacgtaagcacattgccgctggtgcgaaaaaagttgttctgaccggtccgtccaaagatgacacgccgatgtttgttatgggagtcaaccacaaagcttatgcaggccaggagatcgtttccaatgcttcctgtactactaactgtctggcaccgctggctaaagttatcaatgataaattcggcattgttgaaggtctgatgaccactgttcacgcaacaacggcaactcagaaaacagttgacggcccttctgcgaaagattggcgtggtggtcgtggcgctgctcagaatattatcccatcatctaccggcgcagctaaagctgtgggtaaagttatccctgaactcaatggtaagctgactggcatggctttccgcgttcctacgcctaacgtatcggttgttgacctgactgtacgtctggaaaaacccgccacttatcaacaaatctgcgatgcaatcaaagatgctgctgaaggtgaactgaaaggcgttttgggttacaccgaagatgatgtcgtatctaacgatttcaatggtgaaaagctgacttctgtatttgacgcaaaagcaggtatcgctctgaacgataactttgtaaaactggtttcctggtacgacaacgaaaccggttactctaacaaagttctggatctgattgctcatatttccaaataa

SEQ ID NO: 6313 - DNA, 411 bp, Photorhabdus luminescens
atggctaagcatcctgaggtttccctttataaagaacttactgatattcagcgtcatgtaacccaaaatgccgggacagagccgccattctcagggaaattgctacataataagaaaagtggcgtgtatcattgtttgtgctgcgagcaaccgttatttatgtccggcactaaatttgattctggttgcggctggccgagtttttaccagcctgccactcatgatgcagtgcagtatcttgatgatgatagtcacaatatgcatcgtattgaggtgcgttgcggtcattgtaacgctcatttggggcatgtgttccctgatgggccgcagccgacaggagagcgtttttgtatcaactcggctgcattaagctttactgatgaaaatacaggcgaaaaaacagtaggttaa

SEQ ID NO: 6314 - DNA, 270 bp, Photorhabdus luminescens
atggaactggatgatctgttatctgtaatgacaccagaaatatatcaacgcttggttcaggcagtagaactgggtaaatggcaggatggtgtgcctctaacggtcgagcagaaagagaatagtttacaaatgattatgctatggcaatcaaggcataaccatgatccgcaacatatgacgattggtactgatggtcagttggtgatgaagagtaaacaagaactgaaagcgatctttcggtctaaaatggtggcaacattcaagccataa

SEQ ID NO: 6315 - DNA, 639 bp, Photorhabdus luminescens
atgaaaacagccctattacttattgatctacagaacgacttctgtaccggcggcgctttagccgtagaagagagtgaacaagtcattgttgcggcaaatcaggcaatggctatttgtctgaaacacaatatcagcactattgccagccaagactggcatcctgctgaacatatgagctttgccgtaaattccggccagaagatcggtgatatcggtctattaaacggtattccacaagtctggtggccggtacactgcgttcaacgtcagcatggcgcagatttccatccacagctaaacaagcaggcaattgttgaaattttccacaaaggcgaaaatccacagatcgatagttacagtgctttctttgacaacggccatcagaataaaacccggcttgatggctggttgcaaacccagcaaattgaacgtctgtttattattggtatcgccactgactattgtgtgaaatttaccgcgctggatgcgctggcattaggttatgaaacctgggtcattacggatggctgtcgaggggttaacctgagtccaaatgatagccaatcagccttaaaagagctaaaagagcaaggcgctatattgatagaacttgctcaactagaagatgctcttctctga

SEQ ID NO: 6316 - DNA, 1020 bp, Photorhabdus luminescens
atgcagaagaaatctatttatgtcgtctatactggcggaaccattgggatgcaacactcatctcagggatacatccccgtttccgggcacttacagcaccaattaacaaagatgcccgaattccatcgaccggaaatgcccacattcactatccgtgaacatcaaccattgatcgattcttctgatatgaccccagaagactggcaatttatcgctgatgatatccgagaaaattatcatgattatgatgggttcgtgatcctgcatggtacggataccatggcatttacggcttctgccctctcctttatgttcgagaatctgggtaagccagtcattgtcaccgggtcacaaatcccgctggaagcactgcgctctgatgggcagacaaacttgttgaatgcgctttatcttgccgctaattaccctgttaacgaggtcagtctgtttttcaataataaattgtttcgggggaaccggaccgtcaaagcacatgccgacggcttcgatgcttttgcctcaccaaactgttctccattaatggaagctggtattaacatcaaaaccttcaatgcatgttctgcccctgccaatcacagtgaatttattactcatcaaatcacccctcagcccattggcgtaatcaccatttaccccggcctttccagtcagattgtgaataatattttgatgcaaccggttaaggcgcttatcctacgctcatatggcgtcggaaacgcacctcaacaccctgaattattaaaagagctaaaacaggccacagagagagggatcgtggtggttaatttgactcaatgcatttctggccgagtaaatatggaagggtatgcaacaggccatgctctggctgaagcgggggtgataagcggctacgatatgacttttgaagcaactttaaccaagttgcactatttacttagccaaccttatagcaatgaaaaaattcgttatttaatgcaacaaaatttacgtggtgaattaagttatattgataaataa

SEQ ID NO: 6317 - DNA, 1866 bp, Photorhabdus luminescens
atgcgtattttatggaagttgatcgcaagattatttaaatggagttggcgactattaaattttattcgggaagtcatttcaaacctgatttttatcatgctgattctggtggtggttggcagttttctactttaccaacagacaaacaaaacggcagatagttatcaaggagcattatatgtcaatctcaccggtgttattgtggatcaggtctccaaccgtaccccattgactcaattaggccgtgagttgtttggtacatccagcaataaattccaggaaaactccctgtttgatattgttgatagcattcgccaagcaaaaaccgataacaaaatcacgggactggtgctgaaacttgatgatttcatcggtgccgaccagccatctatgcagtatatcggtaaggcgattaatgagtataaaacttccggtaaaccggtttatgctatcagtgatagttataatcagtcacaatattatctggcgacttttgccgataaaatctatctatcaccacaaggaacggttggtctttatggctattcaaccaatagcctgtattacaaatccctgctggattcgctgaaagtcaccgcgcatattttccgcgtcggcacgtataaatcggccgttgaaccggttatgcgtgatgatatgtctcccgctgcccgcgaagctgatagccgttggatcaacggcctgtggcacaactacctcaatactgtcgctaccaaccgcaaactcactgttgatcaggtattcccaggcgctaatgagatgattgccagcttacgtgctgttggcggagataatgcgcaatatgcgcttaaacacaagctggtcgattacgttgcgccacgcaatgtcattgaaagtgacatgacaaaagcctttggttgggacgaaaaaaaccgccacttcaatgctatcagcatttatgattatgcaccgcaattggtagaaggcaggttatcatctaaaggcaatatcgccgttattgtcgcgcaaggggcaatcgtcgatgggcagcagacccaaggcatggttggcggtgacacaaccgccgctcaaatccgtcaagctcgtttggatgataatatcaaagctgttattctgcgagtaaacagccctggcggcagcgtgagcgcttcagatgttattcgcaccgaactggctgcgctacgtgcaacgaataaacctgtggtggtttctatggggggaatggcggcatccggtggctattggatcgcgaccccggctaattacatcatcgcaaaccaaagtacgttgacgggttcgatcggtatcttcggtgtcatcaccacttatgaaaacagtctggaacatattggtatccacactgatggcgtttctaccacaccactcgcgggtatttctgttactaaagggctcagcaaagagttctcagcactgatgcagcttaatattgagaacggctataacaactttattggccttgttgctacttcgcgccataaaacacgcgaagaagtcgataatattgctcaggggcatgtgtggattggtcatgatgcgaaaaccaatggattggtcgaccaattaggggatttcgatgatgcggtcaccaaagcggctgaattagcaaaattggataaccctgagcttgactggatgcaaccagaaatgtcattcagtgagttgctgatgagccagttgacaacaaccgcacaagctatcgtgccggaagcggttcaagcctggctacccgcgccattggtgcaggtagctcaggaagtgaaacaacagagtgagttctatcgccatctgaatgatccacaaaatcgttatgcattctgtttaaattgcggagatattcgctaa

SEQ ID NO: 6318 - DNA, 552 bp, Photorhabdus luminescens
atgaatgcattagaacttttgttgaacagacgttcagtatcacgtttaaccaccccggcacctcaaggtgaagcattacagcatattctggcggcgggaatgagagcacctgatcatggtgcattacgtccgtggcactttattgtcatgcaggatgacggtattgagcgattcagtcgattactccatcaagccgccattgatagtcagcttggcgctgaggcggaagaaaaagcgaaaagtgcgccttatcgtgcaccattaatcatcgctgttattgcaaaagtggtggagaattccaaaatacctgaatgggagcaggtggtttcagccagttgtgcggtgcatgcgatgcaaatggcggctgtggctcaagggtttggtggtatctggcgtacgggttcatggactgatgataataccgtgcgtaccggtttgggttgtcatgaacatgacaaaatagtgggttttctctaccttggaacgcctgcactaaaagcacccaataaggtgactgcgcctgatatgaccaattttgtcagctacttgtaa

SEQ ID NO: 6319 - DNA, 1044 bp, Photorhabdus luminescens
atgtcaacagaagttcgtcttacccaatacagccacggtgctggatgcggttgtaaaatttcaccaaaagttttggaaaccattctgcatagtgagcaggaaaaatttcttgatcctcacttactggttggtaatgaaacccgtgatgatgctgcggtttatgatattggcaatggtaccggcattatcagtacgacagatttcttcatgccgattgtcgatgatccatttgattttgggcgcattgctgccacaaatgctatcagcgatatttatgcgatgggcggtaagcctattatggcgatagctatcttgggatggcctattgataaattagcgccggaaattgcccgtaaggtgattgaaggtggccgggctgcgtgtaaagaggctgggattgtactggcaggagggcactctattgatgcgcctgaacctatttttggtttggctgtaaccggtatcgttaatattgaccgagtgaaacagaacagtgccgcgaaagtaggaagccagctatttctgaccaagccgcttggaattggtgtattgaccaccgcggagaaaaaaggcttgctgttacctgaacatcagggaattgcgatagaaaccatgtgtcgcttaaataaattgggaatggattttgcggaagtggctggcattacagcaatgaccgatgtaaccgggtttggtcttttaggccatttaagtgaaatttgtgcaggatcgggggttcaggcaacactccattttgcaaaagtgcctaaattgccggaagtggaatcctatattgcaaagggttgtgttccggggggaaccgggcgtaactttgatagttacggtcatcttattggtgaaatgacagaacttcagcgcaaactgttatgtgatccgcaaacctccggtggcctgctgttggctgttctaccagaagctatggacgaagtgaaagcgattgcacgatgtcatggcatcgaactgaccgcgattggtgaattgtctgagcaacagtcaggcagagtactcattgaggttaatgaataa

SEQ ID NO: 6320 - DNA, 1929 bp, Photorhabdus luminescens
atgcggctttttattgcagaaaaaccaagtctagccagggcgattgccgatgttttaccaaaaccgcatcgccgtggtgatggctttatcgcttgtggcgataaccagtttgttacttggtgtattgggcacttgctggaacaggcggaacctgatgcctatgacaatcgctttgctcgttggtcattagttgatcttcccatcattcctgaaaaatggcagttaaaaccgcgaccttctgttgagaaacagctcaatattatccagacgttgttggaaaaagccgatgaaatagtgcatgccggtgacccagatcgggaagggcaactgttggtggatgaggtgctggattttttgaaactggatgcagtgaggcgaaaaaatgttcgccgctgtttgataagtgatctaaatccacaagcggtaaccagagcggttgatcggttaagagataatcgggattttattccgctatgtgtttcagctctcgccagagctagggctgattggctttatggcattaatatgacccgtgcttataccttgcttggccgtaatgcggggtatcagggggtactatctgtcgggcgggttcagacccctattttgggtttagttgttcgccgggatgaagagattgagcatttcgtacccaaagatttttttgaggtgaaagcgcatattgttacgccgaaagatgaacgttttatcgctatctggcaaccaagtgaatcttgtatcgattttttggatgaagaagggcgattgatacaccggcctctggctgaccatattgttaccagaataaccggtcaaccagcctatgtgatctcttatcaggataaacgggaatctgaagtcgctcctttgccattttcattatcttctttgcaaattgaagccgctaaacgttttggcttaaatgcgcagcaagtgttggatatttgtcagcgattgtatgaaacccataagttaattacttatccccgttctgattgccgttatttgcccgatgaacactttgccggtcgtcatgccgtgcttaatgcgatatctattcatgcaacaaagctgttgccacaagagttactggaaatagatagaaagaatcgttgttgggacgataaaaaggttgatgctcaccatgcaattatccctacagctcgaagtagccatataaatctgacggatagcgaggctaatatttatggtttgattgcccgacaatatttgatgcaatttttcccggatgccatattccgtaaatgtgttattgaattggaaattgcgggtggaaaatttattgctaaagcccgttttcttgctgaggcaggttggagaacgttacttggtaataaagagcgtgatgaagagaatgacggaacgccattacccgttgttgctaaaggtgatgaattattgtgtgaaagaggagaggtagtcgagcgccaaacccaaccgccaaagccatttactgatgcgactatcctttctgctatgaccggaattgcccgttttgtacaggataaagagctgaaaaaagtccttcgtgcaacagatgggttgggaacggaagccacgcgggctggcattatcgaactattgtttaaacgggagtttctttataaaaaagggcgtcatattcatgccacacctgcgggtagggcgttgatccatgtattgcctgatatggccgctttaccggatatgaccgcccattgggagtcgcggttaacgcaaatcagtgaaaaacagttccgctatcaagatttcatggggccacttgaggagacattgcagcaattaatttggcaggccaaacagaaccgtaatttaaccgcttttcgtgatttaccccccctcccagtgaaagataaaaaagggaagaaaataaaagcaccgaaaaataccaaaagagctgcgccatag

SEQ ID NO: 6321 - DNA, 807 bp, Photorhabdus luminescens
atgaaatttatctcttttaatattaatggattacgtgcccgcccccatcagttagctgcgatcatcgagcaacatcaacccgatgttatcggtctacaggaaacaaaagttcatgatgaagcgtttcctctagaagaggttgggaagcttggctatcatgtattttattacggccagaaagcccattacggcgttgcactgttaacgcgccaggtgcctcttgcggtgtatcgtggttttccaggggatgatgaagaggctcaacgccgggttatcatggcagaagtggaaaccccacacggattattgaccgttattaatggctatttcccacagggagaaaaccgtgaacatccagtgaaatttccggcaaaagagaaattttatcaggatctgcaaaactacctggagcaaaacttaacccctcaatcacacgtgattatcatgggtgatatgaatattagtccgaccgatctggatatcggcattggtgagaacaaccaaaaacgctggttaaaaacaggtaaatgttcttttctgccagaagagagagattggatggatcgcctgaaaaactggggtctggttgatacattccgccatctcaatcctgaatgtaacgaccaattttcctggtttgattatcgttccaaagggtttgatgataatcgagggctacgtattgatttactgcttgcaagtaagcctttgatggatcgctgtatcgcaacaggtattgactataaaatccgtgagatggaaaaaccgtcagatcatgccccagtttgggcagaatttgaaatttga

SEQ ID NO: 6322 - DNA, 864 bp, Photorhabdus luminescens
atgtttttttctcgtaaattagaagcattcatggcagtggtggaaaatggttctttaagtaaagcggcaagagtgatgaaccgtacaactcccccagtagctaaatcaatcaaagacttcgaagcaacattagggaagcgccttttcaaaagggagaaatttgggatgagtctgactaaagatggtttagaattatataatgatcttaaagatctttatttacaagaaaaagaaataactaaaaaacatatcagtggtagtatatgtaacatagttaatatttattacgattgggggaaaaacaaacatcttatttatttatataaggcagctgatagaaatagctcacaggtaaatatattccggtttagttatgataacattgaagaaatagtggattatgacggcaacacgctcattctgagctcagaaaagatactaagtgaccgttttagtctcattcgcaaaataaaagggcctgaattgggaatttgctgccgaaaagagttattagatattgctaatggcgatgtgatgcaattgctaaagagtaatacttggctatgcgatcctgtactttataaaagtagcttcgttaaaaacttggaagaagaagttattcaaagtggtggaaaagtaaatatgcgtcagatggataatatgggatgctgcatgaatttcatttattccagagattatatatttattacagattctcatcctgatgaattggaaggaggagacgctttgagttttgttcccattgaaaaacctggcgcagcaaatcaatgttatatttataagtctaaatcacactcaagtgttcttaatcgttttatcgattcagttaatgacatgagttaa

SEQ ID NO: 6323 - DNA, 285 bp, Photorhabdus luminescens
atgtctcgcttttttaatttcgcgtcgaaaaataagatcggtctcgacggtcccgatatcgtgccatatcaatctgctcaaatgaaaaacacttatccctttttcaatcgttacaaaggcaaactggatttggtggcaatggcagtccaagaacccacactgacctacaccaatccaaaaactaaaaaagccttcactcaggaggagtttactaattttgccgaaaacgacttgggggctaacattattttttggagtaccacaacaccccggctaaagcagtaa

SEQ ID NO: 6324 - DNA, 207 bp, Photorhabdus luminescens
ttgcgcaaacgctatcaggatctgcttttcgaactggtaaaagagtttgacggccgtattaccgggattaatctaccagaaaccgccgttgatattgacatgaaacaggataagaccggttttagccgtgaccgctatttttccgccgaacttgataatatcaaattcgcccgccaggtatttaaaaaattctacaatcctacgtag

SEQ ID NO: 6325 - DNA, 222 bp, Photorhabdus luminescens
atggtgctaaaacaactcatcttagccactctgatttttagtttattgtcaactgatgcactcgcaggaaaaccacaaaactatctctacacttcatccgatgagctcgatcaattatgtcctctgttagaacgtcaaaatattgacggtgtacaagttgtttatgccattttatctctaacaaggcacaaaatatcaaggcggtttagttgctcaagttga

SEQ ID NO: 6326 - DNA, 252 bp, Photorhabdus luminescens
atgaagcgaaggaaaatgagatttaccttcatcctgaatatgatgaatgtggtcgtccgtactacaacgtatcattttcctgccggggtaatggagagcaatctaaaatcgaaacgcgatgatgagccagtctggttggtaaattctgagattggcgttgcaagttggataatgaagaatgcttcttataggaaagagacgttagatcctagtaaatttgattgtgctttgataagcaattatgcagaataa

SEQ ID NO: 6327 - DNA, 585 bp, Photorhabdus luminescens
atgacagtaggaatgacaacgttagtaacgttgctaactccacttccagacgttaatcagttagcaaaattgccagagtatctttctgctccgattacgcaattggtgcaagacagagcagggcaaaaaatgctgactgctcaagaggtgatgtcatatttctctgaatctaaaatggcgcttgcctacctgaaagaaaatacccaaattggtattgaattacttgaaaccattgaccgtgacgggatcgaaccaggtatagatattcgtgatgtagtcgagcgttacgaatccgctgcaaaaatcgccacgagtcaactccatctcttgaaattaagttatattcttgcggagtcttcgcctgcatggggaccgcatgtcaagctattccaaacgcattctcagagagcgttgaggatttttgcaaataatagaaacgttttattgcgtattgcaacaatgttaaagcagtacttgccagttaatgcaggtgaatatacaccgaaagccgacgcggaaagttacaaagagttggtgaatctctcgcataaaaagctcggtattccattgcctgtgtggggttag

SEQ ID NO: 6328 - DNA, 258 bp, Photorhabdus luminescens
ttggctgggtgccaagggcgttttgagcgcaacatgcaggctatggaatcaggaatatggaagttacatattcttcccctgaatgaaaaaccgtggccgacaaatgtgatgctacacaacaggaaaagtgacaattatctggtttatgctcaacattggtattatgaaaatcattatcaggtcatggccgtggtgatgccagatgcacattcgcgtattgataggctcttggataagctagggtgtgtcccgcaatag

SEQ ID NO: 6329 - DNA, 447 bp, Photorhabdus luminescens
atggctcgttacgaccttcctgatgaagcatgggagttactgctccccttattgccccctgaacattctcaacgggcgggacatccttatgttgaacaccgccgggttatcaacggcatgttttggatactctgttccggtgccccctggcgggatttacccgaacgttatggttcctggaaaaccgtctataatcgctttaatcggtgggcaaaatcggggctcattaacctcattttcaataagttattgtcaatactggatgaacaaggtttagttgattggtcagctatatctctggatggcagtaacattcgtgcggcacattgtgcggcgggcgccaaaaaaaacatcccgatgtcaccgaaaatcatggcctgggtcgctctcagggtggttatggctccaaaatccatctggcggtcgatggaaaaggctatccactga

SEQ ID NO: 6330 - DNA, 396 bp, Photorhabdus luminescens
ctgaatgtggtactcagtgcaggtcaatgtcatgaaagtcaatatgcagtgcgcctgctggatggtctgggtattcagcgtaaaaacggttttatgaaacgtcgttcaaaagcggtgattgctgataaaggttatgccagccacgcattacgtaaccggttaaaaagtcagggaataaaagtgataattccctataaatcaaatgaaaaagcgcggtcagatggacgggttaaattcgaccatgaaacgtatcgaagaagaaatgttgtagaaagatgttttggtcgactcaaagagcatcgtcgcatcgccacccgttatgaaaagacagcaagaaattatatcgctatggtgaaattaggttgtatccgcttatttcttaaggccataatttaa

SEQ ID NO: 6331 - DNA, 771 bp, Photorhabdus luminescens
atgtctgaaattaataagccagaagttactgaaatagaaaataaactccctgagcataaatcattaaaccctgatcaatacaaatgtaatcatgttgttgccccagaaaattcttgtccgtgggcgattattcaagtgtatctaggaaatcaagcacgtcgtggtgattgggattctcctaatgaatgcatacgccttattcctgaatcgaacgctaacagtgaaggcaataatctgatttatattgagaagtgcgataagcatgggcattggttaccttggcaaccaacgccggaagatataatgggtagtgattggtcattgttagagccagataacaatatgatggtttttgatgttaccttagggactagtaagtatgatacagggcaggactggggatatatgagtgacaagggagtctttggtaagggagaatctactttcggtactttaaatataacccaaaataaaatagatattaaaagcattttaaggttctactataatagcagcggattgtatttgagagtatattttgataaagctaattatcagaaagttaaagaagtactcaagaagaatttttatgtctcagttgataatgtaacttatgattttggaactttcttgcatgatcatgatgcagataacgataattatgaatacgatgtctactattatgaatcggaaaacccaaccgtagaaaaactaggtgccatattaaagcagacaggtgaaaccaagcgtttttactgtaactggcgttaa

SEQ ID NO: 6332 - DNA, 282 bp, Photorhabdus luminescens
gtggccttttttcgttttaaaggccacctatgtaaatattttcagcgaggcaagagagcggaaatattctgcttaactgagatcagtttatgcataagaatagaggataatcttaatgaagtacttaataagcatttaaggttattaggcactcgcaacgatgatgattctaaagttgtccgacctgatggttcgtcaggacgagttgatttgatgttaagtaaatcaaaaggctggctatctcatcattcacagagaaaactttttgagcatggaaaatag

SEQ ID NO: 6333 - DNA, 312 bp, Photorhabdus luminescens
atgatatttattgagacccatatcttcactgaagattgtaaagagttgttaagtgacgatgaatatcgtgaatttcagcaatatctcgcagacaatcctattgctggtgatgttatccaacacactggtggcttacgtaaagtcagatgggcatctgggagtaaaggtaagcggggtggtgtgcgcattatttattactataaagtagatgtctcacacatcagattgttactgatttacaaaaaaggcatcaaggatgaccttagtgaatcagaaaagaaagtcttgagagcactaaatgaggggtggtaa

SEQ ID NO: 6334 - DNA, 291 bp, Photorhabdus luminescens
atggatagtaaattattttctagactaactgaaagcatgacacagatgaacgaaattattaatggcgaacgtgctgcctctcgtgaaactcacgttgaagcagtaaaagtaaagaatattcgccaggcaaccggtttaactcagaccggttttgctaagttgatttccgttaatgttggaactctgcgcaactgggaacagggaaggcgtgagccaaccggaccagcaaaagccctgttgaaggcaatagagaaagatccggttcatgttttaaaggcgttatctatgtaa

SEQ ID NO: 6335 - DNA, 594 bp, Photorhabdus luminescens
ttgcattactcattcataaaatatataaactctaacaggtataagtgcctattgagccctcctggctatataaaaaatagacaaacactaaacagaggcagagaatgcgttatgttgaaaataactagagatgtttatttagactgtgactcaaacaaaataattcatggtaaaaatatatttatcattacagagaaagagaaacgcctgctacttgcactgtgggaacatgcatcccaagggaatacgttaaaccgggagcaactgatccctctagtttggcctgaacgcaaagatggggtagcagaaaccaatttactgcaattaatctgcaagttacgccgaacattacgttattgtgatctaggtgaagccatacacacggtgtaccgacaaggttatcgttttatcctgccacttcaagatgacgaacaagataatcgtcagctccaaaatactcaattacctattcccatcgctacaccgccaaagccattttactggcgtttcaccaggatgattgttatgtttatcaccgcaatcatttggatatcaactatcctatatacagctccttttctggctaagagataa

SEQ ID NO: 6336 - DNA, 345 bp, Photorhabdus luminescens
atgccaacaaataacagcaataataaggaaaccaatatgatatcaacaaatttcaaaatattcctaaaccctaaccaagctatcgaagcttataaaaatgggaatatagccattcctattcgatggagaagtatagcaataaaaaacaacggccaagcagcaatgagggttttaaatttctgggcatccccatttggggagtatgaattctataattctattgatgtctggcctggagaaactaaaatactcaacgcgcctcctaacgctgtttattactatagaattacagccgtcaatttagacgcaactctaaccacagaagctgagtttaattggatataa

SEQ ID NO: 6337 - DNA, 594 bp, Photorhabdus luminescens
ttgcattactcattcataaaatatataaactctaacaggtataagtgcctattgagccctcctggctatataaaaaatagacaaacactaaacagaggcagagaatgcgttatgttgaaaataactagagatgtttatttagactgtgactcaaacaaaataattcatggtaaaaatatatttatcattacagagaaagagaaacgcctgctacttgcactgtgggaacatgcatcccaagggaatacgttaaaccgggagcaactgatccctctagtttggcctgaacgcaaagatggggtagcagaaaccaatttactgcaattaatctgcaagttacgccgaacattacgttattgtgatctaggtgaagccatacacacggtgtaccgacaaggttatcgttttatcctgccacttcaagatgacgaacaagataatcgtcagctccaaaatactcaattacctattcccatcgctacaccgccaaagccattttactggcgtttcaccaggatgattgttatgtttatcaccgcaatcatctggatatcaactatcctatatacagctccttttctggctaagaaataa

SEQ ID NO: 6338 - DNA, 450 bp, Photorhabdus luminescens
atgtctacaactgtcgatcaaattgctgttcaataccctattccaacttaccgttttgtcgtgaccgttggtgatgagcaaatgtcttttcaaagtgtatcgggattagatattagctatgacacgattgaatatcgtgatggaattggtaattggttacaaatgcccggtcagcgtcagagaccaagcattaccttgaagcgcggtatttttaaagggcaatctaaattgtacgattggattaattctatttcgcttaatcagatagaaaagaaagatatttctattagtctcaccgatgaaacaggctcaaatttgctgattacctggaatattgctaatgctttcccggaaaaactcacagcccccagttttgatgcgaccagtaatgaagttgcggtacaggaaataagtttaaaagccgatcgagtgactgttgagttccattaa

SEQ ID NO: 6339 - DNA, 1122 bp, Photorhabdus luminescens
atgcagtgctttttaaaggcgaatattatgacaacttatcattatccgggtgtctatattgaagaagatgcttcattggcactctctgtccgtaccagtgcaacggcggtccctgtttttgctgtcggagatgaaaatctttttaggtcaggagatgactatcatcgtgttaatagttggctagaatatctggctctaagaggtagacaatttaatcctagtgataagcttgatatttcactacgtgcctattttattaacggcggtggatattgttatctcgttaaaactaaagatttagtaaaccaagttccaaagttggatgatgtcacattgctggttgctgccggagaggatattactactgctgtaggtacactttgccaaccgggcaaaggcttatttgccatttttgatggcccagtcactcaaatagatttgaaccaaaaacccgatgaagtacttaagatttataccgctaccgcctatggcgcagtttattatccttggctgaccgctgagtggggagaaaaaaatgaagaagggaaaagagctagcgttgatattccacccagtgcagtgatggccggtatttatgccagtgtcgataacaatcgaggtgtctggcaagcgccagctaacgttgctattcaaggaggattacaacctaaatatccggtgactgatgatctgcaaggacaatataacaaagataaagcgttgaatatgatccgtacttttcctaaaagtagcccattggtttggggagccagaacacttgaggacagtgataattggcgttatatccctgttcgccgtctgtttaacagcgcagaacgagatattaaaaatgccatgagctttgcggtctttgaacctaatagccaaccaacttgggaaattgtacgtcgagcgattgataattatctctattctctctggcaacaaggcggattgatgggcaataaagctgaacaagcttattttgttcaaattggtaaaggtatcaccatgactgatgacgatattaaacagggcagaatgattgtcaaaataggtttggcggcagttcgtccggccgaatttattatcttgcagtttacgcagaacatcggacaataa

SEQ ID NO: 6340 - DNA, 1407 bp, Photorhabdus luminescens
atgccaacagtaccaacttatcctggcgtctatattgaagaagatgccccaccggcgctttctgtcagccaagggaatacggcaatccctgtttttattggacgtttttcactgaaaaaacctagtacgactacgacaccacaagtgacacgtgttagtagctggttggatttcactaacctgtttcatgtgggttgtgttacgtcaatagcgattaaatcaacacctccatctgccgctaaaaaacctaagaaagttgaaaaaattgaaggtgatatatcaaccgaaaacaaagccaccaaagaaaatgaagaggttaatagcaatacagaaacagaagaagaaaaaaaagctgattacacttatgaggtgactgtcggtacctatacaacaagcagcgatgccttaaaactttatttccaaaatggcggtgggccttgttatatcctaccgattgctgattcggaagatactaaaactctggctttaatccctgagttaattaagcaggctttagaaattaccttgatcgtctgccctgaacaagattctgattaccaaagcaagatatataacaacctgacatcttcattattgaatgagggctatttccttatcgctgataatcaggataaagcattcgctatcagcactaacgtatcctcacaaaccgcaacgtattatcccgcggtgaaagtctcacaacttatgcaaacggaagagagtcttatagatgttttaggttataaggatgcaaaagcaaacaatattaccaatttgacggaactcaaagagaaaaacccgaatgtctataaggaggctattactgcaataaagaatgtaaacaaaactattcccgccagtgcaatcatggccggcgtctattgtgctactgatgccagccgtggtgtctggaaagcaccggctaatattgttctgagtggcattagtgatgtagaagaacggctcaccgaagatgagcaaggtaccatgaatcaaaaaggtatcaatgttatccgctatttcaataatcgagggtttgtcgtgtggggtacacgtactctgaaagatgatgacaactggcgctatattccggtacggcgtttatttaatgcggcggaacgggatatcaaacaggcaatgcgatttgccgtctttgaacccaatagtcaaccgacttgggaacgagtaaggtcagccattgacaactatctccatcaactctggcaacaaggggcgctggttggcagtcatccccaagaagcctattttgtccagattggtcaaggtgtcaccatgtccgaggtggatattaagcaaggaagaatgatcgtcaaggttggtatggcggcggttcgcccggctgaatttattatcctgcaattttcgcaaaaagtcgcacagtaa

SEQ ID NO: 6341 - DNA, 1197 bp, Photorhabdus luminescens
atggaaataacacagccgggtgtgacaagcgcggaaaacctgatatcccagaagccgggggatgcatttattggtgtaccggtttttattggtgatattccaaaaagttcgggcagtaaaaccatagtcaaattaaacagcctgaccgattttaccctaaaattttgtgagtcaggattaatgtacgactcattaatgtacacctccgtgcgccacttttttgaaaatggcggtcaacaagcctatgtgctgccgctgacccttgatgaaccactgagcgattttcaatcattgatcatcgcactgcaacaggattggcttaagcaggctattgccgcggagagtgctattacactggttgtcgtccctgatattgtccgttttaatcagacgggagagtccggtgccgagatagatctttggttgcagttttggcagtcgatactcgaactgtgcaagagccgacgtggcatcatgggattgctggatgccccggatgatccggtactggccgcgacatgtttggcgcagttttcctcaagtgatcggcaatggggcgcggtatattggccggggctgaaaaccacatatcaagaaaatggtcaacatatcatcctttcgcctactgcggcggtggcggcggttatccagcgtaatgatcatcaacaaggtatctggaccgcaccggccaacgtagctttagctaaggttgtcagcccagtacgatcctttattgaagctgatgcgctctttaatcagaatggcacttcgttgaatctgattcgcagcttccccggcaaagggattaaagtctggggatgccgaacgctggataacatccccggttctccctggcgttatatccaaactcgccgattggtctcctatatcgaagctcatctcacccgattaggccgggcttttgttttcgaacctaacaacgctatcacttggatgaaacttaaaggccaaacttacaactggctgcatcaattatggttgaaaggtggactgttagggacccaagaggaccaagcatttgacatattactcggtgttaacgaatcaatgaatgaagcggatctgcgggctgggaaaatgattatgaaaatcaaactggctctgctcattccggcggaatttattgagctgagtctgacgtttgatacgcgcaccgggaccatgggattaaattaa

SEQ ID NO: 6342 - DNA, 459 bp, Photorhabdus luminescens
atgcacaatctatacaccccgtcagtgtcacaccgttttatcgccagttttctgtttaacaatattcccagtccacttgatattgcctttcagcgcatatcggggctcagtcgtgaactgcaaactactcaacacagtcaaggcggggaaaacgccagaaatgtttggctggccgagaagatccagcacggtagtttggtattggagcgtggtgtgatgacgattacaccgctgactctgatatttgatcgtgtcttgcgtggggaaaaagcggtttatgctgatgtggtcatcatgttgctgaatgaaaattttttaccggtggcaagctggaccgtgagtaacgcgttaccggttcgttggtctaccggtgactttgatgccaatagtaatgccgttttggtcaattccctggagttacgttatcaggatatgcgctggttaggagtgaaagcatga

SEQ ID NO: 6343 - DNA, 180 bp, Photorhabdus luminescens
atgactgtagaaattaaagaactgattattcaggccaaagttaccgattctgcgagtgatttatcttccctgcgaaccttagctcaagaagcactggatgacgctcgcctgattgagagggtgaaacgggaggtgttagaggcattacgtgaaaccgggggcgattatgagcttaattga

SEQ ID NO: 6344 - DNA, 1602 bp, Photorhabdus luminescens
atgaagatacctccgatcgcgattaagataggcggcaaaacgctcaatcagtttacagttatcagcctgtcagccaattaccctatcaatggcattccttcggctaacgtcactttgggtattattggtgattccagccatatttttgatgccaaggtgcaggctgagttagcaaattgccgcccgaaccatgaacttatcgtgcaaatgcaagaaaccgtgttgtttaagggagtcatcgttcggcagacactggggcttaaaggtcaggacagtttaatgattctgacggcaaaacatccactgcaaaaattaacccataattttcactcacaactgttcagtaagcagagtgatgaggcgattatcaagaagctatgcagtcaggctggggtacctgtcacgataaaacaggcacctcaacttaaaacggtacatgagcaaatggtgcagtttcgttgcaatgattggacattcttaaagagccgattgagtgctaccaatacctggctgatccccagccatgatgttgttacgttggtcacgccggaatcacttaatcggtcaactgtccacaccattcgtcagcgcggcgacctccgggacattgtgctgtttgaagcgaatttgcaatgggataatcagcgcagccccaaaacggtgagtgtacagtcttgggacattaaccaacaaaagttgtctcaggcgattcaggtaaaaaatagtgggtttgggcatggtcaacttgctaccgacacgctgaaaccgctgaccgatcaagagtggcaatggattttcagctccccattggataatgaacaaaccaaacagtttactcagggcatcatgggcaaccggcgaaaccataatatatccggcagctttgaggttgcaggccatgattgctatcagccgggtgatgttttggcgttaactggctttggggcgggaatggatggtcaggcgattatcactggtgtcagccagatcattaacccgcggcaaggttggcgtacccggttaacgttaggcatgcaatcagatatagaacaggttatacctcaggttaaagagttgcatatcgggatcgtagaaaaataccaacaggatggccaatcgctaggccgtattccggtcaacataccggccttaaacttaaccaacggcaccctttttgcccgtttaggcaaaccttatgctagtcatgagagtggattctgcttctatccagagccgggggatgaagtaataatcggtttctttgaatgtgatcctcgttttccggtgatattaggtgccatgcataatcctaaaaatagatcaccgttagaacccagtgaaaagaatcaaatgaaaacgttagtgattaaacagggagagaatcagcaggcattaatcttcgataataaagacaatacgctcgcatttaatagtggaaaaaataccttatctttgcaacaggataaagatatcactattaattccgctaaaaatctcatcactcaggcgcaggaaattaatattcaagccgaaaaatccctatcagccgctggaaaatctggggttgatattaaaggggcgaaaattaatttaacacaataa

SEQ ID NO: 6345 - DNA, 417 bp, Photorhabdus luminescens
atggcagacaaaatattagccgatatttatggtcggggctgggcatttccgccacaattttcttctcagacgggagtcatcatggcagaaggggcagaacatgtccgccagagtatgaaagtactttttctcaccgaacccggtgagcggattatgcgtgaagattatggctgtggtttgcatgattatctgtttgaaaatatcactgatgaattaatggcgcgtattcaaacgcgtattgaagagcgaatattacgttatgaaccccgagtggaaatgactgaaattcaggtgaatcaaaaaataaatttgcctaatagcctgcatattcaggtgagctatgccctgagaggtagcgaaattagccagcaagttgaaggtattattaagcttggtgaaggagaagtgatcttatga

SEQ ID NO: 6346 - DNA, 417 bp, Photorhabdus luminescens
atgagtaaacaactggtggttgatggcgacactttgctattcgaacccttgttcggtaaccggcaggtcactattctggggccggcaatcgtccggggcagtggtcacgttaagatccaaggcaaaaaaatcgtaatggtgggggatgaaaaaaagatacagcttcaagcacaatatattactcctagccatccaatacccggcatgggtatggtcaccattgctcaattggatgtcggtcagcaggtaaatttttgtcgtagccctgccacggtgattgtggttggacagcaattcattgcccgttttaccccatcacagccggcaaataatccatcgagtggccccgatataaccgcacccagtatgggaaaaggccgatttattgccagtcaatatgctgtcagtgctggataa

SEQ ID NO: 6347 - DNA, 2730 bp, Photorhabdus luminescens
atggaacagaccgaattagaaaataaacttaccgctatggtatcggatacgacttttaaacttgatgaaagaagtacgcgggatatattaaactggattcaggaatatacggaaaaaatcccttttgaacaggggaaagaaaaattctggcatagcttctactttattcaggaaaatcatcctcagcaattagcggatatttaccaaaatgtgaataaagccaatggtcttttacccgctcatcaagcttttttattggcttttttaaaacttttagaaacgacaaaaatattattcaatacctttccggcgcgtcatcgcgatctttattatcgggaattattgggtttaacgccgagaagtgcccgagcggatcgggtggcgataggtattaccttgaatggaggtaacgcagaatatcttgtccctcaaggaacttactttgatgccggacatgatagcgctggcaatccattacagtatgtgtccgagtcgaatgtattggtgaatcaaggagaattgactgacctatattggtatcgaaaagagggcgatggttggaaatcggcaatgtcactgaatcttgcagatagcattaaattacctgagaacggtattcggctttttagcccaacacctaatgatgtttcagttctgtccggttacttaattacttcgcctttatttgcgatgttagcaggagagcgcacgattaaagtcacattagccagcaagtgggatggtgaatctgagcatatcacggctaatatcagcacagaaaatcgctggctttccttggcggtaaaacttgtcaacaaaacaacgcttgaacttggattgtctgccagtgatgcgtcgataactcctcctgatgccttggataatatgacgtttgatgtaccggtattaaaactgggtaccaaacagggaccgattttgcccaaaattatagacatagaagtcagcattaatggtaaccaaagtgtgtactatgcctctgatagtggtattgaacgaacggatgcatccagttttccctttggtcaatcaccgttgctaggctccggttttaatctgattgcccctgaatggtatggcactgaaaacgcaacgctcacgattactccccaatgggttggcttgcccaaagaaggttttaaagagtggtataaggaggttaagaagggtaaagaacttaaccctgtttataggattactgcaaatgacgcattcaaagtacagggctatttaatcactcctcaagaaagaaagacactcagtgctacccaatcgttatttggtggagataaggaaccacaggtccaaagcttaaaattcaccttaccggcaatgaatcaccttgttgcagatagctcatcgcccaatgaatggcctgcgtctgtgcgtatagaactggccggacaggattttatgcatacccaatattggcaagatcctaccggtaagaatttaccttataccccacaaatcagtgcattgcagattcaattcagcgctaaagctaaacctgagcaatttgctgtttaccctctgacgccttttggctggggcgaggcaacagcagaaatgcctgcattaactcatgaagcattctatttaggcttcacgggtgtacagccggggcaaactttatctctttattggcaattagaaggtattaagaagctcactttatcttggttttatctcaacaagcacaatacctggcgtaaattggataaattagttgatgatcaaaccggtaacctgtttgagcgaggtatctggcgcaccttattgccaaaggaggcttcaaataaagccgctttgatgccgacggggcggtactggttgaaagctgagatagttggaaaaacagatccccaagattacccacttgttaaaggtctgctatataacgccaccaccgccaccttagctaacgcagaaactgttgagcaagagcattttattaatggattgaccgccgacagcataaaacagccggtaaccactattccggcaatcagcagtgttacgcaaccttgggcttcttggaatggtcgcccgcaagagagtgagcaagccttcttaacacgaatccctgtccggttgtcccatcgtaaccgagtgttgagttggggaaatatggtcaccttactaaaggatcattttgtcagcctacttgatgtcagacaccattcaggcagtaaattgactaccattccggcaccggaagagcaacaactgatagttatcccggacagccgttacaaggataatgatgatgcgttacgcccaaaattgaacccggcacgattggctgagatggtcgaatggttaagtcaattaagtagcccttgggcaaccattgaaatcaacaatcctacttatgttgatgttaatgtggactatcaagtgaccttcatctctggcgttaattctgactatggccaccatcagctacaacagcaattaaaccggatatatatgccgtgggcggagaatcctgctatcggcgtgacgaccggtaactgcattgactattaccagttattagccaccatccaacaatcccctctggtagaacgtgtcaccgatttaagcataaccatagctaaccgaactacgggtgacgtgggtgcaagtatcgaagccaacgatgacgaagtgttgattttagtttggacagataagcgttctttaaaccaaggagttaacaatgaataa

SEQ ID NO: 6348 - DNA, 2904 bp, Photorhabdus luminescens
atgaataatcaggatgctctgtttcccatcgttaaagacgatattgcctttgataccttacttgctcaggctaaggctgtgattgagcaatattccggtcaatattggagtgatatgagtgaaaatgatcccggtatcactttattggaagcctgttgttatggggcgtctgatttagcttatcgtcattcgttgccacttttggatcttcttacgcccggaaaagaggaacaggcacccggtgatggtattttccctcaagagtttggtccgcagcagatgctgacctgtggtccaattacactagcggattatcgtcgggcgttgctggatttacacagtggcgatacggttgagggttactttttatttaatgatgtactactgatatgtgaacctgacgatcagcgctatacatactggtatagcaaaaagaaacgtgaatacagtttcatgcaactccctgattcagaaagtaaacaattaacattaagaggaaattattggctttatttgctgcctagccgggaaactcaggccgataataagctggctcaggagaaacttaacgctttcctgaaagataaccgtaatctgggggaatgggtgagtcgggttatctggttaaaacctgttgatttgccattgaagattgatattcagcttgataatgatgttaaagatatcgctgacgtatttgctcaaatttatatgacagcggaacaaacggtgcaggaaaagccgctacgttataccactcaagcaatgaaagagatgggttacagtaatgaagaaatttttgatgggccttatttgcatcacggttggatacctgaattaccgccgaccaaagattacaacggtgccatagtgttaagtttaagccatttggttaaccaattattggctatcaagggagttcaaggtattactcggctggaattagataaagataataaggaaattatttctctgctaccgcaagataattggtcttgggaaattgcaaaaggatattatcccagattatggggcagtgatcccttaaaattgattacctcaccaaacagtccattgaatattattgccaaaggtggcgtgaaagttacggtttctagcgaagaaatcaagaaaaagcttattacagaaccgttgattaatacacaaccggaattattgaactggggtaagcatcgtaaagtgcgggattattacccggtaagcaataaattacccgcttgctatggattgcagactaataaacatagcttacaacaactacagttacaccaatttatgttgccttttgaacaactgctagctaatggctgtgcagaacttgccttattgccaaaactattggcgtttacacaacggggaaatacggtatacggtgcacaatggccttttaaagttaattccgttagtcagaacgttcatcaggcgataatgcctgacttaattaagaaactgaatgatgatgggcaaattgagaacgatggtggcatccatgagcgaaactatgcaaaagagctagctatccttgaatatctgttaagttattttggtgctcatcgagcggccagaccacttattctcaatccacaggattttttatccactcagcgcggttatttggctcaacaaccagagctggcctatcatcgtaataatatttgtattgataaagtatcggcgttgcaaaaacgaattgccgcccggttaggcttgggaagaaaatgttttaatgaaccgcctgatttggctgatctgcctttctatttaattgagcatcgtcaattgttacccgtgaaacctgatccggtattcaatagtgaacaaacacctgataatctggaaattaaagatcatcctgattctaaaagccatcacttaattattactcagcaaagtacggcagggcagttattgcatggtcagataattgacttaattgttaaaggtgagggcggattcacattacggggccaagtgatcacggaaattacagaaaaatcattttatcttgatacccgtaacagtgttgctctggaatacaatttggacagagtacaacaagcgtttatcgataaaaaactatgctggcaaaatagcccggtgtggttggaagatatggattatcaattggtttatgccgatgagacagatcaaatcgatgtcaaagatgaatactggatcacttccagtccccaaagcccttttccagccatgattaaagaaggtgatgaaatcacgctaaaatataaaattaccccttatgaaccaaccaaaaaaatagtagctagcatgaattctccatctgactatatgcttaaagctgtggtaaagaaattcgatcgtattgagggtaaaatattaattaaacgagataaagacaatgaggctgcttttccacaaaaggaaaatgcatggcgttatcgctggtatttctctggtgcagaatacgcgcatactgatcgtttctcatttgtcgtcagcgtagtcattaatcgtcagttaattgaaaatagcaaagttgatcctcataaattggaatcatgggtaaaaactgagattttaactgaatttccggcacatgtttccatgattatccattggttacccttagagcatttcaggaattttgccagcacctataaacattggcaaaataacggttctgctttaggggatgaagcataccatattttggaaatgttaacgttaggtcgtataccttccccattaacgggaacagggaatatgagaattgctactgaagaacaaagaactgaggttattggtgaatctgaaacagaatggcattctggatttattgagagtaaccagttgctgtatataccgaaaattcaggaagatattaatcgtaataaaggggattaa

SEQ ID NO: 6349 - DNA, 1257 bp, Photorhabdus luminescens
atggaaaagaaaaataatctatctaattcagagattaatccagaaaataccaataataaaacagaatctccttcggcggatgatttaaaaaaacgctttaaagcaggtagtattccattgcaaactgattatgaacgcttgattaatatggctgatattggccgtaaagcagtagggaaagcaccgcaacaaaatggaccaggaataggattgaagttggatgataatggtacgcttaatttaaagataggtactatccccgatcttgccgataaaggcttttctccattaatgttaaaaaatgatattttatctgtagaccttggtagtggtttgattaataaagacaatggaatatctgttggtcaaggtaatggtattgttgtaaatacagataatatagctgtcaaggccgctaatggtattactgttgatggtagtggtgtttcaattaaagcgggtaatggtatttcggttagtggaaatggagtagaagttaaggccaagaataatggcagtatttctgtcgagccagatggtatagctgttaaatgttgggacgggggcggtattgtggtaactgataataccggtctttatttgaaattagagggaggaaatacaaacaatgcttggagtggtgtaagtggtttgagcctgagtaaaaatggtgtaaaagttaaagcgggtaatggtattaaggtcgatgataaaggtgtcagcattgatcctaacaaagtccttcctagaggaatgattgtgatgttttctggtagcagtgttcctgagggatgggcattgtgtgatggtaaagataataggcccaatcttattgatagatttatcatgggaggtacaacacagaatattggtggtaagtcttcagattcattttcgggcgctaaagacaataaaaaattcacgttcatatcagaaagccagaccgttcgtatatcaggaagtactgacggacatggattaactgctgatgaaaatggtcctcaccaacatgagcaaggtgaaactctaaacaggcaaggtaagtgccataatggctatacagaagataatactgatcgtgactgggttgacggtggtagacgaggtcctgagccacctaattatagggcatacacatttccaagcggtaagggaaatccacactctcaccctataaatctgaccagcggtgggcataatcatagcaataatgttactgtgccgtattatatattggctttcattattaaactttaa

SEQ ID NO: 6350 - DNA, 1860 bp, Photorhabdus luminescens
atgatttcggagaaaaatttgttaaatcgaattactattactattgaagctaataatcaacaaggagctaaaaaattattacatggttctctgctcaatcaaatcggtgtacgtaaattatttaatttatattttaataaacatgttgttagtcaggatatctatttggataaattaacgctgaatcttggtgaaattaactcacctgattttaattcattatttcctattcgtcttaattctgaattaaataaatcattagatcaatattgtaaaaataataaggaaaaaaccattacagaaaattcaataatatccaaaagtgccggtaagttctctttattacagagtgattatttatctaatatcgaggaatttatccagtatttatatcaaaaagatattaaattaaatcatgaaaaagcaatggagagtaataggaatattaatgttaatgctgagtctttaattaatcaattaatgagaatagagaaaaatttaacattattattagcaaaaagctgcttatctgagcacggtttacaacggcttttagctatcagccagccaactttattaagcgaaattaatcacaaattatcggagaatatagatagatctcagcatcaaggaaaggtagttacctcttggcaattggtcttgaatgcattgggatatatacagcggcataatatgcaggaaatacctaaaccagatataaaagtgatatcatatatcatggctgaatttgatagcagtatgcttgatattgtgcctattattaccttatttcgccaaaatataatcgctgaaagtaccttattaaatgaatggttgaagccaatttggcaaatagaatggattccaaaactgtgtaaaaaacacctctctgttcaggaatataaaagtttagccaatcgttttggctgtgaaactcagacttttagagaacaatctttacagcaaacagatccagttaattcaatgattactgagctattactgaaattatctacaaaacatcgggaaaatttaccaccattaagtcagcatcaactttcatcaataactctttcattgatcactacagcgattcaaaaaggagaaataaaagtaaaaaatatcatccagttattgcaacatccagcgttatataaccaaacagggacaacttggttatccccactatggcaattagactctgtttcacaactctgtaaaaaacatctctctgctgaagagtataacgaactgtcgcaacgttttatgtcaaataatgccaatcaagcattaatccctcaagatcagacaatattatcaatatcaaataattttcacgtcaaagacaataattgtaatcaatatcagataagtaatgctggaatattaattctatggccgatgttacccgctttatttaatcaactagatctacttgaggagaagaagtttattcatcagcaagctcaatttagggcggttgatttccttgattatcttatttggggagatgaagagggtctggtagagagaaaaaccctaaataaagttttatgtgggctaatgattgatgaagagacgcaatcaattcttgttgaaccagaaaaacagttaataatagcacaatggttggatgtgattatcgctcaacttccgggctggaaaaaactgagccgtaatgatgttcgccaactgtttttacaacgaccgggtgaattactgatagataaacaggaaatcaaaattacgctacaacatcagccatttgatctgttattagctgactggccgtggccgttaaatatcgtcaaactcccttggttaaatcgtcctttacaggttgactggcaaaatatttaa

SEQ ID NO: 6351 - DNA, 2085 bp, Photorhabdus luminescens
atgaactctttacttaaaaatagtcactacgtggtgacggaattacattggatttatccccatctggagcgtatcgatctgctattacagcgctattattatcaaaagagggaaaggtacgattcattaccggagagttttttacttactgagaataaggtagaggaatatttgatacaaccgcaaggctttcctcattggctatttgaggagggtaatattgttgatcatccgaaaaccgaagaacattttgcttctgatgcgctgtctttattggttgaacgttttgaactcacggaatttgagcgtgatgtcttattactcggtttattgccacattttgacagccgttatcatgcattatttgctgctctgcacggtaatagtaaaaaacagtggcctggctttgctttagcaattgaattatttagtcaacgccacagtgattggcaattattgcaaaactgctttttaccatcctcaccattaataaggaaccaactattacggctcaataaccacgaagaagctatctggttacaaacgcaatttttaacccacagcgccgtctggcattttttatcaggacaacaggtaatttttccgcccctaataaattgtgcttattggcattctcctacttcgaacgtttggtatccatcaactctttatcattcatttgaaaagatattattgaatgaaactgatgaaattcgcccgttggtgatactgagaggaaaacagggcagtgccagagagttagcggttagcaatattatggcgtttcatagcatcagtactctaattttggatttagctcgattgccagaggaagagaatttaactgtaatagctagtttgctggcagatgcagtgagagaagcacggttacataatgcttgtttattaattcgtcatttttctttacttgcagatgaaaagaaaacattgaataacctattatccattttgctgcatcaacccaaattaccggtggtttgtttagtagagccgggagacgcattagtctggattaaacatttatcaatggtgcaaattgagatgccggtagctacacgggtggataaagaatctatgttgaaagaatgtttaccggataatgccgctcagaaagttaatcttgcacaattgtgtcagcgtttctcatttaccgcggaaactttaccgttaattcttaaagaagcttatcaatatcaaatattacgacaaccagatgatcaattagaagagatagatttacgtaaagcattaagtttccgcgctcaacagaatttaggtaaactggctcgacgaataacgccaaaacgtaattttaatgatttagtggtttctgatgaattagctcaacaattgaaagagattattgcaacgattaattaccgtgaccagattttgggtgctggctttcaggaaaaagtaggttatggcacgggtattagtgcactgtttcacggtgaatcgggaacgggtaaaacgatggccgcagaagtgattgccgggcatcttggtgttgatttgattaaagttgatctttctaccgtggtgaataaatatattggtgaaacggaaaaaaatatcgcccgtattttcgatttagctgaatcggattccggggtactgttttttgatgaagccgatgcactgtttggtaagcgcagtgaaaccaaagatgctcaagatagacatgccaatattgaagtttcttatctgttacaacggctggaggattatccgggattggtgattttagcgactaataaccgtagccatttggatagcgcttttaatcgtcgttttacttttattacccattttacttatcctgacgaagtattacgtaaaaaaatgtggcaaactatttggcctgaacaactgaaattatccggtgaaattgattttgcacatttggctaaacgagctgatttgactggggctaatatcagaaatattgccttattggcatcaatattagccacagacaataatagtgaaaaaattgagcatcaacatatagagcgggcagttattctcgaattaaataagagtggcagactgattttttaa

SEQ ID NO: 6352 - DNA, 897 bp, Photorhabdus luminescens
atgaaagataccattgaacctaacaatgctattgtcgaagttaataatgcattaaaagatattctatctcgatatttaaataatattgatattcgttttgatttgccagatatagattcaattccatctaaaccgacaataagtgtatttctttatgatgtacatgaagatttgcaattacgctctgctgaaccgaagcgttataatcctgtgactaatttattgttaccgggatgggtcaatattaattataattatttaattacttactggcattcgaataaaccctcagttgatggtagtagcccggatagtcagcctgataatcaggcggcaaaaataatgacctctattttgaacgcgttgattaatcatcgtcaattacccaaaattcctggtgcctacaccaaagttattccaccacaggaaaatttaaatagtttaggtaatttttggcaggctcttggcaatcgacctcgactttctttattatattccattaccgcaccggtgaaacttcaagatattacaaatatagtagagccagttatggatatttcccattctgtggatcaaaaactgtatctgactagctcacaaatatgtcaggaattattagaaaaattatgtgttgatttaggtggtacggaagatatacgtttggcactgactaaagtgaatctaacaattgaaccgcttgtaccagccacaggcaataatgaaaatgaaaaaattattcttgaggcttcaggtattactttttcaacctattactctaaaataaaagagattctttcaacatgggtaaacagtcgtaaagcagttgttaagataaatggcataggtattattgttgataaagtagattttaataaattaattagcattgaaaagtaa

SEQ ID NO: 6353 - DNA, 942 bp, Photorhabdus luminescens
ttgggtgatgatattatgccaatcagcaatcttgcaaaagaatctgaagttcgtgccgtaaaagatataccctgtaaaaatatagaaaccgataatcatctggaaataggtctttcttctggcttatcgagatcaaaggatacctcaaaatttaaaaaaaatagtataaataccataaaattgatagatgatattatcgcactacataatgatccgaaagggaataaattactgtggaatgataattggcaggataaaatcattaatcgggatttggcgaatatatttgaaaagattgatgaaagtgtttctgaattaggtggtcttgaaatgtaccaagaaatggttggggtaaatccttatgatcctactgagccagtttgcggtttatctgcccaaaatatatttaaattaatgactgagggagaacatgcagttgatccagtagaaatggcccagacagggaaaatagatggtaatgaatttgctgaaagtgttgatcagcttagtagtgcaaaaaattatgttgcattggttaatgatcgtcgacttgggcatatgtttttaattgatatcccatccaatgatcaggaaacagtgggatatatctatcaatcagatttaggacaaggggcattacctccgctgaaaatagcagattggttaaattccagaggaaaagatgccgttagtcttaataaattaaaaaagttgttaagccgtgagtttaatctattatctgatgatgaaaagagagcgttgatttcagagacgcttgatatacataaagatgtatctaatgttgagttggatagaataaagagagatagaggggtggatatttatttaaccgaatacgatgttaataacttttatgaaaatattgaaacattaaaatctaaactttctaattatgataaaaaattgagtaaaccaaaatga

SEQ ID NO: 6354 - DNA, 1146 bp, Photorhabdus luminescens
atgtatgactcgaaaaaaaagaatagtgaaccaacaacaaagaagaaatttgaaagaagtaattatagtcaatgggatgacagcattaaccactatgaagacatgaatcgtgccagaataaaaaacagaaatgatatattgaccactgttgattattttggtgaaaaaaagaagacaatgcatacatttgaataccagtcggatattaaacatgatactaattttaataataaaaataagtcattgtttgagtctttcgctgcatcatttgttttacaaaatccatcttttttttcaggtgtaatagataaattatcaaaaaaattattcaatataatatctaagatcgatgaaagaaataatttccaaaaaaaactgtacgattttattgaaaaagatacgagtccagagggccaatttggccgatttactctaggtaaaaatgaaatcttaaatgtattgcaagtaaaatcggatactcctcaattatttgttaaaaaaatgctattaataaagtctttgggagcttttattattgatttttcctcaaaagatattggaaattatgattttatctttgatggaaaagggagagaagtaaatgatataatagaaaaaaacagaccaactaatctttttaaagttagaggaaggaccaatattaagagcagccaacatcgttcagatataggtattttagatactccaacctttgatagtcttacggaagagcaaaaatcatttttaaccattccagaacttacaaaacgtagaccactatttagaacatttacacatgaattggatgctgaggataaaagggtcgtagagtcagtgtttgttaacagaacctttgattgtgattctccattaataggatccgtatctggtagtacatcttgtgttttagttgctgctgatattttattccctgatatgactatggtggaaaggaagaaattagcaatagcaacctttgcatttttagttggtggaggataccattcagcaactgaggtgtttgatgttgcctatcctggattagatttgaataaagaaatagaagagttgattgagaataacccgatccaagaaaatgctggtgtggctaccttacggcagcttatcggaaacagtggtttttaa

SEQ ID NO: 6355 - DNA, 1386 bp, Photorhabdus luminescens
atggaacactacattccggtcgttggtctgggtgtagccgtatttacgttgatctttctggtgctacgtacccgtgttcatgctttattagccatgctcatcgcagcagcgatcgctgggctctctggtggcttaaccgcagcaaataccattgatgttatgactaaaggttttggctccacactgggcagtatcggaattgttatcggtctgggggtcatgatgggacgggtgctggaagtttccggcgccgcggaacagatagcctacagctttatcaaatggttaggtaaaaaacgcgaagagtgggcattagcgatcaccggttatatcgtcagtatcccaattttcgtcgactctgcctttgttatcctctacccactggcaaaagcactcgcaaaaaagggaaaacgtcatcttctaacgcttggcgtggcactggctggcggattggttgttacccaccacactgttccgccaacaccggggccactgggggttgctggtattttcggtgtcgacattggtgccatgatgttaaccggtatggttctggcggtgccttgcgttattggcattgtattttatgccaaatggttagcagtaaaatatcctgaatttcaacccattgatgaagcagaagaagcgcaagatctacaaacaatccaccaacgctacatggaagagaaagcgaacaaaccgctaccgagcctatttctttccctgctgccgattattgtccctatcgttttgatcttcattaaagccattaatagcctattattaaacactaaaactttgactggacaagaaaacaacttctattttcagacatttgatttccttggtgcacccgttattgctttagccatcagcgtattattggcggtttataccttgatgccaaaagccaataaacatgaagtcattgaccgtctggaagaaggtttacaggctgccggtattattttattggtgacaggcgcaggcggtgcgttaggagcggtattgcgcgaaagtggtaccggcaccattctggcgcaatatatagccactctcccactaacaccggtgctgattccatttatcatcgcaacactggttcgcttaattcaaggttccggcacggtggcaatgattactgctgcttctatttctgcgccaattattagtcaaattccggggatcaacatgctggttgccgcacaagcagcaacgatgggctcattattctttggttattttaatgacagcctattctgggtcgttaaccgcatgatgggaatcaaagatgccaaacaacagatgttcgtttggtcaatacccaccactattgcatgggcgattggcttgtgtggtgtcatcatcttggatctggtgttatag

SEQ ID NO: 6356 - DNA, 966 bp, Photorhabdus luminescens
atgaaagtcataatcactggtggagcaggttttctaggccagcaactcgccagcactttgctaaacaaccatcaaacattaaatttcgatcaacttatattgaccgatattcaatgccctgtctcaccggttaatgatccccgcgtccagtgtctggcattggatttaactcaatcaagggctgcggaaaagctgatcgatgaaaacagcacggtattattccatctcgccgccattgtcagtagtcacgctgaaagcgattttgatcttggcttgcaagttaactttgatgttactcgcaacttattaaacgttgcccgggctaaaaatccaaaattgaaatttattttcaccagctccttggccgtatttggtggagaattacccgcaaccattacagatcaatgtgcggttaatcctcaatcatcctatggtgcacagaaagccatgtgtgaattgatgattaacgattactcccgcaaaggatacgtcgatggccgagttcttcgtctaccgacaatcagtatccgccctgggaagccaaacaaagcagcatcctcttttgccagtgctatcatccgtgaacctctacacggagaaagcagcatctgcccagtttctcgcgatctgactttatggctctccagccctgaaaccgtgatccacaactttatacatgcggttcaaattccggcggaaaaatttggtctttcccgcacagtcaatttaccgggtattagtgtcacggttcaggagatgattgatgcactggcagaggttgccgggcagaaagcggtggaactcatccgcttcgaaccagacgaaaacattaaccgtattgttgccagttggccgggtcatttcgatatcagccgtggcttatcactgggttttcatgctgataatactttcagtgatacaatccgtgcctttattaccaataacctgtcccaaactggaggctaa

SEQ ID NO: 6357 - DNA, 768 bp, Photorhabdus luminescens
atgcttccatcagagcgtagggactttatttatcgctatgtacacgaatatcggacaatttctatcagtacactggttaaactgatgaatgtctcacatatgacagtacggcgggatatccacactctggaggaagaaggaaaagtcgttagtgtcagtggcggtgtgcaacttagtgatgttttacgtcaggaattgccttggaatgaaaaagcccagcttaatcatcgccataagcgggaaattggtcaatatgcagtctctatggttgaagatggacaagtggtctatcttgatgctggcaccaccacgtttgaaattgccagagtcttggctgagcgttttaacctcactatcatcacgaacgatttttccattacccaatatctgatgaacaaaccccaattaaatctgttccataccggggggcaggtagataagagaaatcattcctgtgttggccctatcgccgccatgctgcttcgcaatctaaatgtggatattgcctttattagcaccagttcatgggatctagagcatggtgtctccacgccacatgaagaaaaagtattagtcaaacaggcagtattggaaatcgcccgccgtcgtgttttggtatctgatagcagtaaatatggcaaatacggcatgtttcgggtctgcccgcttgcaagtttggatgatattgtctgtgacagccagcttccgccgaaagtgcagcaacaattacgagaacacaacctggtattacatactgtcagcgtataa

SEQ ID NO: 6358 - DNA, 780 bp, Photorhabdus luminescens
atggctaaattcgcggcaaacttgagcatgatgttcaatgatgtacctttcacagaacgttttgcccgtgcagccaaagctggatttaaaggcgttgaatatctgtttccttatgaagtcgcagcggaagagcttgctgccctattaaaacagcatcaattaacccaagctctattcaacatgcccgccggagactgggcggcgggagaaagaggaatagcctctatgcctggccgtgaaaaagaatttgccgccggtgtgcaaaccgcgctgaaatatgcactggcgctgaactgcaagcaagttcatgcgatggcaggaaagctgcatgaacacttcacaccagaacaacaacgtgagtgttatatcagaaacattcgatatgccgctgatgtgatggcagaacataacatcaacgtattaattgaaccaattaatacgcgtgatatgccgggttactttctgacaactcagcatcaagctgaaacattactcaaagaaattgaccgtcaaaatgtttttatccagctagatctttatcattgccagattatggaaggggatttgctacgcaccattgaacgtctatgggacaaattcagtcacatccagattgcctcggtgcccgaacgccacgaacccgatagcggcgaagtgaactatccgtggctatttaacaaactggatgaaatgggctatcaagggtggttgggctgtgaatatcaccctgcgggttacaccgaagagggtctggattggttgaccaaagcacagaaataa

SEQ ID NO: 6359 - DNA, 660 bp, Photorhabdus luminescens
atgtacaggagatgtttcatgagtgaacaagcactaaggtcagagttagtcgaatgggctcgttcaatgttctaccggggttatagcagtggcggtgcaggtaacatcagcgccaaactggaagatggcacgattatcatcacgccgaccaactccagttttggtgacttgcaagcgaatcgcctgagtaagctagatgcagagggtaattggctatccggtgacaaacccacaaaagaagtttccatgcatttggccatgtaccgcaaccgtcccgaatgccatgcggtggtccatctacattccccttggttaactgccctttcctgcctatccaatctggatagaagtaactgtctacctccgattacgccctactatgtcatgcgggtcggaaaactgcctctggtcaaatatctgccaccaggagatgaaagaatcggtgaagaaattgcgaagctggccgcaaaacacaacgcaatcctcctctcgaaccacggacctgttgtcggcggcaaaactttacggcaagcttttttcaacgcagaagaattggaagataccgcacggctctatttaaccttattgccacacggcttcacgacattaaatgaagagcaagtccaagaacttgaaactcgttacccaaaaactgagtga

SEQ ID NO: 6360 - DNA, 1278 bp, Photorhabdus luminescens
atgaccattaaattgggcgttatcgctgatgactttaccggcgcaaccgatatcgccggttttatggcacaaagcggttggcgagttgtccagttactggatacacctgatgaaaatatcgccattccacaggatattgatgctatcgttatcagcctgaaaagccgttcctgcccgatagacgaagccgtgaataacgcagtgaaatcctgccgctggttacgtcagaaaacaggttgtcaacaaatattcttcaaatactgctcaacttttgactctaccagcaaaggcaatattgggccggtcacggatgccctgatggatgaactacaaacagacatcacgctgatctcccctgcccttcccgttaacgggcgaaccgttatacatgggcatctatttgtcaacggtcaactacttaatgaaagtggtatgcagcaccatccggtgacaccaatgacagatgccaatctactgcgcctaatagaacaacaagctcaagggaaagcagatctggtggatctggcatgtgtacaccaaggcgagcaggcaatccgcgtaaggctaaatcatttacaacaacaaaacatacgctacgcaataacagataccctctccatgaatgacctactgcctattgccagagcggcatcagcgctgaaattaatcactggtggctctggtcttggtgctgcccttgccagcacagacaccggtaagccattgatgccataccaaccggaaggagcaaccccacccgccgagaatagacgcaccgtgatcctttctggcagttgttccgtcatgaccaacaaacaagttgctctataccagaaattcgctccaactaaagccctgaatattgattcatgcatcaatgatccacaatatgccgaaaagctggttgcgtgggttattcagcaatccgaaaactatctggcaccgatgctatacaccactcacctcccagaaacattacagaaaatccagcaacaatatggtgcaactactgccagtgaagcaatagaaaacaccttcgccagcgttgtaaaaggtctgagccagctaggattcaatacctttattgtcgcaggcggcgagactgccggtaagatagtacaaagcttggacatccaacaattcagtatcggtgcacccattgctcccggagtaccttgggtacacgatcgacaacacaattattggctggcattgaaatcaggtaacttcggcaatatcgatttcttcctgcatgtacaggagatgtttcatgagtga

SEQ ID NO: 6361 - DNA, 906 bp, Photorhabdus luminescens
atgagccaatcaatacaaaaaataggaattataggattgggggctatgggcatgggaattgcccgcgcgttaatacgcgcgggcattcccacgtatggatttgatttaaaccaaaaagcctgtgaccaactactacaagcaggcgctaaagcggcgacaaacaacgcagcaaattgggcatcagagctggatgctatcttacttgttgttgtcaatggtgctcaaatagaaagcatcctgtttgagggcgaaacaccgttagtcaaccagttaaaagccggtacgatcattgtgcttcacagtaccgttgccgcagaacaggctaaagattttgcccatcgtcttagccaacacaatctaaacatgctggacgcgcctatttcagggggcgcactaaaagctgaacaaggccagctcaccgttatggcttccggtgaacccgcattatttgaacaactaaaacccgtatttgatgccaccaccgaacgtctctaccatgttggaaatgaaattggtcaaggctctaccgtcaaaacaatccatcaattacttgccggtatacatattgctgccgcagcggaaagtatggcattggcggccaaagccggcatttctctggagctgatgtacgacattgtcacccacgcggcgggtaactcttggatgtttgaaaaccgcgtcccccatattctggcaggggattacactgctaaatcctccgtagacatttttgtcaaagatctgagattagtcttagaaacaggtagagatctgaaactcccattaccattatcagccactgcacatcaaatgttccttactgccagtaatgaaggtttcggccaatgggatgacagcgcggttatcaaaacatttaaaggtatcactttgccggagaaaaaataa

SEQ ID NO: 6362 - DNA, 414 bp, Photorhabdus luminescens
gtgttatatcctattgcgattgaaattggtgatgagaaccacgcttacggcgtggttgtgcccgatatatcaggttgtttctcggcgggtgattcaatggaggatgcaataaaaaactccaaggaagcgattactgggcatttagagttattggccgaaatgaaccaattaccccctgaagcaaagtcattggattactggatcaaagatgaagaatacgcagggtgggcatgggccgtaattgacattgatgttgaaccatatttaggtaaatcgacaaaattcaacgtcactctgcctgatttgttatcaaagaaaatcgatgatcaagttaaagcaagcccaaacttgtacaagaatcgtagccactttttgcaagtggctgctttgcatgaattgcaaaacagtatttag

SEQ ID NO: 6363 - DNA, 849 bp, Photorhabdus luminescens
atgcaacaccaacatatacaaaagaaaattttacgcactatttgccctgatgctaaaggactgatcgccaaaattactaatatttgctacaaacaccaactgaatatagttcagaataatgaattcgtcgatcatcgtactggccgcttttttatgcgtactgagcttgaaggaatcttcaatgatgagacattgcttgctgatttagatgatgcactaccggtgggttctcaacgggaattaaatagtgcggggcgtcggcgtattgtcattatggtgacaaaagaagcgcattgtcttggggatttgctcatgaaaagcgcttatgacgggcttgatgttgaaattgcggcggttatcggcaatcacgcaacattacaatcattggttgaacaatttggcattcctttccatttaatcagtcacgagggtttaacccgtgaacaacatgatgaaaaactgattgcccagattgaccaatacaaacctgactacgtggtattagctaaatacatgcgagtactgacaccagaatttgtccaacattatccaaatcagattattaacattcaccactcctttttacctgcatttatcggggcgcgtccttatcatcaggcttatgagagaggggtaaaaatcatcggcgcaacagcacattatgtgaatgataatctggatgaaggtccaattattactcagaaggtcattaacatagaccacacatacacggctgaagatatgatgagagcgggccgggatgttgaaaaaaatgttctgagccatgctttattttgggttcttgctcagcgggtttttgtttacggcaaccgtactgtaattctttaa

SEQ ID NO: 6364 - DNA, 480 bp, Photorhabdus luminescens
ttgacagagctatgtccttgtggtagtggaatagattttgcggattgctgttccccttatctccaaaacataaaatttgcccaaactgccgaatcactgatgcgttcccgatacagtgcctatgtaaagcacaacgccgattatctaattaccagttggcatcctgactgccaggctgaaaagtggcgtttagatatagaacagagttttattgttacccagtggctcggactcaatgtcattacaactgaaaaaggcgaaaatgataacgaagcctatgttgaattttcagcttgctttcttgatcagaaatcccaagataagcaacttattcatgagcgttcacgttttcttcgtatagaccagcattggtactatattgatggcgtaaaacctattgatggcataaaacctcaaattggccgtaatagcccctgcccatgtggttcgggtaaaaaatacaaaaaatgttgtggttaa

SEQ ID NO: 6365 - DNA, 1026 bp, Photorhabdus luminescens
atggaaaaggcattggcaggcaaaaaaattctgattgtggaggatgaacctgttttttgttctttgctggcagggtatttgcgaacgttgggcgctaaggtattagtcgcatctaatggcgctgttgcactacaggtgctaggacgcgaagctcatgttgaacttattttatgtgatttagatatgccggttatgaatggcattgaatttattgcgaaattgacgaatgagggtattagcattccagttattattatttcagcgactaacaagatggccgaaattgatgaagtgcttcgtttgggagcaaaagatgttttattaaaaccggtttcagatcttaatgagataaaaaaatcggtgttggcctatttacatcctacggtctttatgtctggtgcgattgaacagaataacttgaataaagattggttaaccctaaagcataattcggatgaagcattaaatatgcttaagcagttacaacccccagtttctcaagtgattgcccattgtaaagtcaattaccgaaaattaaatatgattgataatccagggttaattctcgatatggcggcgttatctgacaatgaattagctttttattgtctagatattagccgttcaaaagagtatggtgtgatttcagcattattacttagagtcatatttaacagtttgttacaagagcatatcatccaccattcccggcgtttacccaatatggcagctattctaaatagaattaataacttactggaaggtgcagggttacaagggcaatttccattgctgcttgggtattatcatacgatcaataaaacggttctgctcacttccgcggggttacatgccagtattaagtcgggtaatcgccaaatccaattagacagtggtgttcctcttgggacattgagaacgatttgttcgaaccaagtttgttctcatagtgctgaatggcaatgtcggatttggaatacaaatagtcaaataaatctgatgctttcttcaatgtattctgggtga

SEQ ID NO: 6366 - DNA, 993 bp, Photorhabdus luminescens
atgccattagtaaacgaaccattagtagaaaaatcattagtagaaaaagtatcagtagaaaaaacatcagtagaaaaaacatcagtagaaaaaatagtaaaaaaagccgttattcccgttgcgggcttgggaacgaggatgttgcctgctacgaaagcaattcctaaagagatgttgcctttagtagataaacctcttattcagtatgttgttaatgaatgtattgccgctgggattaatgaaattatcttggtgactcattcatcaaaaaattcaattgaaaaccattttgataccagttttgagttagaagctatccttgagaaaagggtgaagcgtcaattattggacgaagttcaatctatttgtccaagtcatgtcaccatcatgcaaactcgtcagggaattgctaaaggattagggcatgcggtgttatgtgccaagcctttaatcggtgatgaaccttttgctgtgatactgcctgatgttattcttgatgaatacagtacagatctgaccagatataatctaagcgaaatgttggttcggtataatgaaacgggcgcgagtcaaatattagtagaacctgtacctcatgaagaagtttctagttatggtattgtcgattgtcagggggaaaatcttcaacccggtgacagcaaactcattaagcgcgtggttgaaaaacctaaaccgaaagaagcaccatcaaatctttctattgttggccgttacgtattgtccgagaaaatttggccgttattagcaaaaacagcgcccggtgccggtgatgaaattcaacttactgatgcaatcgctatgttaatagaaagggaacctgtggaagcctatcatttgcagggtgtaagccatgattgcggtaataagcttggttatatgcaggcatttgtccggtatggtatgaaacatcatgctttgggcaaagaatttacggattggttagtggcgttgcaggatcaggttaaagaataa

SEQ ID NO: 6367 - DNA, 1344 bp, Photorhabdus luminescens
atgaaagttacggtgtttggtattggctatgttggcttggttcaggcggcggttttagctgaagtcggtcataatgttctttgtattgatatagatgcaaataaagttgaaaatttgaaaaatggccaaattcccatttttgaacctggattagctccactggtgaaaaaaaattatgaagaaggccgtctgaattttagtacggatgcaaaggccggtgtggcacacggtaaattgcaatttattgctgttggtactcctcctgatgaagatggttcagcagatttgaagtatgtgacagcggttgctcgtactattgcggaatatatggatagctataaggtgattatcgataaatctacggttcctgttggtaccgcagataaagttaatgccgttgttaatgagactctgcgtcaacgtaatattgatattccatttgatgtggtttctaaccctgagttccttaaagaaggcgcggctgttgcagattgtatgcgccctgaacggattattattgggtgtgacaatgaaagagtcgttgacctaatgtatgaattgtatgaaccatttaatcgtaatcatgatcgtatgattgtgatggatatccgtagcgcagaactgacaaagtatgctgctaactgtatgttggcaacgaaaatcagttttatgaatgagatatctaatttagctgaaatgcttggcgctgatattgaacatgttcgtcaaggaattggttctgattcccgtattggctatcattttatctatccgggctgtggttatggtggctcatgcttcccgaaagatgtgcaggcgttaattcgtaccgcagagcaaattggttatcagcctaaaattcttcgtgctgtggagcaagtgaatgaactgcaaaagcataaattgccttcttttgtaacgcgccatttcggtgaagatttatccggtaagacattttctgtctggggattatcgttcaaaccgaataccgatgatatgcgtgaagcatcaagccgtgttttgatggaagcattatggcaggccggagccaaaatacaggcttacgatcctgaggcgatgcaggaagctcagcgtatttatggtcagcgtgatgatttattattgatgggaactaaagaagcagcgcttaagggagccgatgccttgatcatttgtactgaatggcaaagttttcgtgcgccagattttgatgtcatcaaagagtctctcaaaacgccggttatctttgatggccggaatctctatgatcctgaacgcctgcaatcccgaggttttacttattatgggattggtcgtggtgcttccattaatccggttatctga

SEQ ID NO: 6368 - DNA, 1014 bp, Photorhabdus luminescens
atgaaattcttagtcacaggtgctgctggttttattggctttcatgtgagccagagattattgcaaatggggcatgaggttgtgggtatcgacaaccttaatgactattatgatgtgaatctcaaacaagcacggttagatctattatttgataggtcaggttttaaatttgaaaagctagatttagctgacagaatagccattcccgatcttttttcgcgacaccaatttcagcgggttatccatctgggagctcaggcgggtgttcgctattcgttgcaaaacccaatggcttacattgattcgaatataatagggcatatcaatattctggaaggttgccgtcacaataatgttgagcatttattatattcttcttctagttctgtttatggattaaatagaaagcaaccgttttctacaaacgattcggttgatcatcccgtttcactatatgcggcaacgaaaaaatcagatgaattaatgtctcacagttactctcatctttatcagttgccaacgacaggtttgcgcttctttacagtatatggtccgtggggacgtcctgatatggctttatttaagttcaccaaggccatgttatcagggcagcctattgatgtttataaccacggtaatatggttagagattttacgtatatagatgatatcgttgaatcaataatcagattgcaagagatcattcccacatcaaatgagggctggatggttgaagatgggcaaatatctgccagctctgccccttactgtatttataatattggtaatggtcaaccaactagactaggtgattttattgaagcaatagaagaatcattaggcattcaggctaagaaaaatttcatgcccatgcaagatggtgatgttctgtcgacctgtgctgattcaagtggcattgtccaaaaaatagggtttgccccaaatacatctgtgaagcagggtgtgaagcagtttgtagagtggtatttgagtttctatcatcagtctaaataa

SEQ ID NO: 6369 - DNA, 405 bp, Photorhabdus luminescens
atgagcgatttaaaaaccctaaataacatccgtactttacgagcccaagcaagagaatgccaacttgagttcttagatgaaatacttgagaaactgaccgtcgttgttgaagaacgtcgtgaagaagaaagtcaggtacaagctgaattagaggaacgtacacgtaaattggaagaagttcgtaaaatgattcttgaccaaggaattgatccaagcgaattgcttcagacaatgagcgccggcaaatctgctggtaaagcaaaacgtcctgcacgtccagctaaataccaatatgttgatacaaacggtgaaactaaaacttggactggccaaggacgtacacctgctgttatcaaaaaagcaattgaagacgaaggaagaacgctggaaagtttcttactctaa

SEQ ID NO: 6370 - DNA, 606 bp, Photorhabdus luminescens
atggctcaactttatttttattactccgcaatgaatgctggaaaatcgacatccttgttgcaatcctcttataactataatgaaagagggatgagaacgctggtgtttaccgcagaaattgacacccggtttgaaaatggaaaagtcaattctcggattggattatcttctgatgcacttctgtttagtcaacagacagatattggtgagttgatcagaaatgaaaataagcaggcaaaagtgcattgtgtgcttattgatgagtgccattttctcacgaaagcacagattgaacagatatgtaaggtgactgattatgatgatattccggttctttgttatgggctgagaactgatttcagaggcgagcttttcagtggtagccagtatcttctagcatgggctgataagttagttgaattgaaaactatttgctattgtggacgcaaagcgaaccgtgtattacgttttgatagcgaaggtgcggccatttatgatggcgagcaagttgatatcggtggtaatgaaaaatatgtgtctgtttgccgtaagcactatatggaggctattaatgaggcgaggaaaaacagaaaagacagcgtgtaa

SEQ ID NO: 6371 - DNA, 2634 bp, Photorhabdus luminescens
atgactgtaactcatgttactgaactgaacgaactcgttgctcgggtaaaaaaagcacaacgtgaatttgctaacttttctcaggagcaagttgacaaaatcttccgcgcagcagcccttgcagcggcagatgcacgtatccctttagcaaaattagccgtagcagaatccggtatgggcattgtcgaagacaaagtaatcaaaaaccactttgcttccgaatatatctataacgcttataaagatgagaaaacctgcggcattttgtctgaggataaaacattcggcaccatcactatcgccgaacctattggcttaatctgcggtatcgtgccaaccactaacccaacatctaccgctatttttaaggccctcatcagcctaaaaacccgtaacggcattattctctcaccccacccacgcgccaaaaaagcaacaaccaaagcagcagaattggttctatccgctgcggttgccgcgggtgcgccaaaagatattattggctggattgatgaaccctccgttgaactttccaatgcattgatgcaccaccaagacatcaatctcatcctggcaaccggaggcccaggtatggtaaaagcggcatacagctctggtaagcccgcaatcggcgtcggtgccggtaacaccccggttgtcattgatgaatcagctgatattaaacgcgctgttgcatctattctgatgtctaaaacctttgacaacggcgtcatctgcgcttcagaacaatccgttatcgtggtggatgaaatttatgatcaggtgcgtaaacgtttctttactcatggcggttatctgttacaaggcaaggaactgaaagctgttcaagatatcattctgaaaaacggtagtctaaatgcggaaatcgttggtcaatctgcaacaaaaattgccgaaatggcaggcattaatgttcctgaaaagaccaagatcttgattggagaagtgagcttaactgatgaagcagaaccctttgctcacgaaaaattgtctccactgctcgctatgtatcgtggtaatagctttgaagatgccgtagaaaaggcagaaaaattggttgaaatgggcggaattggtcacacttcttgcttgtataccgatcaggacaatcaagccgcacgaatcaagtattttggcgataaaatgaaaacagctcgtattctcgtgaatactcctgcttctcagggcggtatcggtgatctctataacttcaagcttgccccctctctgacactaggctgcggctcttggggaggaaattccatctctgaaaatgtagggcccaaacatctcatcaataccaaaaccgtggcgaaaagagcagaaaatatgctgtggcataaacttccgaaatccatttacttccgtcgcggctccctgcctgtggcattagaagaagttgcaaccgacggtgcaaaacgcgcttttatcgtaacagaccgtttcttatttaatcatggttatgctgatcaagtcactgatgtgctgaaatcccacgggatagaaacagaagttttctttgaagttgaagcagaccctaccctaagcactgttcgtaagggtgcggaacaaatgcactcattcaaaccggacatcattattgctctggggggagggtccccaatggatgcggccaaaattatgtgggtgatgtatgaacaccctgaaacgcatttcgaagagctagctctacggtttatggatatccgtaaacgcatctatagattccccaaaatgggggttaaagcgaaaatggtcgccattaccacaacttccggcacaggttctgaagtgacaccatttgcggttgtcactgatgatgcaaccggccagaaatatccactggctgattatgaattgacgcctaatatagctattgttgatgccaatctagtcatggatatgccgaaatcactctgtgcttttggtgggctggatgcaatcactcacgctttagaagcttatgtatcagtcttagcaaacgaatactctgacggacaagcactgcaagcgctaaaactactgaaagagttcctcccaaccagctatcatgaaggggccacgaacccagttgcccgtgaacgggttcataatgcagcaactattgcagggattgcatttgctaatgccttcttgggggtatgccactctatggcgcataaactgggttctgagttccatatcccgcatggcttggctaacgcattgctgatttgtaacgttatccgctataacgctaacgataacccaaccaaacagactgcattcagtcaatatgatcgcccacaggcccgccgtcgttacgctgaaattgccgatcatcttggtttatcggctacgggtgaccatactgtcacaaaaattgaaaaactgttagcctggctgaaagagctcaagtctgagctaggtatcccgacatctatccgtgaagcgggcgttcaagaagctgactttctggcaaaaattgataagttatctgaagatgccttcgacgaccaatgtaccggtgctaacccacgctacccgctgatttctgagctaaaacaattgctgttggattcatactatggacgagaattcacagaaaccgttgcaacagaaaaaagccaataa

SEQ ID NO: 6372 - DNA, 645 bp, Photorhabdus luminescens
gtgggtgacttactgctggatctgccaggttacattaagttttttgttgggctatttgcactggtcaatcctgttggtattttgccggtttttatcagtatgactcactaccaagcccaatcggcgcgtaatagaactaactttattgccaatatttctgttgccatcattttatggacagctttgctgttaggtgacttgatactgcgtatgtttggcatttccattgactcttttcgcattgccggtgggattttggttgtgaccatcgcgatgtcgatgattaacggtaaacttggagaggacaaacagaataagcaggaaaaatcagaaacagccgttagagaaagtgtgggtgtggtgccgttggcattgccgttaatggcaggtcccggtgcaatcagttcttgtattgtctggagttctcgttatcagggatggcagaattttattgggttgatgcttaccagcgcgttgtttgctttttgctgttggttattgtttcgatctgcacctttagtcgtcaaatatcttgggcaaacaggcattaacgttatcacccgaattatgggactgctattgatgtctttggggattgaactgattgtgacagggatcagagcgctattcccagggttgctttga

SEQ ID NO: 6373 - DNA, 1638 bp, Photorhabdus luminescens
atgaagatcaaacgattaaaattacataagtttatttcctgtatatttttattatcggcgttttctgttacagccgtgtctgccgctgaacttccagatggtgtgaaacttgcggataaacagcagattattattaataatggcgcagaagttgcctcgcttgatccacataaagtcgaaggtgtaccagaaagcaacattattcttaatctcctggaagggttagtgaggacgggttctgagggagaagttgtgccaggcgttgcgacccattgggaaaatcaggattacaaggtatggactttttatttgcgtgataatgctaaatggagtgatggaacgcctgtcactgcccacgattttgtctatagctggcaacggttagctgacccaaaagtgggttcaccttatgccagctatcttcaatatgcttacgttgaaaatattagtgatgttctgaagggtaaaaaattgcctgatcagttgggggtaaaagcgctggatgatcatcgtttgcaggtgactctgacgcaccccgtgccttatttcgtcagtatgctcagccatacggcaatgaaacccgtcaaaaaggatgtggtcgaaaagttaggtaataaatggacgctaccagaaaactatgtgggtaatggggcgtatctgttaaaagagtgggtggtcaatgagcggatagtgatcgaacgcaacccgcgatattggaacaatgcaaaaacagttattgatcaagcgactcttttaccccttcaatccgaaaccagtgatattaaccgctatcgtagtggagaggtaaatatcaccaatagcgccattccgccgactctgtatcagaaaatgaaaaaggagctccctgaacaggttcgtgtcagtccatatctttgtacgttttattacgaaattaacaacaaaaaaccgccatttactgatgttagagtccgcgaagctgtcaaattaagtctcgaccgggatattatcgctggaaaaattatggggcaggggcaaatcccggcttatggtttcacgccaacatttatcggtggtggcgattttgttaagccagaatgggctaattggacacaggagcagcgcaataaacgcgccaaagaattgttagcccaagccggtttcaatcaggcgaatccattgaagttcaccttgttgtacaacacctctgagcaaaataaacaacaagctattgctgccgcttccatgtggaaaaagaatctgggagcggatgtgattttgcagaatcaggaatggaaaacctctcttgaaagccgccatcaagggaattatgaggtgaccagagcaacctggtgtgccgattacaatgaacctacagcatttttaaacatgttgttgtcagacagcagcaataacaccactttctatcagaataaaaattttgatagctatctggaacaggcgttaatcgctaaggatgctattgagcgtaagaaattatatcaacaagccgagtttcaactggataaagactcggtgctgattcccgtttattaccgggtgagtgtacggcttgttagcccatcagtgggagggttttcagggaaagacccattggattatatggatattaagcgactgtataggataaaaaattag

SEQ ID NO: 6374 - DNA, 1641 bp, Photorhabdus luminescens
atgataaacacaacgaaaaagagactacttactgtcagcatcagcgctgcactgagtatgataatggcaagtcaggtctttgcggcaaaagtgcctgatggcgttcaattagcggataaacaggttttagtccgtaataacggttctgaaccgcaatcgttagacccgcataagattgaaggagtaccagaatcacatttggcccgcgatctgtttgaaggggtcgtcatcgttggtccgaatggcgaaattttaccaggttctgcgaccaattgggaaaataaagacttcaccgtctggacattccatatgcgtaaagatgctaagtggtctaatggtgatcctgtcactgcgcatgattttgtttacagttggcagcgtctggctgatcctaataccgcttctccctatgaaagttacctccagtatgcccatatcaccaatattgatgacatcatcagtggtaaaaagaaaccagatgctctgggagtaaaggcgctggatgactatacattgcagcttacattgagcgaagcggttccttatctaccaaggcttttggctcactcttcaatgtcaccggtgcataaagcgacggtagaaaaatatggcgaaaaatggactcagtcgcagaattttgtcggtaatggggcttataaactgaaaaattgggtagttaacgaacgtattgtgatggagcgcagcccaacatattgggataacaaaaataccgttattgatcaggttactttcttgccaatttcgtcagaggtcacggatgtcaatcgttatcgcagtggtgaaattgatatgacttataccaatttgccgattgagctattccagaagctgaaaaaagagatcccgaacgagttgcacattaacccacaattatgtacttattattacgaaattaataacgaaaaacctccatttaatgatccccgcgttcgtactgcactgaaattggctatggaccgcgacattgtgaccaataaagtaaaagcacagggtgatatcccggcttccggttatacaccgccagtgactgatggtatgaaagagatgaaaccggtgtggtttactggttggagtcaggaacagcgcaaccaggaagccaaaaaattactggctgaagccggttataataaagataatccattgaaatttaatttgctttataacacatctgatctacataaaaaaattgcaatcgcggtagcttctatttggaagaaaaatttaggtgctgatgttcgtttagaaaaccaagagtggaaaactttccttgatacacgacatcaggggaattatgacgtggcccgtgctggctggtgtgccgattacaacgaaccttcttcattcctgaattcaatgctttcttacagtagtaataacacggctcattataagagtgatgagtttgataaactgatgaaacaatctctgaaagtggcaacagatgatgaacgtgctgctgtttaccagcaagcagaagcgcagttagataaagattcggctattgtccctctctattactatgtgaatacccggttagtgaagccctatgttggtggctatacagggaaagatcctttggataatttacacaccaaagatttttatattatcaaacactaa

SEQ ID NO: 6375 - DNA, 921 bp, Photorhabdus luminescens
atgcttaaatttattttacgccgttgtttagaggcgatcccgacactttttatccttatcactatttcgtttttcatgatgcggttagcgccgggcagcccatttaccggtgaacggaaattgccaccagaagtgctggcaaatattgaagcgaaatatcatctgaatgatccaatttataaacaatattttgattacttaattcaactcactaaaggagattttgggccctcttttaaatataaggactactctgttaacgatcttgtggcaacagcgtttccagtatcggctaaattaggcgtctcggcatttatcatggcggttgtcttgggggtcagcgccggggttattgcggcacttaatcaaaataccaaatgggattatacggttatggggttcgccatgacgggggttgttatcccggggtttgtcgtggcaccgttactggtgctggggttcgctattcatcttaaatggctaccgggaggaggctggaatggcggtgcgcctaaatatatgattttgccgatggtggcattgtctttggcttatatcgccagtatctcccgtattacccggagttcgatgatagaagtgctgcactctaactttattcgtactgcgcgagctaaagggttgccattgcgcatcattattttccgccatgctttaaagcccgcattattaccggttatctcttatatggggcctgcttttgtcggcattcttaccggctcaatggtgattgaaacgatcttcgggttaccgggaatagggcagttgtttgttaatggcgcattgaaccgtgactattcgttggtgttaagtctgactattttagttggtagcttaacgattctgttcaatgcgattgttgatgtattgtacgctgttatcgatccgaagattcgttattaa

SEQ ID NO: 6376 - DNA, 909 bp, Photorhabdus luminescens
atgatagttaataaacaaaatagcgaagctctggaaaatttctctgagcaattagaaattgaaggccgtagtttgtggcaggatgcacgacgtcgttttattcacaaccgggcagcgattgccagtttgtgtctgctatctttgattactttgtttgtgatcttggcaccgatgttagctcaattcacttatgacgatactgactgggccatgatgtcgatgcgacctgattttgaatctggtcactattttggtaccgattcttccggccgtgatttactggtgcgtgttgccattggggggcgcatttcattaatggttggggtggcagccgctttggttgcggtcgtcgtcgggaccttatatggatcattatccggctatatgggcggaaaaatagattcagtcatgatgcgtatgttggaaattttgaactcatttccatttatgttctttgtgatcctgctggtgaccttcttcggacagaatatttttctgatatttatcgccatcggtatggtgtcatggttggatatggcgcgtattgtccgcggtcagacactgagcttgaaacgtaaggagtttattgaggcggcgttggtgtgtggtgtgccaacccgtcatattgtgctgcgccatattgtccctaatgtgttgggagtggtggtggtttatgcctctttattggtgccaagcatgattctgtttgaatcatttcttagttttctgggattgggaactcaagagccgttaagcagttggggcgcattgttaagtgatggtgcgaattcgatggaagtttccccgtggttgctgatgtttcctgccggttttctggtggtgacactgttttgttttaactttatcggcgatggcttgcgtgatgccctcgatccgaaagatcgttaa

SEQ ID NO: 6377 - DNA, 999 bp, Photorhabdus luminescens
atggacagcgttaaaaaccagaaaagttctgagccgttgttaattgttaaagagttggacgtgacttttagcacccctgacggggatgttaccgcggtgaacaagctgaattttgatttacgagcgggggaaacgctgggaattgtgggtgaatctggttctggcaaatcacaaaccgcttttgctttgatggggctactggccagaaacggcaaaattggcggttccgctatttttaatggcagggaaattcttaaccttgaagagaaagcgcttaaccgcatgagagcagaagagatatcaatgatatttcaggacccaatgacatctctcaatccctatatgcgtatcggcgatcagcttacagaagtattgatgttgcataagcatatgagtaaaagtgaagcataccttgaatcgatacggatgctggatgccgtcaaaatgccagaagcacttaagcgaatgcggatgtatcctcatgaattttctggtgggatgcgtcagcgtgtgatgatcgcgatggcgttgttatgtcgaccaaaattgttgattgctgacgaaccgacaaccgcacttgatgtcacggttcaggctcagattatgactttactgaatgagctgaaacgggaatttaataccgcgattattatgattactcacgatttgggggtggttgctggtatttgtgacaaagtgttggtgatgtatgcggggagaacgatggaatatggttcggcccgtgaagtgttttatcaaccaacccatccttattctattggcctgcttaatgctgttccacgtcttgatggtgatgaagcatcgttgacgaccattcccggaaatccacctaacttattacggttgccgaaagggtgtccgttccagccacgctgccagttttcagtagatcgttgtgtaaattgtgatccagggttagagacatttggcaacgggcgtttgcgagcttgttttaaagcaccgggggaattggtatga

SEQ ID NO: 6378 - DNA, 1002 bp, Photorhabdus luminescens
atgagtccgattgaagaaagacgtgtgctgctggaagtagcagatctgaaagttcactttgatatcaaagatggcaaacaatggttttggcaaccaacaaaaaccttgaaagcggttgatggtgtcacattaagattatacgaaggggaaacccttggtgtggttggtgaatccggttgtggtaaatcgacttttgcgcgtgcaattatcggattggttaagtcttccggtggttcggtaacgtggttgggaaaaagcctgctggatatggatgataaacagtggcgggatattcgtagtgatatccagatgatattccaggatccattagcatccttaaacccgcgaatgacgattggcgatattatcgctgagccactgcgcacttatcatccgaagatgaaagggctggaaattaaagagcgggtaaaagccatgatgatgaaggttgggttattaccgaatttgattaaccgttatccgcacgaattctctggtggtcaatgtcaacgtattggaattgcccgtgcacttatccttgaacctaaattggtgatttgtgatgagccggtatctgcacttgatgtatccattcaggctcaggtcgttaacttgttgcaaaaattacaacgagaaatggggctgtcgctaatttttatcgctcatgatctggcggtggttaagcacatatctgaccgtgtactggtgatgtaccttgggcatgcagtggagttgggtacttatgatgaggtttaccataatccacagcacccttataccaaggcgttgatgtcggcggtaccggtgcctgatccagataaagaacgaaataaacacattgaattgttggaaggggaattaccgtcacctatcaacccgccatcaggatgtgttttccgtacacgttgcccgatggcagatcctgaatgtgctaaaacccgaccattgatggaggggagtttccgccatgccgtgtcttgtttgaaggttgatccattgtag

SEQ ID NO: 6379 - DNA, 330 bp, Photorhabdus luminescens
atggatttagacctcaataaccgcatgacagaagatgaaacccttgagaaagcctatgacatctttctcgaactggcttcgttcaaccttgaccccgctgatattctgctatttagcttacaattcgaaatacgtggcggcgcagaattactgcccccttctgatgggtggcttaaacacgtggatttcaatccaaaccctgatttctttgccgaagtcattatcgggctagcagaatctgaggatgctgagatcaacgatgtttttgcccgcatccttatttgtcgagaaaaatctcacccgatttaccatattttgtggaaagagtga

SEQ ID NO: 6380 - DNA, 1470 bp, Photorhabdus luminescens
ttgccgaatatgacaaccttttattccgtcctaagttggcttgctattttcttttattggctgattgttgccagtatcactttacgcattctgataaaacgccggccggtcacttctgctatgacctggctgctgattatctatatcctacccttagttggaatcatcgcttacctgtcatttggtgagctgcatttgggaaaacgcagagttgaacaagcaaaagccatgtggccttcaacaaccgtatggcttgaagaattgcgcaaatctcgccatatcttcgcgacagaaaatagcgaagtcgcgacaccactattccagctttgcgaacgacggcaagggctggcgggtgttaaaggtaacaagatccaactactgaaaacctatgaccattcactaaaaaccattatcaaagatattgagaatgccaaacacagtattgatatggtgttttacatctggcaaaccggcggcttggttgagcaagtgacggatgctcttatggccgcagcacaccgaggagtcagatgccgtattatggtggattcagccggtagctggttatattgccgtagccaatacccggatatcatgcgccaggcgggaattgaatttgttgaagctttgcaagtcaatatattccgtctatttctacgccgtatggatctgcgccagcatcgtaaaattatcttgatagacgattatatctcttatgccggcagtatgaatatggtcgatccacgcttttttaaacaagatgccggtgttgggcaatggatcgatatcatggtacgaatggaaggaccggttactacaaccatgggggttatttacgcttgtgactgggaaatggaaacaggtcaacgtatctttccgccatcaccagataacaatatcatgccatttgaacaggccagtggacacacaactcaggttattgcatccggccccggattccctgaggagttgattcaacaatctttaatgacggctattttctctgcccgtaagcaactgattttaactaccccttattttgttcccagtgatgacctgacaaatgctatttgcaccgccgctttacgaggggttgaggttattattatcgttccacgcagaaataatttctttttagttcgttgggcaagccgggcattttttgctgaactattaaacgccggtgttaagatttatcaatttgaagatggattgctacatactaaaagcgttttagttgatggccaactcagcatggtgggttccgttaatctcgatatgcgtagcctgtggctaaatttcgaaattaccgtggtgattgatgatgaaaactttggtaatgatctgacgctggtgcaatacgattatatcgcccattctacattgctggaaactcatgagtgggaacaacgccctttgtggcatcggattattgagcgtatttgttacttctttagcccgctactgtga

SEQ ID NO: 6381 - DNA, 183 bp, Photorhabdus luminescens
atgaaacgtagtcggaatgaagtagggcggtggcggatgttacgccagaatctcaaccgccgtcgccgttggttggaagggcaatcaagacgtaatttgcgtatttattcactacgtaaattagatggttataaacagcgtcgagctttattgtttgttcagcatggcgaatggatacattga

SEQ ID NO: 6382 - DNA, 681 bp, Photorhabdus luminescens
atgctgctaatcaagaattcccttatgcgctggatacattggccaatattgttgtcagtttgtttacacgtttctgttgctgccgcacttttttgttctgcaataccggaaaagcagcctgatgctgcacttatgtctgttgctatgattcagttagctgccgaagaagcgcctgtttcagaaccggcagcaccagaacctgaatcagagccagaggagccggaacctgttccagagccggtaattccaaaaccagaggtgaagaagctaaaaccggaagtgaagaaaaagattgttaaaaagcaatctgaacccgttgaaaagagggctgagcaaccggaaaagccgttgtttaatcagaatgcattagctaaccgtactgataataatcagaataaaccggtggttaaaccgcagaatgggccaagagcattaagtaaagcgttacctgtctatccatccagagcgtcagccttgggcaccgaaggttatgtgaaagtcaaatatgatattgatgaagacggacgggtaaaaaatatagaagtgattggggctaatccacctaatgtttttgaacgggaggtgaaaaaagcgatgagaaaatggcgctttgaaaaaatacccgcgcttggttatatcacaaccgtcgaatttaaaattacgggtatatctcaatcctga

SEQ ID NO: 6383 - DNA, 432 bp, Photorhabdus luminescens
atgacacaacaacaattacctaacggagagttagtcctccgcacactggctatgcccgctgataccaacgccaatggagatatttttggtggatggttaatgtcacaaatggatattggtggtgcaattctggcaaaagaaattgcggaaggccgtgttgtcactgtcagagtagatggtattactttcttgaaacctgttgccgttggtgatgtcgtctgctgctatgcacattgcctcaaaaccggtaacagttcgattaccatcaacattgaagtctgggtgaagaaagtcgcctctgaacctgtcggccaacgctatcgtgcaaccgaagcggtattcacttatgttgcggtaaatgaagataatacttcacgtcggttaccagaaggtaaaacccactttcaactcgctagcagtactagcgaataa

SEQ ID NO: 6384 - DNA, 537 bp, Photorhabdus luminescens
atgaaacaacttttagactttctacctctagtcgtcttttttgtcgtatacaagatgtatgacattttctacgcttccggggcgttgatcgccgctaccggtttagctgtcgcgatgacttatttcatctaccggaaagtagagaaagcctccctgatcacgtttatcatggttgctgttttcggtacgttaactttagctttccacagtgatctatttatcaaatggaaagtcactgtaatttatgcattattcgcattagctttgctaggcagccagtggtttatgaaaaaaccacttattcagaaaatgctaggaaaagagttaattttacccgatcttgtctggaataaactcaatatggcatgggcgctgttttttacagcctgcgcgctggctaatatttatgtcgcattctggttaccacaagatgtctgggttaattttaaagtatttggtctgactgccctgactctggttttcaccgtgctcagtgtagtatatatttaccgtcacctgccacgcgaacagaagtaa

SEQ ID NO: 6385 - DNA, 1758 bp, Photorhabdus luminescens
atgcagtggaaaaaactacagcgttggatgccagggttgggcaatttttctcattatcgcaaggaatggtttagtcatgatttaagagctgggctttctgttgccgcagttgctctgccagttgctattgcttacgccgaattgatgggaataagtgcaattatcggtctttatgcatgcattttacccatgttcgcttatgcactatttggtacttcaagacagttgattgtcgggccagatgccgcaacgtgtgccgttattgcagcggctgtcgcgccattggtttttggtaatgaagatgtacgctggcagctcacgatcgtaatgaccttaatgaccgggatatggtgtgttctcgccagtcacttccgattaggcgcgtttgctgattttctttccaaaccgatcctgaaaggattaatgaatggtgttgcattgacaatcattgtggatcagctagctaaagtctttggttttgctggcgttccgatgggattgattgaacgggtgatcgcattacctgccaagctcatgagtacacatttaccgacgttagcaatgtctgttgctatggtattgattttgctcactgttcgtttcttgcgcccgacttggccggggcctttgttagcaatggtattagcgacttatataagctggcaatttgatctggaaaaatatggcgttcagattgttggcagtgtcagcggtgggggattacctgttgtgccaatgcccgattttcagcctggcattatgcgtgagctagttatcccatctttgaaccttgctgttatcagttttgtcagttttatgatgacggcccgtagcttcgccagtaaaaacggttatcagattgatgcagattgtgaacttagggccttaggcattgcgaacattgcttctgctttatcacaaggatttgctgtcagtgctgccagcagtcgtactgcggttaatgatacgattggtgggaaaacgcaattggtctctgttattgcagcgaccattattttgctggttttgttatttatgactcgttttctggcttatatcccattgtcatctcttggtgtggtgctgatttattcggcatcgtcattgttaggcttacggcagatttggtcactgaggaaacgaaatcatcaggcatttactttatcactatttacattcattgccgtgctggtggttggtttgattaacggtgttggtttcgccgttctgctgggtttattacagtttttgcgaattatattccgcccgacagatcaactcttgggagtgaatgaccaaggaatgattcattcaattaatcatggcaatgatattaaaccaatagatggtgtgatgatgtaccgatttaactcgccattgacttatttcaatgttagctattttaaaaaacgggtactacagcatgtcgacagaattcaaaaaattaacaaaacgcaaaaacgtccgggttggctggttgtcgatgcggctgttagttttacccatgatgatgtcagtgtctttgctgctattgatgagttgattagtgaattgaaagtaagagatatcaccttggtgctcgccggtcgtcggacagaacttacccgttggataaaacagaataaactgcgaagtagtgatgacgatctgattgtggtgcccgatctctattttgcggtccgaatgattcaaagtaagcctgaatggtactctaattacgctaaaagatataatagcgttattgaaatcaaccaatga

SEQ ID NO: 6386 - DNA, 546 bp, Photorhabdus luminescens
atgaaaaaggcattgatagcctcagcagtggcagtgggtttatctgtattcgcatttgcagcaaatgctggtgaacatacgatttctggtggatatgctcagagtcatgtgaaagttgatggtgaaaagcttgatgaaaacccaaaaggctttaacctgaaatatcgctacgagctggataataattttggtgttattggttcatttacgctgacacatcagggttatgattactattatggtagtagcaagattggtactggtgatttagattattattctctgatggctggtcctacatatcgctttaatgagtacgtgagtgtatacggtctggtgggtgctgcacatagaaaggtaaagggtgaattttctgcctatggctatgactttgaatataaagagagtaagacctctgctgcttatggtctaggattgcaatttaaccctatgccaaattgggttattgatgcatcttatgaatattcaaaactgggtgatttcaaagttggcacttgggtaattggtgctggttatcgattttaa

SEQ ID NO: 6387 - DNA, 528 bp, Photorhabdus luminescens
atgaaaagaacattagtggcttcagtggtagcggtaggtttatctgtatttgcatttgcggcaaatgccggtgaaagtacgatttcgggtggttatgctcaaagtcatgtgaagtttaatggtgaaaagattgatggtaatccaaagggaaagggtttcaacctgaaataccgctacgagttggataataattttggtgttattagttcattaacatatacccacaagggtttcgataaatttgatgtgaattattattccttgatggcgggccctgcatatcgttttaatgactatgttagtgcatatggtatgattggtgctgcacgtggagagtttgaagttcctgttttgaatgggtcatataccgagggtaaatcatctgttagttacggactgggattacagtttaaccctgttccaaactggactattgatacatcctatgaatacgcaaaatttaatgacgccagattgggtgaccttaaagtaggcacttgggtagttggtgttggttatcggttttaa

SEQ ID NO: 6388 - DNA, 771 bp, Photorhabdus luminescens
atgccaatcacggcgaataccctgtaccgtgacagttttaactttttcaagaatcaactgttaagtaccctgaccctggccgttctggcggctctggttaccaccttattggggcacctgtttattcctgacagcgaacagatgaagttgctgacagaagcagaattcacgtttgccacctcaggcaaggccggtattcaagagctggtgtctcaaatgactccagagcaacaatcaatgatcatgcgtgcgggaatcggaaccattttctcaagcatgattggtagcgtgttactagttggtggtgtattgacactggttgcggcagtttcagcgggaaatcgtatctcttcattacaggcaattggtttatcagcaagccagttaccgaaactgttcctgttactgcttatctgcactctgttgattcaatttggcttaatgctgatgctggtaccaggcattattttgtcgatcgcgctggcgttatcacccgtgattatgactgccgagcgtcgcggcgtttttgcttctatgaaaataagctggaaactggcatttgccaatattcgcttgctggttccggcaattcttttatggctgaccgcgaggctcttgctggtgtttattattgaccgcctaacattcattcacagcgagatggcagggattattctcggtgtgtttaataacctcatttcagctattttgctgatttatctataccggttgtatatgctgattgcctctccacaacaaaaatcaatataa

SEQ ID NO: 6389 - DNA, 642 bp, Photorhabdus luminescens
atgaaaaaaatttctgcatttgtattagcagcggcaactttagtaccctcattcgcttttgctcatgaagcgggtgattttattttccgcacaggcactgcaacagtaagacctaatacaggttctgataatgtattgggggtgggttcttttagtgcggataataatacccagatgggtttaactttcagttatatgatgaccgataatattggttttgaattactggcagggacacccttccagcatcgggtaagtttaccgggtgttggtgatattgctaaagtaaaacatctaccgccgacattaatggcgcaatactatttcggctctaaagaaagtagtttccgcccttatgttggtgttggtcttaactatactactttctttaacgaaaaattcaatggtaattcggctgttaaagataataacttacatagtctggacttgaaagattcctggggtgttgcggggcaggttggtctggattatgagttagatcagaattggatgttgaacgcctctgtgtggtgggtaaacattgaaacagatgtgaaatttaaagcaggtgaccagcaatataaaattgatacccggcttgatccgtgggtatttatgtttggggttggttatcacttttaa

SEQ ID NO: 6390 - DNA, 1029 bp, Photorhabdus luminescens
atgattgaaaaggaattaagcctaactggcattaaaactcaacatataaatattgagaataaagacattaattctttaaccataaaagaagcgatgggtttgcctgataaaacaaaccaaactttaatgggggaattatttaaaatatatgatgagcactcaaaactagatagttgtactttacaatccatcattagagattttaatgaatgtttttctcatagatatgtggctggtaatttacttgctattcgaggggattctagaatttctatatttgaacctgatgtcatcattattcctggtggaaaagtacgtctaggtttatctcctgataatgtagatgaaattgtttcaatgtattctcaatatggagtattaaaagaatggattttaaaggaaataccgtcttatgaaattactcttagttcttttggtttggctagatattgcgtaaccaactatgaatattacctatttttaggtgatactggctatcaggagattcctgatagttgggcatggggtatgtatcctcatcaacgttctaattatccagtttattctgtatcttatgaagctgcaatgtcttatgcactttggctaagtgaaaagacaggtaggaatttccatattcctagtgaagcccaatgggaatatgcagctactgggggtaatgggcgtgagtttccgtggggaaatgagtttctgccagaccattgtaatagtattgaaagtggtattgttgatgccactccagtaggcatatttcctttaggcatggggccttttggtcatttagatttagctggaaatgttgaagagtatacttctgatagttatctaccctatcagtcaggtactgctgtatatgatgatttaatgcttactgaaggtagccactataaagttgctagaggaggtagttttacccggtttcgtgatctatgtagaacaagaagacggcatggaagatatcattctcctttgtatatcatgggattcaggcttgcggaaaatctagtttga

SEQ ID NO: 6391 - DNA, 1686 bp, Photorhabdus luminescens
atgcataaacatacctctcctatcagtggtgttgccacttatggtaataaatttgttttaagtgctggatatgataataaagtcattttatgggatgcttataataagaaaccaattagacgagtatatcatgaccatttggtaaatcagtgcgctttcagcccatgtggtaattatatagcaacagtaagtagtgattatacttgtcgtatttggctattgccagatatgacattatatggaattatcaattcgcatactgatgatgtggaatcagtatcattccacccaaataaaaatattgtggcaacatgttctagagataaaaccattattgtttctgattataaaggaaacgtcatagctcagttaaaagggcatgtagaggacgtaatctctgtggaatggagttcatctggaaacttaataagttccagcgatgacggtacaatccggatttgggatgtagattatcagaaagaaatagaatgtatagatcttgataatatagaaactgatactatttctattacgcctgatggggttatttatgctggaaatgacaatggcgaaatcataactataattaatggtaaattaaaaataacatctgcacatgaagcgggtattaagcgtctggtttatgacttccctcaaaaaattatggtaagcttgagttatgatagaaaaatgaaactttggaaagaaaaagataataatcttgaaagttatcatatagccgagcttcctccaattgtttggccaagatcttgtgcatttcttgatagtgataatttagtttttgcgtcatttggtgatagttatgttcaatataccatttccactcaagcatggcatcaagatcatgttagaccaacatacggttccaatgctgtatacgtttcaggcaaagacatttggagtgttggtgatgctggtatagttttctgtaataataggccatttgccgaaatgggaagtctgtgtaactttattatcgaatttgaaaatgtgcttattaccggtggacaaatgggaaaaatatttaatgctcgtactggtgatattatatatgaacatcattcccctctaaattgcgctgctgtttcatgggaagataatcaattttgtcttgttggtacatacactggagaaggtattgttttaagaaaaatagctggtgatattgttgttgataatatagtttcattacataaaaatgcaataaaaggagtttttatatctaaagaatttgttttttctgtatgtgccaatgcagcagttgcattacatagcattgaggacttttcatgttatgcatatattcctaaagctcatgaaaagattgctaatggatgtgatggcagtaaagaagggttgtttgtaagtgttagtcgagatttaaccctccgaatttggagaaatgaaaattatgaaataataaaaacaccaagttctcattcaataaaatgtgtagcatttgatgctaaaaataatcatatatctataggaaattatactggctggattggtgtatatgatttaaatgaaaacaaatggatattatgggaaaaacgttcattttatggtatatcaagtataagatacatacaacatgactttatttactcaacatatgatggaataaatgaatttgtttttaattatggggtaaaatatgattga

SEQ ID NO: 6392 - DNA, 597 bp, Photorhabdus luminescens
atgaataatatatcaattagaaatagtacttttataccgttgaaatctattaacaatgaatctgaatttatatcatttaatggatttacccaggataaagagcatttagctatacgtataggaaaatggtcagagaaacacatacctttggttaggatccattctgaatgtgtgacaggagaaatatttcactctcttttatgtgactgtggtgagcagttaaatgaatctttaaaagaaattgatattcatggaggagtcttaatttatttacgccaggaaggccgtggaattggattatataataaaatagatgcatataagctacagcgcaatgggttagatacataccaagctaatcaagctcttggtttcttagatgattatcgtgatttttctctcgcggctaaaatgttactggccatgaatatttcaaaaattcgtttgataactaataatccagataaaatacatcaaattactcagaatggaattgaaatatatgaagttattaataccaagacattcttaaatgaaaaaaataaaaattatttgactgctaaaaaaataaaaacctttcatgctcttgaactataa

SEQ ID NO: 6393 - DNA, 1041 bp, Photorhabdus luminescens
atgcctatcatagcacctatacctcaagatgaatgccagaaaatgagaaaacttatccataaaacccgtgataagaactattcccgtcgattaaccgcgttattgatgctcaatgaaggattgacagtgacttatgtcgccaagacccttcatgccgcacgctcttccgtcaatcgttgggttcagtggtttacattatatgggctggaaggactcgaaagtttacccgttggccgacctgttgtctgggatctctccccactctataacctcttacttttcttattacagcaatccccccaaaagttaggctatctccgctctcgctggagccttgaactcatgactcataccctcaatgaattactcaacctctctctgacgcaaaatgtcctttatcgttactttgctcaggtggggattgtctggcgtagagcggcacccacagtgaaacaacctgatcccgaatacgatgagaaaatggcaaagatcgcggaagccaaagcgaacatttcagaaaaacatcccgttttttatgaagatgaggtggatattgatctaaacccgaaaatcggcgcggactggtgcttcaaaggacaacaaaaacgggttatcaccccgggaaaaaacgaaaaacattaccttgcgggctgccttaatgcccaaacagagcaaatcacctatgttaaaggaataaaaaagaattctgatttatttatcaaaatgttagatgaactgaatcatcaatatccccatgcggaaaccctcacattaatcttagataactactgtattcataaaagtcagaaggtaaaggactggctggcacgacatccaaaatttaccctgttgtttttaccggtctattcaccgtggctaaataaaatagaacggttatggcaatcgctccatgagacaataacgcgaaatcattgttgtcaatttatgtggcagttactgaattatgttgatgcctttttggcatcgttttcatcacagcaaaagccaggaagacaaaaaatgggtgtagcacaattatga

SEQ ID NO: 6394 - DNA, 477 bp, Photorhabdus luminescens
atgaaattgggaattatttcaggaagtcatagatcgcattctaattcaggtaaagttggtgatttcttagattcacttgaaataaccaaaaaaacatttaaacatactgagcatttccatctgggaaatttaaacataccaatatgggatgagtcaatttggaatgaagtaaaagatcctaaatggcatgaatggggtttaatatcacaatctttgatgaattctgatgcttttgttattgtagttcctgaatgggggggaatggttccaccaaaactaaaaaatttacttttattatgtagtgataacgaattagtgcataagccagcattgttagtgtcaatatcctctggaaatggtggcgctttttgtatttctgaattaaggtcatctggatataaaaataataaaatctgttttatacccgaacatttggtgttgcgtaatatagaaaaagagggcgatatagataaataa

SEQ ID NO: 6395 - DNA, 756 bp, Photorhabdus luminescens
ttgattggctttaaaagtggattgtcagaagcaaaaaaaagtccattaaatttatggttatccgcttttgttaattttagttactatatagcacaagcttttttttggtatgctattttaaactcacaatcttcaggttatattttatctgatggttttattattatattttttactacggtatgtttagtcgataatctttatctttttttatttggtagaggaagcctcttgctggttaaaaaagtcaagtcattaaagttagaacctcatttaacgctacctataaacactcaatttttatatgtcactacaaatattgcatttgagcattttttattatcattcctatctttagtattattttttactgtacatatttactttggcactaatattttgttggtttttttacattttatcatggtattagaaggagtcttaatacttacttcaattacatggatcataagaacaacaatattttggacaacgtcattagttagtattaagaactcaaatccttgttttaaagtattggtgagacctgaacaatcttttcatggtgtagttcgttttattttaatgttcatacttccgtgtctatttataacgggtgttccagcttcagtagtaagtggaataatgagtatgaaatggttttttattcagactctggtcacattaattttaatttttatagcgaaattggtttttgatattggtgttaaaaggtattcaaaatatataacgtga

SEQ ID NO: 6396 - DNA, 753 bp, Photorhabdus luminescens
gtgataactaaattttcttttattgagaccattagggcgaagaatataatatttggttacttatttataattgtaacattatatgcggttgaactatctttttgggataccatgacaaaatcaaatggttttgttaactatacgcatgatgagatgatagtttatatattatggtctgttattatatttcaattaacaagtatcaccggatttccagaaaatttatcgttccatattgaagatggtagtacagatagactaattataatgccaaaatcaatactattatattattcagaatatgctttgggacaagtattagccagattgtttataatgtctccattaattttatttataattatataccaaaaggacattcctaattttatatatctatttatttcgttatgtataggattgtttatcaatttgtacttaacaatgatattgtcatgtatggcattcaaatttagaggctcgtactcttttataattattaaggatactttgtcatgggtcctttcaggtgcgttaattccattagatgtgtttggtgattctttaaaatcaatatttaattatattccatttcaatacattacctatattccagttaaaattgcaacgaactcaatatctatttattttatatttaatgggtttttagtcatgatgtgtttaatgatgatttttaattttatttggaattatatgttaaaatacaatcaaggatataatggtaatgcttag

SEQ ID NO: 6397 - DNA, 765 bp, Photorhabdus luminescens
atgataaaaattactgatttatgctttagttataaaagtagagaaattaaaaaaaatatttttaaaaatatattttcattaaatgaaatcgaagtggttttatttgaaaatataaatattgaaatatttgacgataacaatattataggattactggggaagaatggtgccggaaaaacaactttaataaagctgatttccggtattttaactccaaactctggaaatattactgtttttggtattgattcaaatggaagaccttttaatcttttatctaatcttggtatcgtttttggaaataaatcaatgctttgggaggaattatctctctatgaaaatattgagcttttttctaagatatataaacgtaattatgataaaaatagtgttgagaatatgatagaaatgttgaaccttagaagtatagcaaaaaaacctgcaaaaacgtgttctttaggtcaatcagtgaaatctaacttattaatacactttcttaatagaccaaaattactgatattggatgaaccaacaattggattagatatagagtcacaaattctattacgaaatatattaaaagattatgctcaaaataatgaaagtaaaatactaattacctcacataatatgatagatattgcggacatttgcaaagacattatcttcttgaaggatggtgaaatatcaaaaataaatctaaataaaaataattcgaaagaaaagaatgctctatatctagagggacttttctgtgataactaa

SEQ ID NO: 6398 - DNA, 1647 bp, Photorhabdus luminescens
atggcaatagacataaagaatggagtttttgcggctttatcacaaaattatgatgtaattataggtgaaattttatctgaaaagataaaaataaatggtgtatttagtggtctgaataacatagtcgaagatggacatgaggtttctagaggtgaaagccaagggatatcccttaattctgatagtacaaaggttgccttcagatctcctaattcaacatgcatgatagctgatttatcagacatgaaaaatataatatcaaatttcagatttgacgtattatatgatattgttacgttatgttggacagaggatgataatattctggttggttttggtaatgggatggttgggaaaatagatattaaagataattccacaagaactattaaattagataatatcaacgaatctgtacactggtttgaaaaagttaatgattccgaatacattgtagcaacagatgctagatgtgttgtacgattagatgagcataatttaaattataaaattgggccaaagtttgctaatgatgattttgaacatataacatatgattatataaataaagttgcttatggaacatcttttgatagaaaagtatataaaattgatgttaaaagtctagagaaaattgaagtaatttacgaggctagattcaaaataaggtggtcagatataatatataaagataatattccatatttgatattacagatcagagatggaagtatagttaaattcaatttatcaacaaaaaaggttgagaaattaagaaaagagactccaccggctttttggacatatgtaaattatttagataaggatctattttttggagaggatggtggttatttattttcatcgaataaccaaaaagagccttttgattataggataaaaaaagaatacgagggatattatataaaacgagccatttcaaatgaaaacttattagtgctaggtggaactaatggtaagatcatgattaaaaatcatgatgatgattttaaaataattaatattaaatctcctgtccgtgatttatgttttggttttaatagtatatatattgcttcggaatcaggatgtgtatgcaaaatagaaggagataatgttagggttatatataaaagtaagtctgagccagtatggtctatatcatttaattttgatttatgtatgttagccattggagagagagttggaagtgtaaaaatacttgatagtttaaatgaatatcatgcagtagcatatacagacagtaaaatccctaaaagaatgaaatggattgataaaaataaattagcagtagttaattccagtaatatagacttaattacatatgatgcaaaaaataagtcatgggagcatatatctgaattttataaaggtggtttaaataccattgaggattttattacttacaacgacagcattattatagggataagttacagtcgctatattttaagttggcatttagaaactggtgaagtattaggtaagttattttgggatcaagattatgcgaaaggaataatgaatatagataaagaaaaatttattgtttatggtagaaacagtaaagtaaaagaatatatcatgcatgacaatgacatattacttacaaaaatagtgaattga

SEQ ID NO: 6399 - DNA, 807 bp, Photorhabdus luminescens
atggaacgttacgagcagctatttaagcaactggaaagtcgtaaacaaggtgcttttgtcccctttgtcacactcggtgatccaaccccagaattatcattgaaaattattgatgcactgattaccggtggtgctgatgctcttgagttaagtattcctttttccgatccgctggctgacggcccgacaattcagaatgctaatctacgcgctttctcctcaaatgtaactcccacgctctgttttgaactattaacaaaaattcgggcaaaatatcctgatattcctattggtttattaatgtatgccaacctggtttttcatcatggaatagatgagttctaccgccgttgcaaagatacagatatcgattcggtattagttgcagatgttcctatgtcagaatcacggccattccgtaccgcagccatgaaacatgggattgcccccatttttatttgtccccccgacgcggaagatgaactattacgtgaaattgcttcttatggccgcggatatacctacttattatcaagagcaggagtaaccggtatagaaagacgaggtgaaaaaccattaaatcatctagtcaataaactacgagaatatcatgctgcaccaccgttacagggatttggtatttcagaacctaagcaggtaaaagaaacattagcgagtggcgcagcaggagccatttcaggttctgccatcgttaaaattatcgaagaaaatctttctcagccagaaataatgctgaaagaactgactgaatttgtatcaaaaatgaagtctgccacgcaactgtag

SEQ ID NO: 6400 - DNA, 1191 bp, Photorhabdus luminescens
atgagtaagcttaacccctattttggtgatttcggtgggcaatttgtaccgcagatccttattcccgcccttgaacaattagaagccgcatttattgccgctcagcaagatcccgaattccagcaagaatttcaagatttactgaaaaattatgcaggcaggccaacggcattaacgttatgccgtaatctgacaaaaggcaccaaaacgcgcctttatctgaaacgagaagatctattacacggcggtgctcataaaaccaatcaggtacttggtcaggctctattagcgaaacgcatgggcaaaaacgaaattattgcagaaaccggtgccggtcaacatggtgtagccaccgcccttacctgcgcacttttaaatatgaaatgccgcatttatatgggtgctaaagatgtggagcgccaatcccctaatgttttccgcatgcgcctgatgggagccgaagttattccggttcacagcggttctgccaccttaaaagatgcctgcaatgaagcgttacgtgattggtctggtagctatgataaagcccactatttattagggactgccgccggaccacacccttatccaacgatggtccgagagttccagcgtatgatcggcgaagaagccaaatcccagattctggcaagagagggacgcctgcccgatgccgtgttggcctgtgttggcgggggctccaatgccattggcatgtttgccgaatttattcctgaaacatcggtccgcctgattggtattgaacctgccgggctcggtatcgaaaccggtaaacatggcgctccattgaaacatggtaaattgggtatctattttggtatgaaatcgccgatgatgcagacagatgaaggccagattgaagaatcttattctatttccgccggtctggatttcccttccgttggccctcaacatgcctatctgaacagcattggacgggctgactatgtttccatcaccgatgatgaagcattagaagcattcaaaaccctttcccgtgaggaaggtattattccagccctcgaatcctctcatgcgctggcttatgctttgaaaatgatccatcaagctcctgataaagagcaattactgatcgttaacctatctggtcgcggtgataaagacatatttactgtccacgatattttaaaatctaggggggaaatctaa

SEQ ID NO: 6401 - DNA, 1365 bp, Photorhabdus luminescens
atgcaagctaccattttacagaaaattgttaatgataaagccgaatatcttattcatcgtaaacagcaacaaccattggaaagttttattaatgctgttgttgccagcaaccgtcatttttatcaggcactaaacagtgaacagaccgtttttattctggaatgtaaaaaggcatctccttctaaaggcgttattcgccaagattttgatccaattcaaatagcgaaaatttatcagccctatgcaaccgccatctctgtattaaccgatgaaaaatattttcaaggcaactatgaatttcttcgtttagtcagtgatgccgttcaccagccggtattgtgcaaagattttattatcgatccttatcaggtttatcttgcccgctattatcaagccgatgcgattttgctgatgctttctgttcttgatgatcagcaatatattacgctgtctgaacttgcgcatagcctgaatatgggcgtcctgactgaaatcagctcagaagaagagcgagccagagcggttgcactaaaagctaaagtaataggtatcaataaccgtgatctgagagatctttctatcgatttaaaccgtaccaaacaacttgcgccacagttaccggaagaaactattgttattagcgaatcgggtatccaccagcatcaacaaattcgtgagcttagccattatgctaatggctttctcattggcagtgctttgatggctcaacccaatctggatttagcattacgtcaactgattctgggtgaaaataaagtctgtggattaactcggccacaagatgcgaaagtggcattacaggcaggtgctgtttatggtggtttgatatttgctgaacattcaccgcgtaaaattaatatccaacaggcccaacaaattatcaatgcagcaaatctcaaatatgtcggggtatttcaaaatcaatcatctgcattcatcagtcataccgcccgtatcctttctctggctgcggtgcaattacatggtgccgaaggcgaagtttatattgaggaattgcgaaaaatattgcctgaaaattgtcaaatctggaaagcaattgatatgtcgaaagatgaatttcacaccaaagccggaaatgttgaccgttatttacttgataacggcaaaggtggaaccggccaaagtttcgattggcaattacttgaaaaacaatcactcgccaacatcatgctcgccggtggattaaatgaagaaaattgccaacaagccgcaaaatatggctgttgcggacttgattttaactctggcgtcgaaaacgcacctggcattaaaagcagtcataaactaaataaggtgtttcaactgttacgctgttaccaataa

SEQ ID NO: 6402 - DNA, 1017 bp, Photorhabdus luminescens
attaaaagggagatgaaaatgcaagctattttcaacaaattgtttaatgcgcaaacactgacacaacaagaaagccagcaactatttgccgccattattcaaggagaattaagtgaaccacaactcgctgctgtacttatcagcatgaaattacgaggtgaacaaccacaggagattgccggtgcagcccaagcattattggcaaatgcactgccattcccacggccagattacactttctgcgatatcgttggaacgggcggtgatggtgcgaacagtatcaatatttcaaccgccagtgcctttgtcgcctcggcttgccagattaaaattgccaaacatggtaaccgcagcgtttccagccaatcaggttcttctgatttgctggcagcgtttggtatcgcccttgacatcagcgcggaatgtgcccgtagtgcactggatgaaatcggcatctgtttcctgtttgcgccacattatcatctgggattctgtcatgcgatgccggtacgtcaacaactgaaaacccggactatatttaatatattaggtcctttgattaacccggcacgtccgccattagcattaattggcgtctacagcccggagctcgttgaaccgattgcccgcaccttactggttcttggctatcaacgggcagcggttgtacacagcggaggcatggatgaagtcgccctgcatgcaccaacgaaagtggcagaaattaacgatggagaaattatccattatcaattaaatgctgaagattttggtttacaacgtcatccaatgtcagcattaaaaggaggttcacccgtggataatcatgaaatgctcagtttattgttacaaggacggggtaagaaagcccatgctgatgccgttgcggctaacgttgctctgttaatgaaaattcatggacaggaagatttacgtcataacacccaacaagctctcgaaaccattcacagtggccgagcttatgaacgagttatagcacttgcaacaaggagttaa

SEQ ID NO: 6403 - DNA, 579 bp, Photorhabdus luminescens
atggcaaatattcttctgctcgacaatgtggattcattcacctataacctcgtcgatcaattacgtaatcatggtcatcaggttgttatctatcgcaatactgtggcaactgaaatgattatgcagcaattaagaatgctctcctctccgctattgatgctttcaccgggaccgggtaaaccatctgactcaggttgtatgcctcaattactccaacaaattatcggcaaaatcccagtgatcggcatctgtcttgggcatcaagccattattgaagcttatggtggaaaaatttctgctgctgatgaaatcctacacggcaaagcttctctggcaaaacacgataatcaagctatgttcgctaatctggaaaacccgctacccgttgcccgttatcactctctcacaggtagccgaattccatctgaactgactatttctgcccgttgtggcgacaccgtgatggcagttcgccacgataaacataaagtttgtggatttcaatttcacccagaatcgattctcacaactcatggcgctaaattgcttgaacaaactctggtttgggcactaaattaa

SEQ ID NO: 6404 - DNA, 1575 bp, Photorhabdus luminescens
atgacggataaacaaccaaaaatcacagtaatcgagcaggaagctgcttaccaacccgatcctacgcagctattcaaccagctctgcggtgagcgaccagcaactttattgctagaatctgcggaaattaacagcaaaaaaaacttaaaaagtctgctaattatcgatagtgccttgcgcatcagtgccaacggcaatcaggttacttttgacgcgttaacagaaaatgggcgaaatttattacccattttggccaacaaattttccagcgacgttcaatctgaaataacacacaatgctcttcaagtgattttcccacccatcaatcacaatatagatgaagataatcgtctgaaagcggtatccgtatttgatgcactgcgtgccctgctctctctggcggaagagccgtcaccatataattcgtcaagcgcagaagcgatattcgttggcggccttttttcctacgatctggtggccggatttgagccgttaccggcagtaaaaaccgttcaacgctgcccagatttctgtttttatctcgcagaaacgttattggtgatcaaccaccagaataaaaatgcacgcttgcaaatctctcttttcagtgattctcaagcagaagagcaacgccttaaacaacgattgaaaacattagtggcactcattaccgagcccattgagccagtacaacaaatctctctgccaaccatgaaagtttcatacaatcgggatgacaagagctatgcagaaatggtggcacagttgcaacaatacatccgccaaggggatatttttcaagtagtgccatcaagacgcttctttttaccctgcccggcaccacttcatgcttatcaaaaacttaagtaccacaatccaagtccctacatgtttttcatgcaggacaaagatttctgtctgtttggcgcgtctcctgaaagcgcgcttaaatatgatgcatccaatcgccaaattgaaatctacccaatcgccggcacccgcccccgtgggcgcaatgcggccggcgagctggatgcggatcttgatagccggaccgaactggaaatgcgaacagatcataaggagctagctgagcacttaatgttagttgatttggcgcgtaatgacctggcccgcatttgtgaaccgggcagtcgctatgtcgcggatctgacaaaagttgatcgctactcttttgttatgcatctggtctcccgcgtcgtggggacattacgccatgatttagacacctttcatgcctatcaagcttgtatgaatatgggtacccttaccggcgcaccgaaagtacgcgcaatgcaacttatcgctcactatgaaagtgaacgccgtggtagttacggtggggctgtcggttatttcaccggcaaaggggatatggataattgtatcgttattcgctctgcttacgtggaagatggcatggcgacgattcaggttggcgcaggtatcgtactggattccgaacctttagccgaatccgaagagactcgtaacaaagcaagagccgtcattcgggcaattattgaggctcatcaggcagaggagactttctaa

SEQ ID NO: 6405 - DNA, 120 bp, Photorhabdus luminescens
ttggcactgttgatttatgtgcgtgaccataccgcccttactgggaagttatgccaccaacggatagacgtcatcaatacagccattttcagtgcctcttcattatcactcttgtactag

SEQ ID NO: 6406 - DNA, 1635 bp, Photorhabdus luminescens
atgagtgaaaatgaacccaaagcagatagccaattggtgtatgaaactgatccatataaggttaagaattcggaagaaggcgcggcgcaaaaaacttatcggttaaatggttttgatcctaagacaaccgatggggcattatcctataccccaacaagactcgctaaaacggtttttaatatttatgagcagaaggatgattttggcgttttctgttatttaactgattggtcaatctatgatgcgcgttttattgacacagcaagcgaagatgattttaaaaagaatggtggcagaagctctgacttaatgcgctttaagggtgataaagacaagggaaaaccgtttcagcgaattatctttagctttgcaggtattattggtgatcccggagagaagaaagcaactatcattgctgctgcgggtaaaaatggatggaaaatgggggaggacgaacaagatattcttgagaatcacgaaggcaaacctattccaattgatccctgggctgatgttggcgcttatcttaattgtggctttactgggtggaagggggatgtttgggatttatatgaacaagctaaagcacagggagtattaggcggtttacgtttactcaaggaggaaaatccagatctggaaatttctgtcagtgttggcggttggtcaatgagcggtgctttttataaagtttgtcgtgatgagaaactgcgccaacggtttgttgagggggttaaagatttatacaccaaattcccgatgtttactcacattgatcttgattgggaatatcctggttctgcgggggaaagtaatcaatttgatgaagatgattataagtattttgctgagcttattaaggatttaaaaaactcaaatatcagtaatttgaaaggaattagtattgcagcttctgctgatgtagaaaaaattaaagccgcacatattccagaattgatcgctgccggtgtcaatgaaatcaacttaatgacttatgatttctttacattgggcgatgggaaactttctcatcatactaatctttatcgtaataaggatgaccagtattctaaatattcagtcgatgatgcagttaactatcttatctctttaggtattaataagaaatttatctatattggttattcgggttatacgcgtaatgccagaactgcggagttagagagtaaggataatgaacagctagttggtaaatatactgatggaacatccacggtagggagttttgaatacagcgtaattgaatggacagatattatctataactatgttgattatgaaaatcaaataggtcgtaatggctttgcggttattcatgatccggttgctaaagctgattatctttacaataaagatctcaaagtatttatgtcgttagatacgccccgctcagtaagagataaaggccgctatgttaaagaaaaagggcttggtggtttatttatttggaccggcgatcaggataatggcttattaacgaatgcggctcatgaagggttaggccgtaaagcagttaaaaaagtcgtagaaatggagccattttatttcgaaggtgaacttccttcttacgataaaccgaaagagaaacagtgtgaagcatgtaaattgaattga

SEQ ID NO: 6407 - DNA, 3522 bp, Photorhabdus luminescens
atggataaatataaaagcatttctcgtgaaaaacaggatataacacaagtatcaccattattagctgcggtggcagaagtcaaatcatcaaaattgccatcaggttataggttattaaacgcagtagagaaagaagataattccactatcacgctggttaatacactccagcgtctgggttatcgctcaatttttgatattgcagaagtatcaaagcagagatttattaaacgccataatgaatctttatcaggtcatgcagaggtaatttttgataaagcagtgagtgcggctaatcaattggtacaaagttatcggcaaagacaattgagggattacgatggcgcattattaacaaaagcaagccatcaggcaagatattcttcttatagtaataatgatgtaaatgataaagaaaaattacctgattatagtagtttatttcctgagccttgggatagcttttgtcagccaaacgctattgagtccctcgacagtccggtaaattacctgcttgatctttataagtttgtacaacaaatagagttagatggctctaataatgccgtgggattggaacaaaggcgtgctgatattcctgacttattactgaatagtgataatctttacaaagagattacggcaatatctattgtgaatgatgttttgtcgaagagtgccagggaatatattgatcaaacaggtcaggcggaaaaaccggttaatcaggttttgggagagacgcgttttccctttacattaccctatagtttaccctctcaacagatcaataaaggtttggccgaacaagagactgaattaggtacaattattcagcaagtgaatcaacaatttccttggcatatcttaacggaaaaacgagatcaggctctgcttgcttatactcaattaagtaaggagcaaatgactttactgacagagaaaagcccatttgcacaaaactttttatcacgcgaacaacttattaatagctatttcagcacaagtacaacagaagtattgcctgaacatgatgttgtaaaacatgcttatattattcatgctgatgaaaatgtcactggcccgacattattgagtgataatgttgataaagcctatgatgaaattgttgttacctgtgaaaataaagctaaagagacgatcaaagttaaacttcgtggtgaaaatgttctgacctacaatcgcataaaagcgaggatggagccttttgataactcatcaccatttagtcgacagttaaaattgacttatgtagaaagtgataatagtgatatcggtaatttagataatggtcctttctttggtgaaatgacagtttatgctgcgataccaggagagaacacaaataattcttcggtaaatattgaaggcattaatttcctgaccatgacttaccgttttgctattgcgaaacaagggacggcacaatcagaattattgccagaagctgaacaatttttccaagataactatggtgtttctgcggatgaaagtgtgaaattaaaagagattttatcttttggtcaacaaacaggctcgaaagtaacagatctcgaacacttgtttaatagtggtgatttccggcctttagtttcgccaaatgtggtattttctaatcctatcttcgatagtgggcaaacatcagaacactttcctgcaccttatcactatggtggaatttatatcaatgcggggcaattagacgcattaagcattgtgagaaccgactctggacgggaaatagatgcagtttccgattttcgttatgatcgaatgaaccgctttattcgtttacagcgttggttagcgttaccttatcatcagcttgatttattggtaatttcagcaataaaagcggagtccaataataccgatttggctatctctaataatacattaagatcattaggcttattccgccatttatcgacacaatataaagtattaccggaggcgtttgccggatggatatatcgaattacgccatttgctatcagcaataatattccgttttttgatcaactgtttaatcagtctaaactttttgatcagcctttaattctggatgggaaagaatttaattatacagaaaatcaaggtgatggagcaaaaacagttaaacaattgtgtgctgggttagccatttctttatccacatttcaagtgattgcgcctattgttgagaacgcattgaagctctcttctggcaaattggtgcgtaatcttgatgtcgtatccagactttatcgcttggtgactattccacgattatttggtttttctgcggaagatggattaattctggcggatattttaaccgataaaagcgaatatctggcaaatataccggctttaggagagaaagatgacatcctcagtattattgctcaaatggaagttttgacttcttggttgactaaaacaaaactgacaccgatcaaactttccttattattaggtaaaactcagcttccggtcgtgccaacaagtggtatgttaaccttttataagggaatttctgagggtttgactgataatgtatgcttacaagaatctgattttaatcggcaagaaataaataatatagattggtggactgttctgtcaggtgaaaatggcatttttgataaggaaaatggattaatcaaagatattccattgatatggggaaaaacagatgaggaatctctgaggaaagaaatagaagatattgtaacgaatataagcccagatgataatcaaattaatattgtcgtacagattatattgcaagctaaaaccgcacaagagagtctattatctagcgctattgcgggtgaatatggggtatcaagagatattgtgccactacaattgcgttggttaggaagtagtgtttattcagtattgaaaatggtgttagataatacaccagaaaaagttgaagatattaaaacagagtttctggacttgacctatagtctgttagtttatacccaattaattaatgcgttgagcataggtaataatctattgttattacgcctgacaaatccgaaatggcttgggctaaatatagatgaaacaacagaaatagcattgtcattagatgaaattttcctgttgaatcgctatcaagatttactggaaaatgcgaaacaaaatgaagataaggttcaggaatactttacttttgctaacagtgaaattttaccaaagacagaagaggatgataataattataaatgtgcgcaattactggctgaaattttagattggagtcctgatgaaatttatcttgcttgcgataaaggaggattagaaagaaaacgtgcgataaccttatcccaaatagattggatacgacggctacaacaattttctgtgaaaacccatttatctgttgagcctttattaggtgctgctgcacttgatgttaattcagattttgaagctttccaaagcatcggtgaagcggtaatggctgcattaaaagcgcaaggagatgatgagaatgtctaa

SEQ ID NO: 6408 - DNA, 4089 bp, Photorhabdus luminescens
atgtctaatttaattgaagcaaaattacaggaaaatttgcgtgatgcattagttgactattatcttggtcagattgtcccgcatgatatcgattttcaatctcagcgtgaaggaattaaaaacgttgatgacttgtatgattttctattgttagacactcaggtttcttccaaagtaaaaacagcccgtgtcgcacatgttacccaatcggtacaacaatatattaaccgtattgttttgaatttagagtcaggtttatcgatgactcaggaagaggcagataattggcaggagtttgctaatcgttatggttattggtcggcaaatcaacaactggctatttacccggaagtctatgttgatcccacattacgtttaaccaaaacggaattctttttccaacttgaaagcgcacttaatcaaggtaagctcacggatgatgttgctcagaaagcaatattgggatacctgaataattttgaagaggtcagtaatttagagattattgctggctacgaagatggtattgatattgccgatgataagatctatttcattgctaaaacacgaactcaaccttaccgttatttttggcgaacactagatgccaaacagcgtaataatcagactgacgaactcaatcctaccgcttggggtgagtggaagctgattaatgttcctttagaaaatgcctataatggtattattcgcccaattattctaaatagtcgattgtatattagttggtttgaagtttctgaagaaaaacaagataaagataatagtattaaatatcgcaccaaacttaatttggctcatttagcgtttgatgggacctggagtaccgggacaacggttcgtgaggatttactcgaccactcaatgaaagagttgattgcggttctcgatcgtaccggagacgctgaacgtttagcgttggtggcatttgtacgcttgaaaggttcggatcagggaacaccgtacgattatgatgaagtcttcacttatgtttgtgacaacctattaatggaagcaacggatttgcccaaatccacgtcaacattatctgaccttgatgcatatggtgctgctttagtctggttctatttccgggaacccttaaatggtggaccggaagaatataagcaattggtgctctatcccgttaataataatatgaaatggccgattgccgaaccaccaatatttgaaggacaattgggtacagtaaatgatttcaagctagatgcaacttatgttgacgggacattgaatatgtatcttacgtccacttcaacgtatgtatatgattttagcagaagcaaaaatatcctctattgtatttggctagaagatagcaagggtgaacgctgttggcttgattataagatactgactccagaagattatgatccaaagctgagtgtcacattgaaccgttgtgatagaaatgatgtaacggttgttacgggttttagtttgccatcagaaactggagatgttgcgggtaaaattaaaactaagctcagtgtaggtaaattgcttcgtggcaagatacaaattaaacagactaaacaaactcagtatttgcaatttccaaaagaagagcagccagaggagcaacgagaaagttggtattctgacaaagcgattcgtttaaataccctgtttgcaaaagagttaattagtaaggcgagtcaaaaactggacaaagttctcagttgggaaactcaaaatattcatgaagagccgattactggcaatgtttcaaaacctattgaccttaaaggggcaaatggtatttatttctgggaattattcttccatatgccatttatggtggcctggcggtttaatgtcgaacagcgttatgaggaagctagccgctggattaagtttatttttaatccttttgaaagtaatgacgaaccggcgctggaacaagataaaccacgttattggaatagtcgcccgatcattgacgagcccaaaagattacgcagtctgatagaaccgactgatcctgatgcaatttctgccagtgaacctattcattatcgtaaggctatttttaacttctacgttaagaatgttattgatcaaggtgatatggaatatcgcaagttacagcctactgccagaacgctggcacgtctgagctatgcaacggcaagttcattattaggtgcgcgtcctgatctccaattagccagttcctggcagccaataacccttgaggatgcatcatataagaaaaatagcgcagtacgtgcattggagatgatcagttatcctttgccttatgccccggtggttcatgataaaacaattcgtgcgctggataatgatctctttatgaaaccgattaatgaagagttaacggccctgtgggataaaatagaaaaccggatttacaatttacggcataatttaacgctggatggtaaagaaatttccatggatctttatgattcaaagatttctcctcgtggattaatgaatcagcgttatcagaaggttgttgctgccagaaatgctagcagaatgaatttcagagtaccaaattatcgttttgaaccgatgttggcgcgggctaaatcgggtgttgatacgttgatacaatttggtagtacgttgttaagcctgttagaacggaaagataatttgagttttgaatcattccagatggttcagaataatgatctctaccgttttgcggttgacctccagcaacaagacatcaatattaatcaggccagtcttgatgcattgcaagtgagcaaacaatctgctcaggagcggtacgaacattataaaagtctttatgatgaaaatatttcgtcaacggagcagcaggttattgaattacaggctcaggcatcttctgctctattagcttcacaagtatcaagaacagcggcagcagcactggatttagttcccaatatttatggattggccgttggggggtcacgttggggtgccgctttaaatgctgttgctgaaatagcaactttgaaatatcagtctgataatactaaagctgaaagcctcagtgtttctgaatcttatcgccgtcgccggcaggagtgggaactgcaatataaacaagctgaatgggaaacaaagtctattgatcaacaaattaatattcagcagttgcaggtcagtgccgcgcgtaaacgtttggtgcaagttgaagcgcaacaacaacaatctcaggcactgttggcttatttctccagccgttttaccaatgaaagtttatatacttggatgattagtcagatctcaggcctctatttacaggtttatgatgctgtttcatcattgtgtttatctgcacaggcctctttacagtatgagcttgggctaggcgagcagaattttattgatggtgcgagttggaatgatctctatcaagggctgttggttggtgaaaatctgaaattggcgttgcaacgtatggaacgcacttatgttgagcaaaattcacgtaaattggaaattatcaaaacgatttcgcttaaatctttattgggtgaggagtgggagacaaaacttcaaaccttgaaatcgcataaccaaattacgtttaatttggatgaaaccaaacattttgttccagattatacgggcttatttaatcggcggattaaatcagtttcagtgacgctaccgatgttaattgggccttatgaagatatttgtgccaaattaagtttgtcgggtgtgagtagctatacgacaaaagcggatctcaaaaccgttgaaaagatgttaaaagagggaactcgtgcggaaacaccttatacggtgcgcagcatccagcctaatcaacaaatcgctttatctacggggattaatgacagtggaatgttcacacttaatttcgatgatgaacgtttcttaccctttgagggggtaggggtaggatcgagttggaatttccaatttaccaatacctcacaggatttagaaagcttaaccgatgttattcttcaaattcgatataccgcacaagaaggatctgcatcatttggctcggctgttaaggcattattgagtaaggaaaacccagatttgtga

SEQ ID NO: 6409 - DNA, 1869 bp, Photorhabdus luminescens
atggtaaataaatatacttatacctcatcgaaatccatgtccgacatcagtgatattgttggtgaaccattaactgcatggaataatcaggcaggcggccaagtttataatgttatttttaatagtggtgtttataccaatacctattgggttgagcgctggcatattcccgatcctacggctaaagagggaacaccgcataatgcttggaaatatattcgtccagcgacggaagatgagataaaacagcacggaaatcctaccgatgggcgtattgatccaaccgaagatattccttcaccagttttacaaccggatgctattacagaacaaacctatcaacggccggatgttaattttaaacctgatggttcagcgggtaatctttcttatactgcgtcgcgtgtttgtcgcccgatgtataatgaatatgaaagcgataaatccagaccaaaactttctgcttatattactgattggtgccaatatgatgcgcgcttagatggtaaaaatgaagacgctgatcagcggggaagaggatttgatttaagcactatcaatgtggctgcctatgataaattaatattcagctttttgggtatttacggtgatactggtgtaaaaggggataagatcaaagaagttgccgatggttggaatagccagagtgaaataaaaattactgaaggccatattgttcctcttgatccttatggcgatttagggactgcccgtaatgtgggattacctaaggaaagtgctaacactaatattaatgcaggaacatttctgcctttttatcaacaaaagaaagcgtccggtttattaggtggattacgcgaattacaaaaaacggcgcgtttagcgggtcataaacttgaactggcttttagtattggtggctggagtatgtccggttatttttccgtgatggcggctgatgaaacaaaacgtggcgtttttgttgacagtattgttgatttttttgcgcgctttcctatgttcagttgtgtcgatattgactgggaatatcccggaagcccaggtgaggatggcaatgtttacgatccgaaagatggagaacactacgctctgttaattaaagaattacgtgagtctttggatagtcgatttggtcgagaggatagaaaagagatctccattgcttgtagtggtgtaaaaacgaaattagcaacatccaatattgccgaattagtcaaaaatggtctggataatatttacttaatgagttacgactattttggtactggttgggcaccttatatcggccatcatactaatctctattcaccaaaagatcctgatccatcaggcgcatctgatttatctgcggaagttgctatcaattatttgcatcaggaacttggcatacctttggagaaaattcatttaggctatgctaactatggtcgtgcaggcaaaggggcaaatcttgaaacgcgtgaatataataaaacgggtgaggcgttaggaacaatggaaaaaggttcacctgaattctttgatattgttaataattatctggatagcgaacatactctcgctaccgggaaaaatggctttgtgttaatgacagataccaatgctgatgccgatttcttgtttagtgaaacagaaggacattttatctcattagatacgccacgcacggtgaaacagaaagcggaatatgttgctacgaataaactgggcggtatattttcttggtcaggcgatcaggattgtggcttgttggcaaatgcggccagagaagggatgggctatattgccaaatctaatgatgaaactatcgacatggggccactctataatccgggtaagccctattatttgaaatctatcggttag

SEQ ID NO: 6410 - DNA, 753 bp, Photorhabdus luminescens
atgggcgttaatgtattggccgtgactgatcatgatacaacggatgctattttgccagcccatgaatatatcaaccaacatgatttgccattaaagctcatatcaggggttgagatatccaccttgtggcaaaatatggagattcatattgttggtctgaacattgatattcagtcaaatgcaataattgaattacttaataaacaatctgaactcaggaaagaacgaggaattgaaataggtcgcaagctggcaaaggtgggtattcccgatgcttgggcaggcgcgagccgattagcgaatggtggacaagtaacacgaggccattttgcccgttatttaattgaaataggcagagagccaacagtggcgaaaatatttaaaaagtatctggcaaagggaaaaatcggatacgttccaccgcaatggtgtacaattgaacaagctattgatgccattcatcaatcaggtggtcaagcagtcattgcgcatccgggacgatatgatttatcgaccaaatggttgaagcgtctgattgtctggtttaaacaacatggtggtgatgcaatggaagttgcacagtgccagcaggcacctaacgagcggaaatatctcggtcaattgtcacgggaatatgatttgatggcttcgttaggttctgattttcaccagccttgttcatggatagaattagggcgtaaattgtggttacccggtgatgtggtaccaatatggcgtaactggtcactgtag

SEQ ID NO: 6411 - DNA, 621 bp, Photorhabdus luminescens
atgagccagtttttttatattcatccagataatccgcagccccgcttaatagggcaaagtgtggatatgttgaaaaaaggtggggtggttatttaccccactgattccggttatgcgattggttgccatctggaagataaagattcgatgactcggatatgccgtatccgccagttagatagtcatcataatttcaccttaatgtgtcgggatttgtcagaaatatcgacctatgcttatgttgataattcagcttttcggctgattaaaaataatacgccgggcaattacacgtttattttgcgtgcgacgaaagaagtccctcgccgtttgatgaatgataagcggaaaactatcgggttacgtgttccatccaatccaattgccttggcgcttcttgaacaagtgggtgagccattgatgtccacgagcctgattttgccaggcaatgattttgctgaatctgatcctgaagaaattaaagataatttgggaaaacaggttgatctgattattcatgggggttatttagggcaacagcctaccaccgtaattgatttaactgaggatacgccggttgtaatacgggaaggggctggcaatatcacgccattcttataa

SEQ ID NO: 6412 - DNA, 1155 bp, Photorhabdus luminescens
ttgaaaatgtcagttgttaatttctccgataaaccagttgatggcgctaatgttcatacatggccgaaatcaccagatagggatttaatcgcatgtggacgtgacgcatatgctgaaaaaacagtgcaagaagcattgaacggagatcctgataaagcggtaaaattaagtgaattaaatgatattctggctgcctgtgaaccttttaactttaaaggcgtcactttatatgcaaaagatcctgtcttggccttaattaaagcgttatcagagaagagtgcctatttagtcgatgattcatatcctcctaagcaatggcagagtgggggagttgataagcataaccgtattaaagattttattgaatctccgggtatgtttattaaagggatagagatgatcgatatgggtcagctttatcttggtaattgcggctttgttagcaccattggggcaattgcatcccatcctgaagggcataatttgttattttctgctatctatccaccggtttataacccaacgggcatttattcgatcagaatcatcaatcaatcgacggttggttatttattgattgacgatgatctgccacgagtgagtttttctgctatggaagataaaaatgagttttggtattacctgattgaaaaagcatttgcgaaattgcatggaagctatgagaatttaggcggcggtaatgaaatctattttggtatagaatcgacagcaaataccagtattaatcagggtaatcaggatcgtatttgggatgagaaatttatcgatatcttcaaaataaaacatcatgtgacttatcaaggaaccggttcatcaacggatttagtatcaggtcatgcttatttaatattagatgctcagcaatggaatgatattaagttagtacgactgcataatccgtggaatgttgttaaatataaaggtccatattcgcctgatgctgctgaatgggaaaatattccagcagacgtgcagaatgatatattccagaataatcgatttgaggggaagtcattctggatgccatatgatctctatgttaaaaatttgccaaaaattagtgatatgtatctcagtaaaattattcctgattcactgaaaagtattgcaaatccctctccaattcaagagtaa

SEQ ID NO: 6413 - DNA, 237 bp, Photorhabdus luminescens
gtgtgtggtgcagaacagttagatcctccgtggggtgaagatggtaactcaccaacatttgatatctgtgattgttgtggggtagagtttggctatgaagacgctattttagcagcattaaagaattatagatccaaatggttggataaaggcgcaaaatggaactctgaaaaatccaagccaaaaaattggtcgctagaggagcaactatcaaatatacctaaagaatatttgtaa

SEQ ID NO: 6414 - DNA, 5064 bp, Photorhabdus luminescens
atgagtaaacgcaacaactcggtggcgagaggcacgagttatcttttaatttacctgacggcaattcagccgctacacccggcgattgctgcggggatcacaccggacaataaccatacgcaggtacaaaaccaaagcaacgttccggttgtcaatattgccacgccgaatgacgcggggatatcccacaacacctataaagcgttcaatgtcgatactcaaggcgctgtactcaataacgccacgcaagcggctcaatcacaactggcggggcaacttaacgctaaccctaatctgcatggaaaagcggcggaactgattattaatgaagtgaccggcagcggacaatctaacctgcaaggccaattggagattttcggcaataaagccaatgtaatgattgccaaccccaacggcattacttgtgatggctgtggctttattaatacttcgagtgcaacactgaccacgggtaaaccgcaatttgataaacagggtgcgttggaagcattggaagttaaaacaggccaaatcaccattggcggtaaagggttagatggcaaggcgacggattatgtcgatattatcagccgggcaacggaattaaatggaaaaattcaggccaataacctgtctctgacacaaggcgctaaccgaatcagtttaaaagacggcacagttaaacctgtcgctggtgaaggcgctaaaccccaattagccgttgataccaaagcattaggtggcatgtatgccaataaaatccgactggttgccactgaagagggcgttggtgttaatctgaaaaatttaatcagtgaccagcgtgatattactttaaacgccaatggcaaaattgaactgggcaatattaaggctaaaacggacctgaatgttattggcaaagaaacccatattgcgcccaatattaacgtgcaggcgggacgggatattattctggaaaataccacgctggataataaaggaagcgtgactgctggccgggatatgcggatatttgtcaatactgtgcgtaatagcggtaataaagccttactacaagccaacgataatatgtggatacagaaaaatgcacaaggagataaaagtcatcttattgaaaatagatctgctaccataaagactaataaaggcgatttagttgccagatctcataagatgctcaatataagagatctttatctcctttctaatattaaacctgaaaaaaacgattttcttgactttagtaatgttgatgatctcagtgacatgagcaattggttctttatagaaaattatgatagcagtttgatttcctccggaggaaatttatatataaatagtgatagtttattaaatataaacagtgaaatacatggaaaaggcgatgtatttttgaccggaaatcattttacaagcactaaatttataaatactgaaaatctatataatggaaatacttatccacattttataataaatagttcacatcctgtatttaataatccatactataaatacagaaataggcaggaaaacgacagagaaatacatgtattagatagaaataacgcagatataaaacagcaagattggaatcttcttcgaaataatccttctaatgaaacaaaaattgactcattcacaaataagacaatgctatcttctggaaggaatttagttattgattttcttggcgaagttaaaattacgtcaaataaggaacttattaatgaaaatgagttgaatacgcctgactggaaagaaaaaacattaaatttattaaattcagaaactgatgatatcaaagttaaaaataatcttatattaaatgcaaatggatttacattaaaatcagcacgattaaatgctgaaaaagatatcaacattatctcatcagatgctaactttgtcgaacttaccgattctaaaatcatatctaaatcaggtgatttatctatactttcaacctattataaagcaccatatgaattttttgataaactattatttccctctgccattaatgttttatcaacggtattaaaaggacataatgtttcattaataagcaaaaattcaggaatatccgcctataaatctacaaaaattagttttggaccggagattgatgatcgaagtaatataataaacgcctcaggagatttaaccttttattcaggaacaaacttaaatttaaatttcatcaattatttcacaaaaaacaaaaatactaatttaactgcaatcagagatattaaaataaacataagtaaaaccagtatagactcatccgagtccatatccattaatggtggtataaatctagatattggtgatgtaaaactcaccgcaggaaaagaggttatattgaactctgctcaagactctaaattatggggagttcctattaccgctaatagtatctctatatcggcggggaaagatttgaatgtcaccaactctgcattgaatgcaacagaaaatatattgatgaattctggtggagatctaaatttatctgttgcttattataatgtaggcgctatgataaaagaaggaagaataagccaaattacttctgttaatgcagggaatgaattaactttaatagctaatgataatataaagttagaaggttcaagtttaatttctaaaggtgatatgaccctcacttctggtgggtacacataccttaaatccgcagtagatactgaaaacacgaactccagatcatctattacccataaagaagtcagactagatagcgataagaatttaaccattcttaccggagaaggtcttttatttcaagcaactaaacttttagctaaaggtgtaatagatattgctgctaaagggggttatctttatgcacaagcacaagaagatgtgactgaatataccacctccagtactaaacgtaagtggtatggtaaaaagaagacttcaactaccacgcaccattcagtcaccaataaagtgactgaatttattgctgatggagatattaatttactcagccgagatgacagtacttatgaagccagcaaaattgaaacaaataaaaatgccagactgaccagtacacatggaaaaataaactttaaagcagttaaagatagttcttttgaacaaaccattagccagtctaaaggatttttcattaagaacagagatagtggtcatcgtgcagaaacatgggtgctgccttcagttcacattggtggaaaattaacgattgaggccgcaaatggaatcagtgctgatatcaaaacacagaaaggacaatccttacaggcggtattggctgctcttggtaacacttctgaaacagcctggttaaaacagttaagccaacgtcaagatgtaaactggaatgaagttcaggatgcttatgagaattgggatcataagagccagcatttaaatcctgtcgtttctgctgttatcgctatcaccgttgctgtagtcacggctggggccggggtaactgtagcggctgccaatggtgccgcgggtgcagccagtggtgctgctaccgcagccggagccagtgctgcaacagcagcaacagtgaataccgccacatacggcgcagtttctgcgggtatctcatctctagcttctacggcagcagttaagcttattaataataaaggaaacctatcgaaaacccttaaggatatgggaagcagcgataccgttaaatcaactatcacatcaatggcgatgggtggcgcactggcgggttttgataacgtcatgggatgggataaagccgccaatggcgctcaaattgacccggcaaaagcgacattacctaaactgagcaatggcgactggagcaaagtggctcaacggatcgccggtcaatccattatcagttccagccttggtacagccatcaatggcggtagttttaaggacaattttaccaccgcattacttgccaatattggcagccagattaacgccgaaggtgccgggttgattggggctaacggtcaggtgttagatttacccggaaaagccattagccatgcggcggtttctgcccttgctgcggaaattggcggcggtgatgccaaaggggcggcggctggagcattagccgcagaattggccgcgataacattggataaaacattcaatgatccaatgaaaattcaggcgggtggcaaaatcatcggcagcgtcgcaggggccattgcgaccaacagcgccaaaggggctaacagtggggctaatgccggggaaattgttattctctttaaccacctgaactccatgaatgcctacaatctggctagagagctccaggaagccaataagcaaggaacccctaccgaagcaatctggaacaaatacaacaaactgggcgctacacaacgggcagaaatgttgtctcactgtgccgggaacggtgggttatgcacactgacctatcaggctgaaatggaaggtgggataaaaacagcggatgccatcagtggtctgagatggatgtttggcttatcggctgaagatactcatcgtctcagccagtttgtgacgacagaaaaccagaacgatttagggctgttgtataactcgttgccagcttgggaaaaaggtgcactgatagccaaagaggcggtagaatctgccggtattggtggtgctatcggcggtaaagcttcggttgcttcgattgttgggaagagtcgtcatgttggcaacacaataggctcaagcaaaacgaaagaaactcagatatggacagaaacgaagaaaaaagagcctgtagcaaatgcttacggccactgggataaacataaaagtgaattccctgaatatcagaattcaaaacaatatgtcgaagccacccataattttattaaaaatcctccaaaaggaactttagtcaaaacccgagctaatggtgataccttgtattacaatccaaaaacaaatatttttgcagtaaaaaatgtggataatgtcccgaaaacaatgtttaaaccaaatccagtagatcatggatatgaaacaaatttggattacttcaatgcacaaaaataa

SEQ ID NO: 6415 - DNA, 933 bp, Photorhabdus luminescens
atgagcggtaagatacagaaatctgaaaagttacagaaaattctcgcgcgttccggccacggttcccgccgcgaaatagaaggttatattcaacaagggcgcgtcagtgttgacggtaagattgcgactttaggtgatcgccttgaagttcagcccgccacgaaaatccgtctcgatggtcggatattaaatatcaaagaatcacaaaaaacggtttgccgtgttttggcttattacaaaccagagggtgagctttgtactcgtcatgatccagaagggcggccaacggtttttgatcgcctgcctaaattgctaggttcccgctggatagctgttgggcgtctggatgtgaatacttgtggtttgttgctatttaccacggatggtgagctggctaatcgtttgatgcatccaagccgtgaagttgaacgcgaatatgctgttcgtgtctttggtgaagttgatgatgctaaattgaaacaactggctaagggcattcaactggaagagggtcccgcctcattccgcactatcgcgtttaaaggcggtgaggggatgaatcaatggtataacgtcacgctgacagaaggacgtaaccgtgaagttcgtcgtctttgggaagcggttggtgtacaggtgagccgtcttattcgtgtgcgttatggggatattggtttgccaaaaggcttaccacgcgggggatggacggaactgggtctggagcagactaactatttacgccaattagtggatttgaatgaggagacggtttccaaagtggccgttgggcgtgatcagcgccgtcttaaagctaaccaaatccgccgagcggttaaacgccatgctcaagtcgcatcgcgtccatcggcaggaaaacgtccgggcagttcacgccagaaggcggggcgaacaaccgcaccaaaaggccgttaa

SEQ ID NO: 6416 - DNA, 597 bp, Photorhabdus luminescens
atgacaatcaatgacagccaacatcaaaaaaggcaacaacgcctaaaagaaaaagtggatttccgtattgaagccgcccagttagaacggggtattctgatcgtttttaccggcaatggtaaaggcaaaaccactgcggcatttggcaccgtgacccgagcgataggtcatggatttcgtgccggtgtgatccagtttatcaaaggtaaatgggagaatggcgagaaaaatctgctggaacagcatggagtgaatttccatgtgatggcaacaggttttacctgggaaactcaaagccgggaaaccgatactgtagcctgccagcaggtatggcaccatgcgttagagatgttatctgatcccgatttggatttaattgttttagatgaactgacttatatggtgagttatggctatcttcctctggaagaagttattactgcgctcaaccaccgaccggagcaccaatccgttattatcaccggccgcggttgtcatcgtgaattattggaaatggcagataccgtgacagagatgcgtccggtaaaacatgcctttgacgccggcatcaaagcacaaaaagggatcgattggtaa

SEQ ID NO: 6417 - DNA, 765 bp, Photorhabdus luminescens
atgttacattaccaaccaaaacatgacctcctacaacaacgtattattttagtgacaggcgctggagagggtattggccgtgaagcggctttgacctatgcccgttacggtgcacaagtgatcttacttggcagaacaacacacaaactggaagctgtgcaaaaagagattaaacaagcaggtggtgcccctgcaactgtttacactatggatctgcttaccgccacagccgaagagtgtcaggcattcgctggcgatttagcgcaatattatccgcatctggatggcgtattgcataatgccggattactgggagctgtcgcaccaatggcagagcaacccgtgcaattatggcatgatgttatgcaagtcaacgtcaatgcgacctttatgttaacgcaagccttattgccgctattattgaagtcacctgacggatcattaatctttaccagttcgagcgttggccgcgaaggtcgttgtggttggggagcctattctgcctctaaatttgccactgaaggcatgatgcaagttttagcagcagaatataaacacacttctctacgcgttaattgtattaatcccggcggtacacgcacaaatatgcgcacccgcgcattccctaacgaaaattctgctaaactgaaaacaccggcagatattatgccactgtatctttatcttatgggcagcgatagtctgcataaaacaggcatcagttttgatgcccaacccggacgcaaagcaggaccagccgaataa

SEQ ID NO: 6418 - DNA, 639 bp, Photorhabdus luminescens
atgaattactcaaaggttgatatagatctctgggataggaaagagcatttcttgcattaccgtaatgttgtgcaatgcggatttagtctaacagcaaaaattgatattacccatttgttatcttcgttggtggaaaagcaatataaattctatccaaccatgatttatttaatatctacagttgtaaactcttactctgaattcagaatggctataaaagatgaagaattaattgtatgggatggtgtaaatcctgcatatacaatctttcataaggaaaccgaaacattctcagcaatttggactgagttcaattctgatctggcagagtttatgaaaaattattctgctgattatgaaacctacaaagatgatctttgctttttttctaaaccagaactacctgaaaaccactttcacatatcgtcagtgccgtgggtaagttttgatgggtttaacttgaacatggcgagtgttatggattattttccccccatatttaccatgggaaaattttaccagaatggaaatcaaactcagttgcctttggcaattcaggtgcatcatgctacttgtgacggcttccatgtgggacgtgttattaataacttacaagagctatgtaacgattttatttag

SEQ ID NO: 6419 - DNA, 117 bp, Photorhabdus luminescens
ttgtatcggaaatatgttaatagccatcagttaacactggtggttttcacgattgaagttggtcgggatcatgattgcgattggactagagagcataaaaatgtgtggggcacttga

SEQ ID NO: 6420 - DNA, 381 bp, Photorhabdus luminescens
atggtctctgattgtgctgcgatgtgtgtgatgaggacatctcgcattatgataataagaaatccttgtcaaaacatgtcgatgagatgtacacctattatcgaaaataacagcatgatgatcccgaattacggtgaaatgtactgctatggtgaatccatttccacttcatttgttgaatcgacgatcaatgaagtgattgctaaacggatggtgaaaaagcagcagatgcaatggagtcagcaaggtgcgcattatttaatccagacccgtacagccgtactgaatgatgatttgaaaacccaatttgagcattggtacccgggcataaaattaggtgacgaaacggagcattcttggacagaaaagattgctgcataa

SEQ ID NO: 6421 - DNA, 1005 bp, Photorhabdus luminescens
atgaacactatcgcactgattggcatcgatctcggcaaacattcttttcatgtccattgtcaggagccatcgggaaaagctctgctacgtaaaaaattcacccgaactaaattgatggaattcttagccgattgctctccggcaacggttgtgatggaagcctgtgctggcgcgcatttcatggcaaggcggatcgctgatttggggcatgaggctaagctgatttcaccgcagtttgtccgtccttttgtcaaaagtaacaagaatgattttattgacgcggaagccatctgtgaagccgcctcacgaccttcaatgcgttttgttcagcccagaacggaagcccaacaagccatgcgagcgttgcatcgtgtccgggaatcactggtccgggataaagtcaaaaccaccaatcagatgcaagctttcctgcttgagtttggcatcagtatgcccaaggggattgccgtgataaaacgactctccactgttttggccgaacatcctcttccaccttatttggcgcaaatattactacggttacaggcgcattatcactatctggttgggcaaatcaccgagattgagaccgcactgtcacaggaaatcattcaggatgataccggacaacggctgatgacgatccccggtattggtcccatcacggcgagtgtgctttcctcacaactgggtgatggaaaacaatattctcgcagccgggattttgcggcctcgacgggtttggttccccgccagtacagcaccgggggaaggacgaccttattgggtatcagtaaacggggtaataagacgctccggcaactgttggtactctgcgcccggtcattcatgcaacagattgaacaccggcagggaaaactggctgactgggttaagcagcagcttgaacgaaagcactctaatatcgtggcctgtgcattggctaataaactcgcccggatagcgtgggccattacgacacaacacacggtatttgtcgcctaa

SEQ ID NO: 6422 - DNA, 381 bp, Photorhabdus luminescens
atgaaaattcccggtgtcggtgtcctgattgcgaccgccgccatcgcgacgatgggcgatcccagcgcatttcggtcgggcagggaattttcggcctatctgggcctggtaccgaaacaaacgggaacgggaggccgggtcaaattactgggcatcagtaaacggggagatacctacctgagaaccctgtttattcacggtgcaagagtgaccaccttactgacgaaaaccccgctgccgtgggtgacggcgctaaaaaaacgccgtccggtctgtgtggcgattgtggggatggccaataagctggctcgcaccgtttgggcattggtcgcccatcagcaggaataccaaaaagattacgtcagtgtcagaccttactga

SEQ ID NO: 6423 - DNA, 549 bp, Photorhabdus luminescens
atgaaatttactccttttggcgtcgatattgcaaaacatttgatgcaaattcattttgtcgatgaatacaccggtgaacttactgataagcaactgaggaggccggattttttaacgttcttcagtaaccgcgaaccttgtctgattggcatggaagcctgtggcggtgcgcattattgggctcgggagctgaggaagctggggcatgacgtgcgtttgcttcaggctaaatttgttaaagcgttccggatgggaaataaaaacgatgttcaggatgcccgggccatttggctggcggttcagcaacccggcaaatcgctcgcgattaaaaatgaagagcaacaggccattctgtcattacaccgaatgcgccaccaattagtcaaattcagaaccgcacaaatcaatgcgctgcatggtttgctactggaatttggtgaaaccgtgcataaaggcagggcttctctggataaggccatgctgagcgactcagaaaaaaactggctccgttcctgcttgctctgcttgaagagcaatatcatcgtttga

SEQ ID NO: 6424 - DNA, 159 bp, Photorhabdus luminescens
ttggaagctatcggcctcgttcctgaactgccgggttacccccgaaaaatagaactgatgggtacgtgtaatcttaatccagccgcagtatcccagtggttacttatgcgaaaacttgatcgcgccactgttttgtcacgctttcaaacgccagagtga

SEQ ID NO: 6425 - DNA, 606 bp, Photorhabdus luminescens
atggacaagcagtttaaagaggtcatcgataaattaattcaggcggaaaccgacggattaagaaacctggccttgattgacgtggagtacccgcggcagctagcacattatgtcgcgacggccttttttgacgtttatcacgataagcagaaactctcggcagaacgggccaaggtgattgagcacgtcaccgtggccgtcagagcggggcagcacgatcatgcctggcatgcccagaaagcgctcaccgcctgggcagaaacattttatcaccgccaccacgaccatcttcaccgtgacgacacgctggatacgtgggaccgcgaggctgagacgctcacccttcaactccgggagcatgcagcagatcaattggctggtctggccctcaccctgaaagagttgggggagcgatatcccggagacagtgcatggatactcgcacgctataaagccctggcgggaacgttcgtgctcatgcactacaaaattaaagaattgttacccttgctgggggccagcctccctaaccacaaattcgatcccaattttgatgccatcggatggagcctatttgatgatatccgccgtcagctgcttccctga

SEQ ID NO: 6426 - DNA, 528 bp, Photorhabdus luminescens
atgagcactattgatatattcttattattagatgttgataaaataaaaaaagagagaaaatacagtaaaaagaaaaatgaaccagcttccttagataaagatcatatacacatattgttaaggaatgatgatacttttattgaaggaaataaagaaaccctgacttttagtaaaagtaagggagaaattttaaactgggttacaatatcattggccggccctgaatcacactattcggtggtcatgtgtgggtttcaaaaacacgggcctaaagagcctatgaaaaatgtttatgctcatagatacgacaataaaagaccgacgctcaacaaaagcacttctgactctagttctgacaaagaaatctgccctgcggaatttaccccaactttaataccggaataccaatgggtctggacactacatgagacggaaaatacggattatataattatgtttgccttatatgataaagagcaacttatgtcgtactataagttttctctgttcatcacaaccaccgactag

SEQ ID NO: 6427 - DNA, 5328 bp, Photorhabdus luminescens
atgattttcatattattaccacggcggaggtcctcaatggaattattacatcactctcaggccacgaattttaccggagccatgatgggcggagtcgatccgcgcactggcctgtttactccccagatcccgattacccagctaggtggcaacgatctttggggtcccgacctggccatcaccctgacgtacaatcccttaacttatctcaacacagggtacgggctgggcttttccgacaatttcacccgttatgatactcaaactcaagtgttaaccctggcgaccggcgagatctatcatcgagtggaaaaggcaaacgaagtcgtcgacgggcaggcatggacctttcaccatgccaaacccgcacacttcaaggttaaaaaagagaaagacgctttctgggtactgtataaaacgggtagccgggaaaagttaacccagctagatagggcaaacccagtggccgtggtcagtgaaatctatgcgccttcaggccacaaactgtgcgtaaaatggaatagttttgtcaaccacaactacaactactggcaattgatggaagtctgtgacgccatggagaccttgctaaaagcagacttagcgacaacggaaaagattgagtttactgtatggccagggtcacctgaaagctacaccgtgacgctgaacatgactaatgatctgcttcaaaccgtcatcagcgcatcagagttaacttggcacctggaatatgaaacagagggggcacataagaacattctgaccaaagttaccacaccgtccggattaatcgaaaaggtggtgtatcatgaaacgggccacacactgcccacccctaagtgcattcagtactaccctaatgcttgggggcccggcattattcggcaagatcctaagtcctctacgactgctacagttgaacatttcccttatgttacccaacatcatatcatcgcgggcagcggctcccccgatcaggtcattcgctatgtattttcaccggagaatttcctaggacagaagaataagaacatgaaagacccgatcccccttccccagcaagacaatgcctatctggctaacagtgagtataaatatacatcaacagaggtgcgagagtacaacgaaaagcgctattgcatccacagagaatacaataaatttcatctgctggtatccgaaacggaaacggtcgaagtaacaccctcaagacctcaaaagttaaaagaaacaattataaaatattatgcagatgtgggtaagtcatttgatgataataagcaaccccctcaattcctgatgccaaacacagttgagacgatatggcacaatcctgagtcatcggcatctacaacacaacgcagaaaagaaacaacccaatgggaatataacgcacagtgtaatttaatctcaatgactttaccagataataccacgacaaaaactacctattatgcgcccgatggagaggagacaacagatactcattgccctgccgagccaaacggttttgagaggtttataaaagaaatagcagtggaagccccgtcgccactaacgaaaactaaaataaccatactaagaaaggtaacatataactataaatcgtatgatacatattcccccccaaaaaacaaccaagcctcggttgtcaaatcaatggtcttgccgctatcagaaactcattatagtcgcagggattgttgcgccgaccatctcgaaaaagtaaaaattaataccgtttccttttatgaaaatactcaaaacgcatttttaaacggcagggtggaacaaagaaacagctacctgtttgaaaacggtaaccagacccgtagttatacagaagattatagctggagcaatgagaataagaatggagcatcttgtattaagtgtaaaacaacaggctcagggaaatgcggtacccccccggtatcccacgaacaatactggagcaggtccaccggtcgcctgattttccaaaaagatgctcaggacaacaatacggtatttcaatacgataccatcggccatctcatctcaagcaccattaatgcggacactgcctacgaaaagaccgtgaaatacgcttggtcctattcaaataaaagggttacggtgacgcagacggatatccatgagaaccggtatatcaccgagatggacggcctgggtcgtcccctgaagaaaagttattcccccgcaggataccagggtaaacagtttgatatggaaagataccaatacaatccgctgggacaattatgccaggccatttcctgcgatcacatgctttttgaaaataagtccgagaaaaaatgtagcagcatgacggtatcactagaatacgatgattgggggcataacagtcgcctgcggtacagtgatggcacgtcagtaaaaaatacgtttgatccgataaagatgaccagtgagcatcagcgggtgtcgaacgatgaaagccaatcttccggtatcatccgcacgacatacaaccagtttggccagataacagcgacggagcgattgacaacaagcaggattcaacaagggtgttggcactatttaagagacgaactggggcgactggtttccatcaacgcaaacgggaataccacattattagcgtacgacgcatttgatcgtgtgattaaacagacgttcgccgatggcacgacaatcagtatggcatacgaaaatggggtgtcagtcagaatgtccgccaccccgctgggaatcaatcaaacaccagtaatcctcggaacacagatccttgatggtttgggacgggtcattgatatggagagtggcggtcgtaaaataaagctagattatgagggcgcttctccggttcctgatacagtcacttatgttaagggaccaacctctggtgataaagatatcgtccttcattatgaatacgagccaaaattgaataatgccgtcaccaaaatcaccgcaggacaggacgatgtggaccaaacctttaagtatgatcccaaaacgggtttgttgacagaagccattgaagaatacaaaaataaaaacgatgaaatgattagctccaagctcatttttgactatacactgtcgggacaattagccagcgagaagctggttagttataacaaaaataatagagcgtatatgcattttaaaacatgctattccttttcttttgccaatagaccaaccgcgataaaatcaacaattaatggtccacgatatatcataaataaatactcctatgataatcagggcaggctggaaacggtacgcaataatgacatagagatcaatcttaagtacgataaactgagtcgccatgtttgtcagtcaacagagtacctatttgatactatcaataacaaaatcacgacatctctgacattagatgattttggtcgggaaacaaaacggactataagaagacataatggtttaaaaaataataaaggaataacggatattcacataagtcagacattcaatgaacaggacaaaattacaaacaaagaactattgcacggtacaaaacaaatcagtaaggaagtctatacataccacaaacggggcggactggaaacgtataccttgatggagctggtgggagaaagagagataacgcaatgctctgattataaatatgatcaccttggaaatataacacaacactccataaccacggagggcaagaccatcacttcgacctatacatacggaaatggcaatatccaagatccctgtcagttaatagacgtcagcacctgtaccggtaacaattcaagttcttccttgcggtttacatataaccaaaggggggcgttagtgtgcgaaaatgacgaaaataacacgaagatccgcacatggacttatgacagccttgggcgtatcgacactacggttgatgcccttcataaggttgaaacccgctatttatttgatgctacgaatagactcattatcaaaagatctgaaaaaaatggtacaccttatcatcatgatttgagttattgttcaaatagcttggtacacgataattatttctatggtgaaaaaagagacaatgcagcagaccgcaaatacaataaagtaggtgggatttgtttagggttttcacaaaccccctgccatcaaaccccaacctccgttgctagtcgctatacagaaactgccacggacggcaagggcagcgtcatcgcgacgtttcagggcgaagacgtacagcatattgcctattcgccttggggggtgacaaccgagcaggcaatggttacggctggtcaacagccgccgcacaacacggcgatcgaagagcctcgatttaacggtgaacagtgggataccgccagcgccagttacttgctgggcaacggctaccgggcctaccgccccgacctcatgcggtttaccgccccagatagctggagtccctttggggccgggggaatcaatgcctacgcctattgcgggggcgatccggttaatctgaatgacccaagtggacatattagcgggtggggatgggcaaatattattactggtgggattggtctcttgttggctccgttcacatatggaggatcattagaattagggctgggagttaatgcagcacgggggttaactgcattagacgcagctagtggtgtaactgcaattgcttcaggagcgttggaaaataaaaatccagaaacatcgagaagactaggatggatgtcgctaggattgggactacctagtatggtgatagggggttattctttagcacaatgggttaatgttaggttaacaaacagttttaggacaccttatcattatcccacaagtttaggagaagtaaatctgtctagaaagagttctgattgggtaaacgcacgtagaagtttaaactctggcgaaaattggcactcagaggtcggtctcaatggcagaactatttgggggtctgatacgaagatacgaggattggatataaaatatcctttagaacaaatatcaagaagaccgagtaatggtgatatagttcttttgtcgggtagccatggtgtgcaaaatggagataattggctcatcaatggatcacgtagaggtagtttacttcattttccattctttaaatcggatatgacggtgtatggaggatcgtggaagggacgaacggttcatgtaagaaatcttgcgacaatgagtgaaattgattttggtactttattaaataatggaaatagtcatattattttggggtactgttatggacgaaatgaccaagcattaagatatcatagaaatttactgtcggttacgagttatatacacaattaa

SEQ ID NO: 6428 - DNA, 183 bp, Photorhabdus luminescens
gtgatgcggaaggagaccataaaaatctatggtcgccctcgtttttgcaacactcattttgatgtatggttggcttgcttaaatctatccggcgtcactataggcaaggatgcctgcgccccaatgagttccattgaacgtaaagtgtatcgcaataaccatcaggcatatcacaaatactaa

SEQ ID NO: 6429 - DNA, 357 bp, Photorhabdus luminescens
atgctctctgaggacatctcgcattatgataataagaaatccttgtcaaaacatgtcgatgagatgtacacctatatcgaaaataacagcatgatgatcccgaattacggtgaaatgtactgctatggtgaacccatttccacttcatttgttgaatcgacgatcaatgaagtgattgctaaacggatggtgaaaaagcagcagatgcaatggagtcagcaaagtgcgcattatttaatccagacccgtacagccgtactgaatgatgatttgaaaacccaatttgagcattggtacccgggcataaaattaggtgacgaaacggagcattcttggacagaaaagattgctgcataa

SEQ ID NO: 6430 - DNA, 228 bp, Photorhabdus luminescens
atgctcccggggattcactcccttgccgtcgcgatgcatcttgaaatccatagggtatatattgtgccatttgctgaatgggttgtcagaagggaaagagtgaaataccttgtttctcctgaaaatcaatatccagaatttggcgataatattagcttcattatgaaacacattgagtctgttgttaaaattttcattgataattacaaaataacgactacccattaa

SEQ ID NO: 6431 - DNA, 1047 bp, Photorhabdus luminescens
gtggaatacttatctctttacgggttgtttttagccaaagtagttacgctggtgttggcgattattgctctggcaatattgggtatcggcataggaatgcggaaatcttcgctaaaaggagaattgaaactcgtcgatctcggtgagtcatatcgggataaacagcgtcaaatgcagcgggcgcgcatgacagaagcggaagggaaaatctggcagaaagagtttaataagcaacaaaagctcgaatccaagcagaagaagagtgacgctaagacaggtcataaagggttacagaaaccttgtctttatgtactggattttaaagggagtatggatgcacacgaagtcgattcattacgtgaagagattagcgcgattctggccgtggcagatgcaaaagatgaagtgttgttacgtctggaaagtccaggtggcatggtgcatggctatggattggcggcctctcagcttgcccgtttgcgtcagaaaggtattcgcttgactatcgtcgtagataaagttgctgccagtgggggctatatgatggcttgtgttgctgatcgtgtagttgctgcaccttttgccattattggttctattggcgtggtcgctcagattccgaacattcataagctattgaagaaaaatgatattgatgtggaactccatacggctggtgaatataaacgtacactgactgtgttgggagaaaatacagagcagggccggaaaaagtttcaggaagatctgaatcagactcacgaactattcaaatcgtttattcatacacatcgcccatcacttgacgtggaaagtgtggcgacgggcgaatattggtacggctcacaggcgaaagagaagggattgattgacgaaattggtgtcagcgatgatctgttgattgctcaaatagataactgtgaagttattggtgtcagttatacacgccgtaaacgcatggtagagcgtttcaccggcaatgcaatggaaagtattgataaactgttattgcgctggtggcaaagaggggagaagcctctgctttaa

SEQ ID NO: 6432 - DNA, 180 bp, Photorhabdus luminescens
atgcgtttaaaaacgccaatagcgctgtgcaaaagtgacttggatttgtttgaagatcagctaagcagaacagataaacgcaaagccagagtatcaactattggtgtagaaaagcctgcggctcatcacaagcaggaagagggatgtaaagcaaattatgtaacacctgtaatattttaa

SEQ ID NO: 6433 - DNA, 831 bp, Photorhabdus luminescens
atggctatttcacaatacgatattcataccagtcatgctgttatctctgttgctgatacgggaggtgatgggttaccggtcctccttatacacggtaattcaagttgtaaagaagtttttcgccatcaaattaactgttttggtgacgaatatcggattttagctattgatttacccggacacggtgcttcatcaaatgcagtggatcctcgccggacctattcgatatctggctatgccctttgcatcatcgaagtactggaaaaattagccatcgataaagttgctgttttcggatggtcactggggggacatatcggtttagagctgatcccaagattcccagggattgttgggctaatgatttgtggcacgccgccggttagcccaggtgcagaaaatgtcagccttggatttaaaccaagccggtttatggcaatatcgggtaaggcttcgctgacagaagaggagattacggattataccttggcgttgtatggtgaaaacgcgctttgtgagccatttttgagagccgcagtggcgcggaccgatggtttggcccggcaatatatgtctgaagcatcggtttcaccagacgttatggaccaacggttattggttgaaacaaacccaacaccactggctatcgtcaatggtgtagaagatttattcgttaatattgattatattaacgggataacctacaaaaatctctggactggtcaggtgtataacttgctcaacttgggacatgggccattctgggaagcgccagagctgtttaaccgtttgatggcgggttttttctctgatctcaccttagaagtgtaa

SEQ ID NO: 6434 - DNA, 2601 bp, Photorhabdus luminescens
atgggtaaagctcttgtaatagtggagtccccggcaaaggccaaaacaatcaacaagtatttgggaagtgactacgtggtgaaatccagcgttggtcatatccgtgatttgccgaccagtggctcagccagccaaaagagttcgagctcatctaccgataagtctaagaagaaggttaaaaaagatgagaaagctgtattagtcaaccgcatgggggttgatccataccgtggttgggaagcgaattatcagattttgccgggcaaagagaaggtcgtggcagagctgaaatcactggctgaaaaagttgatcatgtttatctcgcaacggatcttgaccgcgagggagaagccattgcatggcacttgcgggaagtgattggtggtgatggcgatcgttttagccgggttgtttttaatgaaatcactaaaaatgccatcaaacaggcatttgataatccgggtgaattaaatattcaccggataaatgctcaacaagctcgccgttttatggatcgagttgtggggtatatggtttctccgctactgtggaaaaaggttgccagagggctctctgccggccgtgtgcaatcagtggcggtacgccttgtggtagaaagagagcgtgaaattaaagcgtttgtaccggtagaatattggcaattacatgctgatttgctggcgaaaggcgaaatctcgctgcatatggaagtgacccatcagcagggtaaaccatttaagccggttaatagtgaacaaactcaagccgccgtctctttactggaaaaagcccgttacaaagtgcttgatcgtgaagatcgcccaacatccagtaaaccgagtgcgccgtttatcacatctacattgcaacaggcagccagcacgcgtttagggtttggtgttaaaaagaccatgatgatggctcagcgtttgtatgaggctggatatattacttatatgcgtactgattcaactaacttgagtcaggatgcgctggatatggttcgtgattatatcagtgataattttggcgataaatacctgccagaagcagccaatacttacagcagcaaagagaattcacaggaagcgcatgaagcgattcgtccttccagtgttgatatcgtggcagagcaactgaaagatatggatgtggatgcacagaagctgtatcagctaatctggcgtcagtttgtggcttgtcagatgacaccggcgaaatacgattccacaacattgacggtacaggcgggtgattttgagttgcgggccaaaggtcgtacattgcgttttgatggctggacaaaagtgatgcctgtgttgcgcaaaggtgatgaagaccacacgttgccggttgttgaaattggtacagaacttgatttgcaacaactgatcccaagccagcacttcaccaaaccaccggcacgttacagtgaggcatccttggttaaggagctggagaaacgcagtattggtcgcccatccacttatgcttccattatctccacgattcaggagcgtggttatgttcgcgtagagagccgccgtttctactcggagaaaatgggagagattgttactgatcgtctggaagaaaatttcaacgagctgatgagttatgattttactgcgcgaatggaagatcagcttgatcaggttgcaagtaacaaagtcgaatggaaaggggttctggatgagtttttcacggattttagtgaacagctagacgtcgccaataaagagccggaagagggcggcatgcggcctaatccgatggttattacctctattgagtgcccgacatgtcagcgctctatgggcattcgaacggcaaccaccggcgttttcttgggttgttctggttatgcgttatcacctaaagagcgttgtaagcagacgataaaccttattcctgaaaatgaaattcttaatgtcttggaaggggatgaggcggaaacaaatgcattgcgcgcccgtcgtcgctgtaaaaaatgtggtacagcgatggacagttaccttattgatagccaacgtaagttacatgtttgtggtaataacccggcttgtgatagctacgaagtggaagagggcgaatttcgcattaagggatatgacggcccagttatcgaatgtgataaatgtggcgctgaaatgcacctgaaaatggggcgtttcggtaaatacatgggctgcaccaatgaaacttgtaaaaatacccgcaaaatcttgcgtagtggggaagtcgcgccgccaaaagaggatccggttccgctaccagagcttccttgtgaaaaatctgatgcctattttgtattgcgtgatggtgcagccggtgtatttttagcagcaaacactttccctaaatcaagagaaaccagagcgccgttggtagaagagttagctcgttttaaagagcgtttgccggagaaattacgctatctggctgatgcgcctgtggtggatgctgaaggtaataaaacagttattcgttttagccgtaagactaaacagcaatatgcttcttcagagaaaaatggcaaagcaacggggtggagtgtgttttatgttgatggaaaatgggttgagaaagacaaaaagtaa

SEQ ID NO: 6435 - DNA, 975 bp, Photorhabdus luminescens
atgaaattgcaacagcttcgttacatcgtggaggtggtaaaccacaaccttaatgtttcatctacggcagaaggactgtatacatctcaacccgggatcagtaagcaggttagaatgcttgaagatgaattaggcattcagattttttcccgtagtggtaaacacctgacgcatgttactcccgcaggtgaagaggttgtccgaatttctcgtgaagtattatctaaggttgatgcaatacggtcagttgctagtgaacatacttatccgaatcgtggttcgctatatattgctactacccacacacaggcccgttatgcattacctcctgtgattaaaggttttattgaacgttatccgcaggtctctttacacatgcatcaggggtcgccaacgcaaattgctgaagctgtgagtaaaggtagtgctgattttgctattgcaactgaggcactgcatttatatgaagatttgataatgttgccttgttaccattggaacaggacgctggtggtgacgtcggatcacccgctggcaggtaaagagagtgtttcaattgaagaattggctgaatatcaactggtcacttatacgtttggctttaccggtcgttctgagttagatgtcgcattcgataaagtgggcttaaagcctaaaattgttttcactgcgacggatgctgatgttattaaaacttatgtccggttaggattaggtgtaggggttattgccaacatggcggttgatccggtgcaggataacgacctggtttgcattgatatgcgtgataaatttagctacagcacaactaagattggttttcgtcgcagtagtttcttgcgcagctacatgtatgattttatgtggcgttttgcgcctcacctgacgcgtgatgttattgatcaggcagttgctttacgctcaaatgaagatatcgaagtcatgttcaaagatatcaaattaccaatcgtataa

SEQ ID NO: 6436 - DNA, 828 bp, Photorhabdus luminescens
atggatataaaaaacacaattacgaataatcagaaacatatcgcaaaaatcaatgaagctaatacgttctttcacatcgacgatgcttattttagtatagaaaataccaataaatacaatgaaaaagatggtttagttcagttcattatagccaaacaattatctgataaaccagaagttatagacaaaactaatagcttaagtcaaacattaattgcactctcctccatcgcaaccaattatgtcaataaatacgcggaaaagtatggagagcaatataaaacagatatggacttttggactaaagtcgttaacaaactacctctaatgggtactagcaaagttgaatctaaaaattacaccgattcattaaatggtttaagcatttcaaaaagtttccttaatttcattatgaatgtggttgtattcgaaaatacagatatgctgccagatttcgctaagtttctgaccaagcaaggggaaacgattcgtttaggtattcggaaaaataaaggcttctattctactgtgacactaacgattgctatcgataccttgattgtaggagagaagaccgtatatattccaaaactaaaactctatcgagttaactttgatagcactaattcaaactttttatcaagctgtgcttctaatgaaaatatcaatattgattttgagtattcatccttaatatcggttttagactatgaggcgctcgaaaatcctgagattaaagccagttttgataatttcatcaacaaacaaagaaaaacatcaatagaagagtctgatgatttcttcagtggtgaatttgaccccatctga

SEQ ID NO: 6437 - DNA, 2676 bp, Photorhabdus luminescens
atgtcgtttgatttaaaaaaagtttgtgtttcaacactttccgctgcaagtaaacaatatgattattacagcttaccactggttgctaaacatttgggtgatatttcccgtttgcccaaatcactgaaagttcttctggaaaatcttcttcgcaatatcgatggcaattctgttgttgttgatgatttgaaagcaattgttgattggcaaaatactggtcatgcagacagagaaattgcttaccggccagcacgtgtattaatgcaggatttcaccggggtgcctgccgttgttgatttagcggccatgagagaagcggttcagcgccttggtggtaatgttgaacaagttaatccactatcacccgttgatttggttattgaccattcagttatggtggataaatttggcacggaaaaagcctttgaacaaaatgttcaattagaaatggaacgtaattacgagcgttatctctttctgcgttgggggcaaaaagcttttaaccgttttcgtgttgtcccgcccggaaccgggatttgccatcaggtaaacctggaatacctgggtaaaacggtttggcatgaaatgcataacggacgagagttggcttatcctgataccttggttggtaccgattctcataccaccatgatcaatggtctcggtgttctaggatggggtgtgggcggtattgaagctgaagcggccatgttaggacaacctgtttccatgcttattcctgatgtggtgggttttaaacttaccggtaaattacgcgaaggaattactgcaacagaccttgtattgacagtgactcagatgctgcgtgcccatggtgtggtcgggaaatttgttgaattttatggagatgggttagctgatttgccgctggcagacagggcaaccattgccaatatgtcaccggaatatggtgcaacttgcggtttcttcccggcagatggtattaccctgagctatatgcgattgacagggcgtacagaacagcagattgagctggtagaagcttattgtaagatccaaggattatggcgaaatcccggtgatgaaccggtatttaccagtagtcttgaactggacatgtcgacggtggaagcgagcctcgctggaccgaaacgtccacaagacagggtggctttagcgcgagtacctcaagtatttcaatcatccgttgatctagaaatgaataaatcccaggggaaagccatctcagcgccagttaatctggataaccagaagtatgagttagaagagggggctgttgtcattgctgcaattacttcttgtaccaacacatctaatcccagcgtactaatggctgcggggttgttggcgaaaaaagcggttgagaaggggcttaaacgccaaccgtgggtgaaaacctcactggcgcccggctcgaaagtggtgacagattaccttgaattggcgggcttgatgccttatctggaggaactgggcttcaatctggtgggttacggttgcacaacttgcattggtaactctgggccattacctgaatctattgaaacggcgattaagcaagctgatcttaccgtcggtgccgtcctttctggcaaccgaaactttgaaggccgtatccatcctctgataaaaactaactggctagcgtcgccgccgttagttgtggcatatgctttatccggcaacatgaaaaaggatttgactaaagatcctcttggtcaggatcaacaaggcaatgatgtctatttgaaggatatatggcctgatagcaaagaaattgctaaagctgttgagcaaattaaggcggatatgtttcacaaagagtatgcggaagtctttgatggtgatgaaacatggcaatcgctggatgttgcgagttctgcaacttatcacttccagcttgattctacttatattcgccacccgccattctttagtgagatgaccgcagaaccagaagcgataacggatattcacggcgcgaatatattggctattcttggggattctgtcaccacagaccatatttctccggcggggaatatcaaagctgacagtccggcagggcgttatcttcaagaacatggcgttgaacctaaagattttaactcctacggttcaaggcgcggtaatcatgaagtcatgatgcgtggaacgtttgccaatatccgtatccgtaatgagatgattgctggtgtggaaggaggatatacccgccatattccgtcacagacacaattagcgatttatgatgcggctatgcgttatcaggaagaaaaaaccccattggctatcattgcgggcaaagaatatggttccggttcgagccgcgactgggcagcgaaggggactcggttattgggcgttagagtggtgattgcggaatcatttgagcgtattcaccgttcgaacctgattggtatgggcgtattaccattggaatttcctcaaggcgtaaatcgtaagacattaaatctgcaaggtgatgagacaattgatattgaagggatgaataacctcaagccgggacaaattgtaccggtgaaaatgacttattcggatgggcatcaggagatcattaatgctcagtgtcgtattgataccaaaactgaattagattatttccaccacggtggtatcttgcactatgttattcgtcacatgttgaaataa

SEQ ID NO: 6438 - DNA, 609 bp, Photorhabdus luminescens
atgaacaataaaatgcaattaaaacgagtcgctgaggccaagttacccactccttggggtgattttttaatggtcggctttgaagaaatcgccacaggtcaagatcatgtcgcattagtatacggtactatttctggcaatgaacctgtgctttccaggatccattcagaatgtctgaccggtgacgccctgtttagtctgcgttgtgattgcggttttcaacttgaagccgcccttgctcaaattgctaaagaagggcgaggtgtattactttaccatcggcaagaaggtcgtaatattggcttaatcaacaaaattcgtgcttacgcgttacaggataacggtatcgatactgtagaagctaaccatcagttaggttttgccgccgatgagcgtgatttcaccttatgtgcagatatgtataaattactcggtattcaagctattcgtctgctgacaaataatcccaaaaaagtggaaattatgaccgaagcagggattaatatcgtagaacgtgttccattaattaccggccgaaatcctaagaatgcttattatttggatactaaagccagaaaaatgggtcatttgttatctgagcaaaattag

SEQ ID NO: 6439 - DNA, 144 bp, Photorhabdus luminescens
ctgattagcagaatggcattaggtatgcactggtcgcaggacattatcacatcaacgttaattagtgcagtattagtgatggctatctgttatctcacagaaaaatggcggttgattaacgacaaaaaggatttggtggtgtaa

SEQ ID NO: 6440 - DNA, 312 bp, Photorhabdus luminescens
gtgaaatattttctgattttattactgatattggtgatctttgtcatctcgatgactcttggatcaaataacgatcaggtcgttacatttaactatctgattgctaaagggaattactctatatctacacttttagctgtattatttgctagcggtttcgtgttaggttgggttatctgtggattattttatcttcgtgttcgtttgtcattaggaagagctgaacgcaagattaagcgacttgaagtgcaactggagcaacctgctgaaccttcggttactgattcatcgcttgcacttagcaaggaataa

SEQ ID NO: 6441 - DNA, 1170 bp, Photorhabdus luminescens
atgttagagctgttgtttctgttgcttcctgtggccgctgcttatggctggtatatggggcgcagaagtgctcaacaggataagcaacaaaatgctgatcgcttatcacgagaatatgttgccggggttaactttctcctttcaaaccagcaagataaagccgtggatctgtttcttgaaatgctcaaagaggacagttctgcttttgaagcacatttgactttggggaatctattccgttccagaggagaagtagagcgggctatccgcattcatcaatctctcatggaaagcgcttctctgacatttgatcagcgtttgcttgcgacgcaacaattgggccgcgattatatgtctgcgggtctgtatgatcgtgctgaaaatatgtttgctcaattggtgaatgaaaaagattttcaggaaaatgcgtttcagtcgctgctgactatttatcaatcaaccagtgattggaaaaaagccattgatattgctgagaaattagttaaatccggcaagcatgatttacgggaaaaaattgcgcatttttattgtgaactcgctttacaggagatgagcggtgatgatcttgatgaagctatcggttatctcaataaagcggttcaggcagataaaaactgcgccagagtttctatcatgttggggcgcttgtttatggcccggcaagagtacaataaagcggcggatgctttaaaatctgttcttgagcaggataaacagttggtgagtgaggtgctacctattctccaagagtgttaccagcatcaaaatcagattgatgaatgggaaaatttcctgaaacgttgtgtcgaggaagattgtggagccacggccgagcttttgctggctgatattatcgagcagcaaaaagggcatgaagtcgcgcaaacttacatcaatcatcgattagagcgtcatccgaccatgcgcctattttatcgcttgatggattaccacctggccgaagcagaagagggtcgggcgaaagaaagtattatcttgctacgggacatggttggtgagcaaattcgcaccaagcctaattatcgctgccataagtgcggctttacttctcattcgctttactggcactgtccatcatgccgttcgtgggattctattaaaccgatccgtggattagatggtcagtga

SEQ ID NO: 6442 - DNA, 747 bp, Photorhabdus luminescens
atgacatctcataccttaacatcgttcggtagacagattagctcgcctgtcattgttgctttagattacgacaatcaggatacggcgctggcttttgccgataaaattgatccacaggattgccgtctgaaagtaggtaaagagatgtttaccttacatggtccgcagtttgttaagttgctgcaccaacgtggttttgaagtatttctagatttgaaattccatgatattcctaataccaccgccagagcggtagctgccgctgctgagatgggggtttggatggtaaacgtacatgctagtggcggcaccagaatgatgacagcggcgaaagaggcgctgctgccttatggtcatgatgctccattgttaattgctgtcacggtattaaccagcatggaacaatcggatctgcaaggtattgggattgatatgacaccagcgcaacaggctgaaaggttggcaaaactgactcaggcatgtgggctggatggtgtggtttgttctgcacatgaagctcagcaactgaaaaaggtttgtggtcagcattttcaattagttactcccggaattcgcccgacgggcagtgatgtgggtgatcagcgccgtatcatgacgccagaacaggcggtattggctggcgttgattatatggtcattggccgtccgattacccgtgccgccgatcctgcggccgcattgcgtcaaattaatcaatctattgcgggagtgattaatgcaagataa

SEQ ID NO: 6443 - DNA, 327 bp, Photorhabdus luminescens
atgcaagataataattcgcggttggtctattccacagacagagggcgtattcaggaagaaacggttgaatctcagcgtccaaaaggggatggcattgttcgtattcagcgtcaaaccagtggccgtaaaggaaaaggggtttgcgtgattaccgggattgatgctgatgatcagacgttagctaagctggcggctgagttgaagaaaaaatgtggctgtggtggttcagtgaaagagggtgagatcgaaattcagggcgataaaagagaattattgaaacagttactcgaagccaagggtatgacagttaaattagctggtggttga

SEQ ID NO: 6444 - DNA, 606 bp, Photorhabdus luminescens
atggagaatgatcgttctaccatgaaaaacatggaaggtgagcaggcgcccaacatcagggaaaacatgttggatgttgtagaggaattaatttacacaagggggattgcggcgacgggtatcgatctgataacgcgcacgacaggttcttcacgtaagacaatttatcgttattttggtacgaaagaggggttgattgaagaagttcttcgtcggcgagatgaacgatggatgcgggggtttacctcatcaatagctgaatataaaacacctaaagagaaattgctgaatatttttttggtattacaaagatggttcgcgagtgatgattttagaggatgtgcatttatcaatacatccggtgagcgccctaatcctgatgatccggtaagaataattgctaaggaacataaagagaaagtttttacttacgtgctgtctatttgtaaagaaatatcgccggattcatcagtggatttagcgaggaagctcctgctcttaatagaaggcgctattacaactgcgcatgtgatgaatgatacacattatgctttagaggcgatgaatattgccgaggcattgctgagtaaatacgatgtgaattaa

SEQ ID NO: 6445 - DNA, 480 bp, Photorhabdus luminescens
atgtctaatacaaaagaaattcgccagccggtgccaccatttacccgcgaaactgctattcagaaagtccgtttagcggaagatggatggaatagccgtgatcctgagaaggtttcattggcctattcgttggatacccattggcgtaatcgtgctgaatttgtgcatagccgtaaagcagcacaggatttattaaccagaaaatgggcaaaagagcatgaatatcgcttaattaaagaactttgggcgtttactgataatagaatagcggttcgttatgcttatgaatggcatgatgattccggtaactggtttcgctcatatggtaatgagaattgggaatttaacgaagatggcttgatgtacaaccgttatgcctgcattaatgatcttccgataaaagaatctgagcgcaaatttcattggcctttaggtcgccgccctgatgatcatccaggattatctgagttagggttgtaa

SEQ ID NO: 6446 - DNA, 1281 bp, Photorhabdus luminescens
atgacgacccaaaactttcaataccggtcactgggccgactacaagtgatctaccgcgggcgaggagaacagtgggtgttaggtcatctggccgaaagtactgtgagtggccgctatttatttgagtacacccatgaagctcttgataatggtatcgaattctcgcccctacaactgccactttctacagagacttacgcgaattttgagcactttcaggactggcttcctggtttcatcgcagattccctgccggatggctggggacggctgcttatggaccggttcctgcgccgtaatcatgtcgatcccggccggatttccgtcctggaacgcctggcattgctgagcgataacacgatgggggctctgacctaccaacctgttctgcctttaccggaggatcaggaagacaaatacagtattctgaacttgactggactggctcagcagatccgtcaggaagtcaccggtcaggattcggaggcactgcgtgaacttttcctgcttggcggctcgcctcacggagccagacccaaagcacaggtagaatacaatccatccaccggccagatgaaaacaactgcattcccagaaagtgaaccttggttggtcaaattccccgcagcagaggagaatccttgggtctgtgcccttgaagaagcatatgcctgtactgccagaatagcgggcattgatttccccacaagtcgctatttccgccttggaggggagcttgctgctttcggtgtccagcgtttcgatcgtgagaatggaatgcgggtgccggtactgagtatggccggcgccctacatgccgactttcgattaccctgtatggattacatagatatcttacgggcgacgggctccatcacgcgctctgttgttgcgcgagaaacccaggtccggcgtatggtgttcaacgtgttgatgcataatcgtgatgatcatgtgaagaatttctccttcattttgaataagagcaatgagtgggtagtgtcccccgcctatgatctaacctttgcggatggccccggcggacagcatcagacttcggtgaccggctacggaaccgatatcacccgcaccatgttgttgaaagttgccaaagatgcaggcatcgcgccggccagaatgaacaatatcattgatgaagtagcggatgtcgccgccaacttcgctcatactgcacgggatgtcactgatgatattcccactaacgaacttcatcaggtcacggactgcattaaccgaaatctgtcctacctcaaacgataa

SEQ ID NO: 6447 - DNA, 363 bp, Photorhabdus luminescens
atggctctaatactttataccgaatcggaattgctagcagaacttgggcaccgcctccgtgagcaccggttacggcgtaacatgctccaaacagagctagcgctcaggagcggtatttccgtctctgcgctcaaaaaacttgaaggcagcgggcggggcacgcttgagaatttcatgaaggtcgtctttgctctgcggctggagaacgcaattaagtccctgtttatgctacaaccgactagcattgcacagcttgaagccatgaaagcaccagttcgccagcgcgcccgacgaacccaacgttcgtctcggaaaccctcaggcaatggccgcgctcatcaatcaggagacgcaaaaaaatga

SEQ ID NO: 6448 - DNA, 1350 bp, Photorhabdus luminescens
atggaaaaacatccggtagaacaatcacctaaacttgatttctcaaatttagattttgttaaattcggggaatacctcagtgaatataatattgttgataaacaaggaagataccttcattggagccagcttaagtggcgagttcctggtaaagaagctgaacacatctggtatgcggtaaagttctgtagagatcagttgaaaaaaagtacgggcttatttgataaaagtgggaatgaatttagtttttgtatacatgattcactagaaccaaagttgcacaaaattgtacaacttggtgccggtaaagtcgccgcacttgcaggatctcaagcatcagataatattcaacagaattacttagtatcatctttactgatggaagaagccatcaccagcgctcaattggaaggtgcagcaactacccgagctgatgcaaaaaaaatgctagaggaagaattagcgcccagcactcctgatgagagaatgattctgaataattatatgctattaaagctagcggataaaagaaaacaagaaccccttacaagggatctaatgcttgaatttcacagaatagcgactaatggtgtatctgaaaatgaaaatataccggaggaatttagatgcagtaatgatatctacattggaaatgatgacaatccattattttacccgccaaactatgaggagttagaaaataggttagaagaattatgtacttttgctaacgaaaatcataatggagaggatggcaggaggtttataccaccagtaataaaagcgattattcttcactttatgatgggatatgaacacgcatttaaagacgggaatggcagaactgcaagggcaatattttattggtatatgctaaagaatggatatgatatttttgaatatatttcaataagcaaggttatcaaagagcaggctaaagagtatggtatgtcatatctttatgttcagaaggattatggagatttaacttattttatcgattttaacgttaatattattctaaacgcatttgatgaattacaagagtatttaaaagtaaagacaaaagaattttatgaaattgtcgatgtgttggaaaattcaaagtataaaagtaagctaaccttcattcagaaagatttaattaaaaaaggtgtaaaagaacctggaagattgtttaaagttaaatcggttcaaaatgtatatgatgttagtgaaaatacagctagaaaattacttagagagcttgaggcaatgaatatattttttcctataaaaataagacgaacaacttattatattgcccccgcagatctacgtagtaggctaaataagatatcaaaatcgtag

SEQ ID NO: 6449 - DNA, 4911 bp, Photorhabdus luminescens
atgtcacattttgaatatgatatcgaaaataaaaacgacacctatcaattaaaagaaaatgaatatactgcggtcaatggaaaatattgggagtataagcgagatgaaaatgaaaataagccatttattcacctactgaaaggcaatcaagactatccaacttggataacctctgatattaaagaaatggctctatatattatagaaaatttactttcttataataaatactcaactacattacaacagactttgaaacaagctgtggacgccgttttcaatgaatattccgaaataaaatattctgagctactgaataacattaataatatatttaaccttttctttataaaaaattataacagctctgatatcgatacagcaatcaatatcttaatatcaaagatagaaattcatgaaaaattagcaagcataaataaggataaagtcgattcagatcaaactaaagtcgatatatggcaggatctggagattaacgcagaagaacctttgctgaaaatatatcgtcaggcattctctaccggagatatcgatgatgaggtctattcagatgcattgctaacttttatgtcagatggcaatgtagcattaaatgataaagaaaaatcagattataaccaacgaatcaaagataaagaagatcttttcaaatcctataaagaaggtattgaaaaggtgaatagtttaatttctgctaataatattaatccaggcattcccattattcatccagaaataaaccaaagtatcagcattggagatgacatactattagctctactagccaaagaagaggtagcattaaaaaaacaacatcgtaccgagtatagccagaaagatattcttgacctgcaaactctacaagctgctaagtatcatttattagtcttatcttcattaggtgccctattatatcagattgctcctaaaatcggaaaaatgactcaaggtcatggtgattatcgcgatataatttttgcccaagatcaagctgaattattatttaaaaaaaataatattcactatgatacggatcatgttctttatcaagaatcaaaacatattgaaatggaaggctgtattattttaacagccgcaatcatttatcgaatgagaaaagagaatgccaatgtggaacaagcacttaagtattctacattagaaacaataaaattatttgaaaatgacaagcaaaaacttaatcctttcaataaaaacaacgtaaagccagcaggatacttttcttttatcgattttaaaaagagagataaatttgattcacaatataattttaatgagcaatttaatgtttataaaaacaaatacagtgattatgaatccattttacttagtaaattaatactttcatctccggctgcgcaattaactaccgaagagattgttaatccaccagaagaagcttttctctattcagtcgaacagggtatgggaaatgtcgccatgataaaaatgtatcagggtaattggttggttgtctcaacaatacaaggaggagtgaaggcaagaaaatattcccaacaacaagttgatagccagcccaccttacgtgctatgtctagacccaatgcactatttttaattgagcaaaaaatagagataggcatggggatattaatggcaaatagaatggttcgtacaggaaaaagacttttcccgattggctatgaacgggccaaaaccttaagcggcttctcagaaacaagccgatataaatattcttatgacgcattttggaatgattattatggtataacctcaggaatgaatgtcggaattagtttcacaggctcacctaaatttaatttttataaagaagataacttactttctgttaccacaacgatagtgcagaaaggcttaaacgatattgcaataaaaagtaaacaagctctggatattacctctggttggcatatcgcggcaaccattctgattcctttctataatgttatctataaagcaacaaccgatagtgaatatacattaacgggagaggatgtcggttcaattatctttgataccgcgaatgtgctgttagttgttgctaccctaggtatgtcattgactgaatcaatggccgctaaagtcacacaaactacattacgcctcagacaagccggtctgaccggaagagctctaattacagcggttatccgaacattaccagagcatggcgtaatcactttacgccaatcttcccgcattctgctcggtggattaatcgatttaatcgaacctttgcccattagatcaacattgaccttaacttaccgaggagtcgtaagcgcagtaggtgtgataaaaaatagcattaaacttgagaaaagtttcgccgatatttttagcaaaagcaccagagggcttggtaaactgaaaaatgaatggcaagtcagcaatatttcactcaaccgaatggtagctcatgcaaatgagggaatatataaagggatctattcaatacgccctgctaatgtggaaaccgcaattaaacagaactactatataaaggaatctggtgctaattaccaagtcaaatgggatgaaacaaaccacacctggcgcgtagccaatccagcttatccgcaacaatttagttactggcctgcggtgaaattagataaaaatggacattggattactcataccgatgtatctaataaatttcttatcctggagcaaagtaaaaaaatagatcaggaacttgaagcagcacgcagtaatattaataacgataaaatattggatgcatttattcatatcaataccgcattcaaaaatcatgaaaagtatgatatcgataaactatcagatattactgatacattaacccatttcttggaaaaatctttaaaacttggagataaacaagccctactcaacacagagatagtgaatatccaacaagcttggatacgtgaagtcaacttaccattacaaaacaatctattaccaaaaaacctaagtatttcggctgaaaaaattaatgccatcaaaaccgaactaccttatctattgagggaaatctatcctgttggaaatcaattacctaatgcatcggcaatcaataaaatggccctagctattgaagaaatacctaacacaccgatgccaaaatactcttcgggtaatatccaaaaaacgatacaatacacatccatagagagtaaccgcgtaaatattccccctatcgggatcacaataacaggtaatgatctctttattaatcaagtcactcacgtactagatgaaataagtgaaatcccttccggaaatatcgttattcaagagcttgaaaaacagggtttaaatatacaaccaccaacgatggatgccattgtacgcgagaaaaatggtcaattttatgcccataatagcgccggtagcagtattgcctttgacccagagaatcacttgattggcacagaagaaaaacttgtcgaggagccttggcgttcccgtgagcctgctatcgctttatatcatgagatgctacatatctattataatcgttacccaacatggtttacttctatcgataataaaataattgatcaaaaagtcagtggcggtttttctttgctggaagaatcacgcattgtgggaacaaaatattacgccaatgataaaaatacgttatttgatttcagtaattctggctatttattagaaaacaattcggctttattgactgaaaatagattcagagcagaatatgccatattcaaaggtgaaagcgagtatgttattcaaccttattatggtaaaggagatagtcaaatcccattaacaagtactagaataagcacaaatgaatcatcccgcaatgtcatgggtgtgggtagtggaaaacctgaaaaaatgcccgatgaatcagctactgattaccgtaacagagtgaaggaatggcgaaaagcgaataaaaaaccaggggcggatatagatattggatcaggtgatatgagaaaaagaaaagcacaattcagaattgagattttacaaaaagaatatcctcaacttgaaccacaaaaaattgagcttggtggtgcattcgaattatggacagtacctaatgaaccggcgaatagattaatgctgagttcacatggatattttttctctgatagtgcaatgacgcaagtccctgcgggaaaaacgattcaatttcttggtccccacggtcagacattattggaatcaccggaaaatccattaaattctccctttgatgttacattaggtaatagcggcttgactgtacaaccttatgcaacaattaaagcaggcaacacagcaagtctggctaatgtaagaataggtgataagacgtttaccgtgaacgatattcagaatatggctaccaatgatattgaaaattatctgctagccactggagtagaagccaatacagttaatcatggtagggtaagaaattacggtatcaaatattatgagaaaatgcctgatgaggaagtgaaagcggcagtatggaaaaataggacagacagtacgaatatcaataaatatgacgcactattagtcagcccggaagcggggaatcgtaaaaaattgtccgatatttttacgctgctgaaaaccaacgaaaggatggcaaaatatgatgaaataacctttgttgcctgtcgtgaagaattgaacagaataaatatgaaatcagtacatgataccggccttggcggtggttatgaacccaaactacaaccaacggtggttctttctcgttcaaaacgttcggcgactctcacgcccgacggagcaataatttattctgttattgcagtaaatctgcattataatctcataacagaaaaaattgttggtatcgcccctttcctacttatggataattaa

SEQ ID NO: 6450 - DNA, 1026 bp, Photorhabdus luminescens; identical to SEQ ID NO: 6127

SEQ ID NO: 6451 - DNA, 381 bp, Photorhabdus luminescens
gtgaaccagcccaaaccgtttgcgttatccaaactggcagtatggagagcgtacaagaaggtaaaagccaacaaaggtagcgcaggaatcgatggtcaatcgattgaggaatttgagaagagcctcgtaggaaacttgtacaaactctggaatcgaatggcctcgggcagctatatgccgccggtggttcggcgtgtcgagataccaaaaacgacgggtggagcgaggccactggggatacccacggtagcggatcgcatcgcgcagggggaaagtctccttgcccgacccgataacccccgtattagccacagagaccttatcagcccactcctcagcagatacattgtcctaaccataattataaaaagctataaataa

SEQ ID NO: 6452 - DNA, 225 bp, Photorhabdus luminescens
ttgtatgccgccgttgatggacaaaagttcagcgttgaatacccgatgataaaggcccacggttcaaaaaaatatcttggtcgcggaaaaggcgtagtagcttataccttgttgtgtaaccatatagacagcatgagcacaacacaggctctgccatggaacgtgggaacctgtcgtcccgatgtgaagggagcggcgtcaagcagaaaacctgcaagcgcctga

SEQ ID NO: 6453 - DNA, 228 bp, Photorhabdus luminescens
ttgatgatgttaaattggctaggggctgttgacgttttggcaggggatttaaacagcatgatggcctggtatcattatcgttctggtctgatcccggtaaaaaatcaatattcattaacgcatcaagtcgtaacggtgctaaataggcttcttcaagatcatcggcgtacatcaccatgccaaactcattttcatccatcgtcgcaaatcggcggctacgcgtattaa

SEQ ID NO: 6454 - DNA, 1068 bp, Photorhabdus luminescens
ttgaaaagttatttaacagtatctacaatacagtctattattcaggcattgttttcttatcatgtatcttctatttttaccgataatttagaagtctcgcttctttgttcaacttatttaaaatacacttcacctttatatttatttagttcactatcactaattattgacacaatcaataggtgtcataaaaaaccatccatatcaacaaaaataaccattctagaggtcataattgcggttttcttaaactgggttatgatatatggaaatttatcattccctgagatgggtatcataggtgcagctttatcaacaacaatagctagaataatcagaacaattgttggttcttatatattagtaaaaatttacacctataagtattttataagcacaatatatttaaattcttttaagccactagttgttgattatttttcaaagtttctacctattttattaaccaatataatatggtcgcttggaatcgctacgtatcagtttctcattggaaaactaggagttgattatatagctctacactctgttatttcctccatagaatccgcattcttagcaatatcttggggagtagccacttcatctgggatattagttgccagaagactaggatatggatatagcatagctgagctagatagatatttaaaaaagcagaagttatcagtttacttatattcattggtaactagcgtgactttctttatagtgctttattatttttcaatatattataatgtaagatatgattttacatatctattgtttttcccattgatttttttgctaaaatgcatatctgtatattatctaactatacttcaaaattgcggtgatacgaaaaataacctaaaattgaattttatttgccaatggttagtatccataccaatttcaactgttcttataatacatctaaactgtacttatatttcaattttggctatgctaactgttgaagaattactcaaagttgtctttttgcatgttaggttgaaaaatttgtcatggattgatgatgttaaattggctaggggctgttga

SEQ ID NO: 6455 - DNA, 1014 bp, Photorhabdus luminescens
atgcctatcatagcacctataccccgcaatgaacgacgccagatgaaaaaaattatccagaacacccgagataaagattatgctcgcaggctcatggccatattgatgctgcatcgaggcgagtctgtctctctggtcgccaaaaccctttgcgccagtcgttcttctgtctatcgctggataaactggttgactttatatggtctggaaggactcaaaagcctgcctgtgggcagacccgctgtctggaatttaatcccgctttatcctttactgtcttttttattgcaatattctccccagcaattgggctgcctgcgttctcgctggagtcttgagttttttataattaaaatcaatgaattattaaacataaaattatccatcagtaccttctatcgttacttacataaaatgggtatcgtgtggcgaagggcagccccgacgcttaaattacccgatcccgagtaccatgaaaaaatggcgaaaattaccgaggcattgtcaacgtgttcagaaaaacatcccgttttttatgaagatgaagtcgacatcgagctgaatccaaaaatcggggctgactggtatttaaaagggcaacagaaacgtatagtgacaccaggaaaaaaccaaaaacattattttgcaggttgcctgaatgttcaaacgggaaaagtgacttatgctgacgggttaaataagaattctcatttatttatcaatgtattggaagaacttgaacgccagtattgtcatgctgaaaccctcactttgattttggataattacagtatccataaaagccgacgggtcagagattggctggcttgtcatcctaaatttaatctgttgtttttacctgtttattcaccctggctgaataaaattgagcgtctgtggcaatccttacatgaaacggtgacacgaaatcatggctgtcagtatatgtggcaattgcttgagaaagtgaaaacgtttttaaattcatgtccctacaggaatagcagagaataa

SEQ ID NO: 6456 - DNA, 1068 bp, Photorhabdus luminescens
atgaatactatagttacaaattcaaaaattttatacacattaacttccttatgtagaactgattatgaaaatgtgaataaaagtcaattgattgatattatgaatcatacggaatttccttgggatcggttcctttcagtagtcaataggcaaaaaattgtaggcatcgtctataagtctctgtctgaaatgaaattactccatctagtaccttatagagtagcaagtgctataaaatatatttatttagcaacaaccaagagaaatcaggtgcttatggatgaattgattactattttaacggcatttaaggaggaagaaattgatataaggcctctaaaaggctctgttttgttggatttgatatataccgactatggtacacgaacactaaacgacttagatttttttgttagcaaaaatgacttaaaaagattgccaaaaattatgaataatttaggttatattcaaggagagtataatgttaatgacaaaacgttaactgaacttagtcgtgaagacaaattaatgtggaaagtaaagatgtttaaccttccaccattttgtaaaatccacccagagcccactgttgatattatatctatagattttacttttggactgtcattttctgacaataaagacattaatgaaaaaatcctatcaacttattctattctaaataacaaaaaaacattatccaatattgatttctttatccatttatgcactcatttatataaagaggcttcaaacgaagcatgggaaaattttgctcaagatatcaatttaataaaattttgtgatgttagagaatattactatttcttgtcccaaaaaatagataatgatgacattatatctagagtgaatgagcttggtgttgaaaaagcattctctttctcaatactctattcgtccattttatacaatgacaataatttaattaaacttctggaaagaataaattattcaaaatataacttccaagaagtatacactcaaaacaatgagataaataagataaagttaaactcagtcagtgaatctattctacttgtaaaatag

SEQ ID NO: 6457 - DNA, 780 bp, Photorhabdus luminescens
atgaaaatttcagtaataattccaacaattaataggccatcaatgctactgaatgcagttaacagcgttaattcacagaaattcttgaataaagaaataataatagttaatgatgcagaaaaatctattggtaacatttttttacatctacctaatgtgacagttattgaaagtaacttaggtaaaggcccaggtttttgtcgaagtattggatgtaaacatgcaagtggagattatataactttcctagatgatgatgatataatgttacctagttatttggaaagattacatgatgaaattttaaataacgttgataaatcttgtttttattggtcaagcgtgaaagttttagatcgagtatccgaatcatgtgtaagtcaattcgatataaaatttcctattgaatatgatagtttttcagatttggcagtgacagctttaaggattggcactggatatggacttacttgcgcaagagaagtacttaaggatatcggatactttaatccaaaatacagatatatagaagatacagaactagttgttcgattgctaaagaacaatattcatccggtacctataaatcagatttacattgaggtcaacaagcattctagtaatcaattaacatcaagtaaattcaatgaaaaaagaattaaagaatgttacaaattactttgtgaacagtctgatttcttcgataaatttccgacagcaaaggcacagctaaatagacaaatattaaagttggaaaatgagttgtattctatctactga

SEQ ID NO: 6458 - DNA, 1185 bp, Photorhabdus luminescens
atggattactacttaaatagactatcaaatcgagttacttttatagaccgccgtaattctgagttttacaaatggctatcaacaacaccagaatttcatatatatggtgatgatgcaaaagaaaaactcaactctaacttatttaggctgtcaaaaatatgccctgagttatttattcactacacgataacaactgacttgcgtgttaaacctgtaggtgaagtaaaaataaagataatggcttatgaagattatgagcatgaaatattatctgattataacttgataaaaccacttactttatttttaaaagaaactactaatggcttaagttttttctttgtcgtaaatcatttcttatctgatgcactttccaatggaatgatttcaaatctgttatctggagaggatactaactgggatttatatgagaagaaccatattaaaaattttgtatcttctaaactgggtaagaaatcaagaaataataaatataatttagattttataaaagaatactgtgagttaaaaattaataactccgagaaatcaagatttccaattagagatatgaaattagagtccagtacttcagttcttcgtcataaagttttaagatctacatcagacaatatgattacagcccatttaattaaagccatagcatcgtcatttgatgagtactttggaggagaacacctatatatagggttaaatcaacatggaagagaacctacttattcgatagatcctagatatacattaggatggttgaacgagatacggccgttgataataaaaaagagcgaaaatggttactgtgtcaatgatatcaaatccagagtgctaatgagcactctatatggtggagatactaatactctgcttgctagtaacactgaatatggagaggttggtatacaatttccatcaatttgcctaaatgtaataaataaaaaatggtttacaggaaaaattaacacacagtacaaacataaaattttagtcaatgatcgtggagcatgtcgaattatgcatataggtattggacttattattgactctgaatgttgtgatttaactctagacttctcttctcttgattacgaagagcattatattagagggttattttatttgttgattgaaaattttaataattcacacaatataaattttaaataa

SEQ ID NO: 6459 - DNA, 873 bp, Photorhabdus luminescens
atgatgaacactaaatacgatctattaaagaatattctttacaaagaatctgggataaatcctgattatttggatatatataaaaaaggctttaattctagagatgctgtcaagtatttcttggttaagaagcccggagaactaataagaaatccaattaatggagctcctgttttaacattcatgtcatatgagcagtactttaatagtttaggagttaatattacttatgatgatttgagtcattattctctagaaaagaattgttttagagtgattaatccttgggggtttgtaggcatacagattggtgagtctgctttgttctctttaggagtatacaaccctaaagatatggaaataaatggcagaaattataaggtttactatgattttgttcaccctgaatatacatggaaaggaaataataaattcgaactatttgactgtcctaaaggtgaatcattcatatgtacatcatataatacatggcaaggtgattttacaggaaaacttggtgttaataattttcaagatctatatgaaccaaataaacagaccactattatttatgccatatgggctagcgggattaataaattatgtaaccttataggtatgaagtttgatttggttaacttagtgaaatatataaacaatgaaaagaagtttccttttgaagtgtccgaaagtggtattctctcagctattcatttagttggcccatataagttatttgaagtaataggtaatggtggctttataactgatgaaataggaacaagtgctttctcctatattgaaagcttctcattcttggagattgatcccatgttcaatcatgtaatggaggaactatgtcattcaatgtaa

SEQ ID NO: 6460 - DNA, 1386 bp, Photorhabdus luminescens
atgtcattcaatgtaattgaatatttgtattattcatcaaataatttttctcagtctattttttatagagatcatcccattgaaattacatatggtgagttcctttccaaagttgtttatttttcagattacttctctgaagtgatagagaaagtagttgctattgatattgaaagaaaggatataaatatgtattctgttttttcggcaatgtggaaaaacaagaatacgatagttcctttgatttcagattgggatgatgaatataaagaacgaataattaatgcagttaaagctgatatcaggctcaatcaagatcttagtgtatatcatataaaacataaagtagatagaaacgattcagttattataccagcaaaaactgcatacatattgttcacatcaggatctaccggtttacctaaaggagttccgattacacatttagccttaaaacattatattgataatatctatgaagaattggaaattgaaaaaggcatcgaacgattaactaatacattttctccagcttttgatcttttttatcatgatctatttctaagttggaagagtgcaagctccataactccggtagaaaccaaaaaaattggacaattactaaataaggtggaaaataataaactcacttattggttttctgttcctacactcgctcagatgctgatttctctcaaaccaaaatcacatcaactgtctagtttaaaagtttctttgttttgcggagaattattaagaaaacacgtcgtaacctcttgggcacaaatatctaattgccagaagatatttaatttatatggaccaactgaaacaacaatcgcatgtatgataagtgatgtgggtattgaaggcccacctagtcttggccgagctttaggggatatgtcatacaaaactgagcatttatctggaaatctatacaaattattattgtcaggacctcaaatttttaatggatatataggtacttcaaagaatagctttgtgaaaatcgatggtaaagtgtattacgatacaggagatttagtaactatattagatggtgaggtatattttgagggaagaatagatcggcagactaagattatggggcatagagttgatcttcaaggtcttgaagaacaattaagggtaaagaacaataatcctttggtttttgttgttctttattatgacaaaaatatagattgcaatactggaattacaattttttatcaacctaaaaacgaaggcgaaatatttgattgcggattcattaagaatgttaaagtgaaaggaattttttgtatcgaatctgtacctacattaataagtggaaaagtaaattataaaaagttggaattatgggcaaaaaatcaaatttag

SEQ ID NO: 6461 - DNA, 222 bp, Photorhabdus luminescens
atgggcaaaaaatcaaatttagatattgaaataatagtaattgagtttatgaagaaatatgaaataaaatcacttgatgacttggattcatttcaaattgtttctttgattattaatttggaaaatgagcttgatatcaacctactagatgaagatcttacgtttgatgatttttctgatatgaattcaattattgtcttagtaaataaatgtcttatttaa

SEQ ID NO: 6462 - DNA, 1071 bp, Photorhabdus luminescens
atgaaaaaatctaaagtaattgattcatactataattattgtctaaatggttggttgcctgaagcaagtaagaagtacatatcggtcttaaacaaagagtctgccttccaagagaagattctatcaatgtttgtatatgcaaccggccagagtagcgaagagtattgtcatattgaaaatgaaaagagagaaaaatcgatcgtacttaacgatatcgctaaatcctcagaactaaaaaattctgttctagttttgaaggggttatctgtagagcgcttttaccatgaaagtgcctcgcgattcgcttttgacgcagatttggtagtattagaagatcacttaccattgcttgatgctttgttgattaagcatggatacgatatatatttcagtactatttggataaaggatgttgttacagaaaaagtttataaatcattccgatatacgaaagggaaagatgatgatcgtggatttgaaatccatgttgatcactacccaatcgatgataatggttcgagaatattactacagtcgttatattctggctgctacaacactattttgagagggacatatgtcaatgtagttagtgatcttaattctatattgataatacttattcaaatttacaacaaagattatctaacaattagggactttgtggatcttctcattctgcttgaaaatagcgattttaaagcatgtgagcacatagtgagaacactaattagttcgcatggattaggtcctgctattgcaaagcttcgtcaatatattgaagctaatgaaattgacgttagcaagtatccaagtggtgcggacatagtcaaaatggtttcatgggaacttagtactccggacgttcctcaatttgataaaaagtgcgttgcattaatatcagacgatccaaccgccaaatcacgggaactgtttgataggggcactcctacaagattctaccgtttgtttaaaaatgagaaggtagacgaaagtaatagcttcaaaatggaaacaaatattggttgtttttacgggcaagtaacaggagattttgttgtctatgaataa

SEQ ID NO: 6463 - DNA, 771 bp, Photorhabdus luminescens
ttgtctatgaataacaccaaaatactctcagaattaagtgctaaaggttgggtgtgtgttgatacaccttcataccttggccacagtgatgatatgttcactaattatattcgagacactataggcatgcataccttcggctttcggtctgagattctaggggatgtcgcgtctatcctatcccctaaagaaggtattgttcaatctagaaaaaagttaagaggtcacactgatgcaagctttcttccattcgataccgagtggaagaaagttagaggtctgtcgataatcccaaactatgtagcacttctttctatttgtggcagtgatgtgggaaccacagtctgtcatatcgaagaaatcttatatcacatgaatgatgatgaaatttgcgagcttagttcaccaaattatgtatttgagtggcaaaaatcatttgttatggagtccaacgagttagatagttcttggaagcctatccttcatttttctgatggtttttttcaagttcgattctctaactcaataaagacttataaaacagagaaagcaaaaaaatgtgcgataaagctttcttcattatatcaacgcttgtgcctgaagattgcgctgaaaaccgaccagttactcatcgtaaacaacagaaggtgcattcatggtcgagagtttatttctgaggaaagctttagtagaaagttgcatcgatattacctctatgaaaaagaggacctagtggttaaaacggatattaaggggattgtattaccatga

SEQ ID NO: 6464 - DNA, 1086 bp, Photorhabdus luminescens
atgaaaattaatgacagttataaaaagaaacctcatagcaacgatctgattgagctggaaaaagtattggatctcggtaagctttcagggaaaagtgatactgttgagcaatttgagaaaaaaatagcagagttgttcgaagttgatgatgtagtgtgttgttctagtggaacgagcgcacttattgctagcctaatggctgaagacatttgtgctgatgatgaagttttagttccgtgttatacgacgatacctacaacgttcccgatcctatcagttggagctaagcctgtatttattgataccaaaacgtcacatacaactgaactatcgattgacgatttactaagtaaaataaatgataaaactaaggctataatagctgtccctctatggggatatccagtcaattatgatgagattgctgaagtttgtaacagtcgaggtatcattgttattgatgacgctgcgcaagctcacttcagtacatttaagactggtcgtctggttggaactttctctgattatggttgcttctcgcttcatgataagaaaatcctttctaccggagaaggtggctttatcattccttcgtctcctcaaagaactaagcgtttgcgagaaatagtcaaccttgggaaccttaatggcttgtcatttggcttgaatttcaagctaggttcactccaagcggctttaggtatctcaagatgtacacgagtgtatgatgaacttactattcgtagagaaaatgccgagaaaatcaaggagggcatagtgagcacgagatttgaagaaattgattgcctaggacaacctaactactacaacctagtacttaaagataaagatcatagagaccttggcaatgttcatgaggtactaaaagatatgggatttgaaacggactttctaaaatatggggaggctaagtataagtttggtatcctcaataaattttatgatggcagtattgagaaaggagatactgtcctcaaaaatctgataaccattcctacccatccagatctttctcaggaaggaatcgactatataattgaaattctggagaaggtttcatgctag

SEQ ID NO: 6465 - DNA, 471 bp, Photorhabdus luminescens
atgctagaaaaaagccttattttaatcaagccggatgctgttcatcgagggcttgtagggaaaattatcactgagttcgaagaaaaaggattcaaaatacataatatccgttctttggtgctaaatgacgaagacttctacttcttatatcccaaaattttgggtaaaccctttcataagcagttcaaaacggtaatgcagtcagctccatcaactttgctggttctgagtggacataatgctttaggaagtatatttaacttcgccggagcttactcaaacccagaagaagacactacacgttcaataagacaaaaatatagtgtctggacaggtgcagatgtaatccatagagcagctgattccaacgaagcgatgaagcaaattgcctatttctttgatgaagtttgcgagtatagacataataatgaagcttttatggctaaagagtattgggagcctaacgtctaa

SEQ ID NO: 6466 - DNA, 192 bp, Photorhabdus luminescens
gtgacagcggcaatcgtacgatggaatacgctgtatttagaacgtgcaatacagtcgctgcatgcggctggcaatgtgattgatgaacaattattgcaatatctgtcaccattgggttgggaacatatcaatctaaccggcgactatgtgtggcggcagaataaaaaaaggatcttacccagctccgtctga

SEQ ID NO: 6467 - DNA, 972 bp, Photorhabdus luminescens
atggaacatgaatacagtgaaaaagaaaaaccccaaaaatgcccaatacaattaagggattctatcgaacatgataaggaggatataaataccacgactccattggaacttaattctcaatacactaacagaaaaagagcagggttacgggaacgtttctcgaccactttgcaacgcaacctgccaggccattctatgctcgatcgggagctaaccaccgatggcatgaaaaaccaagaaagtcgattctcccctgccatgataatggacagaatgatgcatttcggggtcagaaccagattaggtaaagtccgaaattcggcgagtaaacacggggggcaagtcaccttcaaatttgcccaaaccaaagggaccttcctagaccaaatcatgaaacacaaagacacctcaggcggtgtctgcgagtctatatctgctcattggataagcgcccatgccaagggtgaaagcatctttgaccaactctatgtcgggggacaaaagggaaaatttcatatcgactcactagtttccattaagcagttacagatggacagttatctagatgatgaacaaagtaccatgacagagtactggcttggtacgcaaggcattcagccaatcatgcaaaaaaacgacgtggacgaacactcatccaaggtagtcggtcaaaccggtaacaaaggtacaacagacctattacgcgctattctggatacgggtgataaaggctcaggctacaagaaaattagttttctcggaaaaatggctggacatactgtagcggcctatgtggatgatcagaaaggtgtcatcttctttgatcccaacttcggcgaattcagcttcccaagcataacttcgttttctcgctggttcactgacgatttctggccaaaatcttggtacaacctggaaatcggtctgggacaacaatttgaagtcttcaactacgagcttaaaaaatcctaa

SEQ ID NO: 6468 - DNA, 1707 bp, Photorhabdus luminescens
gtgaccggggtgagtgagtgcagccaacaaagaagcaacttgaaagatgacgggtatatctcttcccggaaattaacaggtgataatatggtatatgaatacgataaaaccatcgaaagaagaagaaatccgtcgatacaattgaataataatgaaaaatcatctgaacaggcattagaattgtctcaaaataatccattactccacgatctcatcaccagcaataatttacgtaaagaggctgcggtttttgccaaacggattggtccctcctatcaggaaattctggatgaacttgagcatctccatcacctaagtgggaatgagcaattggcggcaggtttcgaattgcatcgacgcattacccattacctagaggaacatcctgattctaaacgtaatactgccctgagaaggacacaaacgcagtttggggatctgatgtttaccggtactttgcagaaaatacgccactcgttgttggaaatggcggaaactcgccctgaaatggcatcgcatatctaccagattgctcgtgaagaggtcaaaggcaatacccccgggctaaccgatctgatggtacgctgggtaaaagaagatccctatcttgctgctaaaaccggctatcaaggaaaaattcccaacgatctaccttttgaacctaagtttcacgtggagctaggtgctcaatttgatgactttaaaaagtggttggacaccgcccagagtaaggaattgctgactcatacccggcttgatgaacagaataaacaggtccatcttggctacagctataatgagctgttagatatgactggcgttgaaagcgtgcaaatggcggtctatttccttaaagaagctgccaaacaagccgaaccgggttctactaaatcgcaagaggacattttgctccaccggtttgctaatcctacctatctggcccaactggaacacagtagattggcacaaatagaagcaatatatcacagctctcatgacactgatgtgactgcctgggatcagcaatttgcctcagatgcgctgacgcaatttaatcatcaactgaataacaccgtggatctgaacagccagttatctcttttacttaaagatcgtcaagggctactgatcggtgaaagtcatggctcagatctgaacggattgcgttttgtcgaagagcagatggaagtattaaaagcgcatggcgtgacagtcattgggctggaacacttacgctcagatttagctcaaccgttgatagataaattcctggcaagtggaaatgaacccatgcctgctgaactggccgcactgcttaagactaaacatttatctgcgaatttgtttgaacaagccagaagcaagcagatgaaaatcattgcactagataacaacagcacaactcgccctaccgtggaaggaacacaacatggcctgatgtatcgtgcaggggcagctaataacgtggcggttgaacgtttacggcaattgcctgcgggagagaagttcgttgccatttatggtaatgctcatttgcaatcccatgaaggtattgatcactttttacccggcattacccatcgtcttggtttaccggctctcaaggtagatgaaaataatcgttttaccgctcaggtcgataatatcaaccaacgcaaacgttatgatgatgtggttgaattaccccgtattcaattaacatcttag

SEQ ID NO: 6469 - DNA, 903 bp, Photorhabdus luminescens
atgacaaatataattgatcctaataatgcaattattgcagttaataccgcattgcatgaaattttatctcaacatctaaacacctctaaccaaatgattgatatccgttttgatctgccagaaattaactcaactccggctaaacctaccgtcagtgtatttctttatgatatacatgaagatctacaattacgttctgcggagccaaagagttataaccctattactagctcattattgtctgggtgggtaaatattaattataactatttaattacttactggcattcaaaccaaccatcaggagacggttccaatcctgacagtcagcccaataatcaagctgcacgcgtcatgacagctattttaaatgcactggttaacaaccgacaattacctaaaattcctggcgcatataccagagtcattccaccacaagaaaatctaaatagcttaggtaacttttggcaagcactcggcaatcgccctcgcctttctttattatattcaattaccgcaccagtaaaactacaaaatattaaagatatcataaaacccgttagccaaatctccacttctgtggatcaaaaatcaaatctggataattcgcaaatagaccaagccttatttaacaaattgtgctccaatttaggtggcacagaagatgtccgccttgcccttgcgaaaatgaatctggcaaccaagccgactaaggaaaataatgaaaaacaaaataatcaaaacgtcatacttgaagtttctggtattatccatttggattatttacctagagtaaaaggtattcttacaacatggaaaaatagtcatcgcgccgttgtcagaataaatgacattggtattattgtttcagaagataaatatgatcaattaataggaatttaa

SEQ ID NO: 6470 - DNA, 2082 bp, Photorhabdus luminescens
atgaactttcctctgaaaaataaccactgtatggcagtagaatcagattggatttatccccatttggagcgtattgatctgctattacagcgctactattatcaaaagagagattggtacgactccttaccggagagttttttactgaccgaagatgaaatagaacaacgtttagtaaaaccattaggcatgcctcattggttaaaacagagtgatattattgattataaggacatagagaataaacccatcaccggtagattatcattattaatagaacgttttgaactgactgaatttgagcgtgataccttattattaggtttattaccccattttgacagtcgttatcatgcactatttgcttttctgcacggtaacagtaaaaaacagtggccgagttttgctttggcaattgaattatttagccaacgccaaaatgattggcaattactgcaaaatagctttctaccgcaaacaccattaatcaatcaccatctattacggcttaataaccatgaggaacccatttggttacaaacgcaatttttaacgcacagtgctgtctggcattttttatccgaccaacgggttattttacctcccctgataacctgtgcttattggcactcttctacctcacagacttggtatccgcaaaccctttatcattcacttaacaagatattattaaatgaaatagatgaaatatgcccactggtgatcctcaaaggaaaacaggacagcgccagagaattagcggtcagtaatattatggcattgcataatatcagtaccttaattgtcgatttagctcatctaccagacgaagagaataccaacactaaaccttgtttgttaacagacgcaatacgggaagcccggctacatgatgcctgcttattaatccgcaatttttctttacttgcagaggaaaagcaaatatggctaagcaaattatccaccctgctgaatcaatccaaattacgtgtagtttgtctggtagaaccgggagattcattcgtatggattcaacacttaccaatggtacaaattgagatgccagtagccacactggcagagaaaaaagcgatactgacagaaaatctgccaaataatgctgatcgggaaattaatcttactcagttatgccaacgtttttcatttacaccggaaacattaccattaattcttaaagaagcctgccaatatcaaatactccggcaaccggaagaccaattgaaggagatcgatttgcgtaaggcattaaatttccgcgctcaacaaaatttcggtaaattagctcaacggataacacccaagcgcagttttaatgatttggtcgtttcagagggattaactcaacaactgagagaaattattgccactattaattaccgaaaccaagtattaaacacgggttttcaagagaaaataggttatggtaccggtattagcgccctattttacggcgagtcaggtaccggaaaaaccatggccgcagaagtgattgccggatatcttggcgttgatctgattaaagtcgatctctctaccgtggtgaataaatacattggtgaaacagaaaaaaatatctcccgaattttcgatctggccgaagccgattccggcgtgctgtttttcgatgaagccgacgccttatttggtaaacgcagtgaaaccaaagatgctcaagacagacatgccaatattgaagtttcttatttgttacaacgattggaagattatcccggattagtgattttagccaccaataatcgtagccatttagacagtgcttttaatcgccgttttacctttattacccattttacttatcccgatgaaatattacgtaaacagatgtggcaagcaatttggcctaagcaattgaatttatcagatgagcttaattttgaccatttgtctaaacagacagatctgacaggtgcaaatatccgtaatattgctttattatcatcaatattagccgcaaatgataatagtgaaaaaattgacaataaacacatagaacgggcaattattctcgaattgaataaaactggccgattgtttttttaa

SEQ ID NO: 6471 - DNA, 1431 bp, Photorhabdus luminescens
atggtttcagaaccaaatctattaaatcgaattattattactatcacagctaataacacgcaggtagctaaaaaagtattacatggctccctgcttaatcaatccaatataaataaattaatcaactcccatttcaaccaatatatcattaacaaaaatatctatttagaaacactcactctgaaccttggtgaaataaatttacaagattttaattcactgtttcctattcgacttaatgctagattaagtcaagcattaaaccaatatcaggtaaataatcagactgatattgagaaatttattcattacttacagcaaaaaaattccataccaaataaaatagaggatattaagaatagtgaaattactgatatcaacattaaacaattaattaatcaattaccccatatacaaaaaaactggacactcttattagcaaaaagctgtttatctgagcatagtttaaaaaaacttctagctatcagagatccctctttgttaattgtcattaatcacaagttatcggaaaacataatcacaccgcagcatcaggaggaacccgtttcctcctggcaattaatactgaatgctttgagatatatacaacaacataatgcacaagaaatacctgaccccgacgcaaaaattatctcacgtatcacgactgaacttaataacggagcgattaatatagcatctattattacgctatttcaccagactgcaacccgtaattctccattaaataattggttaaaaccactctggcaaacagcacccgtttcacaatactgtaaaaaatatctatcggttgaagaataccaatatctgtcagaatactttattcctaaacacggggataaaaataaatcgagtaaaaaaccatccgtgtcttctgaacccgttttatcgcctgaatactctccttcacgtcaggtaaataatgctggaatattagttttatggccgatattaccggctctgtttaatcaactcggtctacttgaaaagcaagaatttatccatcgtcaagctcaattcagtgccgttgtcttccttgattatctcatttggggaactgaaaaggcaccaatagaacacaagggattaaatcctattttatgtggactcatggctgatgagaatattgagtcagcacccattgaaccagaaaaacagttggcaacagaacaatggctagatacggttatcactcaacttcctgcctggaaaaaattaagccgcaatgatgcccgccagttatttttacaacggccaggaaaattacgaatagataaacaggaaatcagcatcacaattcaacaacaaccgtttgatgcactattaactgactggccatggccattaaatatcgccaaactaccttggctggatcgtcctttattaatcaactggcaaaacatttaa

SEQ ID NO: 6472 - DNA, 3036 bp, Photorhabdus luminescens
atgaataatcgaaatatgctatttcccattgttaaagatgatattgcctttgagactttacttgcccaggcaaaaaccgttattgagcaacaatccggccaatgttggaacgatatgggggaaaatgatccgggtatcaccttattagaagcttgttgttatggcgcatctgatttagcttaccgccattcattaccactgaaagatcttcttactcctacacaagaggaacaaacatccagagacggtattttccctaaagagtttggcccacaacaaatattaacttgtggccccatcactgaagaagattatcgccgagctttattggatttgcatagcaacgacaaaaatgatggctattttttctttaatgatgcccagcttattcgtgagcctgagaatcaacgctatacatactggtataaccaacaagaacggcaatacagtttcattattaaaaaccgatataacaattcaacacagttaaaattaacactgaggggaaactattggctttatttgctccctagccgggaaactgaaaaaattcaagataataaaattcaagctcaaaaaaagttggaaaattttctgagggacaatcgcaatttgggagagtcagtcagtaaaattatttggctggaacccatcgatctaccattgaagattgatattcaacttgatgatgacgttaaagatatcactgatatattcgctaaagtttatacaacggcagaacaaatggttcttgaaaaaccgttacgttataccacccaagcgatgaaagaaatgggttacagtaatgaagaaatttttaatggcccctatttacgtcatggttggatcccccaattgccttcaattaaagattacaccaaatctaaagaactaaatttaagtcccttagttaaccaattactgagaatcaaaggagtcaagaaagttacccgattcacgttagatgggcataatgaaagaattgctaaactaccaaatgataattggtcctggacaatcgttcatgggtactatcccagactatggggcaacgatcccttacaatcgatcacctcaccaaatagcccactcaccattacagccaaaggtggcgttaaaattattgtttccaaacaagatgtagaggaaaagctcattgtagagccactgattgagacacaacctgaattactggattggggtaaatatcgtaagatcctggattactatccaataagaaataaattacccgcttgctatggattacaaactaatacccaacagcaaatacaattacatcagtttatgttaccttttgaacaaactctcgctaataactgtgccgatctcgccttattaccaaaactattggcttttaaacaacgaggagatactgtacatggtgctcaatggccttttaaagaaaatactgtcgctcaaaatgttcatcaaaacataaaacctcatttaattaatcaaatgaataatgaagctaaaatcaataataatgataaaaactatactaaagagttggtaatactagattatctattgcgatattttggtgcgcaatgtgcaacccctcttctatcacaagactcaaattctcaggaagattttctatctactcagcgcgaatatctttctcaacaacctagtttagcctatcaacgtaataatattcgtattgataaagtgtcagcactgcaaaaacgcattgctgcccgattgggtctgggaggagagtgtttcaaagaaacaccagaactggataaactccctttttatttaattgaacatcgtcaactcttaccaataaaacctaatgaaaaattcaataatgaccaaacacctgataatctagaaattaaaaatgatcaagtcatgattacacaaactgatacagcaggccatttaatgcaaggtcaagttattaatctggaatttagagaaggctacaatatatccaaatttctgaacctaatgatcactgaagtgacaggagatacattcactattaataccaataacaataatgatctaagaaacaatctggacaaattgcaaaacgcatttaagcagcgcaatagcctgcactggtgcaatagcgccgtgtggatagaagatatggattatcaactcgtttatgacagtgaaaagagtcaagaagaaaccgaaaatagacgatggattacccttaatgatcaaaactccttccctgccatgatcgaaaacaatgatgaaatcacaataagaaccaagtccgattatgaacttacaacccaaattgtacaacttgatagtgctaataaccggatattacttagaaaagatataaattcaaaaaataaatttccaccaagagaatatatatcacactattgcttgtcctacacaagatatgactacatatacggagaggaacgcacatgtaaattaatttctaccgatacaacctcaaatgaaaatgaactctggattactatcagaaaacaacccgatgatactccttacaatagttttccttttgatatattcgaagcggatgatgaaataacactaaaatttgaccctgattatgaacttaaaacgcaggtaaaagaatttgatcgcatagagaaacgaatattagttgaaaaaaacatagatcaaataaatgattttccattggaaaacaatgagtcgcactcttactggtacttctcaggaaaaagatatatccaatctgaccatttttcatttgtagtcagcatagtactgaatcgagaacgcattaggagcggtactactgatttttacaaattagaatcttgggtgaaaactgaaattttagctgaattacctactcatatctcactcgttattcattggctatcatcggaagaattcaaaaaatttgccagtacttataaactttggcaaaataatggtgctcctttaggcgatcacgcatataaaattctagaaacattaacactaggaaagaaaccttctgcttcaatagaagcatacagtgaagaaataatagcttcataa

SEQ ID NO: 6473 - DNA, 4053 bp, Photorhabdus luminescens
atgggacttaccgaattaaaaaataaactcgccgctatcgtaccagagacagactttaaacttgatgaaagaagtacactggatattttaaactggcttaaagaatatgcggcaaaaatcccttttgatcaagatagaaataaattctgggacagtttctactttattcaggaaaatactcctgaaaaattagcggatatttaccaaaacattaataaagcggatggacatttaccggctcatcaagcttttatattagcttttttaaaactgttagaaacaaccaaagttttatttaatacttttccggcacgacatcgtgatctttattatcgggaattattaggtttaaaacccagaaatgcccaagcggataacgttgctttaggcattaccttaaatccagataatgcagaatatcttatccctaaaggaaccctgtttgatgccgggcaagatagcgctggaaacccattacaatatgcatcagatgctgatttactggcgaatcagggaaaactcaccgatctacgttggtatcggaaagataacgatagctggaaatcagcaatactattaagcgactcagataatattgaattacctgaaaacggtattcgactttttagcccaactcctaatgatgttccagttttgtccggttatttaattacttcgtctttatttgctatgtcgaaaggagtacgtagtattagagtaactctagcaaatgagtggatgggtaatcctaacaacattactgctcagatcagttctggaaaacattggctttcactattagtagaaaaagcagggagcaatcttaaactcatattaagcttatcagccaacgatgagtccatcagtccccctgacgccttagataatatggagtttaatgtaccggtattaaagctgggcaccgttcaggggcctatactacccaagattacggatattgaaattagcattagcggcaacagtaatgtacgttattcctctgatggtagtattgaaaaaacaggtgccactagttttccctttggtcaatcaccgttgccaggctccggtttcaatctgattgctcctgaatggtatggcactgaaaatgcaacagtgacaattacccctcaatgggtgggattgccaataacaggctttaaaaattggtataaaggatataatcctgaacccgaaaataatgcattcaaagtaacggggtatttagtcacacctcaggaaaaaaacaaactaaaagaggctagtactcaaaaagaaattgaggctcaaccattatttgatggaacgaataaaccacaaggaaaaagcctgagttttcctttgccagcaatgaattatcctattgcagacagtcaatcgccaaatgactggccagcgtttattcgtatagaattagctgaacaggattttatgcattctcagtattggcaaaatcctacggataaaaatcaaccctatactcctcagatcagttcattgaaaattgaattcagtgcagaaatcaaaactggacaatattccgtttatcccctaactccttttggttgggacaaagcaaacgcagaaacactcccattaatcagtaacacattttacttaggttttactgatgtattaccggggcaaactttatctctgtactggcagttagacggtattaaagaacgcttgttatcctggttctatctcaatcaagaaaatacctggagtccattagataatttagtgcacgaccaaacccgcaacctatttaaccgcggaggattgagtactttattaccccatgatgcttcaaaccaagcatctcaaatgccaaagggacggcactggttgaaagcacaaattttacagacaagtcaagcaatactgaccgacctgtattggaatcggaaagataacgatggctggaaatctgcaacacctcttcgcctttcaaataacatgaaattaccaacaaacggtattcagatttttagtccaacatctaatgatatcccggtgctatccggctatctaattacttggcctttattcacattcctaaaaaaagggctcaacattacattaattttgggaagtaaatgggaaggtaattctgagaacatagccgctaaaataagttcagggaatcactggttaacactgtcagtcgaatatctcagtgacactgatagtattaagttgcaattaccagacgatgataacaatgatcccatcagcccccctgatgctttggataatatgacgttcgatacgccattgttaaaactgacaaccactcaagatttcactttaccctggatttataagatatgtattaacagcaacatcgtgctctctgcttccgacaattcagaagcaaaaatcactcgtttcccttttggtcaatcgccatcactggactccagttttagtccgaaggtagtgctccctgaatgggttaattccgaatatgtatcaaacacaacattcactattacccctcaatgggtcaacttacccacagagaacttttcatcgtggtataaaggatatgctaataaacctaccaataataatgtatttaaagtggaaggctatcttgtcactccctatagagaagagaaaaaacttgatgaaattctgtcattatttgatggcgaaaatgcaccacaaggaaaaagcctgacttttaccttacctgataagtattacttctattcaaacaaccatgagacaatgagtataaaaataaaactcgctgagcaagactttatgcacgctcaataccagcaacgtcctacaggtaaaaaacaaccctacaccccacaactcagtgaattacaggtggaattcagtgcgacagctttccatcaacaattctccatttatcctctcacgccttttggcaaagaccaagccggagaaaatataacagcattaactcacgatacattctatttaggttttaccgatatagcaccgggacaaactttctctctctattggcaactaaagggcctgaaagatctctctttgtcttggttttatctgagtcaaaaaaatacctggaaattattaaatagatcaacttacaaccaaacagataatctatttgaatcagaagatcaaagtatcctattaccccaggatgcttcaaaccaaacctctcaaatgccatcagggcgatattggctgaaagcacaaatagaacaggagaaaaaacaggtaaaaatagtccctccagattatccaagaattaaaggattgttgtataacgccacaacagccacgttaatcaacacagtgaccgtcgaacaagattactttatccgcggattagccgccaacagcattaaacagccggtgaactcatccgttgcaatcagtgaagtggcgcaaccttgggcatcttggaatagtcgtccaaaagaagacgagcaaaccttcctgaaacgggttcccgcccggctgtcccatcgtaaccgagcattaaattggggcgatattgtcaccttactaaaagagcggtttatcagcatatttgatgtcaaatatccttctaccaatgaattaaccaaaatacccgcgccagaaaagcgcaaattaatcgtcatccctgataatcgctacaaagataatggtgattcactccgcccagaattgaaccaagcccgattaactgaaatggtcgaatggttagatcgattaagcagcccctggacaaccattgaaattaataatcccacatacgttgatgtcccgattagctatgaattgatatttgcttcaggagttaatcccgattacggccgccatcaattacaacaggagctgagtcgaatctacatgccgtggggagaaaatacggctattggcgtaacaccaggtaatcgcattgactattaccagttattagccacgattcaacaatcaccttgggttgaacgggtcactagtttgactttaaaaaaaggcagtccatccactgatgtcataggtaaaagtgtagaagccgacgatgacgaagtattgattttagtctggaaataa

SEQ ID NO: 6474 - DNA, 417 bp, Photorhabdus luminescens
atgagcaaacaactcatcgtcgatggtgatagtctgctatttgagccattatttggtaaccggcaggtcaccattttgggaccggcaattattaaaggcagcggacacgcgcaaatccagggcaaaaagatcgccattgtgggcgatgaaaaaaaggtacaacttcaagcgcaatacattacttccagccatccaacacccggtatgggtatagtcaccattgcccaattggataccagccagcaagtaaacttttgctgtagccctgactcagtgattattgtcgggcaacaatttactgctcgttttaccccgacacaaccagcgattaatccgtcaggcgtaccggatataacaacacccagtatgggaaaaggccgttttattgccagccaatatgctgtcagtgccggataa

SEQ ID NO: 6475 - DNA, 423 bp, Photorhabdus luminescens
atgacaaacaaaatattagccgatatttatggtcgcggctggaaatttccgccacagttttctcttgagactggcgtagaaatggccaaaggagccgaaaatgttcgccaaagtatgaaaatcctttttttaactgaacccggtgagcggattatgcgtgaagattatggctgtggtctgaatgattatatgtttgaaaatatcagtgatgaattgttatcggagattcaaacccgcattgaagaacgcgtattacgctatgaaccccgcgcagaaatcatcgatattcaggtaacccaaaaaacaaattcaccgaataccttacatattcaagtgacttatgctttaagaggcagcgcaatcactcaacaacttgaaagcattctcgaaatcaacgaaggtcaggcaaaggtgagtctatga

SEQ ID NO: 6476 - DNA, 1605 bp, Photorhabdus luminescens
atgaaaatacccacagtaaccctcaaaataggtggtaagacactcaaccaattcaccgtaatcagcttgacaaccaaccatcacatcaatggtatcccttcggccaacatcactctgggtatcgccggtgatgccaaccctatttttgacaccaagacacaggctgaattggcaagctgccgcccgaaccatgaagttatcgtacaaatgcaaaaaaccgtgttatttaaggggatcatcgttcggcagacactggggcttaaaggtcaggacagcatcattaccctgacagcaaaacatcacctgcaaaaattaacccatagctttcactcacagctattcaataaacagagtgatgaagcaattatcaaaaaactcttcaatcagaatggcatccaaacgacgataaagcaggcaccacaactcaaaaccgttcatgaacaaatggtgcaatttcgttgtaatgactgggcatttctaaaaagccgattgaccgccactaacacctggctgttgcccggcaatgaatcggttaccttgataacacccaaggccctgaataaatcaacggtacatacccttcatcgacataccaataatgctcaagatatcgtgctatttgaagcggatctccagtggaataaccaatacagccctaaaacggtgagtatccgtgcctgggatattactcaacaaaagctttctcaagcaatcaatagccaaaacagtaagcttggcagtcataaattggccgtggacagcatcgccgcaccggccgataaagagtggcaatgggcttacagctatccattggataatgaacaagccaaacatcttgctcaaggcattatggataacttacgcagtcataatatatccggtagttttgaaatcgaaggtaatcaccgttatcaaccgggggatattctggcattaaatggctttggtcaaggaatggatggtcaagggattatcaccggcataaatcagataattaatcagaagcaaggctggcgcactcgattaactttaggcatgcggccagatatcgaacctccggtgccacaagtgaaagagttacatatcggtatcgtggaaaaataccagcaagatagccaatcgctaggccgtattccggtcaaaataccggcattaaacctcactcaaggtgtcctttttgcccggctaggtaaaccttatgccagtcatgaaagtggattttgcttttatccagaaccgggagatgaagtaattatcggattctttgaatgtgatccccgttttccggtgatattaggttccatgcacaatccgaaaaataaaccaccgttagaacccagtgaaaaaaatccggtgaaaaccttagtgattaagcaaggagataaacaacaggcattaatattcgataacaaagaaaacaccgtggcacttaatagcggagaaaataaagtttctctgcaacaggataaagatattacgctcaatgcaacgaaaaatctcatcacccaagcccaagaaattaatatacaagcggaaaaatctctgtcggccacgggaaaatctggcgtcgatattaaaggcgcgaaaattaacttaacacagtaa

SEQ ID NO: 6477 - DNA, 684 bp, Photorhabdus luminescens
atgagtttaattgaacgtggtttatccagactcaccctttccgccttcaaagaccgggaaggaaaagtttccgtggggagcttacaggcgatgtataaccccgataccattcagcttgattaccaaacccgttaccaacaggatgaaagtgttaatcgtgccagccaaagcagccgttatgtgctatctcagcccgccggattatccttagtcctgctgtttgatgcatcaatgcccggcaataacacaccaatagaaacacagcttgcaacgctgaaatccctgtgtgcggttgatgccagcaccaaagtacctcactttcttaaaatcaaatggggcaaaatgcgttgggaaaacaagggttattttgcctgccgggccagtagccttgccatcagctacaccttatttgaccgagacgccaccccattacgggccagtgcgaccttatctctggtggcagacgaaagctttgttattcaggctaccgagcgacagttaaaatcgcctccggccactgcggttagcgtgactgacatgctttccttacccttaatcgccttaggtgctggcgcttcgctggccgggggtatcgactatctctcgttggcatggcaaaacggtctggataatcttgatgactttacccccggacagaccctacaagctcggggggatacatga

SEQ ID NO: 6478 - DNA, 180 bp, Photorhabdus luminescens
atgacggtagaaattaaagaactgattattcagacaaaagtcatcgatccgacgagtgatcaactctcccctcgaacattagctcaggaaaaactggataacgcccgtttaattgagatggtgaaacgggaggtattagaagcattacgtgaaacaggaggtgcttatgagtttaattga

SEQ ID NO: 6479 - DNA, 459 bp, Photorhabdus luminescens
atgcacaacttatacaccccatcagtatcgcaccgttttatcgccagttttctgtttaacagcattcccagcccacttgatatcgcctttcagcgcatatcgggcctgagccgagaactacaaaccacccaacacagccaaggtggagaaaacgccagaaatatttggctagccgagaagatccaacatggcagcctgatgctagagcgtggtgtcatgatcatcaccccgctcaccttgatatttgatcgtgttctgcgtggtgagaaagcgatgtatgccgatgtcgttatcatgctactgaatgaacattcattgcccgtagcaagctggacagtcagtaacgcgctacccgttcgctggtccaccagcgacttcgatgctaatagcaacaccgtactggtgaactctctggaattacgttatcaggatatgcgctggttaggagtaaaagcatga

SEQ ID NO: 6480 - DNA, 1167 bp, Photorhabdus luminescens
atgacaacagagacaaaacagccgggcgtcacgataacggaaagccgtatatccctgccaccaaacaatgaatttatcggtgtccccgttttcattggttatacccaagaaaacccaagcaataaaaccgctgtcaaactaaacagcctgaccgaatttacccaagcatttggtgaatcaggattaatgtactactccgtgcgtcacttctttgaaaacggcggacaacaagcctatgcactgtcattgggtgattatcaatcatcaacccatttccaactattgatcaccaccctacaacaagcatgggtaaaacaagccattgccgcagaaagtgaaatcacattgattgttgtgcctgacactacccgttttaatgatcccgacactcaaaaaagcctttggcaacaagcatggcaatcaatacttgaactttgtaaaagtcggcgcggaatcatggggttactggatgccccggacgatccaacactagctgctgattgtctggctgatttttcctcaagtgatcgccaatggggggccgtatactggccaaaactgaaaagtacctatcaggaagaagataaacatatcgtactttcacctactgctgcgatcgccgccgtcattcaacgcaatgaccatcaaaaaggggtgtggactgctcccgccaatgttgctttagccaaagtgatcagcccggtacgctcttacattgaagcaggtgtcctccttaatcttaatcaaaaaggcacttcgttgaatctggttcgcagcttccccggcaaaggtattaaaatctggggctgccgcacgctggacaacacgccgggttccccctggcgctatatccaaattcgccgtctggtttcctatatcgaaactcatataacccaactcggtcgagcctttgtctttgaatccaacaacgccatcacctggatgaaatttaaaggtcaggcccacaactggttacgtcaattatggctaaaaggtggattacgaggcactcaggaagatcaagcatttgaggtgttactgggtgttaatgaatcaatgagtgaaaccgatatcttggccggaaagatgatcatgaaaatcaggctggccctgttaattccggcggaatttattgagctgagtctgacgtttgatatccgtaactaa

SEQ ID NO: 6481 - DNA, 1293 bp, Photorhabdus luminescens
atgacttccgcaacctatgccacaccgggcgtttatattgaagaggacgcttcactatcgctatcaattagcaatagtccaaccgccattcccgtctttattggtaaattttttgacaaagacgggaatcaacctgcaaagggaagctgtattagaatcaccagttggttggattttatctcacaattttcactttcaccggccgtatcagtaaaggctacaaatgtgggtggaaatgccgcaaaaacctatacctacgccgctaccgtcacagccacttctctcagtgcctttgctgtacagcactattttagtcatggtggtggagtctgttatctgttgccattgataacgacagatgaatcagaattagcaaagctgccagacctgattgaaaaacaacaagagatcaccttattggtctgccctgaaacagatgtaacactaaaacaaaaggtctacggtgcagtaaactccttattacagcaaaaagtaggttacttcctactcgctgatagtacagatggggaaaataaacccactactcaaccggataaaaccgctgtctattaccctaatctagagacctcttttacttatagccaaccagcagatgctgatattatgctagatggctatggcggtgttgaaactctagccaagctgaaaacggcttctctaggggaatacactaaagctaaaaaagccgtcgatgacaaattaaagtccactaaaattaccttacccccaagcgccgctgttgcgggtatttatgcggcgaccgatgccagtcgtggcgtctggaaagcccccgctaatgtggcattgaataatgccaaaccatccgagccgatcacagatgataagcaaggtaccatgaatgaagccggtattaatgccatccgtgcttttagcggcaaaggtacgctaatttggggggcccgtacgttagataaaacagacaactggcgctacattccagtacgacgtttatttaatgcagcggaacgagacatcaagcgggcaatgcgatttgccgtctttgagcctaacagccaacccacctggaaacgagtacaagcagccattgacaactacctctatcaactttggcaacaaggtgccctagcgggaaataaaccgcaggaagcctactttgtccagatcggtaaaggtatcaccatgtccgacactgacattcagcaaggcaaaatgatcgtcaaagtgggtatggccgcagtgcgtccggctgaatttattatccttcaattttcacaatacgtagcacagtaa

SEQ ID NO: 6482 - DNA, 1077 bp, Photorhabdus luminescens
atgccaataacaccaacccatcccggcgtttatattgaagaggacgcctcactatcactctccgttcgttccagtgtaacggcagtgcctgtttttgcggttgcaaatagcaattcattattatcaaaacatccttttatccgaattaatagttggttggaatatttgacactaaaaagcgggcaatttaattctaacgacaaacttgatatttcactgcgtgcctattttattaacggcggtggatatggctatcttgtcaaaaccaacgacttagcaaaccaaattccaaaactggatgatgtcaccttactggttgctgccggagaagatatcaaaaatgcggtaagtacactttgccaatcgggcaaaggattattcgccattctggatggtccaaccacagagttaaattctaatggctcatcccaaaatgattatgagctaagcccttttgccgccgtttattacccttggctgaccgctgaatggggagaaaataaagccagcgttgatattccacctagcgccgtgatggccggtatttattccagtgtcgataacagccgaggtgtctggaaagcaccggcaaatgttgtattacaaagcggggtgaaaccgaaatttaaagtcactgatgatttgcaaggtacctataacaccggtaaagccatcaatatgatccgtgaatttccaaataccggtgtcaccgtctggggcgctcgcacacttgatgatagtgataactggcgttatatcccggttcgccgcctatttaatagtgcagagcgagatattaaaaatgccatgagtttcgcggtattcgaacctaacagtcaacccacttggaaagcggtacatcgtgcgatcgataactatctttatgccctctggcaacaagggggattagccggtaacaaagcggaacaggcttactttgttcaaatcggtaaagggataaccatgaccgatgacgatatcaaacagggcagaatgattgtcaaagtcggtatggccgcggttcgtcctgctgaatttattattctgcaatttacccaaaatgttgcccaatcttaa

SEQ ID NO: 6483 - DNA, 450 bp, Photorhabdus luminescens
atgtccgtaactacagaacaaattgctgttgattatccaataccaacttatcgattcgttgtctccgttggtgatgaacaaatccctttcaacaacgtttcagggctagatatcacttatgatgtaatagaatataaagatggtaccggtaatcactataaaatgccgggccaacgtcagttgatcaatattacgctgcgtaaaggggtattccctggggatactaaactttttgactggcttaattccattcagcttaatcaggttgagaaaaaagatgtttcaattagcctgaccaatgaagccggcaccgaaattttaatgagctggagcgtggcaaatgcgttcccaacgtcattaacctccccttcttttgatgccaccagcaatgatatcgcagttcaagagataaaactcactgcggatagagtaatgattcaggccgcctaa

SEQ ID NO: 6484 - DNA, 1944 bp, Photorhabdus luminescens
atgtttcaaaacaacccgctgcttgcacagctaaaacagcaacttcattcccaaacacttcgagtagaaggtttggtcaaaggtaccgaaaaaggattcggattcttagaagtcgatgggcaaaaaagttatttcattcctcccccacacatgaaaaaagttatgcatggcgatcgagtgactgccgctattcatactgataaagaaagagagatcgccgagccagaaacattgattgaaccatttctaaatcgcttcgtcggtcgtatccagaaaaaagaaaatgacaaccgtttatggatcactcctgatcacccactgctaaaagatgctatcccttgccggccgaccaatcaggtcactcatccatttcagcatggtgattgggccgtcgctgaaatgcgtcatcatccattgaaaggcagccggggttttcatgcagaaattaccggctatatcactgaaagcgacaatcactacgccccttggtgggtaacactcacgcgccataatctggaacgtgatgctcccgcgatgactgccgattgccagatgaacgatggcgatcttgagcgtattgacttaacgtcgctggattttgtcactattgacagtgcaaccacagaagatatggacgatgctttgcatattgctaagcaagatgacggtagcctgaaactcagtatcgccattgctgatccaaccgcttatattgcggctggcagcgagctggatcaaatcgcccatcaacgtgctttcactaactacctgccgggttttaatatccccatgttgccacgcgacctgtcagagaatttatgctctctgcgtcctaacgcccgccggccggcattagtttgtcaggtttctattctggaagatggtcaactaggtgatgatattgcgtttttctctacctgggttgaatcaaaagctaaattggtttacgacgaagtttctgactggctggaaaaaaccgggacttgggaacccgcttccgaagcgattaagactcaaatcacgcttttgaaggaaatgagtgatcgccgtaaccaatggcgccaccaaaatgcgcttattttcaaagatcgtcctgattatcgcttcatcctcgatgagaatggttacgtactggatatcgtggtagaacaacgccgtacagccaaccgtattgttgaagaagccatgatcacttctaacctgtgcgccgcaaaaatcctgcgcgataagttaggctttggtatttacaatgtccatatgggttttgagccactgcaaatcgaacaagtggttgaattactgcaagaaaatgatattgatgccaaaacagaagaattattgactctggatggcttttgtaaattacgccgtgaattggataaaaaaccaacacaattccttgatagtcgcattcgtcgtttccagactttcgcagaaattaaacctgaacccggtcctcattttggtctcggttttgatgcttacgccacctggacatcaccgatccgtaaatacagcgacatgattaaccatcgtttactgaaagcgattattcaaaaaaccgatgtagaacagccctcagaagaaacctgtttacaactggctgaacgtcgcagactgaatcgtatggccgaacgtgatgtgggggattggctatatgcccggttcctgcaaccacacgcaggaaccgaacaacgatttaccgcagaaatcattgatatcacccgtggtggtttacgtgtccgactggccgataacggtgcagtggcctttataccagcacccttcctgcatgccgtgcgtgatgaactgcaatgtagccaagagaccggtactgtgattatcaaaggtgaagtcgcttaccaattgaacgatattattgatgttcgtattgatgaagtcagaatggaaacgcgtaatattgtcgcccgccctacggcctga

SEQ ID NO: 6485 - DNA, 639 bp, Photorhabdus luminescens
atgaacaagcagaaacgtatcgaaattttaacgcgtttacgggataacaacccaaagccaaccactgaattagttttcacaacaccatttgagttacttatttcagtactgctttcagcgcaagcaacagatgtcagtgttaataaagccactgcgaaactctatccagtagcaaatacgcctcaggcaattctaaatctgggggtagatgggctgaaagagtatataaaaactatcggtctgtataacaccaaagcggaaaataccattaaaacctgccagatattactggaaaaacatgctggcgaagttcccgaagatcgtgctgcattggaggcattgccaggtgttggccgcaagaccgccaatgtggtgttaaataccgctttcggctggccgactattgcagtcgatacccatatttttcgtgtttgtaatcgtactcaattcgcgcccggtaaaaatgtcaatgaagtcgaaaataaattactgcaagttgtcccggccgaatttaaagttgattgtcatcattggcttattttgcacggtcgttatacctgcatagcccgtaaacctcgttgtggttcctgtattattgaagatctatgtgaatttaaagaaaaaatttaccctgagtaa

SEQ ID NO: 6486 - DNA, 699 bp, Photorhabdus luminescens
atgagtgaaaccaaaaatttatttatccaagggctatggaaaaacaattccgctttagtacaactgctaggattgtgccccctgttagccgtctcttccactgcaaccaatgcgctcggcttagggctggcaacgacactggttctagtctgtaccaacattgcggtttccagcttgcgtcgttgggtacccaatgagatccgtattcccatttatgttatgataatcgcttcggttgtcagtactgtccagatgttgattaacgcctacgcttttggtctgtatgaatcattggggattttcattccactgattgtgactaactgtattgttatcggccgtgctgaagcctatgccgcgaaaaatccgatcatgccctctgcgattgatggcttagcaatgggattaggagccacttttgctctgtttgttcttggtgctattagagaaattctcggcaatggaaccctatttgatggcgctgatttactgctgggcaattgggctaaggtattacgaatagaaatcgttcatatggattcccctttcctattagccatcttaccacccggcgcttttatcggtttgggattaatgctggcagtgaaatatcttattgatgaaaaaatgaaaacgagagcaataaaagaaaaaagccgtgcaataacaatgtcaccagaatcggagagttctatttga

SEQ ID NO: 6487 - DNA, 630 bp, Photorhabdus luminescens
atgttagaaaccatgcgacgtcacggcatcacactcgccatttttgcggcacttaccaccgggctaacggctgtcgtgaattcactcaccaaaagtactattgcagaacaagccgccctacagcacaagtcgctgcttgatcaggttattccgcctgccctgtacgacaatgatatacaaaacgaatgttatctagttaatgcgaatgctctgggcaataacttgcctcatcgtctctatctggcccgtaaaaatggtcaccccgtggcggcagcgctagaaagtactgcaccggatggttattccggtgctatccaattactggttggcgcagatttctcaggaaaagtgcttggtgtacgggttacagaacatcatgaaaccccagggctaggggataaaattgaaacccggatttcaaactggattaatgtattttcagggaaaaccatcacatcaaatcatgaccagcactgggcagtgaaaaaagatggcggtgagtttgatcaatttaccggtgccactattaccccacgcgccgtggtaaactcagtcaaacggactgcactttatttacagaccatacctgaacatctctcttctctagaatcctgtggagaaaaatcatga

SEQ ID NO: 6488 - DNA, 1080 bp, Photorhabdus luminescens
atgaaattcagacccgttcagactgacaataaaaaactaaaagtcgcaagttcgccttttacacacaatcagcaaagtaccagccgcattatgctgtgggttgtgctggcagcaatccccggtattgcggtacaaacttacttctttagttacggtaccttgttccagctcctgcttgcagtgattaccgccttgcttgcagaatcatttgccctatctctgcgtaaacaggcaattatgcctcgtttgcaggataattctgcattactgacaggtttacttttagggatcagccttccaccgctggctccttggtggctgattgtattgggaactgcttttgcggtgattattgccaaacatttatatggtggccttggtcaaaacccattcaatccggcaatggtcggttatgtcgtactgctaatatcattcccagtgcaaatgaccggctggttgccgccgatggatttactggcaacacaaatcactccgctagacagtctgatggtgatcttcaccggtcagactcccgatggaacaacattgcagcaattgcaacaaggtttcgatgggatcagccaagctacaccgctggatagtttcaaaaccggtttattgactcaccatattgatgacgttcttcaccaacctatattacaaggatctctggctggcatcggctggcaatgggtcaacattgcttatcttgttggtgggctgattctactgaacagaaaagtgataacctggcaaattcctgtggcatttatcctggtattaggtttatgtgcactcactagctggttgattgatccatcccgttattcgccgccattattacaactgttttccggtgcaaccatgctaggcgcattctttattgcaaccgatcccgtcagtgcttccacaacacccaaaggtcgtttggtttttggtgccatgattggcctgttagtctgggttatccgtgtttatggtggttaccctgatgccatagcatttgcggtcttattggcgaatatcaccgtgccactcattgaccattacacccaaccccgcgtttacgggcataaataa

SEQ ID NO: 6489 - DNA, 2559 bp, Photorhabdus luminescens
atgtttaatttattcaatttgctcaataaaaataaaatctgggatttcgccggcggtattcatccacctgaaatgaagctgcaatccagccaaagccctttacgcattacgccactaccggaagagttaatcatcccattgcaacaacatttggggacggaaggcgagttgctggtcaaagtgggtgatgaagtgcttaaaggccagcccttaacatttggcacgggtcgtaccgtaccggttcatgcatcaacttccggaaccatcattgccattgaaccatgtattaccgcgcacccatccgggttgaaagagttatgcgttcgtttgcgccctgatgggaaagatcaatggggtgaacgcattcaaacacctgattatcaatcactggatgcagatacgattcttaaccgaatccatcaggccggtatcgcaggtttaggtggagctggctttcctaccgcagccaaactacaaagcggccgtcatggtcttaagacactgatcattaatgccgcagaatgtgaaccttatatcaccgctgatgaccgcctgatgcaggagcatgccaacgaacttattgagggcattcgtattctggaacatctgcttaaaccggagcagatcctgattggtattgaagataataaaccagcagccataaaaaaactcaaaaccgttctaaagggcgataaatcgattatcgtccgagttatcccaaccaaatatccttccggcggtgccaaacaactgactaagatactgaccggtaaagaagtcccctccggtggccgttcctctactatcggtgtactgatgcagaacgtggggacagtggttgcaatcaaacgggccattattgatggagaacctttaattgagcgcgtcgtcacaattaccggcgaagcagtcacctcgccgggtaacttttgggcgcggcttggtactccggtacaatttcttctccagttagccggttttgcaccacaatcagaacagatggtcattatgggtggtcccttaatgggattcacgctgcctgacctcaacgtgcccatcgttaagatcagtaactgtattctggcaccatcccatcaggaaatggattcaaatacaacggaagaggcttgtatccgttgtggattatgtgtggaagcctgccctgcccgtttattgccgcagcagctctattggttcagtcgtgggcaagagcacgaaaaagccagagatcacaatctgttcgactgtattgaatgcggtgcctgtgcctatgtctgcccaagcaatattcctctggtgcaatattatcgccaagagaaagccgaaattcgggccttggatcaggaaaaccgccgttcaaccgaagccaaaattcgtttcgaagctaagcaggcccgtatggaacgagaaaaactggcccgagatgaacgacacaaaaaatcggccgttcaagttgataataaagataagagcgctgtgcaagatgcgctttcccgcgtgaaggaaaaacaggctaacgcgggtaaagttgttgctatagaaccggggcaactacctgataatgccgcagtaatagcggctcgtcaggcaagaaaagagcagcttcgcgctcgtcaggcggaaaaacaggcggtggaaaatatgagtattactccatctgaaccaacaagtgcagaagatccacgcaaagccgcattagcagcagcaattgccagagctaaagcgaagaaagcagctcaaaatcagtcagaaacaccatcaccggaagcgagagaaccagaaactactactagtgaaaaacaagatcttcataaagatgccgtcgctgccgctattgcccgtgtcaaagccaaaaaagcgcagactcaaccattaactgaaactcaggcagaaacaccgccagcggaagaaactgatccacgtaaagctgccgtcgcggctgctattgcccgtgttaaagccaaaaaagcccaaacacagccattaactgaaactcaggcagaaacaccgccagcggaagaaactgatccacgtaaagctgctgtcgcggctgccattgcccgtgttaaagccaaaaaagcccaaacacagccattaactgaaactcaggcagaaacaccgccagcggaagaaaccgatccgcgtaaagctgctgtcgcggctgccattgcccgtgtcaaagccaagaaagctcagactcaacaattaactgaaactcaggcagaaacaccgccagcggaagaaaccgatccgcgtaaagctgctgtcgcggctgccattgcccgtgtcaaagccaagaaagctcagactcaacaattaactgaaactcaggcagaaacaccgccagcggaagaaactgatccacgtaaagctgccgtcgcagctgctattgcccgtgtcaaagccaaaaaagcccaaacagagcaattagctgaaacccaggtagaaacaccgccagcggaagaaaccgatccgcgtaaagctgctgtcgctgccgctattgctagggttaaggccaaaaaagacgctcaggaacaacagaaaatttcaatagaatag

SEQ ID NO: 6490 - DNA, 633 bp, Photorhabdus luminescens
atgacatcgttatggattgctattggtgcactcagtgcactagggttaatttttgggttaatcctagggtttgctgcccgccggtttcaggtggaagaggaccccattgttgaaaacattgatgatattctgccgcaaagccagtgtggacaatgcggttacccaggctgtcgcccttatgctgaagccgtagcgaacaatggcgagatgattaacaaatgtgcaccgggtggtgagcaagtcatgctgaaaatttcagagctgctcggtatcgatccgcaaccattggatggtgatgcaaacctacaaaaccctgcacgcaaagtcgcctttattgatgaagagaattgcattggttgcactaaatgtatccaagcatgtcctgtagacgctatcgtcggtgctacccgcgccatgcataccattgttgaagatttatgtactggttgtgacctgtgcgttgctccttgtccaaccgactgtattacgatgatccctgtagcaacaaccacttccaactggaaatgggatttaaaaaccattccagttagaaatattcctgttcagccatctcacgccatttccattaaaagtatcccgatcaaaaatattgaggctgaacaccatgtttaa

SEQ ID NO: 6491 - DNA, 582 bp, Photorhabdus luminescens
atgactgactattttcttttatttgtcggaaccgtattggttaacaatttcgtcttggtgaaattcctcggcttatgccctttcatgggcgtatctaaaaagctggaaactgccatcgggatgggatttgcgacaacatttgttatgacactagcctctgtatgttcatggctggtgaatacttttattctattaccactggacttaatctatttgcgtactctgagctttattcttgtcattgcggtcgtagtgcaattcacagagcttgttgtacgcaaaaccagcccgacgttataccggttattaggtattttcttgccgttgattacgacgaactgtgctgtactgggtgtggcgctgctgaatatcaatcaatcacacgattttttacaatccgctatctatggtttcggtgctgccgccggtttctctctcgttatggtactgtttgccgctattcgcgaacgtctggctgttgctgatgtacccgcccctttcaaggggtcatctattggtcttattactgcgggtttaatgtccttggcttttatgggctttagtggtttggtgaaattctga

SEQ ID NO: 6492 - DNA, 441 bp, Photorhabdus luminescens
atgtatcaaaccaatgattatcaccgaattaatggttgggttctggctccggcagcttatctgattatgacctttctcagtgccagtgtaatgctcgctctatatattatgacatttttcagtcaaaacaatatgttgagcgcagggaataatcactttactttaatgtggtttctttctgtcgccattactgcggtaatgtggtgtttcaccctatgggtattgaaactgcttttcattcgatcaaaaaaatttccccacatttttattatttggcttattgttaccgtattaattgcattgaaaactttcgctttctcccctattcccgatcaaatggctttgcgtgcattagcatggccactattggcagccgctatttttgtcccctacattaaacgctctcatcgagtcaaaatgactttcacacaagatcgataa

SEQ ID NO: 6493 - DNA, 1038 bp, Photorhabdus luminescens
atgcgtgagctgttaaaggttgggttggtggggtatggttatgcgagtaaaacgttccatgcaccattaattgctggcactgctggtgttaaattggccgctatttccagtagtgatgctgagaaagtgaaatcagattggccaaatatcccggtggtatcccgccctgaggatctttttaatgatcctgacattgatttaatcgttattccgacacctaatgatacgcattatcctctggcacagaaggcattggcagcgggtaagcatgtggtggtggataaaccatttactatcacagttgaacaagctgaatctttaaaacagcaggcagagaaggcggatttattactttctgtatttcataaccggcgttgggattctggttttctaacgataaaatcgttaattaaagagaatcgtctaggtaaattaaaatattttgcatctcattttgatcgttatcgcccgattatccgtcaaagatggcgtgaagcggcggggcaaggaagtggtatttggtatgatttaggccctcacttacttgatcaggcgattcaactgtttggtaaaccgcaatctattaccgctgatttgggaatgatccgtccacaagcggaagcggtagattatttccatgtactgctaaattatccagatatcaaagtagttcttcatgcaacaacactggcagcggctgaatctgctgtttataccttgcatggtatggcaggtagttacgtaaaatatggtcttgatcctcaggaagagcgattgaaagcgggggaaaggccgccacatgctgattggggatatgatattcgtgatggtattgtgacgctgtcacatggagaggaattagtgactaaacacgtgccgactctgcctggtaattattctgcttattatgcggctatccgtgatgcaattatgctcggtaaacctaatccagttacggcaaatgaagccattcaaattatgaaattaattgaggctggtattcagtcggcagaacaacaacgtacagtggcaatttaa

SEQ ID NO: 6494 - DNA, 972 bp, Photorhabdus luminescens
atgacttggtggcaaaaattaaaaatagattcttttttgatgatattagtgacggtagttgttattgcgacattctttccttgtgagggggaaattaaagtctggtttcaacgattaaccacagcggctattgcgctgttattctttatgcatggtgctaaattatctcgtcaagccattattgccggcatggcacattggcggcttcatctggtggtctttctcagtacctttgttttattcccgattattggattagggttgaatttgctcgtaccggaaatcatgacatcaacagtttattggggatttctctatctttgtgcattaccggcaacggttcagtcagctattgcttttacctcagttgctggtggcaatgttgccgctgctatttgcagtgcttcggcgtccagtattctgggcgtatttttatcgccaatattagtcgggttgatgatccatacacaaggtgaaggcagcgctgatactctggaagccataaaagccataattctgcaattgatggttccctttattatcggacatctatcgcggccattgattgcccgttgggtagagaaacataaaaaactgcttaatatgactgaccggtcatcgattcttttggtggtttatgtggcttttagtgaggcggtggtagaaggtatttggcataagattgatggttattcactcctgacgattggggtggtttgctgtgttttattggcggttgtgttggttattaatacttatattgctcgttggttgggttttaataaagaagacgaaattacgattgttttttgtggttcgaagaagagtctggctaatggtgtgccaatggcaaatgttttattccctgcggcgacggttggcgtaatgttgttgccgttgatgatttttcatcaaattcagttgatggtgtgtgcagtattggcgcaacgttatgccaaaaggttaaaatag

SEQ ID NO: 6495 - DNA, 282 bp, Photorhabdus luminescens
atgattattgttaaaaattcttcaaataaggtgactaaagtttcaattaataagtgggggaaagatggtaatacaggttattgggatattaatccgggagatacagcgagttggaatcgcactgatggtcgtggttttgtaatgtcaataatacgtgagaatgaggaccaaaagtcatattttgtcttagcaaatagcaacattgttatttatgataaagatgctactggttacggtaaaaatgttcaggataatggtcgttggatatatcctttaaattga

SEQ ID NO: 6496 - DNA, 300 bp, Photorhabdus luminescens
atggcgaaggcaaagaccccttaccgcatcgagtggcgaccgaaggcccgcgaggatttgcgcgccattgttcgatacataggcaaagacaacccgaccagggcgggcagcttcggtcaggagctacgcgacaagaccttgccgcttgcgcagcacccggagcttggccgcaccgggcggcccggcctgccggattatgtgcgcgagctggtcgcgcatcggaactacattattttttatcgcgtgctggacgaggcgcgcaccgtcgaaattttgcgagtgaaacacgcggcgcagtaa

SEQ ID NO: 6497 - DNA, 465 bp, Photorhabdus luminescens
atgcaaagcatgaccattgagcagctacgcgccgcaagcgatgccggcggcgtggaaggtgtgaccctgaaagggcaaggcggaaccttccttgtgcagatcgcaacccgcagcggtgccgccgctgtgctggcgaaggcccgcagccaagagccgcgccgtttcggcaaccccattgccgccctgaacgtgttgcgcggcgtaggcatcaccatcggccagttcgacgccagtgagtggaacccggacgagaaagaagaaaccgccggcaatcgtggccgggccgaggcaatgcgcaaggcccaccaagccgccgcctactcggagtggctggccgccgagattcaggatgctatcgacgacccgcgcccgaatctttcacacgatgaggttatggccgagatggacgccgatattgccgccttggccgccgaacacaagcccgccaaaaggaagcgcgcttga

SEQ ID NO: 6498 - DNA, 126 bp, Photorhabdus luminescens
atgggacaaccttgcaatccgcacaaatcaaagagtgaacaacgtgctgtgccccccggcacctattttgacgcactgcataaagccgtcaatgaagaccgggcagcagtcggaaaaaaagcctga

SEQ ID NO: 6499 - DNA, 204 bp, Photorhabdus luminescens
atgcgaactactgtcacgattgatgatgcgttgtatgcacaggcactagaaatggccgatcctggcatggataaggctgatattttccgtgaagcggtgaaaacgtttgttcgggtgcaggcagcaaaaagactggcttcgctcggcagcacatcacctgatatgcagatagttccccgtcgccgggaggagccatccgcataa

SEQ ID NO: 6500 - DNA, 378 bp, Photorhabdus luminescens
atgactattttagtagatacgtccgtctggattgaccatttcaaaaacaggaatgacggattgatccagttgttaagccgggatctggttctgattcatccgatgatactggctgaaatagcctgtggtactcctctggcaccaagactgcgaacgcttggagatctggggctgttaccacagagtcatcaggccactatcatcgaggtaatggcattcattgaaaacgaaaagttgtacggcctcggatgtggtctggttgatattacattgctggcatcaaccttgataacaccaggggcaaggctttggacgctggataaacgacttgagaagttggctaaacgtcttaatgcgagttatcagccgattcattga

SEQ ID NO: 6501 - DNA, 153 bp, Photorhabdus luminescens
gtgatttggaacggcttttcattctcacgcaatgtggttcagaaaagggcatttattgcgcatcggggcaatcatcattgcgcgtcactacagctaggagctgggaaataccgcgcattgcgcactgtagatgtcagtttgtacaaaaaatag

SEQ ID NO: 6502 - DNA, 258 bp, Photorhabdus luminescens
atgcataccactcgtctgaagagagtcggcggttccgttatgctgaccgttccgccggcgctgctgaacgcactgtctctgggatcagataatgaagtcggcatggtcattgataatggtcggctgatagtggagccgcacaagcgcccacaatattcgcttgctgaactgctggcacagtgcgatccggatgccgaaatcagtgcagaagatcgtgaatggctggacgcgccagctgcaggccgggaggcaatctga

SEQ ID NO: 6503 - DNA, 390 bp, Photorhabdus luminescens
gtgcagaagatcgtgaatggctggacgcgccagctgcaggccgggaggcaatctgatatggagagaggggaaatctggcttgtctcactcgaccctaccgcaggccatgagcagcagggaacgctgccggtgctgattgtcacgccagcggcctttaaccgcgtgacccgcctgcctgtagtggtacccgttaccagcggtggtaattttgtccgtaccgctggttttgcagtatcgctggacggtgccggtacacgtacaaccggcgttgtgcgctgcgatcagccgcgcacaattgacatgggcgcacggggcggaaagcggcttgagcgtgtgcctgcaaaaatcatggatgacgttctggcccgactgaccgtaattcttagttga

SEQ ID NO: 6504 - DNA, 228 bp, Photorhabdus luminescens
atggcgctggcgttagtttatcccctgccttctgatgaaggcgactcattacctttctttgccgagtccgttgcggccggtttcccaagcccggcagccggctatgaagctaatgaactcaaccagcctgcggaaatcagtaaattgcctcaaatagacgcgttaagagcaaaaggtatacctttatggataccgatcatcctatcggccacagcccgatcacaatag

SEQ ID NO: 6505 - DNA, 249 bp, Photorhabdus luminescens
gtgagaattttcgagaatcgtttcaatacggatatcgtgaagccagtgctcgaaaaagttgtactcgtaggtaaaacggtcaccggcatcaaattcaaagtcacccagcgtaattttgtaggggttatcaggaaatccgatcccgccggagtaggaaatgccgtaatttttgccctaaatacggaattgatgcagatgatcatcctgccatccctgcacgatctgaatgatatagtgcaaagccgctaa

SEQ ID NO: 6506 - DNA, 1002 bp, Photorhabdus luminescens
gtgattgacataaaactcccactgacagatttacaccgccatctcgatggaaatatccggccggagactatcttagatcttgccaaccagcataatattcagcttccagcaaatgatctggaatcactactcccccacgtacaaattattgaaaatgaaccgagcttagtcagttttttacaaaaacttgattggggagtggcagtactagctgatttggacgcttgtcgtcgtattgctattgaaaatgttgaagatgccatcaatactgggctcgactatgctgaattacgtttttccccttattacatggcgatgaaccacaaattgccggttgaaggggtcgttgaggcaattattgatggtatccgttctgcccgtcaaaataacgatatcgacatccgtcttattggaattttaagcagaacttttggtgaacaagcctgtactcaggaattaactagcctgctagctcaccagcaacatattactgcattggatctcgcgggtgacgagttaggttttcccggccatcttttccaatctcattttaccaaagcccgtgatgctggatggcatataactatccatgccggcgaagccgctggcgctgaaagtatttggcaagccattagggaattaggagccacgcgtattggtcatggggtaaaagccattactgatcccgtattgatggattatttggttgaaaaccgtattggtattgaaacctgtttaacctcaaaccttcaaaccagcaccgtcaattctttattggaccatccactcaaacaattcctggaaaaagatattcttgcttccattaataccgatgatccagccgttgaaggcatcgacatccgccatgaatatgaaattgccgcccctgccgcgggtttatctattgctcaaattcgtcaggctcagataaatgggctggaaactgcttttatcagtgatacagaaaaacaggcattacgcatgaaagcagcaaatcgttaa

SEQ ID NO: 6507 - DNA, 1548 bp, Photorhabdus luminescens
atgaaaaaatcgttagtggcagtaggcattattgttgccttgggagcagcctggactggagcttcatggtatacaggtaaacagattgaacaacgtatagatcaatctatttcccacgccaatgctgagatgaaaaaagccttccctgaaacaggtctgatgctacagagtaaagatttccgccgtggcgtgttcagttctgatgtccgtcttgttctgacagttaaagacggcgttaaaaacgcagaaatcaaacccggtgaagaaatttcaattaaatctgtgattgatcacggccctttcccacttgcacaagtgaaaaaattaaccttaattccgagtatggcttccgttcattccgaactggaaaataatgaatctttaaaacccctgtttgaaatcactaaaggaaaatcgctgttcacttctgattcccgtgtcagttatagtggttctgttatttctgatgttgatatcattcctgtcgattttgaaaaaaatggtgctaaattcaatttttccggtgccaaactgacttccgatctcagccgtgatctgaaaaagatatcactggcaatcaagagcgaccagttaaccatcaataaaaatgacgaaaatttccttgtcaaaggtattgatttaaacctagacaataaaaaaggcaaatttgatatctatattggcgatcaaagcatcaaaattcagcaaatcagcctaaaaggcatcggcaatgaagatatgatgctttccggcgttaaaatagattcaaatatcggtgaagatgaaactaatctgaaaggaaaaatcacttatagtttggatggccttaaactgaaaaatattgattttggttctggtcagtttgcaattactgccgatcgtctggatggtgaagccatgcgtaagtttactcaagcttacaatgatgccacagccaaatcactctcttctgatgatatctcttccgatgcagcagatacagctattattgatgcggtattgtctaacctgcctattttgctgaaaaacaatccacaatttggtattgatccattgacctggaagaataccaaaggtgaaagtaccattaattaccaagtgagtttgaaggacttaccaaaagataaaagtagcttgtcttcaatgaaaacagaggaagctattcgcaccttaattcagaacatgtctctgaatgtcacattaccaagacctatgatgattgagttttccactcagtcaatgataatgaatggcatggataaagcaaaggctgaacataatgctgagcaacagataaaacagtttgaacaactaggacaactgtttaaaattgccacggttgataaagatgctatcagcattaagtttaactatgcagacggtaatgtagaaatgaatggtaagaaaatgcccttacatcaattcatgtctgaatacaatttatccgacccttctgatgatgaagcaccagaacaaatagtgccagaaggcgacacccacgacagtggaaaagtgaaagcagaaggtactgtgcaacctgcgcaataa

SEQ ID NO: 6508 - DNA, 1173 bp, Photorhabdus luminescens
atgttgaagatgataaatcagatccagcactattcatggggaagcaaaaccgccctgatggatatttatggtgttgaaaatccagataatctgccaatggctgaattatggatgggcacccatcctaaaagcagttcacttgtagccaacccagaaacgggaaaacccattgccttaaatgaattaatagccagtgatccggaaaaatatctggggaaaaaagtttcagatagctttcaccgtttgcctttcctatttaaggtattgtgtgcggctcaacctctctcaattcaggttcatcctgataaaaaatccgcagaagaggggtttgccaaagagaatatcgccggtattccgttggattccccggaaagaaattacaaagatgataaccataagcccgaattggtttatgcccttacccctttccgggcaatgaatgggttccgtccattaaacgaaatcgcacaattactgaaatttattactgcggcccatcccaaaattccgttctttattcagacaccaaatgaacagaatcttgcctgcttattttcccaattactgaatatgagtggtaaacaaaagcagctagctcttggcgtattgaaatcagcattgaatagtcggctcggagaaccttgggattccatcaaaaaaatgacggcattttaccctgacgacaatggtctatttattccacttttacttaatgtcatcgaacttgaacccggtcaagccatgtttctatgcgcccgtacgcctcatgcttatctggaaggcgttgctcttgaagtgatggcaaattcagataatgtcctacgagcgggcttaaccaacaaatatattgatattcctgagctaatggcaaaccttgactttgtttcaaaaccaacaaacaccttatttatgctaccaaggcaggaaaaaatcgctaaaaatttccctattccagtggatgattttgcattttctatttattctctatcggaacagtcaattacgcttgataacaattcagcatcgattgttttttgtgttgaaggtcaaacagttatacaatctggcgaacaccaattgagaattttcccaggtgagtcagtattcatatctgctgccgaaaaggctgtgataattcacggtgatggttttaccgcccgggtttttaattaa

SEQ ID NO: 6509 - DNA, 1395 bp, Photorhabdus luminescens
atggcagccactcgcattgaaaaagactcaatggggcccatcgaagtacctgctgaccaattgtggggagcgcaaactcaacgttcacttgagcattttcgcatttcgcaggagaaaatgccggttgcattaattcatgctctggcattgactaaacaggctgcggccagtgtcaatatggatttgggtcttctgccgcaagaacgtggtgaagcaattattgctgctgcgaaagaggtgctggaaggtaaacatccgacagaatttcctcttgctatctggcagaccggttcaggaacacaaagtaacatgaacatgaacgaagtgttggcgaaccgtggtagcgagatccttggcggggtgagggggagtgaacgccttatccatcctaacgatgatgtcaataaaagtcagagttctaacgatgttttcccaacagcaatgcatgttgctgcggttattgcgctgagtgagcatcttattcctgagctgaaaatattacaaaaaacattggctgataaagctgaagcttataaggatatcgttaaaattggccgtacacacttgcaagatgcgacgccattgacccttggtcaggaaatttctggctgggcggcaatgttaacgcataacctgaaacacattgaagacagtattccccatgtttgtgaattggcactagggggaactgcggttggcaccggtttaaatactcatcctgaatatgctgttcgtgttgctaagaaattggctgaactgaccaaccattcgtttgttactgccccaaataaatttgaagccctggcgacttgtgatgctctggttcattctcatggggcattaaaaggtctggctgcatccataatgaaaattgcaaacgatgttcgttggttggcttccggccctcgctgtggtatcggtgaaatttcaattcctgaaaatgaaccgggtagctcaatcatgccaggtaaagttaacccaactcagtgtgaagcagtgacgatgctttgtgcacaggtgatgggcaatgatgttgctattaatattggtggggcatcaggcaactttgagctaaatgtgtttcgcccaatggtgattaataacttcctgcaatctgttcgcttgttggctgatggtatgcgtagcttcaatgaacattgtgcagtcggtatcgaacccaaccgtgatcgcattactcagttgctgaatgaatctctgatgttagtaacggcgctgaatacacatattggttatgacaaagctgcagaaattgctaagaaagcccataaagaagggctgacattaaaacaatcggcgatgaaactgggttatctgacagaagctgagtttgatgagtgggttcgtccagaagatatggttggcagcttgaagtag

SEQ ID NO: 6510 - DNA, 471 bp, Photorhabdus luminescens
gtgatcttataccgacttacccgttcaaaatatgtcgaatcagcatggagtggtacaggagcaaagttatatggtggccgttggcacaatataggaagacccgcagtttatgtagccacttcagtttctcttgctgtgctagaagtacttgttcatgtcggagatgatgaacttctcactgattttgctttgttaagtatcgacatccctgaaaaccaaattgatattttagacattgatacattaccttctgattggaatgctcccgtaccttctacttgcacaatggaaataggcagtgaatggttcgaggttagtcattctattggcctggtagttccctctgccattgtcccctacgaaaataacgtcattttgaatcctatggcgaaagattttcataaatatataaacacggttaaacgcttggattttggcattgattcccgtttagtaaaggcaaaaaaataa

SEQ ID NO: 6511 - DNA, 447 bp, Photorhabdus luminescens
atgcgagtttttacaccaagccacaaagtccagagtaacccactttggcgaacagttggtttcccatcaagcagtgggccacatttgaatgcaatattaaatgaagggttaccagtcactatagttgataaaatacaaaactggtcaacgttcggtaaaggggatattttgcggattgcaggtatccaaatacgcagttattcaagacgctgttcaggtaaaggtaaatttactgctgatgaaagtcagcgcattgctcggtttgtacgtgtcatggaccatgctgtagatttatttaatggtgacaaagataaagcagctcaatggatgaagcgacctatccggggtttaggatacgtaacgcctgaatcaatgctcgatacagaaagtggagcgctagatgtcatgaatctcatcggcaggattgaacacggaattgtatcgtga

SEQ ID NO: 6512 - DNA, 927 bp, Photorhabdus luminescens
atgagtaaatatttatcaattgacgatttgaatagttgttttcaacaacaagagagtaagttgaagcaactgtatgaacaattaaatagctattctttgttggccgctcatgtgtttattttgcctgatgtagaaaaaggctgtgaacatgagccagtaacagaaatcattgtgaatgaaatgacgggtaatgacgcacgaaatataggattaagtcattaccagaagctatttatatatcacaataaccaaaatatcagcagtaaagctgccgttcgtcttcccggtgtattatgtttttctgtgaaccaacaacaatatcgttctgctttacttttgattgaggaaattaataagttgaaagcagagcttgaacatatcgtaacggtgcaatcaggggtggataaagagcagcggtttgagtttgttcacagtcagttacatggtttgataactttaaacgcttacagaaccatcactccccttctcaatcccgattcagttcgttttggttgggcaaataaaaatatcatcaataaagtcacaaaagatcaaattctgcaacgtttggagaaaagctataactctggacgtgcagtttccccctattctcgtgaacaatgggcagcattggtcgcaaaagaaattatcgatataaaaaaattaccggacgatgtggtgttaaaaatcaaacgcccagtgaaagtgcagcccattgcacgagtctggtatgcggaacaacaaaaacaggtgcaatatgcttgtcccctgccaataattgcattttatgttaactatggcgataaccaaccaaagataggtagacttgctaactatgatgccaatgccatagtgcatcgctataaacccaaagctaaaccactagaattgattattccaaggctacatttatatcgtgagatttag

SEQ ID NO: 6513 - DNA, 468 bp, Photorhabdus luminescens
atgattatgggaatactcacaggcagcgatactccgatcccaggaaaatcttatattattcatccgtatccagcaggtgattacgcgactgctgtaacggtagctagtatatttcatgcagcgccggggagcgtgtcattggcaatatgggaaagcactgtaccataccaaaaatttgagtgcgtcggggatggaaaggggagaggctaccttggctttatttgccgggcatcccctgtaagtgatcgcggggcttaccttggctacaacgctcacgaaatacttatctgtaaagctcagtaccaacaaaaatgggaagatatggttgttgttgagcgtccggctggaggattcgagtggtgcatgagaaaggatgaccatcttgcattcgttggaattcagggccacatacagctaaagatatttagagactttaccacgacgtggggcttcaccgagtggttctga

SEQ ID NO: 6514 - DNA, 219 bp, Photorhabdus luminescens
atgcgatacgaccggttcagccattggcccagagcaaaatcggagtctgtgaaacttggattggtggaaagaaaacgcagccacattcgtaattacgtacaaagaaacaaaaaactggttattttcactaatccggatcttggtaacccggttccccgggttgccacagtgccggaaataaatattaaaacaacgccagtagttaagtgttggatttag

SEQ ID NO: 6515 - DNA, 1113 bp, Photorhabdus luminescens
atgaaacgaaaaacggggtttttctttgatgaacattgtttttggcatagtactggcatgcatgtaatgactctacctgtcggtggttgggttcagccttcttctggaactgcacatgctgaatcgccggaaacaaaacggcggttaaaaaatttgatggatgtatcaggcttgagccactctttacacctttcttcggcatcgcctattgatgagcaaacactacgtaaaattcatcctgaagagtacttgaagcagtttaagcgagtcagtgataacggtggaggaatgcttggtatagaagcctctctaggaccgggaagctatgaaattgctaagctttcagccagccttgcttgtgcggcggtggaagcagtgcttagtggtgagcttgataatgcttacagcctttctcgaccaccgggtcatcactgtttgcctgataaacctatgggattttgttttctagcaaatatcccattggcaattgaacaggcaaaagcacgttttgatttaaaacgagttgcggtcattgattgggatgttcatcacggtaatggtactcaacatatttattgggatcgttctgatgttttgactatctcgatacatcaggatggttgtttccctccaggatacagcggtgaagatgatatcggggaaggtgaaggaaccggttataacctgaatatcccattacttgctggagccggacataatagctatatctatgcaatgacacagatagtacttcctgcgcttgaacgctttaaaccagaactgattattgtcgcctgtggctatgatgcgaatgcgatggaccctttggcaaggatgcagctccatagtgaaagttttcgggagatgacccagctagtgcaacaagcagcagatagtttatgcgacggaaaactagtcgttgttcatgaaggcgggtatgcggaatcttatgtcccattctgtggattagctgtacttgaacagatgagcggcattcgtacagaagtcaaagatccaatgttagattctatacgcttgcagcagccaagagctgagtttgagctatttcaacaacagcagcttgataaacttaaagaaaaattcggtctttaa

SEQ ID NO: 6516 - DNA, 600 bp, Photorhabdus luminescens
atgtataaacataaagtgaaagtgatggctttagccgctacgataattacagctttatctaatggtacatgggctcatggttatattgatagcccaggaagtcgtgcattcctttgttccgcacaaggaaatgaacaaaatatggattgtgggttggttaagtatgagcctcaatctcttgaagctaagaaaggctttccacaagctggcccggaagatggtcatattgccagcgctggcattggtcattttggcgcattggatgctcaaaccgaagatcgttggaaaaaaatccctattactgccggtgagattgagttccagtgggaaattatgattcaacacaaaacctcaagttgggaatattttattaccaaacttggttgggatcccaataaacctttaaccagagagcaatttaatagtacacctttctgctttgaggattatcaggaaaaaatgccgagcagcagagttattaataaatgtaccttaccagagggttatcaaggctatcacgttatactgggtgtttggacaatctcagataccctaaatgcattttaccaagtaattgacacaacaattagccctgcttga

SEQ ID NO: 6517 - DNA, 834 bp, Photorhabdus luminescens
atgcagagtaatattttggtcacaggtggtaagggaaaaaccggaaggttgattagtgagttactgacccaaaatgggatcacgcatcggatcggtacccgcacccctgaatcaagtaatgaaattgcctttgactggatgcgccctgatctggctgaagccgcattttctggcatcaggtcactatatattgtggcaccaacgaacaccagtgatcatggctcagtagtaccaccattgcttgaaatagcgctagaaaaaggggttcaacgttttgtgttgctcagtgcatcgtcactggcctctggtgcaccaatgatgggaaaaattcacgcctggctggaagctaatgcgccagaatggacagtgttacgtcctacctggtttatgcagaacttctatgaacaacggcatttggtaacaataaatgaagaaaatgctatctactctgcaacgggcgatggcaaagtggggttcattgacgctcttgatattgctcaggcagctgtttctgcgttaacatcaaatctaaccataaataaagatttcatccttacagggcccgaaacactgagttatggcgatattgcttctgcactgagtaaagccttaggccgcgaaattagtcaccgaaatctaacgaccaacgaattggccagtcggctacaacaaaatggactggatgaaacctactcaaaaatcctttcagcaatggatagtgacattgcatcaggtactgaagaccgcattacagatggcgtcaaagcattaacaggtgtaaatccttgttcactggatatctttattcagcgggaatgtcctcgctggagataa

SEQ ID NO: 6518 - DNA, 1611 bp, Photorhabdus luminescens
atgatgaataaaacattaaggaatatatccttattcacaggtattatatttttcaatctggcattatctcatgccgcaattattccagcaggtacattattgtcagttaatcaagatatcgttcgcaataatggttcggaacctgtgtctcttgatgttcataaagttgaaaatgatgttgagtttaatattgttcatgatttttttagtggattaatcagagctggcagtgatggaaaaatcatccctgatttagcggtcagttgggaaaccaaaaataataaagtgtggttatttcatctaagaaaaggaataaggtggtctgatggctcccctattactgctcatgatgtggtttttagctggcgacgtttagttgatcccaaaattgcgtctccgtatggcagttatcttggaaacatgcacgtagtcaatgccaaagatattgttgctggtaagaaaaaaactgatgaattaggtgtaaaagcactggataatttgactttggaagtgacgttagaacaacccgtatcctattttttaccgatgttggcctaccctgttatggtgcctattagccaaaaagcggttgaaaagtatggcgaaaaatggactcatcccgatgtatttgtcagtagtgggccatttaagttgtccgaatgggttgtcaatgagaaagttgtgggtgtcaggaattcacaatattgggatagtgctcatactgttatcaataaagtcacttaccttccaatagcatcagaaacggcagatattaatcgttatctagccggagaaattgatatcaccaagaatatcccgtcgattttatttaaatccttaaaggcaaaattaggtaatcaagttcatatcacaccagcattaggtgtttattattatgatcttaataatcaaaaagcaccttttaatgatttcagagtcagacaggcattaaatttggctttagataaagagattatagcgaataaagttttggggcaaggccaagaacctgcttataatcataccccaccaaatactggaggagtgaatttagggcaacctgattatgcatcatggacacaacaagcaagaattgagaaagctaggaaattattaaatgaagcgggttataatagagataatccattgaaatttaaacttctttataatacatcagaagagcataaacgaattgctattgcggcgacttcaatgtggaaaaaaagtctggatgtagatattactttgcagaaccaagaacgaaaagctatgttagatgttattcatcaaggtaattttgagatggtgagatatgcacggatcgctgattacgataatcctgcctcgtttttaaataattttgttactgatagttctaataatacattcttatatagcaatcatgcttatgataatttgataaataaagctaaagcaacaaatgatcgaaaatattttcagcaagcagaagacattttggcaaaagatgtaccagcaattcccgtttattactatatcggtgttagattagtcaaaccttatattggtgggtattatatgagtccattgggtttcgtatcgacaaaagatctttatgttattaaacattaa

SEQ ID NO: 6519 - DNA, 1431 bp, Photorhabdus luminescens
atgccggtaccaacgctcaggcatttcattaatagtcagtatgttgaatctaaaagttccgaatattttgacctaataagcccggtcacgggtgaaacctatgcgcgttctcctaacgcgactatagcggatgttaatgaagcttatgcatcggctaaagaggcattcaagatctgggggcgcagcacaccgtcagcacgtcagcaagcgttgctggcattagccgatgcggtagaaaaaaactctgaacgtctgatcgaagcgcaaagccgcaataccgggcagctcaagcatctgattgcctctgaggaagttgcggcgtcagtggatcatattcgtttcttcgcgggtgccgcccgttttctggaaggcaaagcgacggctgaatatcttcctgatatgacgaccagtattcggcgcgaaccactcggcgtggtggggcaagttacgccgtggaactacccgctgatgatggcagtatggaagatagcgcctgcgttagccgcgggtaataccgtggtactcaaaccgagcgataccacgccggaaagtactctgttgctggctgaactggccgctccgttcttcccgacaggtgcattcaacgtggtgttgggtaatgccagcgcgggggcgctggtcgtttcacacaaaacgccagctatggtttccatcacgggttccgtgcgcgcaggtttgcaggttgcctcttcggcggcagctaatctcaccagagcacatttggagctaggtggcaaagcgccagtggttgttttcgccgatgcagatatggacaaagcggtggagaccattgctaccgcagggtatttcaatgcgggtcaggattgtacggcagcctcgcgtgtgttggtgcatgaatctgtttacgataccttcgtcgctaaactggtggcggcagctaaagctacccgctttggctacccggaagatgaagaggcgctatatgggccgctcaataatgctcgtcagctggagcaggtcaaagggttcattgcacgtttgcccgcgcatgcctgtattgaaaccgggggccgtcaggctgagcgctcgggttattactttgaacctacggtaattaccggtctggaacagcacgacgaagcaatccagaccgagattttcggcccggttatcacggtgcagaagttccgcgatgaacaggatgccatagagaaagctaacgacgtgaaatacggactagcctccagtgtctggacccgcgatcatggccgcgcgttgcgcctgtcacgtgaactcgattttggtaccgtctggattaacacccatattccgcttacggcagaagcgccgcacggcggcttcaagagctcaggatatggtaaagatctgtcggcttatggcttcgatgaatatacgcgtatcaaacacgtgatgagttccaacgactga

SEQ ID NO: 6520 - DNA, 630 bp, Photorhabdus luminescens
ttgcgtgagctggtctggacacatcctaaactgcaccacgaaacgtatcgtgtattgcaggatggtgatctggtcgccatccacggtcgttttacgggattagacgactggccgttggtcggtttcgatctgtaccgggttgccgacggcttaatcgtagagcactgggacggcctggtgccgcaggctgcacccaacgtcagtggccggactcagttagacggcccgactgaagcaggcgatgaccatgaccgagagaagaatcgcgaactggtggtcaacttttttacacgtaccctgatcgagggtcactacgaagagtttggaaactacactaatggtgaattgtttcgccagcacagccccgatattcccgatggtacggcggcagttatctcgtttcttgagcaactcagagatgaagggcaggggctgcattacactaaaattcaccgtacggtagccgatgggcagtttgttctgactcattcggaagggagtattgccggagcgcgtcatagttacttcgagctatggcgcattgaggacggcaaagtggctgaactttgggatgctatcaccccggtaccggaggatgcgaaagcgctgcatcgccacggtattttttag

SEQ ID NO: 6521 - DNA, 1278 bp, Photorhabdus luminescens
atgactgaatctatgctagccaaaagacgcagcgcggctattgcaagaggcgtgggcgtgaccacacaagtctatgcggagcgtgcggaaaacgctgaaatttgggacgttcatgggcaacgttatatcgattttgccgccggtatcgccgtggtgaataccggccactgccatccgcgcgtcatcgcggcagccagagaacagatggaacagttcacccacacctgccatcaggtggtgccctacgaaaattatgtggcgttggccgaacgtctaaaccgcttggtgcccggtaatttcgcgaagaaaaccgtctttgtcactaccggggccgaggcggtggaaaatgctgtaaagatcgcgcgtgccgctaccgggcgcagtggcgtggtagctttcagcggtgctttccatggccgtaccttcctcggtatgtcattaaccggcaaagttgcaccgtacaaaatggggttcggcccgctggttagcgacgtttaccgtgttccgtttccggtcgggctgcatggcattagtgtggaacaaacgctgaatgcgctggaaaatctctttaaagccgacattgagcccacgcgcgttgctgccatcatcatcgaaccgatacagggcgaaggcggtttctatcctgctcctcccgagctgctcaaagcgctgcgtgagatcgccgattgccacggcattgtacttatcgccgatgagatccagaccggtttcgcacgtacgggcaaactgtttgctatggagcatcatgaggttgttgccgatctgaccactatggcgaaaagtctggcgggcggtttgccgctggcagcggtaacgggacgtgcagagttgatggacgctgtagtgcccggcggtctggggggaacttatggtggtaacccggtggcgattgcagccgcccatgcggtgctggatgtgatcgaagaagaaaagctgaatgtgcgagcgacacagctgggagagcaactaaaacagcgtctgcatgaactgcgaccgcatgtcccgcagattgccgacgtgcgagggctcgggctgatgattgcggtggagtttaaccatgcggacagtcaggaacccgatgccaactttaccaacgcggtacgccagaaagcgctggagtgtggtctgatcctgttgatgtgcggtgtacacggtaacgtgatccgtttccttccgccgctgaccatacaaaatgacgtttttaatgaagcgctcaacattctggaatctgtgctgctcgatctgactaaacagtag

SEQ ID NO: 6522 - DNA, 369 bp, Photorhabdus luminescens
atgcactggtatttaaatgtattaaagaactatgcatatttcagggggcgggcccggcgtaaggagttctggtatttttttctgttccaaatcttggctgtatttattatctctttccttgaaaactactttgctgttgccaatcctgaaatttatatgggctggttcagcgctatctatctgctgctcacgtttttgcccgcgctagcagtgaatgctcgccgcctgcacgacatcaactgtagcgcttggtggttactgctacatctcataccgtttatcggcactattatcctgctgattctcgccggtctgaaagggagctctggcaacaataaatacagctcagatagccggactcacccatag

SEQ ID NO: 6523 - DNA, 1542 bp, Photorhabdus luminescens
atgacaatgaatagaagagcctttatctctaccgtcgcgacgctcgcgggggcaggagtgctttcatccgcacttcccaatttatccctgctcgcccggaccttaaccgcggccgatgctccggctaacactattgataagctccggccaacactattggaggatgcacagcatagagccagccggttgggactggatccgcgcatctggagctggcataaagacgctgctgctggcgtcatgccagccaactattatgaagcttctttagctgactggcccgctttgggaaacctacccggagaccagaactgcgaagttgtggttatcggcggagggttgctgggtgcttccacggcattgcatcttgctgaagcgggagtggacgtgattctggttgaaaaggataacattggttcaggagcttctggccgcaacgggggacagataacccctgggctcgcacgctgggaagctaagaccatactggaaaaactttcattcgatgaggctaaacgcttatggcgttttgcctctgttgaagcgatgaatctcttggatgaactccgtgagcgttatcgtttcgaatgtgaccgcaaatatggtcatatcactgttgcagtgcacgcaggccacatggggccgctggtggctaatgccgatgcccggcgtcaactgggagatacggcgatgaaggttatcgggccgcacgaattgcaggaagagtatgtgcgttcgggcatctaccacggagcaaatatcgacagtatcggtgggcaggtccagcctctggcactgttgcgtggtctggcttatggtttcgccagactgggtgggcgaatctatgacagcacaaaagtgaagggcatcaagcaggatactggtggcacagtcgtagaaactgagcgggggactatcagggcaagtaaagccgtggtgttgggtgtgcatggctccacgggtgagtttatctccggcccttccaccacggtgccttttttctcctacgtggcggtaacgccgccgttgccagtggatgtcaaagaattgatcccgtcaaatctgccggtctacgatacacagttacaggttgactactatcgtgcggtgcgcaacaaccgcctactgttcggtggacaggggactggcaattcctggtcaccacgtgatgtgaacaactatctgcttgggcgtatcagaaccgtgttcccgcagttggaaaaagctgaactggaatattcctggggcgggatcagcgatctgaccctgaacggtgccaccgatgctcgcaagagcaacgacagagtacccgtgtatatggtacatggctggagtggtcatggcgtggtgcaaacggtacgcattggcaaagctatcagcgacgatctgaccagacgcaacgacgactttaccatgcttacctccattgaccacgcgagtatcccgctgggttcctatctctctccggtagccattccgttggctaagggtattctgggagtgatcagcacgcttaatccggcagacatagtttcgttctga

SEQ ID NO: 6524 - DNA, 771 bp, Photorhabdus luminescens
atggatcgtatgctagaaggtaaggttgtgattgtcactggcggcgcgagtggcatcggagcaggtattgctttagccgctgcgcgtcatggcgcagcaaccgtaattatcggcgatatcacggatcaaccccgagagggaggaacgccagtgttccagcgtctccgtgcgcttggtacacaagccatattccaccggtgtgatgtcacctcgcgaagcgagatggatgcattagtcgatatcgctacaccattcggcggtgttgatttgatggcttgcaatgcaggaattgcattagctaccgatggcccacagattaatgcggacgattttcacaaactgcttacggtcaaccttgatggtgttttatttggcgcccaggctgctgctgaacagatgataaaactgggcaaacgcggaagtattgtagcaacgtcaagtatggggtccattaggacaggacaacttacaaccgcctattccacaagcaaagctggcgtgaatatgatggtggccgcattggccgatgcttttgggccgtcaggtattcgtgttaatgcagtatgcccagggctgatcaatacagcacttcctctttcctcgccggaagtcgcgaaaatgtttgatgggttacgggagaggatgccccttcgtcgattgggagaaccggaagaggtaggaaatgcagttgtgtggttaggatcagatctcgcgtcgtttataactggcgtatcactgctagtcgacggcggacaaacggtagtactgtga

SEQ ID NO: 6525 - DNA, 738 bp, Photorhabdus luminescens
atggggacaacgacgaaagagctcaatgctctggcagtaaaactgaaaagtggatttgatcagcctgaactggtcagagcacgtatcatcaatcttgctgatcattttattaatgtgcttaaaaacaaagattcagagagtatttctcagttgttgactttacctgatgatgaattttggtcagaagtcaaaggacgagctaactatattgaaatagtggcaaatatcacacaggaaaagaaagaacacgaggaatttatcgaaactagaaacgcttttcttgcccatcttggggaatacggtggtgtttataagtccagtaaggttgctgatatattaggagtgacccgcccgacagtaaataagtatggtgaaaatcataaactcattgtattaaattggggaatagagaatttatatcctgtatttcagttttcggtaaataaaaaaactagcaataagggatatttaacaggtgttccagaaatgctggctaatctaggtccagtcagtggcgtaaaaaagtgcggttttttcctccgtaaaatcaagacatttaatcttggtatcgagttggctgaatccacgacggtactggatatcctcagaaatggtgcctccaatgatgaaattgctcaattgataaaactggcgcaaatgttcagttctgctgattctataccctatggatttcaagagggatcgcgacggcaagggagcgaatccccgggagcatag

SEQ ID NO: 6526 - DNA, 1017 bp, Photorhabdus luminescens
atgcacagccaaattaattcattgccccaatatatgttagctatcagtatcattaagcccggaggcccggagaaattgcatttggttcaggttccgttgccgcggccaggaaaaggttacttgttagtaaaagtggcggcggcgggtgtgaatcggcctgatatatttcagagaatgggttcttacccaccaccacctgatgcatctccattgccggggttagaaattgcaggagaagtggttgccaaaggtgaaggttgtgaacgctggaaccttggcgataaagtttgtgcccttgttgccggaggcggttatgccgagtattgtctggtacatgactccgttgccttacccatctatggcttggattttgttcaggcagccgcattgccagaaaacttttttaccgtctgggcaaatgtttttcagactggtcagttgaaaccaggagaaaatttgctgattcacggtggtacttctggaataggcagtgtcactattatgttagcaaaagcctttggtgccaaagttattactaccgtcggctctgatgagaaagccaaagttgcacacagtttaggtgctgactttgttattaattaccataaagaagatttcgttgatcgggtattgaaaatcacgggtaatcatggggttgatatggttgttgatttaatcggtggtgattatgttaataaaaactataaggttgctgctaaattcgggagaattattcagattggtatgatgaaaggaaaccctgaaaatcttaatctgatgcccttaatgctaaaacgtctgactcacacaggttctacattacgttctcgcagtgtagaagaaaaagcagagatagccaaagagttagaaaaacaggtctggccactactgaaatcaggaaaagtcactccattaatttgtaaggtatttgatctgaaagatgcggctgatgcacatcgaatgatggaagccggtgatgttatcggcaaggttatgctggtaaatgtatcaccttaa

SEQ ID NO: 6527 - DNA, 1926 bp, Photorhabdus luminescens
gtgattatgaccaagcagtttacttcgcacttaaacattgatgcgttgtttttaggccctaaatcagaaaatacggttttttttagagaaatgatggaatatgccgtaagtgagcacatgcactggcgttctgattttcatcctgaagaccccgccttggtaacttcagttgatcgttacgcacctgattatagagaaaccctttatcggacagagggtattctgaaccagctatctgccaaactgaaaaacacctctgttccctggttttctcctcgttatatgggacatatgaatgccgataccttgatggtctccaatctcgcttatgtcatggctatgatgtacaacccgaacaattgtgcccacgagtcatcaccgacaacaacagagctagaaattgaagcagggctagatttatgccggatgtttggttatgaccctcgccgagcctggggacatatcacatcgggaggaactgtcgctaattatgaagggctatgggttgcgcgtaatttaaaaaccatgcctcttgccattgcacaacacccgcaatctcgtgatttggttgcaaataaatcagaacaacaactgttgaatatgtcgtcatcagacattctggatttaacggatgaattaaagaagcgtggcattttcgaagaagttcgtgaactttcttgccggggtgttgggataaaacagggaatgttcggcaaggtcttggtaccacaatcgaaacattattcatggatgaaagcaatggatgttctagggattggtcaacagcatattgtgccattgccggtcgatgcaaattatcgtaccgatgttgaaaaaatgcgcgaaattacattcagtctgatagagcagggagaacctattctagcgatggtaaccgtagttggaactacggaagtgggtgccattgatcgagttgatgaagttattgcattgcgtaaagagtgtgaagagcgttatggcgtctcattttatgtgcatattgatgctgcttatgccggttatgccagcgcaatgttccttaacgagcagggagagtttatggaatatgatgaacttatccgtcgttatcgtgaattggcaatcattccggaagatattatttggcctaaacctgaaatttaccaaagtttccgggccatgtgtcaggctgattcaatcactgtagatcctcacaaagttggatttattcaatatgccgccggtgcggtatgtatgaaagataaacgtactgttgacctaatttcctaccgtgcagcttatgtttttgaagatgttgatacgcaacaggatcaagctgttaatcggcgtgtcgtgctcggtgcttctattatggagggatctaaagccggagctatcgccgccgcaatttgggctgcgcatcgattggttccactgaatatcagtggctacggaaaagtcattgctgccggtattgtgacggccaattggatggttaaaaaacttttaaccacagaaccattggttgttgataaacgccggtttgaaattcatgccatgccgaatcctgatttccatatggtcaattttacttttaaagagcaaggaaatgatgacttaatacatcataatcgtcttaataaacggatgtacgaactttgttcatatgcctctggacgtacttataccaatgattttttgacttcttccacctcccttggttatgaagagtatggtgatactccctggcattatgttgcaagttgcggttttgaccaaaaagaatggcagaaagtccaccgtttatatgtcttacgggctgctgtgatgactcattgtttacgtaatgctgacgattttgacgagtattgggaaaggctccagaaaatttttattcacaaactgactcaatttattgatgaagaagaaaaaaagaaagtggcctga

SEQ ID NO: 6528 - DNA, 1209 bp, Photorhabdus luminescens
gtgaagaaccgtacttttggcagtacttttattatcgccggaacaaccatcggtgctggtatgctagccatgccattagccaccgccggtgtaggatttggtgtaagtttgatcatgttggttagcttgtgggttttgatgagttacaccgcattattgctggttgaaacttaccaatatgaatcccctgatacggggttagggacacttgctcaacgttatcttggcagcagcggcaaaatattagccggtttcagcatgatgtttctaatgtatgcattaacatcagcctacattagtggcgcaggggaattactgacagtcagcctcaacaaatggctgaatctatctcttcctgcctcagtcggtgttatcctgtttaccgtgattggtgggggagttgtttgcattggtacccgttcagtagatatggttaaccgagttatttttggtgcaaaaattattttcttggtattaatgttggggatgatgatgccgcatgttcagcatattaacttactgaccatgccattagaacaaggattaatactatcttcaattccggtgatattcacctcgtttggttttcacggtagtgttcccagtattgtgaaatatatggatggcgatatccgtcgactccgctgggtgtttatcatcggcagcgcaattccgctaattgcttatattctctggcaattggcgacactcggaagtattaattccagcacattcgtcaatattttagctgaaaacgcagggttgaatggcttattacacagcattcgcgaagttgttgcttcaccgaaaactgagcttgcagtacaaatgtttgccaacctggcgctcgcaacctcattcctcggtgtcacacttggcctgtttgattttctgggtgatctatttaaacgcaaaaatagcgtagccgggcgtatgcaaactggtttgttaactttcgttccgccattgattttcgcgctattttacccaaaaggatttgtaatggcgttaggatatgccgcggtcgcgctatcaattttggcgttagtattgcctagcctcctggcatataaatcccgccagcaaaatgaacgtcgatatcgggtacctggtggtaagcctgtactattactggtgtttgcctgcggtattgcagtaatagcaatccaaattggcatagtcagtggaatgttgccggaagtagggtga

SEQ ID NO: 6529 - DNA, 435 bp, Photorhabdus luminescens
atgaatcatacccgttacgaaactgatgtggtcgcttgggcaaatgaacaggcagcgttattacgtgccggtaaattctctgagattgatatagccaatattgctgaagagatcgaagacgtgggcaagagtgaacagcgtgagttggctagccgcatggcagtattaattgctcacttattaaaatggaaataccagccaagccatagaggaacaagttgggaaagaaccattaaagcgcaaagaaaagagattctttatggtttaaaagaatctcctagcttaaagacaaagttaaatgattcagactgggttgatgttgtttggtctaaagccgttgcctcagcaatgaacgaaaccgggttagacgtgtttcccgacgtatgcatttggggtatgtcccagatactgtcccctgaattttatcctgattag

SEQ ID NO: 6530 - DNA, 510 bp, Photorhabdus luminescens
ttgaaagatgacgggtatatctctattttcccctgtgaaaaactaacattaattataaggagttggatcatggcgaaagagttatttactgccacagtaaaatctgtagctggattgaaagttgaatgtacatcaagagatttctccttttatttggatgaaccgcgtaatttaggtggtactaatcaggggatgaatcccgttgaagctttactctgttctctcggggcctgcaaatgtatcgtagcaaaggcttttgctaaactgcacaaaattaacttaattgatattcacgttgatctggaaggcgagcttgatactgatggtttcactggtagaaataaacaagcgaaattaggtttctccaaaattgtgacaaaatttcatattaaagctgataatagtgaagaagaaattcatgcctttgtcgactttattaataaaacctgcccagttcacgacactattgagaatgcaccaagttttgtcactgaaatatattgtgaataa

SEQ ID NO: 6531 - DNA, 315 bp, Photorhabdus luminescens
atgaaaaaattgatatctatgctatttattttcattggtatgattagcatccctgcattttctgcggaaaccaatagtggcattgtcaaagtcgcagaaattaaagcggattgggacaatcctgcacattatctttatacattcagtggaggattagccggtaactgtggaaaaccaggttatatttggtcaggttcaagcgctgataacattaacaagctattaagccaagcttatgcacagggtttaaatattaaagttggcatagaaaatgcgagttgtaatataactaccgtttacattattaaacaatag

SEQ ID NO: 6532 - DNA, 1764 bp, Photorhabdus luminescens
atggataaatcattgtacaattcagaatcaacattaaagtcttatttaggtataggaaatgagggagtatctgataaccttttagcggtacttaaaagcaattgtgtcaattatcagtcgtcagtaaaaaaattcatagaacttcttgaatatattcaaaataataatattcgcacgaaaccatttaatgaattagttgcgcttcatgaacttgtagctccacatgattgcgctgtagtttctatgctatcaattcattataatttagccatcggcactgtcgctaacttaggcgtgcaaactccatatgtggaagatctttaccaaaaactttgttcaggtcgtgccattggagtatatctggcgactgagctagctcacgggaatgatctaatcgcaatcgaaacacaggctaattatctgccggaaaaaggcgtattcatgctaaattcacctagcccaaatgcatataaatttatgcctaataccatgccttgtgaattacccaaagtggctgtaattttagctcagttaaatgtatcaggaaaaaaatatggtattttcccatttcttcttcctctgtctgtaaatggaaaattaacgcccggcgttaaaattaccccacttggcgataagcccgggttttatttagataatgcaataacttcatttgataatgtcgaaattccctttgaaggactccttgcgggtaatatgataaccctgaccagggagggtaaagtatcattgcatattaaagaattaagagaaagattctcgttaattacaaatagaatacattcagggaagttatgcatggcaatgatctcagtgacagcggccaaatcagttcttcatataactagcacatatggaaataaacgacaaacattcggctattcaggtgctatgccaataattaattattctcatttcaaagaaggtatcgcctgggataccctgagcaccatcactcatacgttatacttaagagagctaacaagaaaagtttcaactatattatcagaatcaattaaaaactttaagttttcagatgaactacttattgaaatcattactaccaagtccctgtgcacatggcgtacacaagaaatattaattaattgtcgtgagcgttgcggcgcacaggggttatttacggttaacaagatatccccttatttgatatctaattttggtacgattacttcggaaggtgataaccttgtattatcactaaaagccggagggatgatcattctcaataagatgaaagaaataaacaaagcatctttccaacataacctatttcccattttgcatgactatatgaactttttatataaaaagttaaatggattaatagcgagtaacaataaaaagataaacttagatattcttaataagcatagtggggattttctagaactaagccaaacatatgccgttttatccgtggtgacgacaactattgatgcataccatgataataatgatgatgatctttgtatgatcatcgaaggttatcttctcgactggattcatcgtaacatgagcaatctcctgagaagtgaagtgatcaatttacaagaatctaaaaaaatagatgagagacgcattgagtatatacgccagcatgcagacagaataaatgattatattcccagttttggcgtagataaggctggaatcgaaacgccgatatccagtgatgattatatttcctggtatgcaaataatcaccatcagttaaaaaacaattaa

SEQ ID NO: 6533 - DNA, 783 bp, Photorhabdus luminescens
ttatcaacaacaaggttttttatcaaggccgatgcttggaataattcctatcggggctttctggcgggcgaatcattacaattggatctacagcaaatggaagcggcttggttacagcgtcacgaacgctgtttaaatatcaaaaaaaccttctctcttcttagtactgtgtcttctatcaaagagataactgatcaaattgacaaaaaacaggagataaatttcactctggacgcacgggcctttgataaaaactatcccggacattatttgcgtcagataaaacgggtttctgtgtcattatcgctggaaaacgcgggttccgagccaatagctaccccggaaatttgcgcgattttgacacaaacaagcagttcaacgttagttgatactgatattaacggagttaattggctctatgatccgacgagaaaagcaggcaacaatagaaatatcaaaaccaatttacgcgcacagcaacaaattgccctctcttcaatacatgaagatgatggtggagtagcaacagagaattggttatgtaccttgatgtttgatgatgatcgttatctgccatttgaaggaactggtgctatttcaacctggaacctgaaattccctgataagcaagttatcgatcaggtgctaaaaaacattaatggcggttggaaattaaaagatattcttattcatttgcattataccgcacgagatggcggtaatcagttttctaaacaagtggctgataaattagctgaggagaaaaatggatctgaaacataa

SEQ ID NO: 6534 - DNA, 1086 bp, Photorhabdus luminescens
acagtatttctgggaattattctttcatctgcctttcctggtatcttaccggctttgcgaagaacggcgttattactaatccagcgacattcgggtaatatcgccggtacatctaatagttcgctacagcaagttccgccctatcgtttcccgatcatgttaaaacgtgccagtaaagccgtgaaacagttaattcaactaggagatagactgttcagggcgacagaaaatgagattaacgctgaacaacaggtgttacaacaatcgcaagtcattaagttatctgcttttgctatagagttgcaacaacaagctattgaaattgctcaggctagtaaagctgctttagaagcaagtaaaaatatggcgcaacaacggtatgagcattactacggtttatatgaagagaatctttctggcttggaaatatcagctatagctctcaagactacatcggaaatcacaagaatggcagccgttcccttccatatcatgagtgccgcggtggaaactttacccaatatttttggtctggcggtaggaggaggtaactacgcagctcctttggtaagaacagcactagttgctgaaatcaccggactgacattaggcatgacagcggatcggcttcaagatggagcaaactatcagcagcggcgtcaggattgggaaattgagtggaaacaagcacaaagtgaaatcaatatcattgacaagcagttaaaagagcaggagttactgattcaaagcgctcaaatctcattacgagaagctcaggcacagcgaaatgcggctgttgagttgtatgaatttataacgacaggttttctggttgtaccgacatatcaatggctgatgaatcgactttctatattatatgctcctgcctatgatgctgttttatcactgtgcttaatggttgaagctggctggcgttatgaagttggtgattatcaacaacaaggttttttatcaaggccgatgcttggaataattcctatcggggctttctggcgggcgaatcattacaattggatctacagcaaatggaagcggcttggttacagcgtcacgaacgctgtttaa

SEQ ID NO: 6535 - DNA, 162 bp, Photorhabdus luminescens
atgcagcagctgcctctgtcaaatagtgctccattaggtacaggctctcaatctacccctgtcgatttccaaggtgctaatggacagtatttctgggaattattctttcatctgcctttcctggtatcttaccggctttgcgaagaacggcgttattactaa

SEQ ID NO: 6536 - DNA, 237 bp, Photorhabdus luminescens
atggggggatgctcaggtacaccattacatcactaccctgaaacaaggtattggacgtctcgcttgcggcaatctttcaaggatatgagcgaattctttccagcattgcgcatggcgcgttgtgaacatcactatgtattttgtttgccacgcaaagatgctcctgcgttaatagtggcaatttttcatgagaggatggacttattggcacgccttgctgaccgactaaagttgtga

SEQ ID NO: 6537 - DNA, 120 bp, Photorhabdus luminescens
ttgcgcacaattattagttatacacgtaagcaatggggggatgctcaggtacaccattacatcactaccctgaaacaaggtattggacgtctcgcttgcggcaatctttcaaggatatga

SEQ ID NO: 6538 - DNA, 255 bp, Photorhabdus luminescens
atgagccgtttaactattgatataaccgatcaacaacacaaaagtttgaaagcgctggcagccttgcatggcaagacaatcaagcaatatacactcgaacgtttgttccctgacatgaccgatagtgatcaggcatggcaagaattgaaggtcttgttaaatacgcggatcagtgaagggatggaaggcaaggtatccaaaaaaagcatcgacgaaattcttaatgaagaacttgccaagaacggacgcgattaa

SEQ ID NO: 6539 - DNA, 201 bp, Photorhabdus luminescens
atgactcatcatacagaccaaaagttggaatttctgtcgctgtcagcaagcgaattggagcctaatacaacccggccgagtttatattcccaaatttactgtgtcctgcaaatcggttatttcaaagttaaacacgctttcttccgtttcgcttgtctgatagacagccagtcggtctacattttatttttagaaggataa

SEQ ID NO: 6540 - DNA, 657 bp, Photorhabdus luminescens
atgtcttatattcaatcgcatttgaagggaaggtgttggtttaccctcggtgacagtataactgaaagagggtggtatcaaccaatagtgaccgaaaatttaggtctaaaagaatggaaaaactacggaatagggggaacatgcctagcccaaaaagatgaaaatgacaattcagccatttgtttaagatatgaaaaaatggaaaacaatccagatattattacaatatggggaggggtaaatgattttggatttaactttggctcctatggaggggtggaaataggtgattataaagacaacacctccttgacatttattggcggtatgaagttattgatggctggaattacaaaaaaatacccattagcgagaatagggtttattataacaacaccaatatcagtacaaagaggcatgaacagtaaaaacgccaaagggtactacttgtctgactattgcagcgtttgtcgggaaatttgcgaaaaatattccatcccatatctggatttattaaaacaatctggattcaatgaaggaaatatcgatattatgaccagcaatagcttgggcacagtgtccgatggtttgcatccatcaaaaataggtatgaccaggattgccccaaaaatttcaaacttcattttatctatttaa

SEQ ID NO: 6541 - DNA, 912 bp, Photorhabdus luminescens
ttgggggtctcgttgttttttatgtgcagtggctatttcttactaaacaacaagcatgaaaatcaggtggattacatcattaataaatccaaagggatattaactgtattgttgttttggcttatcttttattatctgtatgacacatattttatcagtaaatttacaacagtgcctactgttaactttttaaattatgttaatgttagcggaactacatcagatgctacccatttatggtttatatttgcaattgtctctctatatatattaacaccactaatgcgtaacacatttaacgaagcaaatgcaaaggggattaagaaaatactcatcataatgcttataatttctaatcttacattgctgaatgcactaacagattacaaattctctttttccctaatcccattcaatattttgcttcctttccaatctgagggtttgattagtttcttgataggcggatatatagggttaacgaaacctaaaataaaggctttttcctgtaaacatataatacttatggtattttttcttatatcattgatatctttatcaatcatttcatccaagatggggatagccttcttttatgggaagttttataatgtattcctccaagcttcttcggtgtgcctgtttttattcttggttaacttgaatatcagagaaataccattcttaatagatgacattagcaagaatatactaggaatatatcttgttcacaatatttttgttattgaaatacataacgaattcgtccataatttcttattaacaaaatttaattacataaatgtatatatttacataatagcctattctttgctggcttttatcctgtcatatatattatgtgttttgctgcggaaatcaaaaataacatcaaaaattataaccatctaa

SEQ ID NO: 6542 - DNA, 1008 bp, Photorhabdus luminescens
atggttatacaattaacacctgatgatagaagtggatatccacccgttgaaaagcaaatagcaggagatatagtacgtatactaaactttaagcaaacagatgagggtcatacagcatcatatggaattgaatatcgagctaagaaaataatattagcttacgctttggctgtaagtggtattcataatgtatctaaacttcctgatgactattataagaataaagagactgctgagagaatttatcaagaatatatgtctaatctttcatctgcactattaggtgaaaatggtgatcaaatttctaaagatatggcaaatggtttttataagaatgaactggattttgaaggtcaatatcctcaaaacatttggaatgttcctgagcttgaaaataaaccattgagtgcttattcagatgacgataaattattagcactatattttttctctgtacaggaaattccactggaggaaaatcaacaatcaaatgccgcaagattttttaaattaattgatttcttacttaccttatctgctgtaacttcattgggaaggaggattttttcaaaaaacttttacaatggattagagtctaaatcattagagaattatattgagagaaaaaagtttcctaaacctttctttcgaccaccgcagagattacctgatggcagaataggttatttggctggaccaacagaagcgcctaaatggagagtgagttttaaagaacttaaaaataacaaatctaggaatggattttctaatatggaaggggctgcaaaacaaaagtatagttcatttataaaagaggtacaaaagggtaacgctccacagacagcagcaaaaagtattggtacagcaagcggcagtaacctggaaaaattgccgaataatttatatagtgtgaggctaagccaaaaagacagggtaaccttcactcaaaatgatactgacaatacaatgacggttcatagtgttggaactcattataaaaatatatga

SEQ ID NO: 6543 - DNA, 1167 bp, Photorhabdus luminescens
atgttctctcgtcgtgatatcttgaaggcatccgcaattggcgcggcggccgctagcatgggcggtatgattaaaacggctgttgctgatgaacagcacaatacggctgccgcgggtaatagtaaaccgtccacagatgctaaaagtttgtataaatataaattcaccgatagtaaaaaacgggtattagaaaatggatgggcacgggaagctacggtggaacaattcccgatatctgaagggattgcgggtgttgacatgatgcttgaaccgggtggcgtgcgtgaactccattggcatgctgttgccgctgaatgggcatatatgcttgaagggcatgcacgtattaccattattgatccggagggcagaagtgaagtagctgattttggtcccggtgatgtatggtattttcccaaaggtcatggtcattccattcaggcgcttgaagatggtgcgcattttattctgacttttgataacggacacttctcagaatttggcacttttagcatcactgattggataacgcatatgccgaaagaggtgcttgagaaaagtgtcaacatgccagcatctgttttttctaaaatcaaacagggtgaagcttacattgtcggtggcgctatcccgccaaaacttcccctacccgccgatgacggcggattaaacgatgccccactcacccaccgttatgaactcttgaagaacaaacccttcttcgagaacgacgcagggagtgtttatcgagcatcatcgaaggaattccccatttctacaacgatcactggcctcatcgagaccatcaaacctggcgctatacgtgaactacattggcaccctaatgccaacgagtggcaatactacatttcaggcaaaggacgtatgaccgtgtttagttcccacggacacgcccaaaccgcaaaatatgggccgaccgacgttggttatgtgccactgggatttggtcactatatcgaaaatattggtaatgatgatcttcaagtactgattgtgctagataacggtatctaccaagatatttcactttctgattggttagctaaaacgccgtcttatctgcttgcggataacttcaacaataatccctccgattgggtggaccgtcctaaggataaattagttatatcgcgccgtaggagttga

SEQ ID NO: 6544 - DNA, 2934 bp, Photorhabdus luminescens
atggcacctttttctattcctgggaaaacacttactatgacgccagactacctttggaatggcaaaacgctggaccaacaacttgccggatggtctggtatttggggcgataaaacagcgctgatctatcaagaacaacaactaacttaccgtgaattgcaccaatccgcagagagattggccagcggattatttcgtcgagggatccgtcgtggggataacgttatggtacaactgcctaaccgtatctcctttgtcgttacctgttttgccctgtttaggctcggtgctcatccggtgttattaatgccgacacagcgggcacatgatgttcatgctctttgccagattgcacgtccggttgcttacattatccctgattgcttccatgattttgactaccgcgaaatggcacgagaaattgcggcattttgccccgatctaaaacacattattgttgatggagaagcggaagaatttaccgcattggcatccattgatgataaaccagtaaatattcccgctccaagttatggtgatattgccgtattgctgctttcgggcggaacaaccggtacgccgaaactcattccccgtactcacgatgcttatacctatgattttgtgctctccgcccgtttgtgcgcagtaaatacggaaagtgtttatttggccgtactgcctgtggcacataacttcacgttaggcagccccggtattttgggtatcctttcccagggtggaagtgtccttctgagtgataccgccagttttgatgaggccatgccgctaatcgagcaacacaaagtgacccatttagcattagtaccggctctggctcggctctgggaacaggctcgcgactgggaacaaagcgatctttcatccctgcgctgtttgcaagtaggtggtggcaggttgacaccagaactggcgggacaagtaatagcacgccttgggcctttgcagcaggtgtttggtacagcggaaggattactctgttatacccgattggatgatccccacgaggtcatcattaatacccaaggacgtccgttatcagaagaagatgagatcaaaattgttgatgccaatttacaacctgtagtacccggtgaggtaggagagcttattacacgtggcccttacactattacgggatattaccgtgcagagcagcataataccgtagctttcaccaccgatgggttctatcgtactggcgatctggttcgtatgacctcagatggcaacctgatcgttgagggcagaattaaagagcagattaaccgcagtggtgagaaaatttcaacccaagaagttgagaccttgctgctgcaacaccctgatattgatgatgccgttgtcatttcagtgcctgatgaattgctgggtgaacgaacctgcgcctgtttacctaacaacggcaatcaaccagaaccggtgcagatagcggcatttctacaacagaaaggggttcagcgtcataaaattcctgaccaatggttgtttgtcccatattggccacttactaccgtgggaaaaattgataaacgccgcttggtacagatggcacaagcagaacatggccgcccaatgcagcaatatcatgaacaaacagttgttattaccagcactccgttagatttgatcacacatttgctttcagaaggcgaagcacaaccttatatgctctatgaagtgaaaggtgaatggtcactggggataggctgtgcagcgaccatcagtgcggatgcatcgggacaattgattgattcacaaggtaatcgccatccatacgatatcagcacgttgagccaaaaacttgaacaagcgcttaatgcccttcccattcaggattggcgggcctatggaagaacgttatttgaattctcccatatgacatatgggttgccattagcacaacagaacgaagcgttgataaaaatcactattccacagcatgaattacgcataactccaggacaggttctgatacgaacgctcgaagagagtcaactcaccatattgagggaaaaaattagccaggttgatcaattaggaacacctgttttcccgtggacaaaagatagggaaattatcagtacatcagacgcggcgaaacgttatcaggataacgtcgccaatgcggttaaggacattgcctcgggccactatcaaaaagtgatcctgtcacgtcgagttgaacttggctcggatattgacatgccacacagctactggttaggccgccaagctaacacacctgcccgctctttcttcttacgtgatgaagatttctctgtttatggttttagcccggaaaccgtagttgaagcggatggttcaggttgggttagcacgcaaccattggctggaaccagagcattgacacatgacaaagatcaggatcaacgattgagagcagatttgctttctgacccgaaggagatctctgaacatgctgtttcggctaaattggcattagaggaactggcaccgatttgtcaggctgacacactttgtgtatcagagtttatggcgattcgtgaacgaggttcagtacaacatttggcatcacgggtaaaaggattactacaaacagacaaaaatcgttgggatgcgttcatcgccctattcccggctgtaaccgcttcggggataccgaaaaaaacctctttacaggcaatttcacgttatgaaggtgaaccacgccggctttatagtggttgtgtcatgttattagatagctcaggtaaactggatgctgcgctggtattacgttctctctatcagcatcaaggtcgctgttggctccaggctggcgcaggattggtcagagattcaaaaccagaaagagagtggcaggaaacttgtgaaaaacttgactgcattatgaaatacgttcgcccttgctctggtaaaaaagagtaa

SEQ ID NO: 6545 - DNA, 777 bp, Photorhabdus luminescens
atgattcgtccttgcttgacgactcacggcaaacccaaatacacgctgttaatctgcccctttgctgggggcagtaccagtgcattccgccactggtccacactagaaaattcagatatagcggtttcactcgtgatttaccccggacgagacagccgtatgacagaaaaggcggccaccagtattgtgccattggcgcaatcactttctgacctgatggtgtcattcacccccgcacagagagagaacctgatacttgtcggtcacagtatgggggcccaagttgcttttgaaacttgccaacgccttgagcaacaaaattgttcacccaaggcactggtgctttcggggtgccatgcacctcatcttcaatcccgccgccaacttagcggattacctgatcatgaatttattgaacaattgattgatatcggcggttgtagcccgattttgcgagaagatcctggcttgcttgcgctgttcttaccgatgctacgggctgattttcttgctacggaacattatcaccggtttattcagactgacgcggtaaaactgcaaacaccaacattgctgctttatggcagtgaagataaagaggcttctgcgatagaagttcagcagtggcagcaatggcttgcagacggagaacaacaccgttcatatcgccacaaggagattgtaggcgaccatttttatattactcaagaacctgagaattttattcgtcacattacacaatttatacaatatgtctatttacaggagttcgcataa

SEQ ID NO: 6546 - DNA, 1098 bp, Photorhabdus luminescens
atgataaagccacggcgggttctgattgtcggttcgaaatttggcgaattatatcttaatgcgttcttacaacctcagtctggtctggaattagccggtattttggcacagggtagcgctcgttcgcagcaacttgcctgtgattttaatgtgcccctattccgctcactggatgaactaccagatgatattgatattgcctgcgtggtaatacgggcggaggttattggcggcaaaggcgatcagctcactcaggcacttttggcgcgtggaatttctgtcattcaggaacatccccttgatgccgaagctatcaaaaaacatcaattaaccgccaacaaacatgatgcaatgttttgggtaaatagcttttatagccaatgtcatgctggaagaagttggttacatgcggcgcggcaaatcactcacttatcacagcaacgtccggtaagtggttatttgacaaccagtcgccaattgctattttctgcgctcgatctgttgttacaggcatgtcattgtccggaacagatggagatagtttatgtcggtcagcgaagcggtgcatttcattgctttgaacttagcttcgaagggacaaccgtaacattaaacgtgcaatcctatctggacccaagagatcccgatatgcacaatctggtgatgcataaaatgacgctgatctggcctgtcggttatcttacgcaggaagccagttacgggccggttatctggacacccgtccttcatgcacctgatcatctgaataacgaacaaagcctctacctgaatgccagtcagccggatgataactatctgtaccaagcgacatcacaaattctttgtccggcaaccaaaaactggatgacagcatttgaatgtgatggggctaaaggtgtggcatttttgctcaataccttaggttctgtattgaacggtgccctttgcccaccggcttttgcttacgattaccaactgcggctagcaggtttatggcaacaaattttgcgcattatgggagagcctgttactcaggatttatcgccccctgtttggattgagccagcaaaattgatgttaactaaggaagaatgttga

SEQ ID NO: 6547 - DNA, 11727 bp, Photorhabdus luminescens
atgactgatttaacgtctcattacgataattgcgatcctgtcgcagtgattggccttgcctgccgctttccgcaggcaccagatagcgatactttctggcataacctgcaacacggagctgagtgtactgttccactctcccgtcaaacattattagatgcaggtattcctcttgaagtcattgagagtgaaaattttgtcaatcgggcagcgatattagagaaagcggaacaatttgacgcctcgctgtttggttattcacggcaggaagcggagatgctcgatcctcaacagcgtctttttctccagaccgcttggcatgctcttgaacatgccggttatgcgccacgtcatgtcccgttgaaaaccggtgtttttggtagcagccgggtcagtacttggccttcatggtcacaattttccatgaccgatgttggcaaagttaaagggcttcaagcgttaatcagtaacgataaagattatcttgcgacacgtaccgcttataaattaaacctaaaaggcccggcactgacggtacaaacagcgtgttcaagttcactggttgctgtgcatatggcttgtgaaaacctgcgtgccggtgagtgcgacatggcgttggctggtggtgtggcagtttctttcccgcaagaaagtggttacttgtatcagccgggaatgattttctcccctgatgggcattgccgcccttttgatagccaggcaaatggcacctatggtggcaatggcgttggtgttgtcacgctaaaacgcctaagtgatgctctgcgcgatggcgatcccatcatggctgtgctacgtggcagtgcaattaataatgatggcaatgagaaagttggctttaccgccccttcggtcaacggtcaacgcaacgttattatcgaagcactccaactggctgatgtcagcattgatgatgttggcatgattgaagcacatggtacgggaacgcctcttggcgatccgatagaagttgacgcgctacgcagcatattttctgatcgtagtgtggcgttaccgccttgctatcttggctcagtgaaaagcaatatgggccatcttgatacggctgccggcattgctagcttgattaaagcggttttgtctgtttggcatggctatattccaccgacgatcaatgttcagcaacccaacccggctttacggttggaacaaagtccattcaggctggcaacacaagggcaacgctggacacaagcattacgtaccgcaggcgtctcttcgtttgggattggtggtactaactgtcatgtcgtcgtgcaatcattgccggaagaattacgtcgtcaccgtgtccatcatgcgcagacttcgcctttattgctctctgctgcttctgaattttcattacgtcaattggcccaacgttatgcggctgcactcaatggtgcaccagagcatcatgcagatctggcttggaccgcattacagggacgtgatttttcattaccctggcgtttagcattggcgctaacgccacagagtgctgaaaatttatccgcttttgccaacaagaaaccaacacaaaatgttttcagtgggcaaatcaatagcgaaagtaaacaactttggcaatttagcggtcagggttgtcaatggtctggcatggggaaagcaatgtatgccagctctcctgttttttccgctatgttggatcgttgctgtacagcctgtgcatcagagttggcattgccattaaaagcagtcatgttcggagagcatgatgctgcattagccaccaccgaatacgcacaaccggcaattgtggcgcatcaaattgcactggcggcacattggcaggcacttggattaaagcctgattatgtattggggcactcggttggagaatttgccgctgccgttgttgccgggattttcacacctgaacaggtgatgccgctcgtggcggtacgaggcaaactgatgcaaaactgctcccaagggggcgcaatgctggcggtttttgccaatgaggaagaagtacttccgttcgttcattcgctggtattagatttggcggtttgcaatggcccacaacactgggtttgggccggtacagagacggaaattgcgaccttggcacaacgcttggaacaacagcagattcgttgccaacgtctaaacgttgcctgtgcagcacattcagccatgcttgatggtgtactggaggcattttctctgcgttgtagccagttgcaacctgcattgggggaaattccgctgatttctaccctgaccgccaatattgcaacggcggcacaattaggttcaccggactactggcgtaatcatatgcgtcagaccgtacgctattacccggctgttgagtttgcccgccagcaaggggtggcattatttatggagatgggggctgatgcacaattaactggcatcgggcgacgggtcagtctgccacaggaatcttggattgctggcatacagcgtcaaaactctccagagacagctcagcaaacggctctcatgcaactttactgtgctggtgtgcatcttgactggccgcatcttttctcgcttactggggaaaaatgtcatgctcctctctatccatttgatgagcagcattatcgcttccctgcaaccaaatctgtgcagcccacaaccaatatcaatgctggacttgatgtaaatgctctgctcgatcctgccattgagcaaaaccctgatgctgcaacactacgtgagttgtataccgatgcattggtatatcaatgtcatgggcgtgatactgaacaaggtttcagtgctatcgacactattcgggctggtcgtctgcaacctcgttggtgccctttgttggaacaattgctaacctattgcgtccagcaaggttattaccgggaagtttctgggccaacagcaagtaaaatgtattgccctgatcgtcccctgccatatgccaaacgcagattattagagtcacgtttattcaccgcttttccggctttgatttatgcgggtgagcgtctatttgccctgttaagcgatcgttgtgatctgccgcgtcagtttgtatcaacccaagctgcgaccaactcatggcttcccgcaccacaaccgtgtcccaacacccactatgccctacactggcgtacaataaacacagataacccaagatcttcaacggcatatactctccgttcttcaacggtgaatgacgagatagttaatcattggcgtcaggcgggtattgatttacagccagaaagcggaaatatcttattactgcttaccggcagtgatgtacttgaattatgcgatcaggttattaccgaactaaaacgtgatgaagaaataccattaaccgttgtcacctgtggcgctcaaccggaaaccaccttatcaccagagaatatcaatccagctcaatatgctgtctgggcattgttacgtgtcgcagttgaagaatatccccatcgtcgtattcaagcgattgatattgctgatatcaacgatgctgacgctttgtcattagcgcttggctatttgagtgaacataaccgttggctgagagttcgtggcaatcaagcctcggtgccggttttacaacgtcaatccttacggctttctcaacagccgatgtcgattccccatcagggttggcatatcgtgaccgggggaatgggagggattggtcagatttccgtccgttggctgttggctcaaggtgcacgtagaattgcagtatttgcccgtcgtcaacatgcggattggggcacttttgttcaagagtcatcactgaatactgaatgtgagatacgctggattaaagttgatgttactgatacgccagctttgttaaatgcagtacagatgctggcacaagaggatggtatcgccggggcaattcatgcggcgggtatcgctgatcatacccggttggcagaacttgaacctcaatgtctgtcacagatgttatcggtaaaagccctgagtgcatcggcgttgcaaactgctcttaagcaacataatgcacactatctgttgcttcattcttctgccgcatcaatgttaggcgctcaaggacaaggtgcttatgccgttgccaatgcttacctggaatctttggcgctgacagccccgaatccgttgatagtaaaagcattggtttggggtgtttggggtggcgttggtatggcccgcgagcggcgattagtggaaaaattggcacaagatggcatgttaccgttcagcgtcaatgaaggtatctggcattttaatcaatctctgcgcagtgcatctccttgttatctggcgatacggttggatgagcatcaccctgatatttcgcggcgtttacaggctgatactgaccataaccacccagtggcacccccggcaccttcacactctgtcgataacacgttgtatcaggacagtgaagaacggcttaattggttgcgtcaacgtgtcgctgcattgctgcggttagaacagcctgaacgtttggaatcgcaacaggacttactgcaatttggtttggattccttgttgtttctggagctaaatgcagtgatccaccagcaatttggtttcagactcactgccgaattggcttatcagaatatgaatttagaggggcttaatcggcttattggcgacgcgttacctgaacaacaaataaccggctctcagcctgagatcattattgacagtgcccaacgtcatgctccattcccgttgacgcccattcagcacgcttactggattggtcgtactcaggccattgattttggcggtgttgcgtgtcacgtcctatttgaatgggatctgacactagatcgttttgatattccgcgttttgagaaggcatggaatgctttaattcagcgtcatggcatgttgcgcatggtcgtggatgaagacgggcaacaaagaattctgcctgaaaccccttggtatgctttatcacaagatgatttgcgtatgctggatgaaacagcttgccaacaggcactggttcagcgtcgtcatacgctttcttaccaggtcccgccggcagaacagtggccactgtttgaagtttctgtttctctgttaccgaatgcacgttgtcgcttacatatgaatctggatctgttgcagtttgacgtacagagtttccgaatcatgatggacgacttgcaacgcgcttaccaccagaagccactgatcccgcaggtgtttactttccgtgactatgtgatggcggaacaagctcaacgggcaagtaaagagtggcaggcatcatgggcatattggcagcaccaattaccttcgttgcctccggcaccaagattgccgctgaatccacaattgcctcagcgtcgtcagccacaattcaccacttatgaaggtcgattagcacaatctgattggcaaatgcttaaacaacgctggcaacaatggggtgtgacgccttccgccggtctgctgacgctgtttgctcatactctggaatggtatagccgtcatccgctgtttactctcaacctgacattctttaaccggcaacctttccatccagaggttcaagatctgattggtgattttacctcagtcatgttgatggattttgatttacgtaaggcaacttccctgcgtgccagcatggagaaaacacaagctttgctatggcaacggctgagccataactatgtcaatggtgttgaggtattgcgagaacttggccgccaacaaaatggtgaaactcaaagcagacaaccgctgacgccggtggttttcaccagcatgttaggaatggcgcaagaaggcgtcgccatcaaacaatcgatcactcagttactgggagacccggtttttgttctgagtcaaaccccgcaagtctggctggatcatcaagtcatggaagtagatggcgatctactgtttaactggtactgcatggatgatgtattagcaccgggggttattgaggcactgtttgccgcttataatgcgctgttagtgcaaatttgctgccagcctgactgcatagaacagtatgatcttcatatccccccttccggtcatacccgttatgacttctggccgcaacaacctgaattgcatcaagctgaacaatatttgcgtgccaaacctgaaatacggttggcagaaattcagccacgtcaggatgacacgcaaggttataacttctggctggtggcagaggacaatttgtcattatcgctgccagaaccattagcgataaacaccgataagttaccgctgcctgagttaactgaacaacaggcatttgagcgctcttggcagcacattgagcagcaagcgttatttggcctgagtcagacattactgcgccataatctgttcacttatcctcagcaatgccactctcgcacagagattgaacaacatttacaacttgcgccacagtatcagcgtcttcttacccaatggctgacgttattaaacaaccaaggattgattgaaaaaactgctgatggataccgttgtttgcaaccgcttaatcgtgttcctgctcctacggcaaaactggacaatgctgtgtggtgtcaaacgattagccgttatatcgcgacatgtatcgagcaacatgatgccctgcttgccggacgaagtaatgcgttggaactactgtttgccgataaacagatcactgccagcctctatagtgagaatcccgcgttacgatgcctgaaccaaacggccgctgaaattgtccggcaattgagtcaggtatctgagcatttcactgttctggaagtcggtgcaggaaccggtgcaacctcagcgaaggtgcttgaacacaatgcacaatcgattgaacgctatcactttaccgatgtttcgccgctatttctggatgatgcccgccagttgcttaatcactatggcgaaaccgtaaaatttgcgctgttcgatattaatcagcgtattgattttagccaacatcctgcatccggttatgacctgattatggcggttaatgtgttgcatgatgcaactcatctgcaaaacaccctacagcgcctgtcacggttactgaaaaccggtggatggttactgattattgaatcaacgaaacgcgaaagcgctatgcaacttgctagtgtcggatttattgaaggtattaatgcctggagtgatgatcgcggcgatagtgcattgatggatcttgcggactggcgtcagtgcctggagaaatccggttatcgggtttcattggaatggccggggcaagatgggccagaactgcatcaacaactgattctggcgcgggctgaacggcaagcacggctcaatgtcagtgaaatagcggcacaattttctactttgccttactcattgcatgttcaacagcaagaacaattaccgctgatcgtggctgctaaagagagcgtggcacaacgatcaactccagaagcagtacaaccggaaacagaagatgaccagctccatgatatagaacagcaggtaatcacgctctggtgttcactgcttcctcagccaatacagcgccacagtgactttttccaaagtggcggtgacagcttaattgctacccggatggtggtgcaattgcgtcgtcaaggttacgaacaggcaaatctgcaacagctttttgaacatccgaagttgagtgagttttgccgtactttgcggacaattgaaacagttgaaacaacactcgctacacaggctgttccaattgagaccaagccagcatcggagcaaacgctgccactgactgcgttgcaatatgcttattggttaggcgaaagccaactgtttcagtttggtaacggtatcgcgcatttctacgctgaactggctatcaacgatcttgatctgcctcgcttcattactgcctggaaccgtgtggtgagtcatcatgcgcaattacgtggttatgtgaaggatgggcaatatcatattctgccggaagtgccttgctataccccgacggtaattgactgtcgtaacatgatgcctgctcaacgcgagacaaaactcgcggatgcccgcgatatcctgcgcactaaaggtgttcctagcgataactggccgctgtttgatttgacgctatatcgtactgatgaccggacgcacttattacatttgactatcgatctactggttgctgatggtaaaagtttgacattaatcctacgcgatttgcaacgcggatatcaggaacctaactggcagccagaaccaccggcagcaactattagtgactatattcaagcactggaagatgagaaaacaggggaagcttggcagcaaagccgacaatactggcttaatcgtttaccctatctgcctgatgctccagagttgccactaaaagatcatcagtcacaagaacttaatcaacaatgtctgacgggatatattagtccgcaacaatggcagcgtttgcaacaacgcgcagcagaataccgagcttcaccatcacaggttatgctgacattattcacccatattctggcggtatggagcaacagcgagcatttcaccatcaatgttctgcatggcaaccgactgttaatgccgcaacattgcgatacgttggtcggaaatctgtccactacatcattgttggaagtggatttacgccatatcactggattcagtgatgcggtaagtcagatacagaaacagtggttagcagatctgcaacatgctctatttgatggacaactggtactcagagagaaaaatcagcaccgtcacaatctaaacgccggtatgccaatcgtgttcaacgatacaaccggcactgcgggtcgggggccatcagggctgggaacgctgaatctctttggtgcgcaaacaccgcatgtttatctcgactgtatgctgatttctggctcagagggtggcgttatcattcaatgggcaattttgccgcaactgttccagccacaagttgcagaaaatatgtttgctcattatcaggctagcgtcgccgccctgcttgaacccgattatcaatggagcgcaccactgccagagtggctcccggtaaatgatcgaattttgtgccaaaacagtaatgcaacaacgcgtgtctttccttcccatacgctttgttcgttaattgaacaggcagtaaatcgctacccacaacgtatcgcggttgttgatgcttatcgtcaaatcgattaccgcactttgtggtcacaaagtctggcgctggctgctcatctacaaacacaagaacatcagcattcgtcactaattggcgtggtgatggaaaaaggttgggaacagattgttgcggttatggcgattttattggcgggacgggcttatttgcctattgatgccagctacccgcaacagcgcatccatcagctattggcatcaggggaagttgatactgtattaactcaacctaagtttgctcaacaaatgagttggcctgatagtgtacaggttatctcgctggatgaactattacttaaccgcttgccgaaaaataccggtggacaacgcttgtctgcccatcctgaggatttggcttatgtgattttcacatcaggttctaccggcaaaccgaaaggcgtgatgatagatcatcaaggtgcggttaataccattcttgatattaaccaacgcattgctctcaatgaacacgatagcgtactggcgatatcagaattgacattcgatctttcagtttatgatctgtttggtactttaagttgtggagcaaaactggtgattccttctcccggtgacagccgacaccccgacaagttattgacgtggttacaacaagaatccgtcacagtttggaactctgttccagcatttgtacaactgcttgaggaatacgccagagattacccacattccctgaatagcctgcgttgggtattgatgagtggtgattggataccgaccagtttaccggaaagattatctgctcttcaccctgcgttgaatcttctcagtttgggcggtgcaaccgaagcatcaatttggtctattgcctatcctattgctcaggttgatccaaactggcgcagcattccatacggaaaaccactggctaatcagactttctatgtgctcaatgcaacgctttcgccctgcccggtttgggtaacgggggaactctatattggtggacaagggttagctttaggctactgggctgatttggaaaaaactgcccaagcctttattacccatcctcaaaccggtgaacggttataccgcaccggtgacttaggtcgctggcggccagacggtaatattgagtttctggggcgcaatgatcaccagattaaaattcggggctaccggattgagctaggtgagatcgaacaccgcttatgcgagcacccggatatacaacaagcattagcgtttgcacatactacgtcaaccggtgcattgcaacttgtcgcgggtttgcgtttgtctgatgaaaccccgctatctacagaacttttaccggttctgcctcattggttgcaacagaccttgcctgtttggatgtgcccacagcgatttatcattcttgatgcgatccctgtatccgacaacggcaaaattgacagacgcgcattagctaccttggttgaggtggcagcacaggaagtcaatcttgcatcgtcggttgctctcagtgtgacagcacaagctgtgttgaacctttggcaatcagtattggaacaacaagctatcggtgtgcatgaaagtttctttacgctaggtggagattctctggcggcggtacggttaatggtgaaaatcaatcagacgtttaaccgtcaatatccgctcagtctgctacaaacttacgataccgtacactctttggctgaatttattgaacatcagccagaaagcctttgccaaggggtgatattgaacaagggaagcgttgagcaacctgccctgtttatcgtccatcctattggcgggcatttgttagggtatcgtcatttagcggccagtttcggtgaccaacgtatgattgggttggcattttcgccagataatttaactccagataccccttccgtggcggcgttggcggctgactatatcagtcaaatccgcgccttccagccacaagggccttatgctttggcaggatggtctttcggtggattggtggcttatgaaatggctcatcaattacgagcgatgggtgaacgcatttctcaatgcatcctaattgatagctttgcgccaaatgtgcgggccgatttgacgctgaatgaaacattttgtcatcgtcatttcctgctcgatttgcaggggcaattccccggtctcactctggatgatcatgttatcgctgccgatacggagaccttccttaatacgttgcacgctgctttgccacaatctgcacagattgatagctcgctgaccgcactttatgacgtgtggcaccataacttaaatgcgttgcttgattactgtccaccgcagacttcacagcctttctggcttattcgggcagcacaggcactacctgattttatggattatctcgatccaaccaccatcgcctcaatcgatcttggctggcaggcttttgggccagtccatgtgacacaacttgcgggtgatcattacaccttgttccaacatcaacatgttggctcactggttacctgtatgaaagatatcttgaattcagtatcaaccactaatcttgttaaggagaacatatga

SEQ ID NO: 6548 - DNA, 6150 bp, Photorhabdus luminescens
atgcacaaggattttgtctctccagattcactgcgtcagatcatatctggcctgtttactcaaaaaaatacactggtggatgataacgatgatttaattcgcaaagggctggactcaatgcaaatgatggcattgttaaaccagttgaggcgtcagggatatcgcgtcacccttcgtgaactgtatcaaaaacccacactgtatgcctggagccagcttctgcaacgtcatgcgcctgttactcatacagcacttaagcctgatgtggcgcagccattgattgcggatgctcgtccgttcccgttgactgcggtacaacatgcgtattttgttgggcgttcgccagaacagacattgggaggagtcggttgccatttatatcaagaatttgacggtatcgggttggagcctgaaccactggaagcggcaattcataagttgattcagcgacatccgatgttacgagtgcggtttttgcccgatggtcgccagcaagggatggccgatgcttattggaaaaaattaacggttcatgacctgcgcagctttacagcagaagaacagcgacaagcgctgaataatatacgtgaacaactaagccatcgggtattacaggttgaacaaggggaaacgttcgatattcagctaagtctgtttggagagaatcagcaccggttgcacgctaatattgatttgctgatcatggatgccgccagttttagcctgttctttactgaactggcggcattaattgttaaacgcaacctgccggttattccttctgactacgatttttgccgctatttggtgcaatatcaggcgcaatttgcgcaggctcgacaagaagcagagatattctggcgtaaccggttagatacccttccccctgcccctcaactccctctggctaaggaaccttccctaataaaaaacgtccgcattcagcgcagatgcttccgtttggctcctgaatattggcaacgttttaaacaacttgctcaacaaaatggtgttacgccaacgatggcattggcaaccgcatttgccggtttattatgtcgctggaatcatgctccccgtctgttgtttaacctgacgttgtttgacagagcgccattgcacacggaagttgacaacctgttggccgactttactaatattttgctgttagatattcccgctgataacttgccgttctgccaactggctcaagacgcgcaagcaacatttgctgaagcttacgaacaccgccattggtctggtgtagaagttttacgtgaacttaaaaaacgcggtagtcatccacatggtgcgccaattgtgtttaccagcaatttaggtcgacctttatatggtgaaaatacccgtgatgttctgggaaaaccaagttggggaatatcacaaacccctcaggtatggctggatttcgttgcatttgaacatgaaaacacgctgaatattcagtgggatagtaacgatgaactctttcctgacgggttaatggataccttatttactgcctatcaggggttcattggaaatttaacggaaaacgctacacagtggagtaaagaattaccggatctgatgcctaaatcgcaataccaactgcggtatcagatcaataacacaactgaacctttgccggatgctcttctgcatgaaggggtgtttttgcaggcagaacgcacaccaaatattgttgctttggtgactaataataaggaaatcagttatggtgaattaagtttggccgctcgccggttagcaaccgtgttgcaaaaaatgtcggttataccgggagatcgggttgccattagcatggaaaaaagtgtcggacaaattgttgcggtattggcgatactttatatcggcggcgtttatgtaccggttcctgttgatcagccagtaaaccgacgtcgtgctatctgcgaaagtgctgggattcgcgtcgttatcattgatcctgaacaacacattgatcttgaaaaacaaggtgatgactggtcacaagatgtgcattgtgtttcttggcatcaggatgagcaatggccgcctttggcaaacatggttaagcgtgcggttactgatccggcttatatcatctatacctctggttcaaccggtataccaaaaggcgtcgttatcagccaccagagcgcactcaatacctgtttggatatcaatcgccgtcatcaggtccaaagtagcgaccggttattggcactctctgctctacatttcgacctctccgtttatgacattttcggtattctcaccgcgggaggtgcgctggtattaattaatgaagcacagcgtcgtgacccatcaacttgggaaatgctgatcgcgcgtcatcatgtgacgttgtggaatagtgtgcccgcactgttcgatatgttactgacctattgcgaaggcatggaggtcgatgcgccgaaagcacttcgtactgtgatgttgtccggggactggatcggtttgtcactgcctgaacgttaccgcgccttcaatcctgatggtgttttgagtgcaatgggcggtgctacagaagcggctatttggtcaaacgaatatatcgtcaaagcagttgaagcacagtggcgctccattccgtatggctatcctttagctaaccagcgctaccgtgtcgtgggtgaagatggtcgtgattgccctgattgggttgtcggtgagctttggattggtggctccggtgtcgcattaggctactttaatgatgaagaacgtacttccgctcaatttgttgtcgatcaaggggaacgctggtaccgcaccggtgatctgggttgttaccatcctgaaggttggcttgaatttctgggacgtcgtgatagtcaggtaaaaattggtggttaccgaattgagttgggggaaattgatgcggcccttaatcaagtcactgggattagtaaaggagtggcactcgccagtggcgaaaaagagaagtcgctagtggcgttccttgaattagaaggtgattctttatgccaacggatcaatcgtgcaccgcagttatccgctggctatcgtgagctgttccccgcaatgcatgcaataaccgcagatagcagtgaacctcaagttgccatgttcctgctggaacatctatctcgtcacggtattacctttacttcaccgcagtcactgacagattgcttgaaacactatcagccccaagcggagtatcatgactggtttgcccgtatgttggcatatctttgccaatgtaaggtactggttgaatctacaccgtatatatatcaggccggatggttacccgctacatccaatgatcaggcgataggtatcccggaacgttggcacactgtgttacgcgatgttcttaccgggcaacagacggcggttgcattacttgacgatccgcaattcgcaccggaacaacaattgtttgtgttgccagaaacccagcagtggctgaccgggttgcaacaagtcatcaccatcctctctcagagattacaacgccccgtgactttgatggagtttgatgctcgcagcggtcgctgtgcgcagtggttagcagagcatattactgatcagcatctctgttatctcggctttgaacgttctcaggcactggtcaatcaggcgcaaacacggttaagcggttatgctcatgcatcagtacaatattggtctaaagtgcaaggttggtctaaacaagttcctgaatcgctgcaacatcaggctgatattattctgctgaataatgtattacaccgggaagaagatcctgcacgttgtctcaaggaattggtaccatttgctcaacccggcgcgttgatattggcaatggagttgcaacaggcatcgtctctttccctgattacgactgaattgctttcacctcaaggtattcaattacgttctgcgtcacagtggttattgttattgccacaactattaccactactaccactacaggctgaaacgccaattaccatcggtaaccttagtgtgttattgatgcaaacaagtgacagcgtaactattcctgatcgggaaaaaattaagtctgtgctggcacaacatctgccgggatatatgatcccacagcgcttgcatattattcctcgtctgccattgacacctaacggcaaaattgatcgtaaggcgctatcgcaagaactacagtctgcgataaaaacagagacagcaccgcgccagaatgaaatggccttgttgaatgcggtggaacaaaccgttgccggcatttggcaacgcttgctcaatacagaacaactgggctgtgacagtgactttttccaacttggcggtgatagtcttctggctacgcgtttggttggtgaactgacacaacaaggctttaaaggtgagctgggccatcttttccgtaacccacaattggcagcatttgcggctacactggttcctctggctgaaacttcatcaacagagtgcgctctgccgaaagagcaaaatgagtaccagcctttcccactcacggaagttcagcaggcttatttggtcggacgccatccgggtttcgctttaagtggtgttggcgcgcatttctttattgaataccagatagagcagttagatgttcaacgtttaaatcgggtgttaaatcgtctgattcagcgtcatcccatgctcagaaccgtggttgtcaatgggcagcaacaggcattagaaaatgtcccgctgttctccgtcaaacaacatcaattcaccaatattacgcaggcagatacattacgcgaacagctttcgcatcaagtattagatgccagtagctggccagtgttcgattttcagcttgcgcaagatgatgggattgtctcccggctatttgtcagcttggataatctgctattagacgggttgagcatgcagatattgctggccgagttagaacagctttatctcgacgagcagcatgaattgccaccattgaaagtcacattccgggattgtgtactacgccagcaacaggcaccagcacatcagcgttcgctgcaatattggcaggagcaagtgaaaacattaccactggcaccacaattgccactgcgtattgccccggaaaaggttcaatcgccacgttttgtgcgctatagcgatcggctatctgcatatgaatggagccagttgaaacaacatgcagctccttatcaaataacgccttccgcgctattaattgcggcttatgcagcggttctttctgcgttcagtactaaaccggagttaacgctcaaccttactctgttcgatcgcccacactggcatgaagatatcaatcacattttgggtgatttcacttctctgtcattactggcctggcacccggagaaaaattggttatcaagtgcccgtagattgcaacaacagttatggcaggatctagatcaccgtcacatttcagcaattagagtgatgcgtgaattggtacagagccgtagcgccgatgcggccattatgccggtcgttttcaccagtgcattgggaacacaccaagggcaattcctttcgcattcatcgtggatgaaacccgtttggggtatttcccaaacgccacaaatctggttggatcaccaggtttatgaatctgataatgaactttgtctaaattgggatgctgtcgaagaattgtttgaaccacatcagttgcaaaacatgttcaatagctacatgacgctattgcgtgcccttgcggctcagccagaaagttggcatgcagcactggaacaattgatgccacgccagcaatccgtgatggttgaaaatactgctgttgccattgcgccatcattgcgttcagagggatatgaccctcaaatatgcagtaaaattcaacgtctgttcttgtccataacaaatcatcctattaacgcacaacaaaacttttttgaggcaggagccagctcgctacagctaattcaattgcacagcaaactacaacatgcgggtttttatcatcttgccgtgaccgatttatttgcttatccaacaccagagacgctcagtttgcgctgccggaaggattcccacgacggaaatcgccagtcgattacccctcgtcagcgtcaacaacagaagcgtctgcaacaacgggaaaaacgtcataaaggagctgcataa

SEQ ID NO: 6549 - DNA, 1803 bp, Photorhabdus luminescens
ctgcttggcggggagaaaaaaccgggacaggagcaaattatcatggggctatttaatcgtctccagcaacatctatcaccaaaactacaaagagtttggtttaagggattgttatataaacagtttgataccgttgcgattatggctcaactggctattgctgcctgggctattacccatctaggggaaagtgacaatcctatgttgccgcttatcactttgggattactggttattttattgttgctgcgatttacttttatggctcgcgcattacgtaaactcaccattgccgcctatggtttaggcatagaaattcgtcgctctctgctacaacgccttgtcagtatgtctgtcgccactattcggggattgagcgctggaaaaatagcgttgacgttatctgaagatgtgcaatggcaggaaaatcagtcagcctataccacaccgcaaatcgcttgtcaggtgatgatgctgactctcatctacttagctttattctggttcgattgggtggttgccggtagtgcattattagtgctgatggttggaatgttcatcttgggagctatccgtaaaaaactgaatgaaatattgcgcttgcgtgccactatgatggctgaggtatccgaagctatcgttgagtacgcccaaggtatgtcctttattcgtgctgcggcagcaaccacgacggtagaacagcgttttgaccgcgaaatcgaccaattacgtgtcgcattccgccgcggggtattcagaagtattccgctactgagcctgttttacatcatcattgataccagcgtggtcgttggcattctggctggtgctctgcgttttaattcaccagaagcattaacactttcagaaatacttatcactattctgttgttgtttgccacgattacccctctacgtgggatcatccccttactcaatattacggccttaacgcaagtaggtgaaacccatattgcagagatagaagccgttgcaacgcaagcttccgggccactagctgcgccagacaaatatgatgttgaagttaatgacatttcgtttagctatccaggtaccaatcaacccgctatccaaaatgtgtcgttttatgcgccgcaaggcagtatgaccgctattgtcggacccagtggcagtgggaaatccacactggcttatctattactctctttctatcaactggataagggagaaatccgtctgggtggaaatgatatccatcattaccaaacccaagcattgtatgacaccgtgactatggtatttcaggaaaccgcactatttcaggataccgtcgctaacaatctccggttgggtgatcccaatgcaacccaattagaactggaacaagcagctcgtcttgccaatattcacgatacgattttggcattaccacaaggatacgatactccgctaggcgtggatggcggtacgctgtctggtggcgagcgtcagcgccttgccattgcccgtgccattttaaagcaatctccggttttattccttgacgaagcgacggcttctctcgatcccgaaaacgaacagttgatacaacaggcgtttgattctcttacccggaataaaacagtttttgttatcgctcatcggctgagcacgataacccgcgctgaccagatattggtgatggatcatggaaccctttgtgatagcggcactcatgacgaattgttagcgcgttgttcactttatcaatctctttgggaaaaccatctcggctcagaagagcactggcatctatatccaaataagccaaataaggtgtaa

SEQ ID NO: 6550 - DNA, 1719 bp, Photorhabdus luminescens
atgatgcgcccataccgcacgttgagttacgttgctattgcacttgccattctttccgccggcctgcaaatattgccggcggcggttgccgggctcatcacccaatctatctatgacgggcaatatgacacgctattgaattatggcgttatgttattgggattcacgtttgccgctatgttgacctttagtggttcaacgttttttgctcatttggttgctgccgatgtgcaagctgatgttcgccgcaatatcagcagtaagttgaagtctgtacctttgggctttttcatgctgaccgacagcactgaaataaaaaagatgatgctagatgacgtcgaacagcttgaagatggtattgctcatatcattccagagatgtctgctaccttatttggtccattgatcgcattgagtgtcatgttagccattgattggcggttagccttggcggccttcgcgccgactttgggtgcctgcttgttatttgtctatattcagataaaagttcaaacgacaactcagcgtttttatgcagcccaaaaccgtattgcttcaacaatgggtgaagttattaatgcgattcctgtggtcaaaacctattcaggcggcaaggttgcgttgcaacgcgctgagaaagcgtttactgccctgactcggattattgacgtttgggttgagaaagtgcaggtcaaatccagccggtttttcgtgttatccagtgctaacctgttgtttgtcctccctttggcggtctggttattgaaccgacaagagatcactttattcgaattgactttctttattttggcggcaatggcattcggtaatattgcctcatccatgttcgctgtgatgacacgtttgcaacagcaagaggcgttgatcacacgttatcgttggttaatgaatcaacctgaactagcgccttgcacccaaagccaaacacccgccgatcacagcgtcgccctgcacaatgtcagtttctcctaccaagataagcaggggaatgcattaaataacatttcattttctataccggcgggcagttcattagctttagtcggtgccagtggttcgggtaaatctactgtagcgagtcttatcgcacgtctttgggaccctcagcatggtcaggtgactattggcggtgttgatatccgtaatatggatgaaccgacgctacgcaataacgtctcttttgttttccagcgggtgtttctgttcaacgatacggtggctaataacatacgattagcccgtcctaatgcctcactggccgaagttgaaacggcggctaccgcagcgcaagctcatcaatttattcagcaattaccacaaggctacgacaccgtactgaacggtggcgtgagtttatcggtaggtgaaaaacagcgtattgccgttgccgccgctattctgaaaaacgccccaattcttgtattggacgaagctacagcctatgccgatccagaatgtgaaaaagagatgcaacaggcactcaatgccttatgccgcaataagactgtgattgtcattgcccatcgtctaccgactatccgtcatcttgatcgaataatggttttagataaaggacagattatcgaacaaggaacccatgatgaactggccgcacagcaaggtgcatacgccagacagtgggctgcttggcggggagaaaaaaccgggacaggagcaaattatcatggggctatttaa

SEQ ID NO: 6551 - DNA, 1209 bp, Photorhabdus luminescens
ttgctattattgactttggcaggggtttataccctccaaagtacgatcggcatgttaacgttacaaagtatgccagcgtttttgcgtagccacggcgtaaccccggataaaatcggcttgctctacttgttgatgctgccttgggcattcaaattcctttgggcacctattatagagcgctatcgtaaatcgggttcgggggatacaaatccccgtcgtatcatgatttgcggtaatctgttaattaccttgcttttttgtgcaatgtcactggcaaaacctgccgaacatatgccgctgattatcgtcggtctatttctaatcaccatttgcctgacggtggtggataccaccaccgatggtcacgctattgaccggttatcaccaaaacatcgcccttggtgcaatgttatgcaagttggcggcggttatttgggttctatcattggcagcggtctgtttctatacctggtttcactgtatggttggcacattggtgccggggtattagccatcgtgattctattgatgtcactgcctgccctatttttacgcgaaacacaggtagaaaaagcaccaacggttttaaaagccccggttgccccttctctcaaaaatgcactccgtcgggcaccggttagacaagcattggttttgatattgctgtgtatgatcggtacgcgcctttcacttggtatgctttcgccgtttttgatcgatcgcggtgtggatttaactcaacttggtatcattgccgccagtggtggtgcattagctggattatctggtgttctgcttggtggcatcattgtacgtaaattcggtgctgtccagactttactgtctgtcatactgcttgaatctatcgtattagccggtattttctggcttgcccggcaaccagaagcgccgttatccctgctttcagccgcatatgttttcatcaccttaatcactgccgccaaatttgttgcgctgtatacccagatgatgtcgctcgccgcgggtgctcagtccggtgtggattttgcattgatgcaatccgcagatatgggtattgcaattatctgttcagtgttgggtggattgattgttactaaagcaggctattctgcccttttcgttcttgcacttctcttcactttcattgccttgttctggatattgcgtaagttccataatttccacaaggagagcgtgaatgcgtaa

SEQ ID NO: 6552 - DNA, 2007 bp, Photorhabdus luminescens
atgagaaaaaaatacgctagggcgtctgtcttatgttgtttaatttcgcctgtggtatgggcagaacattcgtctggcgcgacagaagatgctttgattgtaacggccaataaacgagaagaagcgttaaataaagtggatggtagcgttctggttaaaacaggcgaggaacttgtacaggccggtatcactcaagtacaagatcttgagcgcgctttccctggtttacaaatccgctcacgaggtaatagaacctattcagcaaccaccattcgcggtattagttcaccggatttctactcgccttctgttcgaatttatgtcgatggtgttcctcaggatcaccaattcctaacacaagaattaatcaacgtggaacgtgtcgaactattacgtggcccgcaagggactttatatggcggaaatgcacaagcgggtgttattaatatcgtcacccgttcgccgcaagaaggcccttggcttaatctttccggtaattactccaagttgaaacaaggtggttctttcagcggatcaataccgcttattgaagatctcctttatggtagtaccagcctgcgttgggtaaaagagcctgggcaaattgatgcaccaaatcgtggcgataaaaatattgattccagcaaaacctggctcggtcgagggcaactgacatttgcgccagaagattcttcgttcagtgctgaacttagctttgctcatgaagatctcgattcccatgaagaactctatttaaacgacgaacaatttcgtcggaaagaatatgatggccctatccctgatttaacccggcgggttaacagttatgcattcaaggctgaatatgatttcggcgacagtgtgttaaccagtgtgacttcttatcaggatcgcgatatttaccgtgatttcattggtggtaaatggaaagagaaacatcatgccactacgcaagagctgcgtttgaactccaatttctcaaatgggattaccactgttctcggtggctggttctcagatgaaaagaataaacatcataccagtggttatcccggttactatggcgatgcggctaacacaataaaaggaaaatcgctggcactgtttggtgaggtgaaattaccctttgcttctcagtgggatttgactctgggtggtcgtttgtcccatgaaaaatcgcagatagactatgcgggccgttctggcatggcagcaatcgaagcttttgataaccaagtttccagcaaggagtttacacctaagactgcattgggttggcaattgacgccagatacccgtttctatctctctgccactaaagggtacaaacccggtggattcaataacattgtctcctccgccaatgatagcaaaccctacaatactgaaacctcagataattatgagctcggctggcatacctcgttctttgataatgcagtgacattagacagcgctgtttactacattcgttcgaaagataaacaaatttatgttggtccgatcggtgcacagtttatacgcaatgtgggtaaagcagagagcaaaggcattgagttgagtagccagattaagccaatgaaagggctgaaattttctcttggaggaagcgtaggcaaatcaaacttcactgatgcaaccgatgcagagaatggcataaattatgacaataaacgtctgccttatgcgccagatgtcatgcttaatgcaagttttgactacttgattgatcaaacattgttacccggtaacctctatttaaatgccggtgcccgctactattcaaaaagctactttaatgaagcgaatactcttgaacaggggggatacaccctctatgacgcatcattaagtttagaaatggcacatggggtgaatgtaaaactctatggcgaaaatctgggcgataaaaagtatcgtgtctcaagtttcaccgtggggccaaatacgctcagtatgatcaataaaggcttgaatgttgggctggatgtgagtatctcactatga

SEQ ID NO: 6553 - DNA, 972 bp, Photorhabdus luminescens
atgaagacaatctatagtgaaaaattagaagttttcactgctgattattgtaattattcacatgaggataaaaatagtaaaagtacacctgtactgattgaggaattatctgacggcattcacataaaccggctacgctttgaactcaacaaagatgtcacagaatattgtgaagggccgccaacggtgtcaattgcgtttattttaaacgggagaggaaaaatggcgattgaaaacggtgatgaattagatattcattcgggaatgatgatatttttctattcacctaaaatgacgcgaggcatgaacttctttggctgcggatcatggcatatactcgacattcgtttttcattgaacgaaattgcagctcaggaattgccaccttttactcaattagcggcaggttttgaaaagaacgccagttacagtgatgtattgatgatggcatctcccatctacccaccatttatgcaaatagtgaaccaaatagaagagtgccaattaagtggcaatgtaagaaaggtttatttaaaggcaaaagcgttagaaatactcgcttgtgtggcgtctcaagtttatgattgccaatataatatggtcaacgggttacaacgccgcgccgtttataatgcaataaaaataattaacagtgattatcattacccttggacaataaaatcattatcaagagcggttggtttaaatgaacggaaattaaaagagggatttcgtgcggttgtttttcgcactttccatcaatatctggaaaacgtccgcatgacgaccgcagaagatttattgaaaaaaggcatgagtgttattgatgtttctaccgcagtaggttacgccagtccaagccatttttctaaacgcttccggcaacattatttgatcaatcctaaagcatggcaggcgaaatatgccgttagtcacactttattaacagaaaatatcatggtcggaaaataa

SEQ ID NO: 6554 - DNA, 1026 bp, Photorhabdus luminescens; identical to SEQ ID NO: 5914

SEQ ID NO: 6555 - DNA, 1854 bp, Photorhabdus luminescens
atgggtgtttttcagtacaaagactttgatgacactacttccaaagagttattttccgacgcaaaaactatctccgggtatgcttaccataatctgggtagcggatttgccgaggggtattacaattatggttttggtttggggatgccattaacgttgttgaccgcaattctcggcagcacgacatcgcagggcatcacacctaaattgccttggaatccggacgcagaaaagcaagcacaagataaactcaatgacgcaggatggtttactatcagtgctgatgagttaggttatcagggcaaaacggatgcccgcggtacttttttcggcgaaaaatcaagtcattccactgctcaggcagaggtaatgggaaaatatgatgctgatggtaatttgatttctattggcattgcgtttcgcggtacgagtggtccccgagagtcaattattaccgatacattcggcgacattatgaataatgtgttggtcgctttaggtaagaaagactattcgaatgactacgcgccaaacgctttcggtcggctgctggaccatgtcgctaattatgccaaagctcatggtttgacgggcagtgacgttttggtcagcggccatagtttgggtgggttagctgtgaatagtatggcggagtctagcgatacaaaatgggggggattctactcccagtcgaattatatctctttcgcttcgccatcacagtatgagaaaggtaacaaagtgctgaacgtgggatacgagaatgatcccgtattccgcgtattaaacggcactagcgttgattcattctctccgggtgttcacgatgtaccaagggattcggcgacaaataatattgttaattttaacgatcattatgcgtcagattggtggaatgtcttgcccttctctattgctaatccgtcaacttgggtttcgcatgtgacgccattttatcagagcggcatgcaacgtattatggattcaacgttctacgatctgactcataaagactctactattgttgtcagtaatctttccaacgtcacccgtgaaaatacctgggtgcaggatttgaaccggaatgctgagaaacacacggggagtacttttattatcggtaccgacggcaacgacctaattaaaggtggtaaaggaaatgattatctggaagggcgcgacggcaatgatatcttccgtgatgatggcggatttaacattgttgccggcgggaaaggccataatacctttgacttacagaagtcactaaaaaatgcagaaatagcctatgaccaggcaggtacattgtatatgcgtgatgcacaaggcggtatcaccattgctacggatatttccactataagaagtaaagaaagtacctggctgtttttgactaaacaggtggattctcaagtcagggccgatggtttgtattccaacagcggattgaagacgaaatatgccaattcagtcacaggcaacgatgggaatgatactctgacttctaaaacctccggtagctggctgttcggtctggatggcgatgatacgttgatcggcttcggcaacaataatgtcttcgtcggtggtgaaggtaatgatgttctgaaaagtcagggtaataacaataccttcctgttcagtggtgattttggacaagacatcatctatggttacaacaagacggataaactggtgttcttgggtaccgaaggcagcagtgataaaagtaattatctggatcatgcttctatggtggataatgatctggtgtttaccttcgggcaaaactcagtcactctggttggcgtcagcatggatagcttatcggtggataacataatattggcataa

SEQ ID NO: 6556 - DNA, 381 bp, Photorhabdus luminescens
ttgcttttccggcatgggctggcagcggccagagcaagaggacgtgaaggcggacgttcttttaaactcacaaaatctcaggttcgcttgccacaagcttccatgaagagtagagattgtagcgtatctgaattatgtgaagagcttgggattagcagacagactctttataagtatgtagggccagatggggaactcagggaacaatattttgatctaggacgaccaaatcgatattctcactctgaaagcgactggcgatttgcgataagtaatccactgaacgcgcgagtctgtctaactttgtcacgattaacgtatctgatgtggcacacaataaaggggcattttctgcccctttattgtgtcagatatatttga

SEQ ID NO: 6557 - DNA, 303 bp, Photorhabdus luminescens
atgataactgtattaagtacagaaacatttgataactggattgatgccctgaaagacatcagggtaaaaacaaagattcaggcacgaattcgcagactgaaaaacggtaattctggcgatatagagccagtaggggaagggttttcagaaatgcggattcatgaaggtaaaggctacagggtttatctaaaaaatcacggaaaagtaatcgttgttttgttgtgtgggggagataaaagtacacagcaaaaagatatagccagagcaaaagccatttacaaagagattgagggggagctatga

SEQ ID NO: 6558 - DNA, 279 bp, Photorhabdus luminescens
atgaaactgaaagaatatgatattgcagaacacttaaacagtgaagaagaaatgcaaatgtatcttaatgaaattatggaagatggtgatccggcattggtactgtctgcgctgggtgatattgccagagccagaaacatgagccagctttcaagagaggtcggtatgtccagagaagggctatatcatgctctttcaggaaaaggtaatccaacattcagcgctatgatgaaaataacaaaagcgttagggctgaaacttcatttcacaggggcttaa

SEQ ID NO: 6559 - DNA, 135 bp, Photorhabdus luminescens
atggctgtggctcagcggtgtgcccggttgcatattccaaatccatgctcagagcgtgatgcacttatcgtctccaccgcgttggttcatggtatgactgtcgtcacacgaaaaatactaaatccttgggtttaa

SEQ ID NO: 6560 - DNA, 291 bp, Photorhabdus luminescens
atgccacgtttgatttggtctccgcctgctctcgctgatatacagcggctctatggttttcttgctaaaaaagacaaagacactgctcgtcgagctattaaaacaatacgtgctggcgtgaaaatgctggcacgtcagcctgaagcaggacgccctgctgacgatatggatccggcattccgagaatggcttattgattttggaagtagtggctatatcgccttgtatcggattgagggtgaaacagcaacaatttttgctgtacggcatcaaaaagaggccggatattaa

SEQ ID NO: 6561 - DNA, 273 bp, Photorhabdus luminescens
atggcaacctcagtaaaacttgacgataacttgaaaagccggatccagtatttggcagaagtgcgacatcgttcagctcattggataatgcgtgaagctatacgtgactatgtagagcgcgaggaaaagcgtgaatctttcaaacaggatgcattgcgtgcttgggaagcgtatcaagagaatggactacacctgacgcttgaagaagcggacgactggttagctaagctcgaagcaggagaagatgcggagttacctgaatgccacgtttga

SEQ ID NO: 6562 - DNA, 135 bp, Photorhabdus luminescens
ttgcgcttggcacgttggctgaatttgaacgtaatctacgccgccaccgcgttggttcatggtatgactgtcgtcacacgaaatgtgattgattttgaattgaccggcgtgccaatactaaatccttgggtttaa

SEQ ID NO: 6563 - DNA, 876 bp, Photorhabdus luminescens
atgagcccaaaaaatgattttaaacctttttccattagaaatgattctaatatagtgagtcaagaaagatatgaagcagataagagtttgcaggaagggtttccaccagacaatatctctacgcatgtattaaataagacattacgccaatcatcaacaatagcctctgtggtagctaattttattgcgacacaatctggcgatgatgttctggatgatggtgatatagataaactcaccacccaactaaatcgagcattaaaacaaatagccactgatggcaaagtgcctaatagccggaaaataaatggtaaggcgttgactgaggatattaatctgaatgcgagtgatgtgggagcatatactagaacagaggtatacactcggtcagaagtatacacccgagcagaggtggatagattgattaagacaaccagtgagattcctgttggtgctcctattccttggccattgccccatccacctatcggctatttcacttgtaatggttccgcttttaataaattacagtacccaaagttagcagaagcttatcctgatggcagattacccgatttaagaggcgaatttattcgtggttgggatgatgggcgcggtgtggatgctaagcgtgtaattttaacatctcaagaggatgccattcaaaaaattacgggaacatttacaactatcagagctgttgttattaacgccgctggagcattttcacttggggatagtacacatagaggcaatacacttgatgggggagactacggaagagtggtcaatttcgattcatcacttgtcgcacgcgcagccacagaaacccgccctcgaaatatcgcctttaattacatcgtaaaagcggaataa

SEQ ID NO: 6564 - DNA, 255 bp, Photorhabdus luminescens
atgagtgaaacatcaacctatccattgcgattaccgaaatctctaagagaggaagtcaccagagtggcaaagcgtgatcgtaccagcgttaaccagtttattgctatcgcagttgcggaaaaaatttctgctctggaaactgagcaatttttttcagaccgtgccaaagctgctgatataaaagcattccgggataccctattccggataggtggagaagcgcctcgttctgatgatgaatttgttcatcgataa

SEQ ID NO: 6565 - DNA, 552 bp, Photorhabdus luminescens
atgaatactcaacgtaagcttgataaagtcagaccgccccgagttcagattacttatgatgttgaattaggtggcgcggtcgagaaaaaagaattgcctttggttattggcgttattgggcaatttgctgagcaatctattcccatgcgtgaacgtcgttttatgcaggttgataaagataattttaatgcagtgatggaaggtttatcaccttcattggaattacaggttgaaagtgcgctgccgggtcagagcggatttatgaatgtcgatttgcaatttaaatcaatggctgactttaccccagagaatttggcgaaacagatagaaccgcttcgtcatttattagaggtacgcggcaaactcagtgatttgaaaggccgtgcattgagcaatgaaaaattgcgtgaccgtctggcggaaattctagctgaacatgcggataaattaccgcaagcaaatgaagaagcagaaaccgctgccatagaaaatagagcagatgacgtcaccccggaaaatagcaatatcccggaaaataacaatgcacagtga

SEQ ID NO: 6566 - DNA, 1482 bp, Photorhabdus luminescens
atggaacagagcgttgttgaacaacaagaattgaaaacgacggaaacaagtggtgattttcttgatcaaattattgataacacccaagccattcgtcgagaagccgatcgtgatcgggtaaaaagccagctcgaccagtttctggccgaagtcacctccggttcactggtggtttccggcgatttggtaaacagcattgacgaacgtatcgccgcgattgatgcgctgatgtccgctcaactgagtctggtattacatcacccggaatttcagcgtctggaatcttcttgggtagggcttaaaggattacttgaccaaagcgaaacggataatacccaaatccgcatgttgaacgcgacgaaaaccgatttgattaaagattttaaatcggcatcggatttcgatcagtcaatgctgtttaaaaatgtgtatgaatatgaatacggtacctttggtggtgaaccttattccgcatttgtcggtgattttgactttgataacagcccggaagatctctacttactggagcagatttctcatgtggccgcagccgcccatgcgccgtttatcagttcagtcaacgcgggcatgttggggctgaatgattttggtgaactaccacgtccacgtgatttatccaaactgcttgcaacatccgattatctgcgttggaaacgcttccgggaatctgatgactctcgttatgtcggcttgacgttaccacgagtaattggccgtttgccttatggggcaaaaaccatcccggttgaacaattctgcttcgaagagcaggtaaaagaaggggatagcggtagttatctgtggattaacgccgcctatgcactggcaggccgtatggtggctgcatttgaacagtatggttggtgtgctgcgatccgtggtgtagaaggcggaggattggtcgaagcattgccagcgtatcactatacctctgtgtccggtgaaaatgtgctgcaatgcccgactgaggtggctatctctgatcgccgcgaaaaagagttagcagaattagggttcattcctctggtttattataaaggaactgactatgccgcatttttttcggtacagtcaccaaataagccgagaaaatataattctgacctggcaaatgccaacgcaaaattatcaacccaattgcaatatattatgacaacatctcgtttcgcccattatttgaaaatgattgtgcgtgacaaagtgggcagttttatgtcccgcggagaatgtcaatcttatctgcaaaactggatcaaccaatatattgttggctctgataccgttggtgcggaaataaaagcgagtcacccattacgggaggcaagagttgatgttgttgaagttcctggatcaccgggaacatatcgggctgtagcctatttaaggccgcatttccaattagaaggattaagtatgtctttacggttggttgctgatttaccgccatcatcggctgcctga

SEQ ID NO: 6567 - DNA, 495 bp, Photorhabdus luminescens
atgagttcttcaatctttttacaaattgatggtattaaaggtgaaagtaccgacagcaaacataaagagtggattgagctggaacatgtcaattttggtctatttaaccatgcacgtattgcagacagcggtaaacgtaaaattaccgttggtgcagcagatttccgtaccattgactgtgtgaaggtgatggattccagttctattggcttactgtctgctgtggcgcaaggtaccgcgattaagaaagtgaaactggaaatctgcacgattttcaaaggcgaaatgcatccttatgcggaagtggaaatggacgaatgtattatctctgacgttcatgaaacctgttcacgtggcggtgaattcccacaagaacagatttctatcgcctattccaaaattaaatggacatttacaccactcaaagaagacggaactaaaggaactaaggtgggaccggaaggttgggatcttatcgagaacaaaaaacaataa

SEQ ID NO: 6568 - DNA, 444 bp, Photorhabdus luminescens
atgatgactcagccttcatttcttcatcgcctgaaagatgattatccacaagatgaaaaacagggtgtcgcacttatctggtcacgtcaggaagttgtccaaagcctgatttctgatttaagtatgttattttcatcaagaccgatttctgaaatttcccctttatttggtgagttgccgaaatcagttttaaattatggcgttcccgatgtcattaatgtggatatttccgatgatgaacgtattgatgcacttagcaataatatttaccaagctatttcctggttcgaaccccgtttgaaaaatgtcgttattacattacaaaaaaatacgccagaaaatatcattttctgggtgagtggaattttcctcgacgaacaagtggtgttttctatctcatggaacagtaccgcatatacctattcaatttcatgggataaataa

SEQ ID NO: 6569 - DNA, 1812 bp, Photorhabdus luminescens
atgatgttattaccacaaaaaatactgacttattacaaccgggaattgagttatttaagacaatatggcgctgctttctcgcagcgttttcctaaaattgctaaacgtcttgggttcgcagaaggtgtttcagaagatccgcatgtagaacgtctggtggaatcttttgcatttctgacagcaaaaatccaccagcggattgatgaagatatgccggaactgagcaacgccatgttagaggtattagcgccacagtttctacgtcaggtaccgtcggtatcgttggtgcagtttcaacaggacctgttaacatccggtgtgaccggaatgatgacggtagcgcggcatactccgttgatttctcaaccggtaggtgatgtgacatgtcgtttccgcacggtatatccgctggagatgttgccattggatttaacgcatgcagaactaataccagacccttacgatcgggatttcatcttaacgctgaattttaccttgtggccgggtgccagctttcaggcacaacatatccggttgtacttacatggcgcgccaatgctgacccatagcttgtatgaattgttgtcggcccaagttaagcaactggaatgtcggttaggcgagcgtacattcaacctgaatcgccgaggtgttcaggtggtgggctttgatccgcaagataacttatgtgccgatgatccattgataaatccggttcaccacttgtttcgtgattatttcagtttcccagaaaaattcttattcttggatattccactaccggatgctggtttgattacccgttcattaggtgagctgcaataccgttttcggcttaaggattgtgtcgcattgcgccgcattgaacgtatgagtgataaagtcagcaacgaaaccttccggctaaattgcgtgccgataattaatctgtttcctcatcatgcggaacccattattccactggaaacagagcatgaatatctggttcaaccggatgcgcgtcgcccacaaagtatggaagtctataccattgatcaggtcgaaattgtcagccgtcagcaggaacaattaagttccaaaccggtgccgtcattatttggtattgggcatacgcaatctgacgaacagttctcattgttttggcaggcaacgccacgtccctcactcagacataacgatcttgggatgaatatgttcatcggtttttctgatagcagtggcgaacatctgaaacccgaaaccgatgtggtgatcttgagtctgacctgtactaatcgcgatataccgcggcaattaagcaacggtcatcctgatggggatttcgaatcagaaagcgcgttgccaggggtaaaaattctgggattgatccgtccccgattgccggtacgtccacaacccaatagtgcattgaactggcggttggtatcgcaactcaatttgaaccaaatgctactgagtggtccgcaaggagttcaatgtttaaaagagacgctagaactctacaacctgcttggcgatccagccatatcgcggttgattgcacaattacagcagattgcgattgcgccagtaagtgcacgcttgaatcccgccgatccctattctctggcgcgtgggctggaggtgacattaacatttcaggcacaagccggggaatttgttgatttttacctgttttgcagcttgttagaacgttttatcgcaatgtatacaccgattaacagcttcacgcagaccgtaacacagttagagacgattaataatagtacccgccgttggccacgtcgcagtgggaggctgacatggctatag

SEQ ID NO: 6570 - DNA, 1011 bp, Photorhabdus luminescens
atggctatagaaaataaaatgcgtttagttggcggccgtttttatcaaaatgtacgtcgtctgcttaaacgttgtcgccagcgtgaagaaacggcaatcatccctgatgatgtggtgcaattcagttcggtactgacattagatgcgccggaaagggaagtcgagtcgctattaccaccgcaagagggggatgaacagtatcgcatggcggtacatcactttggtctattaggcacccttggcgcattaccattgcgttataccgaatggttgattgacaggcgttaccgctatggtgacgaatcagctcaggcgtttattgatatttttactcatcgtctgcttagcctgcgttttcaggcatggcagaaataccggttatatattaataccgagttacaaaaccatgccgagttacaaaaccatgccgagctacaaaaccatgcggaatggcaaaattatcgggctttaccggcagtcattccagcagttgccggccaattgatggcggacaccacacagcgttctcatcccgcctgtgtcgggttgctggcaacaccggtccgctcaatggtgaatttgcagcagctattgcagcgggaattgggtatggcagtcagcatccagccctttaaagggcgctggcaatatgctgaacaggcacactgttgctgtttaggtcgcagtttgttaggcgataacccgatgttgggtcgcgcttattgggatattcaatcaggatttcatattcagttggggccgtttgccgctcggcaacgagccgcctttatgccgggaaatgaacaatatcgcaaactgacacaatgggtgtggcaatttgccggaccgctgctctccttttcactggaattgttggtacagcatagcgggcaaggcaatatattaaatggcagccgccaattggggtgggatggttgtttgggcgataccggcgaaagcaatattcagcgtctctatttggctgaatgtacaggtccctacgcaaattaa

SEQ ID NO: 6571 - DNA, 2007 bp, Photorhabdus luminescens
atgctattagggcaaaagaatcgttttttacaggttatcggtaacctgtcagatattgtggcactgaacaaaatagaaggtgaagagcacctgtcacgaccttattcattttctgctcagctctattccaacgcagactgggataagctggagtctcatatcggtaaacctttggcatttcgtcttggcgaagcgccgaatcatcgcattgtgcatggcatattgactgaattgcagcaacaaggttttagcgacggccagttttgttatcaagcacgtattgaaccctggctgaaaatgctgacattaacccataatttgcgcgtctatcagcgcatcagcgtgccggatatggtatgtgatatcttccgtaaacgtgggtttaacgacgttgaactggcgctaaaaagccgttatccgaagcttgaatattgtatgcaatacaaagaatcagattttgactttgtgacacgtcaactggaacacgcggggattttctatttctttcgccatgaagaaaggcgtcatgtactggtattggcagatcacccttcggcgtttattaacgcaccgttagcggtattgccatatcaatcgaagatgggtgatcagcaaggctatgggctacgcgcctggcatattcatcgcacaatgattccaggtacggcggaaatgaatggttataacgttaaaagtgctgcggcaatcagtgccagcgccaaagcgaacagcggctattctaccaatcccaagctttctatctatgacgaccgacgtcaggaggaacgtaaccaactggaaacacaggcaacgctgtgcatggaacaatgggaatcacagtcctattacgcacgcgccgttaacagttatcccagtttacaagtggggcatcagtttaccctgaaagggcacaccagcgccgatggccgttatgccgtcggccaccagcgattaaaagcggagaacaacctggaggaaggtgaattactgttttcgtctcaggtgaccttattcccggcgaataacgtattccgtccgcgtccttcggttacgcggccctacatttccggcgtattgtccgcgttggtggtagggccgacgtcagaagagatccatacggatgaacagggtcgcatcaaaatccagtttcactgggataaagagcataaaaaagatgatgacagctcctgctggatacgggtcagtcagttctggaatggcgcaaagtttggtgcacaatttgtgccacgtgtgggcaatgaagtcttggtgagttttattgatggcgacccggatagcccgctggtgaccggaacggtttataacggggtgaagatgccaccattcgcgctaccggggcagaagacccaaagcgggattacgacacgcagtagtgcaaaaggcacggtggagcaaggacatcagttctgtttcgaagataaaaaaggtgaagagtttattttgcttcactcacaaaaagatatgcgcctgaaagtgaaaaatgatttttcggcgcagatcgatcgcaacgtgttatgggaaatccaagaaaagcgcgatacccaaattaaaaagggcaatgacacattaattttgagcgagggcaacgccttaactgaggtgaaaaaaggtgacaaaaaacaaacgctggatcgtggcaattttaccaccaccgtcagtgcaggcagttatgagctggaagtatccagcggtaacgccaaaatcaatgtcggtcaacaatgcacaatgacggcaaatcagggcattgaactgaaagtcggtgccagcacattatcgattaccccggccgggatcaccatcaaagcgccatcggttaccgtagaaggatcaggaaaactggcgttgaagagcagtggcatggcggagctaactggcaccacggtaaaagtagaaggcagtgcaatggcacagctaaaaggcggcattgttcaggtggatgcgaccggcattgctatggtgaaaggcactttgaccaagattggttaa

SEQ ID NO: 6572 - DNA, 303 bp, Photorhabdus luminescens
atgatgccaatgccagccgcccgtgtgggtgatatgcatatttgtccaatggtctcgcctgcggtacctccggtgccacatgtaggtggaccgattatgccaccaggtgtaccaacggtgctgattggtggattgcccgcggcaacaatgggctcaatgctagtgtgcgtcgggccgccggataccgtagtcatgggtagcccaacagtattgatcggtggacggccagcggccagactcggcgatctgtgcgcacatggcggcacaattaccacaggctatccattggtgattattgcttga

SEQ ID NO: 6573 - DNA, 1104 bp, Photorhabdus luminescens
gtgaacttagcccaaacagatatcgcgcgttttttacaaccgattgctgctgacaaaccagcagggtgcgatatcgaatacgaacctatttttgaacagataaacgccgcgcgtgaaaccgacgacgattttctccaagacgacacatggggttatgaaacccgtcaggctgattggatgaaggtttcagcgttgtgtcaggaagtactggaaaaacagagtaaagatttgcagatagcctgctggttaacccaagcgcaaggggaactgtatggtctggcagggattagtggcggtatcacattacttgcccatctactggaaactttttggccggtgctctacccgccgctggatgatacagaggcaaacagtgcggatgcccgtcttggtcggttaagctggttggataatcaattggtgaaacaattggacaatctgacactgaccgatgatggcaaattgagcttaagcgtctggcaacgcgtgcaatattttgaacaacgcgctgccgttaatagcgaattacgcagtgccttgatcagtgatggttatttcggtatggctgagtgcgacggcagtattcgcactacacccgccgaacaatttaaccaattactgacgcgggctgaacaagttaataaggcattagcagaactgcaaaaaatcatggtggaactattgcctgatgccggtaacagcatgagtgccagtacgcagcgattgcaagagctggtggccttaatcgaacgatttcgtgacatggtggcaccgggatcaagccaggaatacggcaatagcaatgaagcaatagcggcagggggagatgcgccaaacggcatgaatacgacttttttaacagaagatcgggcgcaccatgaaatgcgcgctatcgccataggacaaatgatcaatatcgccaattactttcgtcaaaatgaacctaccagtccggtgccctatttaattgaacgtgcagcacgttgggcaaatatgggcatggccgaatggctggaagaaatgatgtcagaaaatacctccgcgctacaagaaattatgcgcgtgatgaaaggaccagaaataaatagagagcaaaatgaataa

SEQ ID NO: 6574 - DNA, 1398 bp, Photorhabdus luminescens
atgtttgaacataaaccgatgtattggtattcaggattatatttacagccgcaacactttcaggcccatgaattgcaacatgaatactggcaaggacgttatcagttactgacacaaccttatgcttttggtgtggtgaaactcgcattcaatctggccgcgctaagtgatgaagtactgagtgtccatcacgccgcgtttatttttcccgatggtggttacgtggattgtgatgtcaacggcgtactcagtgcccgatcattgcgggattgctggccggtacgtgacaaaccgcagcgcatctatgttggcctgcgcatgttcagccacaatcagaataacgtcaccggtatcacggatgccaatggtgtcggtaatatcaccagccggtgggtaacatggccgcaagaacagcgtatgcgggatgcttttggcgaggggccggaagcggaagtgcaacaattgacctataacttacgttttttcttgcacgatgagattgctcaggcaacgggttatacactattaccggttggccaactgcactgcaccagtgacggtattgcgctggataaccgctatctaccgccatgtttgacgctctatgctgtgccacaactgggccagcgcattgatcaactgtgtcaggagttaaccgggcgtatccatcaattggaagagttgaaacgcccgcaaacactggaaggggaaatttatactcaggaaaaaagcacattattgctgacactacggactctggcgcgttatgtcgtacagttgcaccattttcaggaagcgagagatgttcaccccttacagatttttggattattgcgccaactgatcagcgagctttcctgttttaccgaccgttgctcctttttaggccagtggaacgggcaggaagaggtactggagaaatatcagcatctggatctggcgctaactcttgatagttgtgaacggacaattgccgatttgcttaatgcgctggtgctggaacccaataccgtgatctctctgcaacaggaaagccgtggttattatcatgcaaccttcaatacaacggggagcaatgaacagcaacggctctatttggtgctgcgttctgacagctttactcatcgcgagcgtgaaattcctgatgatcgcttgattaaactggcggcggcagaacagatcgacaacattattaaccgtgctttgcccggtgtacgtctgtactaccaggaaattgcgccacatggtttacctaaccgagcaaacacctgctatttccggctagaaaatcgcggtgcattatggcagcaggtagaagagagcaaacgtgtggcagtgcactgggcagatgcgccagacgatttacaaacagaaatcgttatagtgagagcgtcatga

SEQ ID NO: 6575 - DNA, 621 bp, Photorhabdus luminescens
atgcagttgttggattgttatattcccgtattcacttgcgtattgcgcatgatccagcagcaggtgaatcaagcggaaacactgcggcaaaccgtattagctgagttgacacaagcgcagaatagggcgcgtttgcagggttatggggcacaagatatcgaagaggcaaatttcgccgtagtagtttgggcagacgaagccattttgtgtgcaggtcagaaagcgttgagtatttggcgccaatcatcattgcaggctgagctttatgatgccgaactgggcggaaatacgttttttgatcgccttgcggcattagtaccggataattatccggttcgattggtctatgttttctgtctgcttgctggattttatggccgttatggcaaacatgataatttggaattacacaatattatccagcaagagttaaataatcttcctgatactttgcgtggttatctctctttagaaaatcaccgattaatgaacagctacgataataagccgaaaaataaataccccaatcataaatggcgtagaaaattaatattattcatgtcatctattacattaatttatatttttattaccgtctatttattaagtattggtcggtaa

SEQ ID NO: 6576 - DNA, 3510 bp, Photorhabdus luminescens
atgaaaaaattattttatgccattggctggcttagcgtgatggttatccttttattactcagtttaactattgcggtggcattttcatggccgacaataggtggtttattactatttatttgcctattactgttgttattattgctgcgtgtggcaatggcattcatgccagaaataatgaataaactgcgctggttaaataaattctggcggaaaggaaataaccgtctggaatatttactctatcagcactggagacaaggaggatatttacaaagttggcgtcgattccgttcactgttacaccgtaacgaacccgttccaccgtggtttctggtggtaggggaacggggcaatggtaaacagaagttgttaacacgctgcaatgtggtgcccatgacggggaaaaatctgccagcgctgacagaaaacacctttacctgtcgctggtggttcttccgccgggcaatgtacatggttgtttccggccgttataccgaaggtcaatccctgtaccggcaagcctggttgcgtctaatcagttggatcgcacaagtacgtaaacccgctggcgtactcgtttgcttatcggtggaacagttgctaaacagcgacaatagagcgctctatatcgccgcacgtcaggtacgtgctcagttggaaccattacagatacgtctggaacgccgcttacccatctggctgatccttacccacagcgaaacattgccggggtttgaccattggtgcacccaactgtcagtagaacaacatgctgaattgctaggcgattttatcgagcatcatacggtgggtaatgtcaccgacgtgctggataagagcatgaacaccattgttaacacgttgaaaatgatgcgccttaagttgctcaatcagcaacggcagcaacccaatgcagaaatcttagcgttaccagaaacggtagctcaactgcaacctgcactgggttgttacttgaatgcactgttcgaccaagaccattatctggagcatggtctgttgcgtggcctgttttttaccgccgagcatcaaactgctggcgttttcagccaacgtttgttgggagaatacctgccagatcaagttcaacatagccaagatcaacgtagccataacgtattgctgactggctggcggacattgaccaaacgcgtatgcgttagcctactcagtttgatgctggtgtacggtgtcggcaatgcattgatgacgacctggcgtggcgttacgcaacttgaaaatatccatgaggcagacccgcttgagcggagttacttgcgctaccaaaaagttgaatactggttgcaggaaaccttgccatctctgtttttctatccggtcacccatacgatggaacaacggatggcacagcaataccagcaacaagcacctgttggtgcattcaacccggagtcggtagcggcacacttactagcacgtttccataacgcggaaacaccgcaaaaacgactgttggttttacattgggcacgctttattaacatagaacaggcaatgacacatggcgctacgctagaaactttacagcgtatgcctgcttattcagcttcactattaagtggtgaaaacgatcctttatccgcggaacaacgcgtcgcacttcgtctggcgcaatatcgccaaggcaatgcacagcaagcatttgatcagtggcgaaatgtattgcaaacactactagaagatagcaataactggcagtggctattagccgacgaacaaccgactggcacgcattcgctgacactggctgatttctggccgctcgccagcgatgatgttgccacaattaacacacgtattcgtggtatctatacccaagcaggtgagcaagatattcaggcaaccttaggagaactggcacaagcccttaacagaccggcattctttactcctttacagcgctcgttttatcaacagtatcaaaatcagcgccaatcagagtggttagcattcgctcaggctatgcctcaaggagagatgttagttcgaggcaagaaaaactggcaagcgctgatattagcagcgggccaatatgacagcccctatatcacctttctgacccagctagaacgtgatttatcctcgatagagcaggcggatcggcagccttggttacagacacagcagcgtttatggcaactgcatggttatgtgcaaaaaagtggcatgatgcaacgagtctcgctagggaatttctctgtgcgccagcgcatcatgtcatggcttggaatttcaccgcagatctcggtacggctggatgataccgcgctgacacgctatcgcgcctaccgacaggcggtgcagttaaatagccaacgcgagttgctcagtgatatggaaaccgaggtgttggttaaaaatgcgctaaataacgagaaaggagagttggatgatagcggtttacgcgcattgtttaaccgtttcaccctgtggcaccatgagactgaaagcaaacagagtgcaggagtaaatgaaaccttatggcggctctatcagggtgatgcgcatctggtactgcgttacgccttcttaagtgctgccagccgcttgcaaactcagtgggaaagcaaagtgatttggccgatggaaaaattgagcagacaggaactgtttgatggccgggaattgaacgcgcgtttgtatgaatacagcaatgcatttgtacgggataccgcagggtatgcgctggatatccgtcctgaagggattaaacgtcaggaaatagaggatgtagtctttccgtttagcgacgatttcattttctatatcaataacctcattcaaccgaatgacctactttcagcgacatcggatattcgccgtcgtctgcaagagaaactcgccttattggaaagcgaacagcaactgacgacagcacagcaggaaccggagcaagaacagaagccatcggcggaagtaaccattgtcagtcagccggcgaccgctaaccggggggcaaaagtattgccagtaggcagttcagtgacgttgagttgtgatgatggcgtacagcagcttaagagtatgaatttcaatgacagcatgacgctgcactggagcccaggaacatgcggtaaagtacaaattgatatctattttcctcgctttaccctaagcaaaagttacattggctccgatggtttgctgcaatttatgcacgctttctcccgcggtgaactgacattagcagctcaagcgttcccgcaacggcgggatgaattaagtgcgctgggtatcaataacatcactgtgcgctatcaagtcagcgaaagcacagcggtttcaacactctaccaacaatggcagcaacatcagcaacaacaaacggcgttattggaacaacgcaaccgactggatagccagttgttaaatttaagtgaacctacagtggcaaagggaactctctctactttgccatcacagatcaccacccattggaacgaattaaggaaacctaaaagtgagtaa

SEQ ID NO: 6577 - DNA, 2583 bp, Photorhabdus luminescens
gtgagtaattatcttaaacagatcgtcagtaaattaacggtagaagcgcgtcagtgccttgacgaggcggttaatctggcagtacggcgcacccatcatgaagtggaaattgaacatttgctgttggctttgtttgaaaaacagcttccgacgatggagcaagtgtgtcaccacggcggtattgatagcatgacattgttgaatgcttgccaacggtcactggcattattacgcagcggtaatcatcgtccgccggtgctggctaccaacttaactgaatggatggaacagacctggatgtacgccagtactcactggggagcatcacagattaccgctcaagtactgattgtggccctgatcatgaatccgtcactgcaccattctcttacctcagagctacaacaagcgttacagggtaacaccgatgggatagaaccgtggttgcgtacacagacaaatacgacaccacaacacattacagcacctgttggggataatacccaatccgcactggcacaatacacgcatcacctgacacaagcagcgcgtgataacaaactcgatccggttttaggacgtgaacgagagattcgtcagttgattgacgtgctattacgtcgtcgccaaaacaacccgctgttaaccggtgaagccggtgtcggcaaaaccgcgctgattgaagggcttgctcagcggatcgtggatggccgtgtaccgaaagttttggcacaagccgaactatttacgctggatatggggctgttacaagcgggtgccagcgtaaaaggtgagtttgaaagccgcttgcaaaaattattggatgaggtgaagaagtatcccaccccggtgattctgtttatcgatgaagcgcatacgctgattggcgcaggtggtcaagccggacaaaatgatgcggctaatctgttgaaacccgcgctggcacgtggcgaattacgggcaattgcggcaaccacctggtctgaatataagaagtattttgaaaaagacgccgcgttagcacgtcgtttccagttgatcaaagtcgaagaaccttcgctagaactggcaatcgccatgttgcgggccataacacccgcaatggaaaagcatcataacgtcaaagtacttgcagaggcagtcacggaagcggttacgttagccaaccgttatatcactggacgtcagttaccggataaatcagttagcctgttagatagcgcctgtgcccgcgttgccgtttcacagaccgatgaaccggcaccgattgaagatctgcgagccatgttggcaaacattgctgccgaacaggaagccctgttacgtgaaggcggccatgaaactcagttacagaaattggcgcagcgtcaggctaaattgcaggcatcactggcagaaattttgccggaatatcacgctcaacgtcagttggtcaatgacatcctcgcctgtgacgaacacgacgaacggctaccagtgttacgtgcagaactgcatcagcgccaccatcagcacgcttatgtctttgactgtgttgatgccgcctgtgtagcagacattgttgctggttggacagggataccccttggtcgaatggtcgaaaatgagcgtgatgtgttgcgtcagttggaaacccgtctcggccaacgggttatggggcaagatcatgcgctcagccagatagcacgtcaaattcggattgctaaagtacaacttgccgatccaatcaaacctaccggagtatttatgctcgcagggccttccggtgtaggaaaaaccgagaccgccttagcgctggctcatgagttgtatggtggtgaacatcatctgatcacaattaacatgtcggaatatcaggaagctcattcggtttccggcctgaaaggttctcctccaggctacgtcggttatggacaaggtggtgtattgaccgaagcagttcgacgtcaaccttacagcgtcgtgctacttgatgaagtggagaaagctcaccccgatgtgctggaactgttctttcaggtgttcgataaaggcatgatggaagatgccgaagggcaacagattaactttcgcaatacgctaattatcctgaccacaaatgcggcatcagatttggtaatgcgggccgccatgcacggcgtaaaagagcagggggaaaatcgcccggccaccctggaagatattcaggagattatccgaccagagctacaacgtatttttacgcccgcatttttaggtcgtttgcaggttattccttatcttccggtacagggcgaagttctgcatgccattgtgcaccataaactgaataaaattgtcacacgttatcgtcaatcaacccaatgtgaattgcactatagcgacacgctggtggattttatcgctaaaggatgccagatcgcggaaagcggtgctcgtgaaattgataatctgttaacccagtttgtcctgccgttgttatcagatcaattgctattaggtggcgtgccagtcaatcaggatgtctggatggatgttatagacggtcaaatacagctacgatcagaccaaaagaaactatcactatctaatattatcaactaa

SEQ ID NO: 6578 - DNA, 1260 bp, Photorhabdus luminescens
gtgttacgaaatgagatcccgatgaaaatgaaaaagatagtgatcttctggtttatctttacattggtcaatttcgcgctggcactgttaaacctacaggtacgggatgtgtggagtctgtcatcactagtgtggtttccggcaggcttgttacaaggcattttttgcgccagagcaccgcggtactggcctgtctggttaatcacaggtgccttgatttcgctgactgccagtcagtggtatggaaggccagtcaacgtatcgctgaccttttccagcatcaatatgatgatgctggtagcaacagcgctgatctggcagtttttttacggtgtcatgtgggcaccgaagcggacgagggacatcattaacctgaccgtactctgttcgttaagtggcatcattgagcgatttatcgcaaaatggatactttatctatttggttatcctaccgacatatcggtttcattgccgattgttgtaggctcagtgttgagttatctaccacttacgttgtttgttatctactacatcacccacgagaaaaatgaggttgggaactggaaaacctacggtttatgtctggtggccctatttgccatgacagcattgttcatcagtccaccaccggaagccgggaaaatacactggcaaggtatcgcactgctgttttctttcagtttgccgatgctgctagcattcagcggtaatctgctggcattaagcagctttttatccctgtgtacggtggggatcgtcagtgccaccatttttggtcttggcccattctcatcgccgttaacccatctccaacaaaatgtgcagatagcggcttggtacagtacagcgttaacgttacctgcgttgttatgctgtagctgtttatccaacataatcaatgcattacatcggcgtaaagcgcgttttctgttaatgagagcgatgctggatcaagaacaggttaattgctttcggttaagcgccaaaggacatttgtactggcatcataatagtgctgcctggatgcggttcgggaaagcacctgcctcctggtcgcaattgatggcttgggtacatcaggaagatcggcacaaaatcgaacagcttaaaaattctgtctcgcaaatcccgcagacactaaaagttcggattgccgatggcaaaggcgaatttaacctgatcattatcgctttaattgtccatgtgggagaaaatgccggttttattgaaggaacgatacgtgaaataaagagtaaataa

SEQ ID NO: 6579 - DNA, 627 bp, Photorhabdus luminescens
atgcccagacaagtcattattgccgacgatcatccggtatttttattaggactacgtacgatactggcaacattgccggagaattaccagattgtgggggaagcccatgatgtcacttcacttttctctctgctggaggaaaaagaagcggatatgctgattacggatttcattatgccgggtaataaccagatcgacggtctgaggatgattagccgaatacgggaacagtatccgaatttgccgattgtggtgattacgatgattaacgaccgaaaaataatagcttcattgattgactacaaagtaaaagcgattttgaacaaaaacagcttatcccatgagctggtaaaagggttgtacagtacaaccggacgttatgaaccctatttaagtgaacaatttctcgaatcaccggacgaagaagttgtaaaaacgctaaccagtaaagagttggaagtgattaaactgttgggacaagggttgagtgtgaatgatattgctgcgcgtttataccggactaagcagacgatcagcgcccaaaaaatcagcgcaatgaaaaaactcgggttagatagcgaagccgcgctttataattatttgcatcagattgggctggggctgtaa

SEQ ID NO: 6580 - DNA, 3444 bp, Photorhabdus luminescens
ttgccgttgcccattaaagagcaagcggttcttccctcacgcttcccgacattaaaagtcggcattctctgctgtatcggtgcgccactggtgatccatcgttgggacggcaagttggaaggaatttatgctgattatctgcgcttgattgaaactgtgctgaaaaggccggtggaagtacggctatttggcaactgggaatcagcttataaagcgttgcaacgtggcgatatccagttgttatcgaattccgcctcctcacaatcaggaaatgaagccaatgacacttacccgattctggtacaaccacttgccctgatgatgcgcaaagaacaagtcaatatgccatttgccaacatgaatattatggcggcacccagcagtgatccgaatgtcattaagcaattacgtaaacattaccgcactattttaatagccaaaaatcagcaagaggggatacaggccgtcgtggatggcgaaatggatgcctatctggacggacaaagccagattgcctatttactggcttttcgtccgtttaccggattgacttaccgccgggatatttcattcggggaacgatatgattttcttggtcacagcggtgatggcatagttgaagcggtaaatctgatcctgacatccattcctcatgccattagaaataaagtttatgaacgttggatttctggactggcgttgggtaacaacaacgacgccgctattttttcagctcaggaaaaagcttggattaaaaaaaatcctgtcatcaatgtggcactgaatcgcaatacaccgccttattcctttctggataaaaacggtcaaatcaccgggctggatgtggacattttacgcttgctgggagaaaaaagtggcatcatctttaattttatcccaacagatggtgcagtaggcattaaaaagcggttagaagatggcgaagcgcaaatgacctcgatgctcaacacgcccgaacgtaaccgttggctctctttcagtcatccctacggtaccgtggaatgggtgatgatcacgcgcaatgagcgtaatgcgccttatgagtttgaacaacttaaacaccatcgggtggcaattcagcgcggcaacgcacttttatcactcttaaaacagtatccagagatttttatcatcgaagttgacagcgtgacacaaggtattgatatggtactggccggagcggcagatgccacttttgacagcctgatcagtgctgattacctacaagcaagccgctacggtgccaatatttctattcaattctttaaaggctcattgcaaccggaacaatacgccgtcataccggcctatcctcaactggtagacatattaaataaaagcattgatgcactgccaccaaatgaactgcgggtattacggttgaagtggttatccatggcgaatgtcacgccttatgatgacaataaaatctctccttgggtgaagctgtggggaggggcattatttgtaattgcattaagctcggctttttggggcagttatcttgcacaccagatcaaacgacgtaaaatcgcggaaagcaacttacagaatttactggcgtactgggaaacactctttaataacatgcctacgccaatgtttgtctgcgatcccaccatgtgcatcacggcggctaacctctatttccggcatgaaatgggctctgttggatctgaggtgattggccgcagtcttttttccctatgctttttaaaaccggtcgatgagcaagagatcagtctaatttttctacgctgtttggaaggtgctcctgtacatttttctgatcgcaacattgttattcaaggacaggataaagatgtctatttgtggctcgaaagttatagcaataccgaaggcgttgttcaggggatcattggcggctggtttgatgtgaccgaacgtaaattgttggctcaggaactacgccaggaacgtgataaggcggaactcgccagcctggagaaatcagattttctggcccacatgagccatgagatccgtacaccgctccaagccattatcggtattcttgatctggaggtaaaaaagcaaactcagccatccacgccattacatatcgcctggcaggctgccatatccttgcaaggaatcatcggtgatgtactggatttctccaagatagaatcagggcgaatggtgctaaatctcaagccggaatcattgcaggtgattctggaaaattgcgtggcaacttttagccatcgggcaaaggaaaaagagttatttttcacctatcagtttgatttgccgtctgaatattatcatctactggacgcaacacgcgtaacccagatcatcaataacctgttgggcaatgcgattaaatttaccgaacagggtggtgtacagatcagcgccagctatcagcttattccagagagtcagcaagatgaaatcacgctggtggttgctgatactggttgcggcattccagaaaccatgtatgaagcggttttactgccctatgtacaggtgacacaacataatggcggtaaaaccggtacggggttgggattacctatttctgtacagctagttgaattaatgggcggcaatctgaaaatcacgggtgcgcccagtggtggtgcgcaggttaccgtgatgttaccgctgacgcgcacgattattgaaaaagaggcgataagcgaaaaaaccgaaaacattgagacggagcttcatgaatctttgaatatcttagtggttgatgatttacctgccaatttacaggtgttgtcattacagttagccccatcgggccatcgtatcgcgctaactgaaagcggtgaacaagccatgaagctggtggaggagggctatttcgatatcgtgctgacagattgccagatgccgatgatgaatggttaccaactggctcagttactgagaacacatgaacgattacggcaattaccgccatttattatcctgggctgtaccgcgaacgcgttctctaccgaacaggctcgttgtttggaagcgggaatgaatggtgtattaatcaaaccactggtgcaaagcaaattgctggcagaaattacccgttattaccgacaaatcaatgaggaagcaacattaacattcgatgagattcaagcattggctcagcaaaatgtggctgtagagtgccagttacttagcgcaatacagcaagggatgtcggaagatattgccgaattacaacaacaagaaaatcaacaatgccatgaaaaagtcgtgcatcacgcccatcgtatgaaaggcgcttttgcgctgatgcaatatcagcaaggaatacgtgtctgcttgcggattgaaaaaagtgagcagtgtgatgtgaaaataatagccgttttattaactcgtgcggaatatttccaacagcaaattaagcagaaattgggggaattgcatagttag

SEQ ID NO: 6581 - DNA, 201 bp, Photorhabdus luminescens
atgaatacagccacagttagcaactttatcctgactagtgcattaacacatgctgaaaaaaccattcatgaatacgaagttatgagtttgaataaccgagactcagaagttttcttcaatgcattggttaaatcggttcgcttcaataaaaagctggcagatgccttcgaagaacataatcaacgtgtgatcaataaataa

SEQ ID NO: 6582 - DNA, 969 bp, Photorhabdus luminescens
atggcctatacacaactgaccgaaacagaaagataccagatttccagtttaagagaagcgggtttttcacagctttttattgcgaagtcacttaagcgaagcccatcgaccatcagcagagaattgaagagaaatcaagaagtccagacatactgccctgaacaggctcatttgaaggtattggcgcgtcgtcattttgctaaaaaggccgtgaaaataacgccggaagtaaaaagatggataaaacggttaatttggaaagatttaagccctgaacaggtggctgattatttgaagcaacataaagggatatctttgcatcatgagacgatttatagactgatttatcaagataaaagagaggggggtgatttatggcaacatctgcgaatagccagaaaaccctatcgcaaacgctatggtcgctatgaaagaagaggtaaaattaaaaatcgggtcagtattgatgaacgcccggaaattgttgataaaaaagaacgtattggggactgggaaggagatacgataatagggaaagataaaaaaagtgtcttattaacattggttgaccgcaagacgctgtatacaattatcgttaaacttgatagcaagcaggcatcagaagtcgcgaaagcagcagtgaaagtattatacccgttaaaacaaaaggttaagaccatcacgttcgataacggtttggagttcgcagatcatgaaatcatcggtgaagaattagaaacccaaatttactttgctcacccttattcgccttgggaaagagggatcaatgagaatatcaatgggttaatcagacaatactttccaaagggaaccaattttaatgaaatctctgatcaggaaataaattttgtggtaaaccgattaaataatcgtcctcgaaaaacacggggtgggaaaacaccgaatgaattatttaaaggaatacgaacatgtttacttccagattaa

SEQ ID NO: 6583 - DNA, 459 bp, Photorhabdus luminescens
atgtttacttccagattaacgatgttgcacttattatgtgaatccaagcgtgctttatattttttccctattttcttatttttatcttcttgttcaataaatctcccaccttatgaacgggaagcccgacattatgtttatcgctctaatgatgattttgaccctaattttgaaacacatgtaaataattctattaagcttatgacgccattctttgaacaattttatcgagaaggagttaaggatagaatgaataacatcagttcacatgaatttgagaaaaaaattaattattttaagagtgataatttaattcaagaaatcggcatgtccgaaatattcatttcacccaaaatacacacaaaagaaatcaacaatagtcagatttcaaataagaagaaaaaagcattaattaacggaatcatcaattcttacgaggccggttactatggcaagtaa

SEQ ID NO: 6584 - DNA, 255 bp, Photorhabdus luminescens
atggacacaataaactattcagcatttagaactcacttcgccagccccttagataaagtgaacgacaatcacaagccaattctgattactcatcagaatggcaagccagcgatcgccctacgtttggaagattttcaagcctacgaagaaacagcctatttaatggctagcccgaaaaacgcggcacatttaaatcaggcaattgctgaagtggaagcagggagaatgattgaaaaagggctattgaaagaatga

SEQ ID NO: 6585 - DNA, 306 bp, Photorhabdus luminescens
atgcagtatgttgtttatcgcaatattggcaattctgcttacccatatcttcttgacgtacagagtgacattattgatatgttgaatacaagattaatgatacccctgtttctgaaagaaaattttaaaggcaaagttcctataagattatgtccaatattgacaattgaggagagtgactacatcgtcatgactcatgaaatggcaagtatcagagtatctatgatcggtaatgaagttattgatgtcacatcccaccggaaacaaattaaagatgctttggattttctcattgatggattttga

SEQ ID NO: 6586 - DNA, 240 bp, Photorhabdus luminescens
atgccagcaacacaaatcagattaaagaaaacagtgagcgtgaccgttgcacctgaactgtatcaacaagcgagacaggtagggcttaacttatcagcagtgctgactaaagcactaatttcggaactgaaagccgttgagtctgaacgctggaaacgtgagaataaggcaggaatggaagaacttaatcgtatcactaacgaacacggtttactgtctgacaagtacagggtgttctga

SEQ ID NO: 6587 - DNA, 372 bp, Photorhabdus luminescens
atgacagtatcccccaagcctaaccttcaacttgtttacgtatctgatattgaatgttcgacggtcttctacgagacgattttcaatgctaagccggtattttcgagccctcgttatgtggcatttgccgctggcggtgaagcactattcgctatttggtcaggcggaacaacgccagatgcctctactcctcggttctctgagatcggtattatgttgccatctggagaagatgtagatcgcttatttgaagaatggcagaagaaacccgatatcaagattgtgaaggaaccccacactgaaatttttggtcgtactttcctcgttgaagatcccgatggtcatattattcgggtatgtcctttggattag

SEQ ID NO: 6588 - DNA, 573 bp, Photorhabdus luminescens
atggctcacatacaattaggaaatggtgaaattattaatcttaccgaagcagaaacaagaaattctcgcgaagcgaaaggcggatatgtatatatgcttgataatatagcgtataagccaatgaatctaaacaattctattaaaagtgtttttaaaaactgtgatcgtagttatggcttgccaagcgtatacttagacgtttttaatgctaaattttcatttcaaggtagcaatggtatagatcgtaatgatgacgctactattattaagatgaaacgcattgataccagtaataatagtggtaatcatttctttcagatttcccacggtggtagagcgaatcttgaaaactttattaataacgaaagtgataaagaaaggttaaaaagaattttacgagctttatgtgcagctagggaatcaaatttaaaagatatccaaggtttttattcgtcgaaaggatctaacccgatattgttctgtgatattcattgtggtacaacccctagcttagaaattgaagaattgattgaatatactcaaaataggatgaaaaattcccttgacgattaa

SEQ ID NO: 6589 - DNA, 1320 bp, Photorhabdus luminescens
atgcaccggtattttgagagagtaaatagaattagttacgaaggtaggcaaagtaataatccattagctttccgtcactacaaccccgaagagattattctaggcaaaaagatgaaagatcatctgcgttttgccgtctgctattggcacaatttttgttgggatggtactgatatgtttggttctggggcatttgagcgtttttggcaaaaagggggtgatgctttagaactggcgaagcttaaagctgatgttgcttttgaatttttctacaaactcaatattcctttttattgtttccacgatattgatgttgcccccgaaggttgttccttaaaagaatatatttataatttgggtgtcatgtccgatattcttgcagataaacaagcagaaactggcgttaaattattatggggaacggcaaactgttttacacatcctcgttatgctgccggtgcgtcaacgaatccagatctcaatattttcgcttatgcatcagcacaagtatgtcaagttatgcaaatgactaaaaagctaggtggtgaaaattatgtactgtggggcggacgtgaaggctatgaaagtttgctcaatacagatttacgtcaagaaagagaacaaatcggccgttttatgcaaatggttgtggattataaatacaaaattggttttcagggaacattgctaattgaacctaaacctcaggaaccgactaaacaccaatatgattatgatgtagcgactgtttatggtttcctaaagcagtttggtttagaaaatgaaattaaggtgaatattgaagctaaccatgccacattagctggacactcatttcaacatgaagttgccaccgcgattgcattgggaatattgggctctattgatgcgaatcgcggggatgctcaattgggttgggataccgatcaatttccaaatagtgtcgaagagaattctcttgtaatgtatgaaatcttaaaagctggtggctttaccacgggtggtttaaatttcgatgcaaaagttcgccgtcaaagtattgatattgatgatctgttttatgggcatatcggtgccatcgatactatggctttatcattaaagagcgcggtgaaaatattagtagacggtaaattagatgaatatgtcgctcagcgttattctggttggaatagtgaattaggtagagatattcttgaaggaaaaatgacacttgatgaagtggctcactatgcagaaacattagttcaggaacctaaacatcgaagtgggcaacaggaattactcgaaaatcttattaatcgctatatttatgattaa

SEQ ID NO: 6590 - DNA, 1182 bp, Photorhabdus luminescens
atgaacagacgataccatataacactattacttaacgctaataaagcttatgatcgtcaggtgatagaaggaataggtgaatatttacaggaatttcaatgtaattgggatatcttcattgaagaagatttcactactaaattaaatagcctgaaaaccttacagagtgatggaattattgctgattttgatgatatagaaattcaacgttttttcagcccgttagagattcctgttatcggtgtcggtggctcttatcaccaagaaagtcattatcccgccgcgcattatattgcaacaaataactttgctttaatagaaagtgcgtttaatcacttaaaagataaaggtattaaacgctttgcattttatggtttacctcagacaagtggtaaacgatgggcaatagaacgtgaatacgctttccgacaattagtcgaaaaagaaaaatatcaaggtgtgatatatcaaggaatggagacgacaccggaagattggttttatgcgcaaaatagattaaaagattggctccaaactttacccccaaataccggcattatcgcggtaacagacgcccgagctcgacatattttagccgcatgtgaatatctaaatattcctattcctgaaaaaatctgtgttataggtatagataatgaagaaatagcccgttttctttcacgtacggcactctcttccgttgtgcaggggacacagaaaatgggctaccaggcagcaaaattgcttcataaacttcttaaaggctacgttcctaaaaaataccaccgccaattaattcccccgttaaaggttatagcaagacaatcgacagattttcgggcattaaatgatcccgcggttattcaagcaatgcattatattcgtcatcacgcgtgtaaagggataagagttgaacaagttattgatgctattggtatgtcacgttctaatcttgaaaaccgttttaaaagtgaatttggacaaacaattcatactattattcataatgagaaattagataaggtaaaaaatcttttaatccatacctctatttcaatcagtgaaattgttaccgtttgcggctattcttctttacattatttttactccatgttcaaacgaaattataatatgacccctaaagagtatcgagataaatataaaattaccaaaaagagttaa

SEQ ID NO: 6591 - DNA, 1443 bp, Photorhabdus luminescens
atgaagaataaattccccaccggtttcttatggggcggcgcggttgccgctaatcaagttgaaggttattggaatcaagatggtaaaggaatgagcattgctgatgttatgacaaaaggagagcacggcgttaatcgtgtcataactcatggtattgaggaaaataaaatctatcctaatcatcaaggtgtgaaattttattcccattataaagatgacattgcactatttgcagaaatgggattcaaatgttttaggacatcaattgcttggtcaagaatttttcctcatggtgatgaattacaacctaacgaagctggcttaaaattttacgatgatcttattgatgaattattgaaatataatattgaacccattattaccttatctcactttgaaatgccttatcatttggttaaggaatatggcggttggcataaccgaaaattaataaattttttcatgaattttagtttgacggttatggaaagatataaaaataaagtcaaatactggattacatttaatgaaattaataaccaaataaattggcaatatccactatttggttattgtaattcaggtgtgatttatcaggattatgacaatccagaacaggttatgtatcagactattcatcatcaatttgttgctagcgcaaaggttgtcaaattaggccatgaaataaatcctaattttaaaattggcggcatgatccatatgtcgccattatatccagcgagctgtaagccggaagatgttttatatgcacaacaagccatgcgtcagaaatatctttttagcgatgttcaacttcgtggatattatccatcttatcttattaaagaatgggaaagaaaaaagatagaacttcatattgaagatgatgatttaaattggttaaaggaaggttgcgctgattatttagcgataagctattatatgagtaatatcgtctcttcatccacagaaatgttagaaaaaaatagccaatccctctccttcttcgaaaaaggaagagacaatccttatttaaaatcctctgaatgggaatggcaaattgatcctataggtattcgatacagtttatctgagttatatgaacgttatcaaaaacccatttttatcgttgaaaatgggctaggttccgttgataaattacctcaaaatggtgttatcaatgatgattatcgtattgaatatttagcatcacacttatctgaaattaaaaaatctattttattcgatggtgttgatatcctcggttatacttcatggggatgtatcgattgtgtctctttttcgaccggtgaatatcgtaaacgatacgggtttatttatgtcaatgttgatgataatggaaatggggattttgtacgttataagaaaaagagtttttcttggtataagaaagttatagcaacgaacggcgaagatatttaa

SEQ ID NO: 6592 - DNA, 1314 bp, Photorhabdus luminescens
atgattaaagttatctatacaaataataaagaacaatggaaagaaggattgtcgatcataaaaacagatgagaaagccaatttaattgtcactaataatcgaggtcgaaaattagatggctttggcggttgttttaatgaacttgggatgaaagctttattagatctggataaagaaaataaaaaaactgtgttagataagttattttcgccagatggtgaatgcaaattaacattagccagaatacctattggtgccagcgattatgccatttcttggtatagtttaaatgatattgaagatgattataatatggcacacttttcgattcaaagagatagaaatttactgattccctatataaaggaagcgttaaaaagacaaccaaatttaaaaatatctgcttcaccgtggagtccgccggtatggcttaagactcaccaagtctataattttggcagattaaaaagcgatgttcaaagccagaatgcatatgctttatattttgcaaaatttatcgaagagtatcagaaagaaggtatttcaattgatcaaattcatatccagaatgaagttgctgcggatcaaaaatttccttcttgtgtgtggagcggtgaacagttaagagagtttataaaaaaatatctcggtccgaaatttgaacaaaataatgtaaaaactgagatttggctaggtactattaatgcccctgagttctctaaagaaattggacaggattatgatgattatgcaaattgtgtattgcgtgacatagacgcctataaatatataaaaggcgttggttatcaatggcaaggaaaaaatgctattcaaagaacggtacaaagctatccagaattaagatattatcaaactgaaaatgagtgtggtgatggtcataatagttgggaatatgctcattatgtctttacccttttcaggcattatttaaccaatggtgctaatggttatttgtactggaatatggtgctgcattcaggtggagaaagtagttggggctggaaacagaatagcatgataagtattccaaaaggaataaatgaagtgatatataatccagagtattatgtcatgcgtcatttttctggtttaattttgcctgatgcacaacatattgaattagaaggtagtatgtcaggaaatgccgttgctttcgagaataaaacaggttcccttgtggtgaatataaataactcttataaagaaaagcaaaaaataaatattagttataataatgatatttggtctatttatttggaacctaactcgattaattctattatctttaactaa

SEQ ID NO: 6593 - DNA, 879 bp, Photorhabdus luminescens
atgtctctcgtaccatttaaacaggttgatgtattcactcaccgaccctttaagggaaatcccgttgccgttgttatggatgctcaagaactttcatcaatacagatgcagggcattgccaactggaccaacctttctgaaaccacttttatccttccggcagaaaatccattagcagattatcgtgtccgaattttcacacccggtagcgaacttccttttgccggtcatcctacgatcggtaccgcacatgctcttcttgaagccggcttaattcaggcaagagaagggcgtattgtgcaggaatgtggggcgggactgattacattaaacgttaccgaaagggatgaaggtcagaaattaatcactttcgaactaccagaaccaaccatcacaccgcttagttccgagcagatagatcgcctcgaaagcattctagattgcccgttagatcgcgcgctaacaccggcacttatcgatgtgggagctcgttggattgtcgctcataccactggagcagaagctgtgctggcaacaaaacccgactatgccagattacttgaacacgacacgcaaatgaacataaccggagtttgtctgtacggtgcctatcatgaaggagcagaggctgatattgaagtacgctctttcgccccatcatgcggtgtcaacgaagacccagtttgcggtagtggcaacggcagtgttgctgcatttatgcgccaccacaaagtagcaatgattgacgataaaatcgttcattcatcacaaggcaaaaaacttggccgtcagggaagtgtatggcttagccattctgatggtaagatttttgtcggcggtagtgctgtgacttgtatcaatggcaccatcacaatctga

SEQ ID NO: 6594 - DNA, 279 bp, Photorhabdus luminescens
atgacgaaacaagctgtttttacgatgaaattagaacctgaactacgtgccgaatttatggctgaagccgaagctgctcaccgcccagcctcacaggtgctacgcgaactcatgcgcgagtttattcaacgccaacgtgaggaacgagaatacgataaattcctatgtcacaaggtagaagcagggcgagcctcaatgcgtgctggtttgggccaatctaatgatgaggtcgaagccgagtttgccgcacggcgtgccaatgtggtgaaccaagcgtga

SEQ ID NO: 6595 - DNA, 291 bp, Photorhabdus luminescens
gtgaaagttatctggacaccagaagcgaagcaagaccgcgctgacgtgtgggactacatcgcagccgataatccatacgcggcagccagaatggatgaacagtttagtgatgcagcatccaatcttgcacgacatcccatgcttggccggccggggaaaatgccaggcactcgtgagctgtttccaaacgagagttatcgcctggtatatgagatcaacggagaaatagtatggatattgacgcttatccatacagccagacagtggccacctatgcacaaaatgaagtag

SEQ ID NO: 6596 - DNA, 462 bp, Photorhabdus luminescens
atgattacttccactttctctgatataaatcttccggctaaacgcgaaagtgaaatagctggaaaggggctgcgtgaactttcagcgttcctttcaacaaaacttgaaactcagcagatttcaattattagtgatgatcataaatctcatcaaattgaagtgcctacatctgcgcttactatgctagtgcaaatcttgagtgaactcgcttcaggtaatgcagtgcaaattgttcctgttcatgccgagctaaccactcaagaagccgcaaacatattgaatgtatcgcggcctcatatggttaaacttctggaagatggttgtcttcctttccataaaacaggccgacatcggcgtattcgttttgctgatctgatggaatataaaaagcagcgtaatactgagagtatggaggctatgaaggcattagctaatcaggctcaggaattagggatctactaa

SEQ ID NO: 6597 - DNA, 960 bp, Photorhabdus luminescens
atgattaactttgaaaataaaatttcattaccaagaagtacagaagaacaactatataaacttgggaacgagctgcatagcgcatctgttgacaagttgtactctgcaagatattggggcaaatatggtactttttcaaaggttggtatggaggttcaaggaagtctagcttatggaatggctctggctagttcatcggatcttgacattgcatttgtttataaatacaacaatggcgaatcgatgaacagactcagcccgatagaactaaaggttaatgctgtcaatgtattcaaggaagtttttggtagtaggtataattatactattaaagctcccgtaataaatttaagtaacagtacagaagatgtcgatattgcatttttcaacgttctgaacaactcaacacctttatgctctatcgataaaaggtgttctgaattgaactatggaaaagatcctgccacatcagaatggtatcgttcagaacgtcttagcctatactccgaacttgataatgttttcagtaaaaaaacacctaaaagagagataattaatcgatcaggaaaaatattaaaagtatggcgggagaaaattttttccgatcaagatgtgaaaataccctcgattgccttagtgaccatgatttacgatttcagtaaggacaagggcactacatataattacaataaatccacagatactcttcgtgatgtaaccagctatggtattactaagtattttaagaatgataaatgtgaaggtgctccaaatgcaaagattgacttgcctgtatatcagcaagatagaaacctcttaagtagattaaattcatcacaacgtatgaatacctgtctgaaattagttgaatttaataaagcacttataaaggcaacatcggctcatgtaagcgaagctgattcggttaaaattcttgagccttttattggtcagttttaa

SEQ ID NO: 6598 - DNA, 921 bp, Photorhabdus luminescens
atgccacttgataaaaatgttgaaaaatggcttgcttctacgcctgaaattgcaataggagaagattcccccctggaacaacttcgaatcgttcttgagcatgctcttatccagcaacagggcgaatggaacgatgcgacatataatagcagctttactgtcctcgcagaggatggtttccctattccggttcgcatgtatgtaccctatggaaaagaaaagatgagtgataaacccgcgctggtttatgctcatggcggcgggtggtgtttaggaagtcttgatgcttgggatcgcccttgccgtaagctggcggaatcaatgggttgcgttattttctcggtagactatcggcttgccccagaaaacccttttccggtaccactaacggatttctatgcggctctatgctatgtcactgataatgcggaaaagtttggtatcaataggcaacaaattgcggtcggtggtgatagcgcaggtggtaatcttgccgttgccgcttgtttgatgtcgcgaaaccaagaagggcctgctatttgctatcaattgctattctatccagctttagatgcatcaatggaaacggattcatacgataaatatggtgaaggttatgtattgacaaaacagatgatggcattcttttggcaggcatacattaatgagcacaacagtagaacaaatccacttatctcgccttctcatttaacgcattttgaaggactgccagatgcaactattttgctttgcgaatacgatccgctaagaagtgaaggcgaagcttatgctcagcagttaagagatgccggtgtgtccgtgcagattgaaactattgagggaatgatacatggtgcgatgcatatgactgcggtgacaccatccgttgaagcattttacaaaaaattctgtttttgttga

SEQ ID NO: 6599 - DNA, 252 bp, Photorhabdus luminescens
atggccaacataattctgtcagatattagcgcaagcattagtgaacttaaaaagaaccctatggcgacccttagtgccggggctggataccctattgcaatcctaaatcgtaaccaacccgtgttttattgtattcctgcggagctctatgaacagatacttgatgctttggacgatcaagagcttattcgactggtaaatgagcgtagagggcaggcattggttgatgtagatttggataattatctatga

SEQ ID NO: 6600 - DNA, 288 bp, Photorhabdus luminescens
atgatctatagagtgaaattcacggaagatgcactcaaggagtggaagagacttgataaatcagtccaacaacaatttgctaagaagctgaaaaagtgctgtgttgaacctcatattccatcagttaaacttcgaggcatgccgaattgttacaaaataaaattacgcgcttctggttttcgcttagtttatgaggtcatagataatgtgttgattatcgtcgtagtagcagttggtaagcgcgaacggagtgaagcgtatgagctagcaagtaagagactaagatag

SEQ ID NO: 6601 - DNA, 912 bp, Photorhabdus luminescens
atgatcttaaaaaatatcaatttgttgaaagttgtacttattattacctttgcaacaaatcaatctcttgcagcaaataatattacatttctgagtaatccttcaccgcaacatgtcaaggatatcggtaattttgttgtgaaacaaactgaaaaaccatttttttccgatgttatattattcgcagcaaatattaacaatagtatatctaatagccctgtactgttttacaacgataaaataagctcgatactcaaagaaaatatttccctagtgcggaatttgcaaaaaaagggcatcagagttcaactatcctatctgggcaatcatcaaaatgcaggttggtcatgtaatatgagtcaagcaacggcaacgaaacttgccaatgaaatggtaaatgatgtcgttaaatacggattggatggaatcaatatcgatgatgaatattcaacatgctatggtaatcgtcaatccttctattgggtagcggatgcgattaaaagccatccaaaatttgccaacaaaatactcacaaaagccctgtggtcagattatctctacttcaaggaaccgacaaatatagcaaatttactggatgcaggttacgagatgacttacatcaacaccagtgccagtaagctggttccatacgttaacttcgggatgaagaaagaaaatttgttgttgggtatctcccccgaaaaaaattcgatatcctcagtgcagaatattacccgctcagtcattaataacggatatagtgggatgatggtatggtcacctaatacaatatttacaattgaccaagcatctcaatattacaccaaaatcatcaaagcagaagaggggataaataaagaagttatctatgtcccggataccagcaaagacaatgcaagtaattatgaataa

SEQ ID NO: 6602 - DNA, 3447 bp, Photorhabdus luminescens
atgaagagcgagtttaaagagggatattgtactctctgtagatcaagatgtggcactgtcaacgaagttcgtaacgatacactgataaaaatccaacagaacccaaaacacccgaccggcaacgccatgtgcatgaagggtaaagctgcaccagaactggctcatagtcctaaccggattcttcatcctctccgtaggacaaatcccaaaggtgatgccgatccaggctgggaaaaaatcacctgggatgaagcgttgacgtatgttgctgagaaactggctttctataaggctgagtctggtgcagaatcggttgctttctcagtcacctcaccaagtggcacacctcttagtgacagccttgaatggatagagcgcttcattcgaaatttcggcagccctaacgtctgctatagtacagaagtgtgtaactggcataaagacgaggcacataagtttacctttggatgcagtattcctgtagctgattacagaaatgccgagctgatcattttatgggggcacaatccaacaaatacatggcttgcgcaagcggaagctcttggcgcgggaagaaatgcaggtgccaaacttatcgttgtcgatcctagacatacggctcttgctaaagaatctgataattggctcaacatcaatcctgggacggatgccgcgttagccctcgggctaataaatatcatcataaaccgaagaggatatgatcaggcgtttgtagcacgctggacgaacgcctcattgttagtacgaaatgataatggtcttttcttgagagaaaaagatataaacatttcagctaagaaaaacagatatgttgtctggaataacataactcagtctccgctaccctatgatattcacgaaaatgtgccatgtgatgaaaatgatcattatgctttattgggcgaattttcgattaactctgcggaagatgtaaataaaaaaataccatgcaaatctgcattccagcgacttctaaatgagtgtcaaccatacacacctgaatatgtagaaaaaatcaccggcataaccaaagaaaaactcctatatgccgcagatttaatcatctcttccaaacgaattgcttatcattcttggacaggtgtagctcaacataccaatgcaacccagtctgaacgagcaattgccgtgctgtacgcactaaccgggtgttttgacactcagggaagtaacagggtgtacaataagcatcccgttaatcctgtaaatgctcgcagacttatgccaaaggagcagcaagaaaaagcacttggctttaaggaaagaccgttggggccacctctagatggttggataacatcacatgatctgtatcaagcaatcttgcacaaacggccttacccgattagagctatgatggcatttggtacgaatatgttgtcatctcatgctgacaccaaaattgggatagatgcgctaaaacagcttgaatttcatgttcattgtgatctctttgaaacgcctactgcacattatgctgacatcttactacccgtgaatacgccttgggagagagaagggctacgtgtaggatttgagatttcagctaaggcagaagaactcgttcagttaaggcaaaaaatgatttcgcctcggggagaaagccggtcagataacgaaattgtcttcgacttggcctgtcgcttaggcatgaatgatctattttttaatggaagcgttgaagcgggatggaattatattcttgagcctattggcttaaccgtagaggcgttaagagaaaagccagcagggatttcaatgccattaattcagcatgataggaaatacgcaggaatcgatcctgttaagaacacagttaaaggttttgataccgaaacaggagtggttgaaatctattctgaaaaattgtggcggcatggttatccgccactaccaatatatgatgaaccaaaagagaatttaaactctgagtcacatttcccttatcgactaacctcggtaaaaaatggtttctattgtcatagccaacagagaagtttaacccgtctgcgcaaaaaatcaccttatccgaagcttgagataaacagcagattggctgaaaagaaaggtattaacaatggagattgggtagaggtcatcacccgcaacggcgaggcacgttttaaagcatcgttagatgataatattgcttacgacacgataattgctgagtttggttggtggcaagcgtgtcccgactatgggaaggaaggttttcccgccataggaaaaaacagcagtaactataatgcgcttatttctgacgactcttgtgatcctatcagcggcgcttctccgctccgttcattccgttgtgatattaaactcgcagaagatatcaacccggagagaaggccgtggcagggccgtaaagcatttcgggttgtagatacaaaacccgaggctaagggtgtcaaaaccgttatttttgagtcacaagatggaacaatgctgcctgattatgaacctggccaacatatcacagtacaagtttccatacctggacaggatgcccctgtcatcagggcctattctttgacaggaacggcaacactggaaggtagaaagagttacagtatttccgtacgacatcagaaaagcataacttctgacggagaaacttttgaaggtgtcatgtcttcatatattaacaagacactggtagccggagccgaagtgaatctgacgcctccgggaggaaactttattattccgcttaatgctaagcaacctgttgttatgttggcaggaggaattggtattacgccattcataagttatcttgaatctcttcccgctaacggtgaaaagcctgaactcttattgttgtacgctaatcaaaacagcaatacacatactttttccaaaagactaaaagagattgagtcaaaaattaagcaattgaaggtaatcaactattacagcaatccgttgccagtggatattgagggtattaattaccagtatcatggatatattactgcggatgccgttcctgaaacactgattaaacagcaagctcgtttttatatgtgtggtccggctcctatgatgaaaacttttgaagaaggtttactcactctaggcgttccgccttttgatatctataaagaaatgttccgatcgctaacgccggtaaaaattaaagatgggaagagttttgctgttaaatttgaaaaatctggcgttcctcttgaatggtcccctgacaaaggaacactccttaattttggcgaaaaaagtggtattaagatggcaagtggatgccgggttggacagtgtgaaagttgtgctgtgaaattaaaaagtggcgaagtacaacacttaaatggcgtagaaccttcagagcaaggaatgtgccttacttgtcaatgtatacctatctcagatatttccattgatgcctaa

SEQ ID NO: 6603 - DNA, 1113 bp, Photorhabdus luminescens
atgtcaacagaatacaagatttatattgtcaaccagcaagataaaaagaaaaagttttggtgttttctcagtgaaccacaatcagaagtaagtgataaagtgtttgctaactcatcaacttatatgacattatctaagtatgaaagaggagatgaaaacgcttttattattcctcttgaatttaaattgaaggctagttcacacaataaggtggtaggtattagttcacaaatatctactcattcccttagaaatatagaattagggagcgtatggaaggtagaatttgactctagcgaagaacatataaacccatccttaagtaagttgagtgaggaaactgaacctaaccaagtcggaattaaaatcaatggtttcgatttgacagaacaagaaatcaatcagtggtatagctgtcttacatttggtattaaatcaggagcgggttttattggctactcctggctcccatcacccagcgacacatatcacattcagcctaagatagagttttatgttaaaaccggagagtatattgagaatcagctcatcaaaatgagtgacgtgtctagcgattctgcattgattacagaagaaaattttgacaaaagaaaggagtgtacagttatttatacgactacaggaaagtggaaaattaaacctggtaagccttcacagttactctatgataattcattagtgaaaaatttggtttctgcccatattaatttaactgcatctcattctgctttagttgaattgatcgaaaaaaactatagtgagtataactccaggcaggaaaaaagagtatccgatattgaagagcctaccctttggtatataagtgcggtgattacccttgctgctggatttactaacgagatattaataccaatcttaaaggaaaaaatagtgagttatttgtatggaaataattttgaattgaaagagataaggattgttaaatctggtattgaattcatatattccttaaaaagagggggaattttaagagatagtaaaaacaataaatatctgttggatataaccaaggaagccttggaatttgagaagcaagaacatcacattcagagttataagattacaaattaa

SEQ ID NO: 6604 - DNA, 1332 bp, Photorhabdus luminescens
atgtctaaaacccattattctgaatcattaaacctaaaatctcactggatgccatttagtgccaaccgaagtttccaacgcgatccacgccttatcgttgctgccgaggggcaatggctaaaagacgataaaggacgccagatttatgacagtctgtccggtctttggacctgtggggcaggccatacccggacagaaattcaacaagctgtcgctgctcaattgagcaccctcgattattcaccaggctttcagttcggtcatcccttgtcgtttcaactggcagaaaaaattgccaatttaacgccaggtgatctcaatcacgtctttttcaccagttcaggttctgaatctgtagataccgcggtcaaaatggtacgagcttactggcgagtgaaaggccaacccgagaaaactaaactgattggccgtgcacttggttatcatggtgtcaatattgctggtaccagtttgggaggtattggtggcaaccgcaaaatgttcggacagttaatggatgtagatcacttaccccatacattacagaccgatatggcgtttacgccaggtatggcggaaaccggcggcgcagaattagccaacgagatgctcaaattgatcgaactgcatgatgcctccaatattgcggcagttattgtcgagcctgtgtccggttccgccggtgcgattattccgcccaaagggtatctacagcgtctgcgtgaaatttgtgatcaacataatattttgttgatttttgatgaggttattactggctttggtcgcatggggcgctggactggcgctgaatattttggtgtgacacccgatcttcttaactttgccaaacaaattaccaatggtgccattcctttgggaggcgtagtggcaagcagtgaaatttatgaagcctttatgtcccagtctttaccggaacactccgtggagtttagtcacggttatacctattcggcgcatcccgtagcctgtgctgccgggttagcaactttagatctgttggataaaaaccatcttatccaacgctctgctgaacttgcccctcatttcgaaacggcccttcatgctctcagaaactgtccaaatgtgactgacatccgtaattgtggcttggtgggagcaattgagttggctgcccgtgacggtgataccgctgtacgtccttttgacgccagcatggcgctttggaaagccggtttttacgtacgctttggcggtgatacgctgcaattcgggcctatgttcaacgctgaacgagccgatttggatcggctttttgacgccgttggggaagtattgcatcacattgactga

SEQ ID NO: 6605 - DNA, 2412 bp, Photorhabdus luminescens
atgcatcattacatcggaatttgtgtggttgctcagtcccaaatcgtgagccaaggagtgaaagaagcgattaacaagttggaattgtcaattgcggccgaatctgatccttgtgaggtttggaaacttaattcaacagtttcagttgattctattatgacgtacttgcttcagcaagctagaggatatttacttgtctatcagaaaaagcatcaattttcttttcatgtcatgacctatgaaacgctggatgaagctctggccgatatcgcacggcatccggacagaacactcgatctggtaattgctgatgatctgtttttacaacatggacattatgagcaggtcagtcatcagtttttccgattgtttgagtcgaatcctgggaaattgtcaccctattctttcctgctctctttatcagagatgattcctggtagtgcacgaatacaagagatggattcagtgacactcaatatttggcagccagatccgcttgtttgggagatacaggtgctaaaaaacctaatggatcatttggatagcacttatattaatccattacttgttagagcgacgacgtctaaagtaacaatatcatcaatggcacagtttattcatgattatatggagtgccacttcaaggagcgttgggacttccactactatactgggtcgatgatctccggatttatcgattccatgcttcgtttgtgtgatggtacatctaccctgtgtgaaagtgggccgaatgagcacagtctggcagtttctgcactttgtggctggcagttctatcaacgtggttatgtaattgcggtaacttccggcatgatcgatgagtttcgtggcacattatgcaacctgaaacgtgctcatgcgccaggtatcatcatttgtgcagatagtcctggaaatagctggttcccatttcaaggtacgatgcatagagattatgatggtaagaagtcgattgaagcaaaaggaattccgtgcgtttatatcaatgatcaattgaacttgcctgagcggttaaatgaggcaatagatctattgcagtctcaacccggcccagtgtttattcttgcgacacaatcagttttggaatgtacactgaaacctgagcagctacctcatccgagtcagtggagccttttggttccacagattggggataatgaagcgtccgtcatggatgcagtaatgtctctgatcaaccatgataagcgtcgtatactgtggcaatgttgtcatttaacggatcatgaacgtgaactgatttatcagattgctgaaaaagcagggatagcgttagtagatacgctagtatctccgggggcggtcagtgattaccatcagcaaaagcctgttagtaactatattggaattctgtcggtttacggctttagcagcaaagtatttcattacctacatgaggggcagcagcttgctgatcctgaaagccagagtatttttttccttaaaagtaaagtcgatgaagcatcctcgccattttccgccagtaaacttaaaaataaatgtcatattattcaggtgaattgccgtttagagcacatgtcaccttacactgatctagctgtacatagctatttacgctcattcttaaaaaccgttctcactcgacttaatgtggatgaaaaggtacttgcttatcgtcgtcgcgaactggaacgagttcagaattatcctaacatcaccccgatagattggttgccacaggtgccgatgtcccccaattacttttatgcccatttagggaagcagttgcatcatctgattagtgagcagggatttgtctataccggtgtttatgatgtagggaggtgcggaatcggggcgatgcggaatttaccgaaaacagggaaaggattttccggttggtatggccgggcactgatgggcgatgcgttgatgtcactgccttatttggctcgtacatcatcccagaatattctggcatttattggtgatggtgccagagatttaatcccaaacattgagtcccatattgaacgagcattgatgcaaaatcctcatcggcagaagatcaatatttctgtgttttatctttgtaatggtatgttgtcgatgattcgatcatatatcgatatgagaagtgcgacgaataatacaaaacagaccttgcttgctgcatcgtcgcgtaatttgtctttgtttactgctgctaatgtccaggttgtccctgacgcatatgcgacaacacaggtaattcgtgagcgttggacaacatttgacgcaacctattgtgaaaccatgttaaccactcctcaaaccatttattttatcgatgtcatgctctcacataactccgatggggacgggatggtcctgttctctgaagcgacatggcagcgtgccaatataatataa

SEQ ID NO: 6606 - DNA, 1194 bp, Photorhabdus luminescens
atgaaaatattaaatattataattttatcgctatcgacagtgatagcttctaattctttagccgatgagattagagcaagggatttaggcattcctttctctggagtaaccgggaaatataatgcgattaccgatgttagtggtgtagaagttggctattcaaccataatagaaggcgatggaaagctagaggttggaaaaggcccaataaggacaggcgtaacagctatattgccaaaaggcaagaaatttagcccggtattttctagtacattctctttaaatggaaatggagatatgacaggcaatcaatgggtcaaagagagtggtttcctggaaacgccaatattaatcaccaacactcatagtgttggtattgttagagactcaacaattagctggatgattgataacaacctaacatcaccactgaaagatgatttattttggttattacctgtggttgcagaaacgtgggatggaatattaaatgatataaacggtatgcatgtaaagaaagaacatgtatatcatgcgttgaatagtgctaaatcaggagcgatagaggagggtaatgtcggcggtggaacaggaatgaacctttttaagtttaaagggggcacaggtacttcatcaagaattctagataaaaaagatggcggatatactgttggcgttcttgttcaaggcaactttggtgatagggacgatttgattattgctgggattccagttggtaaagaaatacaggatctcaagccgatatatcatggcggcaagaaaaaaataaaggatgccggttctataatcgccgtggtggctacagacgcaccattagcgcctcaccaattagaaaaaatagctaaacgagtctctcttggactagcaaaggtcggtggggtagccaggaatacgagcggtgagatatttattgcattttcgaccgcaaataatgatgctttctccagaaaagatgtaagaacaataaaaatactgtcaaatgacaaactagatcccttgtatgaggccacaataagtgcaacagaagaagcaataattaatgctatgatcgccgccaaaaaaatggttgggagaaatggcaatacttcgttttctattcctaaagatagagttcaagagatattaaaaaaacatcatgtcttagctcagactcaatctgacacttcaatttaa

SEQ ID NO: 6607 - DNA, 285 bp, Photorhabdus luminescens
atgttcaagaaattattaacagttggggcattagccgtgggtattacattaactggaggagttgggagtgcattggcacttgaaaaatgtccgagtcagaatataaacaaaaagggctcgatgtatactaggcatgttgttaatactcaaaaaaaatttgctaatgcatttgaacagaaatatagtggtaaaacgattaagtggtatttaaaaggagttgttaaatcttgtaattataacggacgtaccgcttatgctgcttactatgaaggtagggcaaaataa

SEQ ID NO: 6608 - DNA, 297 bp, Photorhabdus luminescens
atgttcaagaaattattaacagttggggcattagcaacagtattaattggagggattgggactgcatcggcagcgagttgtccgggacaggacgtaagcgtagcaggcgcagatagctcgggcttgaagtattctagaattgttgttaatccttatgacaattttgctaatgtatttactcggtatgagtctgatgttggtaaaacgattaaatggtattttaaagggcgttatggagcttgtgattataacggaagtactgcttacgccgcttactatgaaggtagagaagtttaa

SEQ ID NO: 6609 - DNA, 180 bp, Photorhabdus luminescens
gtggtgctggatattgcagtcaatggtgagcccgttgaaatcacccgtcgggacggcagcgttgccgtagtgatcagtaaagcggaattcgaggtgtatcagaatgcaaaactggatgccgaatttgatgctatgatgcaacgtcatggccacacagtagcagcgttgactgaccgatga

SEQ ID NO: 6610 - DNA, 885 bp, Photorhabdus luminescens
atgaacaagttagttgaaattttctgcgatgtcgatgatttttgccgcttcttcattcctcaatgggaattattttgtttcgaaaaagggtaccgccagcgtcatcggcaaggccatatgcaccccagtgaaatcatgactattttgatcctttttcatatggcgcattaccgtgattttaaacatttttatctggaacatatttggaaatatcaccacaaagatttccccaccctgctcagttatacccgttttgtcagtgttgccccttccgttttggtcccactatgtagttatctgactcaattaaaaggaaaaccgaccaagattgcttttattgattccacgagtttgtgcgtctgtcataacatccgtatcccgcgtcataaggtttttaagggaatagcccagcgcggaaaaacatcaatgggctggttttacggcttcaaattacacttggttgttaaccatcagggcgaaattctcgcgctaaaagtgactcccggtaatgtgaatgatcgagagcctgtacgcgaattatcaaaatcgttaacgggttatctttacggtgataaaggttatctcagtcaggaactggccgatgatttagccaaaatcggtgtgactttcatcacgaagaaacgccgtaatatgaaagcacaagcgctgtctgagtggaataacttaatgttaaaaaagagatttatcatcgaaacgattaacgggcaattaaagaccatttctcaaattgagcactcgcgccaccgaagtataaaaggctttctgttgtgtgttttaggtggattgattgcttacagccttaaattgaaaaagccatcactgaaaattttctactcagagaaagatattttaatgacggcttaa

SEQ ID NO: 6611 - DNA, 291 bp, Photorhabdus luminescens
atgagatatcctatttatttacatcaggctgacgacggatcgttttccggttttgtgccagacgtgatcggatgttactttgctggcgatactattgacgacgctattagcggtgctcaaaacgcattggatacttattttgaatacatgagcgaaaagggtgaggctccagcgcaagcgggaactgttgctgaccatctaagcaatgaagattgtaccggcggcagttgggcttatgttgatatggatttaactaaaagcgggttttttcttttaagtataccaaagtga

SEQ ID NO: 6612 - DNA, 276 bp, Photorhabdus luminescens
ttggctgatgacgacatatttcatattgcccgttatacgatacagcaatttggtcaaaaccaggcgaagcgttatcacgatgaactgaaaagaactttcgagttactagccatatctccctggattggtagggaatgtgattggatatgcgcaggaatgcgccgcttcgagttcaagaagcattccatctattacatgttgcaggatgacgacatcttcatttcacgcgtcattcaccagtcgatggacgttgatatactcgactttccagaataa

SEQ ID NO: 6613 - DNA, 243 bp, Photorhabdus luminescens
atggcacgagtaactagtgtaacccttggtgagcacttcaacggattcgttggtgatatgatccaatctggtcgttatggcaacacatccgaagttgtccgcgatgctttgcgcctgatggaggctcgcgagcagcgtattcagaatgttcgtgaaatggtgctagctggcctgaattctcctgtcagcaaaaacagcatggatgatatttttgtaatggcagcgaaggatttaaatgtataa

SEQ ID NO: 6614 - DNA, 441 bp, Photorhabdus luminescens
atgcggctatctattcgaactttatcagcctttacatcttttgctttcctcattgcgccgtttttcactcaagcccatagcggcaatactgctggtattaacgttgaaaaattgcttgagactgaaaagtcttgggatggcgtgtcttatcaggaataccctaaaggcactcctcagctttcagttctcaaaattactattgctccaaataccagtcttgcctggcatgagcacccgatacctaatgcagcttacgtgttgagcggggtgttaacggcagagaaaaaatccagtggtgaaaaacgtcttatgaaggcgggagaggtgttatccgagatggttgacagcactcatcgcggttacacaggcaaagagggcgctactctcgtggtcttctacgcggggcaaaaagatatccctctttctaaacccgttgagtaa

SEQ ID NO: 6615 - DNA, 582 bp, Photorhabdus luminescens
atgagcaatgttatcagagaaataagtgacgctaatattgcatatgcagcaacttttggtgataaaaaaaaccttggtttacctgctgtcaggcgatttgccatattgacttgtatggatgctaggttagatccagcaaaatttgcaggtttatctgaaggtgacgctcatattattcggaatgcaggcggaagagccagtgatgatgccattcgctcacttattatttcctataaactttttggcacaaaagagtggtttgtcattcaccatactaattgtgggatggaactttttacagacaatatcatgggcgatctactggaaagcagcctggaaagcgcgataatgacggatgaaggatttaaagatgtcggcaacggtacaggatcatctgaaggaaaatatatcaaatggcttactattaacaatcaagttgatagcgtagttgaagatattcatcgtattcgtacccaccctcttgtccccgcaaatatctccatatatgggtacatatttgatgtgaagtcaggaaaattaattgaagttcccgaagcagcaagcattgcagaagatgcttga

SEQ ID NO: 6616 - DNA, 1602 bp, Photorhabdus luminescens
atggcgctatacaaagcctcttcacggccaaaatccgattcagggcagggtaaatttaagaaacagttaacactcacggatttaaccttcatcggattaggggctatttttggttctggctggttatttgcagccagtcatgtgtctgttattgcagggcctgccgggattttttcctggctgattggtggtatcgccgtgctgttactcggcattgtttattgcgaactgggtgcggcactgccgaaatcaggtggcattatccgttatccggtgttttctcatggcgaactcatgggatatttaatgggttccatcaccttaatcgcattttccagcctaatagccatcgaagtcgtcgctgctcgacaatatgcggcggcgtggttcccctttctcagtcagccgggttcgggtgatccgactctgacaggctggctggttcaatttatcttattagcatttttcttttaccttaattacaacagcgtgaaaacctttgcaaaatccaacaatattattagtattttcaagtttatcgttccgctgctcgtcattattatcctatttaattatttcaatccgagtaatctgcaagttcacggattttctccttttgggatatcgggtattgaagctgcggtttcaaccggaggcattatttttgcctatcttggcctaacgcccattatttccgtcgctggtgaagtggaaaaaccccaaaaaacaattcctattgccctcattctctctatttcactgtctacggttatttatgttttattacagttagcgttccttggtgggataccctctgatctactttttagtggctggaataacattgggcaatatttttcattgccgtttcgtgatatagccttaatcctcggtgtggggtggctcgcttttttggtggtatgtgatgcggtgatctctccaagtggtaccgggaatatttatatgaatgccactccccgtgtagtttatggttgggcaaaaagtgggacgttatttaatgtgtttacccatgttgatgaaaaatcggggataccacgtcctgcactttggttgacatttattctttctgttttttggacattaccttttccttcatgggaaaaactcatcagtgttgtttctgcggcgttaattctgagctacgcattagcgccagtaactgcttctgccttacgtcgtaatgccaaggagataaaacgtcctttttatgttaaatggtttgcgatcattggtccgctttcctttattatttccgccttcattgtttactggtctggttggaaaaccgtttcttggctacttggattacagattatcttgttttttatctacttgttatttaaaaataaagttccgataggcaaagtgagtttgcgtcaacagataacctctgctttatggttgattagtttttacagtgccatgatcattttgtcctatttaggcacatttggcggtaagggaattattcccgcgccttgggatattgtggcagtggcagtgatctctttaattgccttctattggggaacttttagcgctttacccaatgctattttaccaacggaggatgaggattag

SEQ ID NO: 6617 - DNA, 1584 bp, Photorhabdus luminescens
atgttggtaacacattcaggtaggcagtttattggtggtcgcaggcaagcagagggggaacgctgtttgcacagtcggcgggcggtggataacgcaccaacgggttatgcgttttatcaagctacacgacatgaggtcgatctcgccgcccaagccgccgccgatgcatttacccgttatagccagacatcgttagaagaacgtgccgtttttttagataaaattgccgatgaaattgatgctcttggtgatgacttcattgcccttgtatcagaagaaacggcgctaccaccagccagaattcaaggtgaacggtcgagaaccagcgggcaaatgaggctgtttgccacgctgttacgccgtggtgatatgcatgctgcccgcattgatactgcgcaacctgcaagaaaacccctccctagagttgatattcgccaatgccatattcctctaggccctattgcggttttcggtgccagtaatttcccgttggctttttctactgctggtggtgacacggcgtcagcgttagcggcgggctgctctgttgttttcaaagcacatagtggccatatggctactgccgaaatcatcgcagaagccattggacgcgctattatcgccgcacaaatgcccgcgggtgtattcaatatgatttatggcaatagcgtgggggccgatctagtcaaacaccccattattcaggccgttggttttaccggttcacttgctggtggacgtgcactgttcgatatggcgatgcagcgaccacaacctattccggtttttgctgaaatgtcgagtatcaacccggtcattgtgctgccaaacgccttagcacagcgggggaaaccgatcgcccaagaactggcaaattcattcacattaggtagcggtcagttttgtaccaagccaggaataatcttgggtattcgttcaccagagtttgatcaatttattactcaattaacgcgggaaatcacgcttcgcccggcgcagtcaatgctgaaccaaggcacattacttaactaccaaaaaggtattcatcaactggatgatgaacccttaatgacacggttagccattggcgaacatcatgaaaatcaggcaagtgcaatgttgtatcgtgcagatattgctttattgttgaataaaaatgctctgttacaagaggaggtttttggccctgttgctattgtggttgaagccgaaagccaatatcagcttttacgcgcaattgactgtttgcaggggcagcttaccgctaccttaattggtgagcacgatgaattagcgaatgcacatgagctcagtcgacgattacaaaacattgcgggcagggtggttgttaatggctacccgacaggcgttgaagtctgtgatgccgtggttcatggcgggccttacccggcaacttccgatgtgagagggacttcagttggtacactggccatctggcgttttctgcgcccagtctgcttccaaaactatcctaaatccttacttccactcgcactgcaagaccataatccgttaaatatttctcgattaatcaatggggtgatgagccgggaagtgttgtaa

SEQ ID NO: 6618 - DNA, 921 bp, Photorhabdus luminescens
atgaacaagagaaaagttaattggcatggtgtttttccagcagtgacaacacaatttaactccgatttttccattaatttggatgccacacagaaggtaatgaccaacctgattaaagatggggtttccggtttagtcgtcaatggttctgtgggggaaaatacatctctgtctatgaaagagaagcgtactatcgttgaactcgcattagatgttgctggtggaaaagttcccgttctttcgggtatcgcagaattgacaaccgataatgcgtgcaaaatggtctctgaatgccgtcaggcaggggctaatggagtgatgatcatgccgccactggtttatacgccaacaccgaaagaaaaccgagcgtatttccgtacaatagcggcctctaccgatttacccgtcatgctatataacaaccctctgctgtataaaaatgatattacgccgaaaattctgacctctctggccgattgcgaaaatatcgtggcatttaaagattcatcaggcaatacccgtccttttagtgatattcccaatgaagcgggtgatcgcttcattctttttgctggtttggatgacgtcgttttagagtcagtcgcagtgggcgcggaaggttggatttcaggtatgtcgaatgcttttccacgggaaggggagactttattccgtctggctaaacagaaacgttatgaagaagctcgggaattatatcgctggtttatgcctctgttgcatttggatttccgtcctgatttggtgcaatgcatcaagttgtgtgaagagatggttggccgtgggagtgccattacccgtccaccgcgtctacctctcgaaagggaaacattggctgaagttcgcgccattgtagaacaagcccttgctaatcgtccttcactgcctgatgtcggtctctga

SEQ ID NO: 6619 - DNA, 825 bp, Photorhabdus luminescens
atgatgaatatataccgaaacggcattggcacaaatggtcatgatgcttgtaatgttgagtttttagcggcgctttgtagtggattagttaatcacaaacccagtaacctgcaagatattctcaatgcggttgccttaattacaccattgctaaatgcgattcccagcgtggttttctttatcaaagatattaaagcacgttatctaattgcgaaccttacgctagccacacgctgcgggtttaagtcgatctcttcgctactcggtaaaacctcttccgaaatctttcctgctcagatgggcagttgttacacggaacaggatttacgtgtgttgcatcaaggggtaattatccaaaaccaactggaactccacttttatcatggacgcaaagcaggttggtgcatgacatataaattgccattgtataaccaacataatcacattattggtatggcaggaatttctcatgatttgatggaagttaaggaaaatcaccctgtgtaccaaaagttggctatcgtcgatgattatattcgtgaacattttgatcgaacaattcgcctcgacgagctaactcatttaacatgcctctcggttgctcaattggaacgttactgtaaacgtatctttcacctgacacctcggcagatgatccacaaaattagaattgaaaaagcgtctgaattgctggcgacggaattacctatcacagatgtcgctttgcgatgtggttataccgatcacagcgcatttactcggcaatttaagacctcaactggactcacgcccagtgattttcgtcagtcaataggggtggagtaa

SEQ ID NO: 6620 - DNA, 963 bp, Photorhabdus luminescens
ttgggtggctttatggcagataaacatgattatcagattgttcgcgtcattgattcacacaccggtggagaacccacccggacagtaatcgagggatttccgtctcttggcaaaggaaccgttgccaaacagtgtcaacgctttgaaaccgaatttgatcactggcgcaaggctctcattcttgaacccaaagggaatgatgtgttggtcggtgcacttttatgtccgcctgctgtacctgacgccgatatgggagtgattttctttaataacgcggggtatttaggcatgtgcggccacggcactatgggccttattgcttcgctccatcatctgggctggttgacccccagcaaatataaaattgagacgccggttgggatggtagaggcggtactccatcaggatggcgcagtgtctgtttataatgtcccctcttatcgttatcagcaaaatgtcactgtcaacgtgcccggtgtgggtgatgttaatggagatattgcctggggcggaaattggttttttctgatcggtcagcataacctgtttctaacccccaaccatatcgatgaacttacgcaatacagttgggccgttaggcaagcactggcccaagcggggatcaccggtgaaaagggtgagtgtatcgaccatattgaattgtttgctcctgataaccatgcggatagtcgcaattttgtgttatgtccgggaaaagcctatgaccgttcaccgtgtggcactggaacaagtgctaagttagcctgcttagcggcggatggaaaattgcagccgggtgagatttggtgccagtccagcattattggtagcgtttttgaagcccaatatcagtggattggtcagaaaattgccccagtgatccggggaacagcgcatgtttacggtgataacaaattaatcattgccaagagcgatccttttgtctggggaatcaatgtatga

SEQ ID NO: 6621 - DNA, 1128 bp, Photorhabdus luminescens
atgacgccctgccaaatatcggatgtcattatcgttggtgctggcatcgttggagccgcatgtgcttatcagttagtacaggatggtttgagagttgttgtgattgataatggtggtaaaggggcgacacaggcaggaatggggcatctcgtgtgtatggacgataatcctgctgaattggcactgagcagttactcattagatatatggcgaacattcaccccacatatgccagaaaattgtgcatggcgtggatgtggcacactttggctggcggatgctgaggatgaaatggcacttgctgaggaaaagagcgcacgtctcgccgcctatggcattgagaatatgccgatgacagcaacacagattcaccagatggaaccgatggtgaggcgtgggattgctggtggtttgtctgttcctggggatgggatggtctatgcgccgaatgtcgtacactggtttcttgctagcggtaatgaaaaaattcagtttattaaaggccaagtgcatgccttaaagcctcagaccgttgtgctacgtgatggaaagaaatattgcgcgccgagaatattgttagcaaatgggctgtggagcacacatctgttacctgaattaccgcttgttcctaaaaaagggcaattggcgattaccgatcgttaccctacctgcatcacacatcaactggtggaattagggtacagcgccagtacacatgcatcgaatggcacgtcaatcgctttcaacgttcaggctcgccctactggtcagcttttaattggatcttcacgccagttccataacgaaaaacacactattgatctcggactactccgttctatgctccagcgagcacttcattttttacctcagcttggtcagatgaatattctacgttgctggtccggctttcgtgctgcaactccagatggcttgcctctattgggacagcatcctgcttatgaatggctatggctggccgtaggccatgaaggattaggtgtgacgaccgcaccgggcagtgccaaaatcatctccgcattgatgctgaatagcaaaacggagattgatcccttgccttaccagcctgcacgttttactgctatggcccatcagaggttgctatga

SEQ ID NO: 6622 - DNA, 255 bp, Photorhabdus luminescens
atgacactcaacaaacccccatttattgctctgtttatcgatggcgaattgatcaccgtgcctacggggattactgttgcggcggcgctagcttataccggtgatgaacattgccgtatatctgtatcacatcaattaagagtacctttttgtggtatggggatctgtcaggagtgccgtttgatgatcaatggtcaccactgtgtcgcgtgccagacagtttgtgaaatgggtatgaaagtcgagaggatctga

SEQ ID NO: 6623 - DNA, 1293 bp, Photorhabdus luminescens
atggcaacatcatcttcttctacagtattgcgttgtgatgtgctggttattggtgcaggacccgcgggattagctactgcacaggcggccatacaagggcaacaatccgttatcctgattgatgacaatcccagagcaggcggacaaatttggcgtcaagggccatttcatacattgccaccgatggcgaaacgttatttatcagtaacatcagaagatgccctgatctatttacccggttgtaaagtgattgcagtagacaaccaatgtgtgattgttgaaacggcaagccggcaccgaatagttcactaccaacgcatcattctttgtactggagccaaagaaaaattacttccctttcccggatggacattaccgggtgtcacaggtgcaggcggattacaggcgttgataaaaagtggtctccctatgacgggtgagcgtgttgttattgccggtagcggtccccttttgctcgcggttgcgcagacggtaaaaaaagcgggaggaaacgtagctggtatcgttgaacaagcgcctttgtaccgcttattttcgtttggcttgcagttgttccgctggcctaacaagttgcatcaagccatcacgctcataccgcttaaaaattattacaaaaacagtatggtgttgggagtggaaacctcggtagaaggcaggttgactggcgtgtatatcagcaataaagggcagaagcagaaactatcctgtacgcgtttagcttgtggttttggtttaagacccaatacggaattggcacaattgcttggttgcttgctggatgaacaaggaaatattcaggtagatgcgtggcaacagacgaccctatctggtgtatatgccgcaggagaatgcacaggtattggtggcagtgagcttgtactttgtgaaggatttattgccgggtttgcagcaagtggtcaatgcgctctggctgaaaaatggcggcaaaaacgagtaaaatggcaacattttgcaaccgcggtggcacagacgtttaaattgaatgaagagatcgcacgggcgcttccacccgataccttgatctgtcgttgtgaagacgtacatttaaacgagcttgaaccctttcaggattggaatagtgcaaaaatggcgacgcggtgcggtatgggggcttgtcagggaaaaatctgttctgccattctccacgatatcaaacattgggcaataccctcccctcgcattccactatcccctaccagtcttgaaacgctggcagcaggagacacggaaaaaattaacttttctgattga

SEQ ID NO: 6624 - DNA, 978 bp, Photorhabdus luminescens
atgcataagacaaatggaaccattttagatgtaccgggtgttaaggttggacatgctgaagatgagttgcaacaaaccggttgtagcatcattattttcgacgacggcgctgtttgtggcgttgatgtcagaggctccgcaccggggacaagggaaaccgagcttttagatcccattaacactgtccagaaagttaatgccgtggtgctaagtggagggagtgcttttggattagattccgcctctggcgtaatgcgctatcttgaagaaagaaaaaaaggttttgatgtcggtgttactgtcgtacctatcgttcctgccgcaataatttttgatctaaattttggcgatcctgcggtgcgtcctgacgctaaaatgggctaccttgccgcacaaaacgcttctgtaaccccttttccatcgggaaatattggcgctggcaccggggccactattggtaagatagctggttttgacaaagccatgaaaggtgggcttgggaccgcatcggttaaattacctgatgggctaacaattggcgcaatggttgttgtaaatgctgttggtgaaatcagagaccctaaaaatggtaaaactattgcgggcgcatgtgatgaaaacggtcatcttatcgatctcattccctacattataaaaaataataaagataataatttcactcagggaacaaatacgaccattggcataatttgttgtaacgccaatatgaataaaagccagatgaaaaaagttgcccagatggctcatgatggtctggcgaggacaatataccccgttcataccatgagtgacggggatactatttttgcagcggcaacaggtggtgtggactcatcggtgaatattgttggtattctcgcggctgaagtcatggctgctgcggttttagatgcggtgaaatcagctaaatcaaaatttggtgttagaggttatgccgatttagcactttcgatttag

SEQ ID NO: 6625 - DNA, 771 bp, Photorhabdus luminescens
atgctgcaaaccggaaccatcaaatgtaaggttcacaacattaagatgaatcagggtaatggtgccgattatgaaattccgattcccttttttttactcactcatcctaacggccatacgctaattgacggtggcaatgcagttgaaactgcaactgaccccgaaggctactggggaactatcaccaaaacctactggccggtgatgcgtgaagatgaaggttgtatcgctcaagttaaaaagttggatatcgatcccgcagatatccgctatgtggtgcaatcccatcttcatctcgatcacactggtgcaataggacgcttccctaacgcgacacatatcgtacagcgacgtgaatatgaatacgcctacacacctgactggtttgctgctggtggctatatccgcaaggactttgaccggtcaggtctgaaatgggagtttctcgatggggaacgcaatgacatgtttgatgtttacggcgatggcacgttaaaaacggtatttactccggggcattcgccaggacaccaatcactactggtcaccctgccgaacagtggtagcctgctgttaacgattgatgccgcttataccctcgaccactgggaagaacgggcgctgccggggtttctcacctctaccattgaaaccgtacgttcggtgcaaaaactacggcatctagccaaacgcacgaatgcaatcgtggtaacgggacacgatccagatgcctggccaacattccgtcaggcaccggaatattacgattaa

SEQ ID NO: 6626 - DNA, 948 bp, Photorhabdus luminescens
atgtataaccgatatccatatcctagttctgctattggagacaatcttatttatgatatggctacggtgataaggcttatatttaagccggattatttaacgggaaaatatgtgcttgatttaggctgtggaacggggcatcgtttgttagggctggcaagtatgtatcccgatacccaatttgtgggtattgatatgacggataaagcgttagaggtggcagataagttgatatcttatcatcagttggataacgtcacgctagaaaataatacgattgagaagctaacacgagataatcaatttgatgttgttgtttctaccggtgttatccatcatatggaatttccacaagagggttttttagccgcttcacgttcattaaatgaagaggggatagcgcttatttggctatacaacgcgataggagaatatgaacgattgaggcagcgagaacttttgcagatttttgtaaaacaaaatcatgcagaagagtattttttaaatactgatttaatgaataagctatgcgataacttaagtcgaaatcaatatggcgatagtacagctaatcatttagatgatagtgttgatcaggttgctgttaatgtagatgcatttttgaatcctatcgtcaacgcatacagatatgatgaaatatgcgatttttattatcaagctggctttaaacgtgtgagatgttgtgggttcaatcgtgaaaacggcaataagctttttgctggatgttgcgatcaattcaatgatgaatattttcttcaatatcgagatttgcttttagatgaacaattaaatgaaatctttaatgctcttgattataaccaaaagattcgtgctatcgagctcttatggaagccaaccggcatatcttcgataggatttaaatctgaaaatgcccagtcttttgtcaatgattggctaagaggataa

SEQ ID NO: 6627 - DNA, 1236 bp, Photorhabdus luminescens
atgcatgtcggcattattggggcggggattggtggtacatgtttagcccatggattacgtaaacatggaataaaagtgacgatatatgaacgaaactctgccgcatcatccatacttccgggttatggaattcatataaattcattcggtaagcaagcactgcaagaatgcctcccggctgaaaactggctagcctttgaggaggcatcaagatatattggcggacaatcccggttttataatgaacgtatgcgtcttctcgccgttcatggcggtatttctccaatggcagggaaaattatttccgaacaacgtttgtcaattagcagaactgaactgaaagaaatactcaacaaggggcttgcaaataccattcaatggaacaaaacattcgtccgttatgaacatattgaaaacggtggtattaaaattttctttgccgatggcagtcacgaaaatgtcgatgtccttgtcggtgcagacggtagcaattcaaaagtacgtaagcagtaccttccttttatcgaaagattcgatgttggtgttagtatgatcattggtcgtgcacgtcttaccccggctctcaccgcgttgctaccccaaaatttccgcgatggtacacccaatagtatcgtccctaaaagccccgactggttgttcatctctatgtggcgtgccccagtgaatattcatgtagaggcatccttagcggaaatcgataattttatcgtatgggtttacgtagcagcaacagatagtcttcctgacaatatcaccgatttttccgctgaagccctctgcgatctggttcaatcgcgtatgatttcgtgggacccaagcctacatactctggttcaacaaagtgatatggaaaacatctctccgctacatttacgcagtatgccccatcttctaccctggaaatccagcaccgtcacattacttggggatgctattcacaacatgacgccaatgacaggctcaggagcgaacacagcgctgcgagacgcacttttactcacgcagaagcttgccagtgtagcgtccggccacgaagagttagtcaaggcaatttcagattatgaacaacaaatgcgcgcatatgctaatgagatcgttggaatttcactgcgcagcgctcagaacgctgtaatacatttttcaataccaccattgaaacaacggcatttgagcataagaagaaataaatctcaaagtcatcaacaccgacgttaa

SEQ ID NO: 6628 - DNA, 1704 bp, Photorhabdus luminescens
atgtcaaaaataatccagacagattcttttagtgaacagtcttatcagatagataatttcaatccatcaactgaaacaataaatttcagttacacatcgggaagaatcgcattaccagtctataataaatatgacacacgaaataaacctaaagtttttggttattatacagattggtcgcaatatgacggtcgattacaaggaaatcaagatcccattcgtcgaggtagaggaatagatttacagcaccttttagataatccttttgcttatgataaattagttattggtttctgtggaatattaggtgatgagggcgaaaagaagcagcaaattaaagagcaagcgccattatttgcccgcaccaataatggagaagtgacattcacagatgcttggggagattgccaatcttatcagaattgtacttattctggttggcaagatatccaaatgccaagggatttcgatcaatctaaaagtatgggcgtattaggtggattggctaaagttcaacaagctgcaaaagctcaaggccatgatcttattatgtcatttagtgtcggtggttggaccatgagtaatggcttttatgctatggtcagagacgaaacactaaaatcctatttctgttcgagtctagtggatatattccaacgtttccctatgtttaccgaaattgatattgattgggaatatccgggcgttgctggaaatgaaggtaacatgtatgcgtcagacgatggcgattattatgttagtttaattaaagatttaactgctgcttttaaagaagcagggcgttcagatataaaaataagtatcgcttgttcggcggtaccagagaaaatggaaaaatcaaaaatacctgaattactgcaagttgggctatatggtgttaacgttatgacctatgatttctttggtacgccgtgggctgaaaggttgttacatcacaccaatctccgcaattatcctagtggtgagaatagtgtagaaaaggcggttgaatatttattgagtcttggtgtgcctgcatctgccattaatattggttacaccggctattcacgcaatggcagaaatacggttattgatagttattctccattatccggcagttatgatcctggttatgtcccgaaaaaagaaccgaagattaccacaaccggctcgtttgaatcagggaccacagaatggtacgacacgatatataattatctggatttggaagaaaagaggggaagaaataattttgacttatataccgatgaaatagcagacgctgattatctctataataaggatagtcagttgtttatttctcttgatacccctcgttccgttaaatctaaagcacaatatgcactagaaaagaatctgggaggaatatttacatggaccgccgatcaagatcgtggtttattggtcaatgcggcgagggaagggcttggttgtgagttaatcacggaaaaaatagatatgacaccattctacttcaagggtgttaatgttgaaccggttgatcccattcatcccgatacagggagtgattaccctgtctgggatgcaaatagggcatataaggccggcgatagagtgagttggaacaatcaaaattgggaagctaaatggtggaatagaggcaccgagccagatggtgcaggaacatctgatgcttatccttgggtaaaaattgcataa

SEQ ID NO: 6629 - DNA, 1599 bp, Photorhabdus luminescens
atgaaagctaaagatgttcagccaaccattattattaataaaaatggccttatctctttggaagatatctatgacattgcgataaaacaaaaaaaagtagaaatatcaacggagatcactgaacttttgacgcatggtcgtgaaaaattagaggaaaaattaaattcaggagaggttatatatggaatcaatacaggatttggagggaatgccaatttagttgtgccatttgagaaaatcgcagagcatcagcaaaatctgttaacttttctttctgctggtactggggactatatgtccaaaccttgtattaaagcgtcacaatttactatgttactttctgtttgcaaaggttggtctgcaaccagaccaattgtcgctcaagcaattgttgatcatattaatcatgacattgttcctctggttcctcgctatggctcagtgggtgcaagcggtgatttaattcctttatcttatattgcacgagcattatgtggtatcggcaaagtttattatatgggcgcagaaattgacgctgctgaagcaattaaacgtgcagggttgacaccattatcgttaaaagccaaagaaggtcttgctctgattaacggcacccgggtaatgtcaggaatcagtgcaatcaccgtcattaaactggaaaaactatttaaagcctcaatttctgcgattgcccttgctgttgaagcattacttgcatctcatgaacattatgatgcccggattcaacaagtaaaaaatcatcctggtcaaaacgcggtggcaagtgcattgcgtaatttattggcaggttcaacgcaggttaatctattatctggggttaaagaacaagccaataaagcttgtcgtcatcaagaaattacccaactaaatgataccttacaggaagtttattcaattcgctgtgcaccacaagtattaggtatagtgccagaatctttagctaccgctcggaaaatattggaacgggaagttatctcagctaatgataatccattgatagatccagaaaatggcgatgttctacacggtggaaattttatggggcaatatgtcgcccgaacaatggatgcattaaaactggatattgctttaattgccaatcatcttcacgccattgtggctcttatgatggataaccgtttctctcgtggattacctaattcactgagtccgacacccggcatgtatcaaggttttaaaggcgtccaactttctcaaaccgctttagttgctgcaattcgccatgattgtgctgcatcaggtattcataccctcgccacagaacaatacaatcaagatattgtcagtttaggtctgcatgccgctcaagatgttttagagatggagcagaaattacgcaatattgtttcaatgacaattctggtagtttgtcaggccattcatcttcgcggcaatattagtgaaattgcgcctgaaactgctaaattttaccatgcagtacgcgaaatcagttctcctttgatcactgatcgtgcgttggatgaagatataatccgcattgcggatgcaattattaatgatcaacttcctctgccagaaatcatgctggaagaataa

SEQ ID NO: 6630 - DNA, 750 bp, Photorhabdus luminescens
atgatcatttttgtgacaggagcaacttcaggttttggtgaatcaattgccagaaaattcattcaaaacggagctaaagttattgcgactggacgccgtaaagaacggttagaaaaattaaaagctgagctgggtgataacttttactttgttcaacttgatgtcactgatcgggccgctatcaaccaggttgtagagcaattacccgaatcactccgccatatcgatattttagtcaataatgccggtttagcgcttggattagaacccgctcatctggctaatttggatgactgggaaataatgattgataccaatgtcaaagggctcgtcaatatgacccgtgctctactgcctgaaatggtaaaaagaaatcatgggcatattattaatatcggttctaccgctgcaagctggccatattccggtgggaatgtttatggcgcaactaaagccttcgtcaaacagtttagtttgggcttacgagccgatttgcagggaaaaaatatccgagtcactgatatagaacccggcttagtgagtggcactgagttttctttagtacgttttaaaggcgacaatgataaagtgaataaaacctacgatggcacgcaagcattaaccgccgaagatgtcactgaagctgttttttgggtcgctaatttacctgctcatgtcaacattaatacattagaaatgatgccagtttgccagtcatttgccgggcttaatgtgcacagaaatgaataa

SEQ ID NO: 6631 - DNA, 363 bp, Photorhabdus luminescens
atgaatatttgtaattctttgatattaaaagccatgccagctatcgctctggcaataccattgttatggcaaacgccagcattggcggcaacttgtacttctggaagtacctgcgtcacagtgaatggcaacggagattctgtgctcgataaagaagccgctcgtcaaagcaaagaacaatggaatgaaacaaagaatcttcgcactaaagttaataaacgtgccgagaaagagttcgacaagttcgataaagccattgatgctcgtgatacatgtatgaaaagtaccaatatcaatgcttattgggaacccaataccgaacgttgtttagacagcaatacaggtatgcccatcagaccgtaa

SEQ ID NO: 6632 - DNA, 264 bp, Photorhabdus luminescens
atgaagatgaagaaagcgcttttatttagcgcactgctctttaccctacctccatttgcacttgctgcacaagcttcatgcgaaagcgtgaaagaacaaattgcgcagaaaattatcaataatggtgtgccggaatctggctttacattggaaattgttgctaatgaccacattgaacaagccggtggtaaaatcgttgggtattgtgaaaataataccaaaaagattatgtatatccggcaaggaagccaatcttccaagtaa

SEQ ID NO: 6633 - DNA, 1398 bp, Photorhabdus luminescens
atgggtgatcttatcactaagaaaattcgctttgccgtggtattttttatagcattagttgtatcaggatgtagcgctttcgcagaaaatcaaacagaagaccagaattttaatggcaacaacaatgcgcaatatgtaaaaatttatttgcataataatacatcacattcattagtggctgaaaaaacagacttactttggggaagttggattgaaaaaccatcgtcatcaatatccgcatatagtcacgattcatttgcctcaaaaggtaagatttttagtggcaccgagggcaaaattatttatcgtttacccaatggtgaagataagttaaatgttcactggaacctttcatattggggtgtacagaaccacaatatccatctctccgaggcatcaactcattataaacttgagaaaacagttaaaagctcatcttctttaggcatacagattgatatttatctcactgaaaaaaatataggcagcaattataaaattgccgtgatgtcagatcctcagccgtggcgtttagatcctgaacagggcgatcctaatgccgacaaaaaaccgtgggaagaattaaataaaaaggtagcaaatagtatcaataatatttatgaccgcaatcatcttgcttttggcattgttaatggtgatcttaccgagtttggacgcgctagtaccagaaaaagccttgaggagatatatacatcaaaaatcaaattcccgctatttatgggattaggaaatcatgattatgcaaataatgttaatgattgtacttatccagaaggttttgatttcagtcgtaatgcctgcgccagatctgctgtctttgatatggcagagagaataagtgattatagtaaagaattgaataatttctcctatgactatgataatgaagcatggaaaggcagtttatcttattcctgggatttcggggatattcattatgttcaattgcaaaactatcctacctataatgtcaatttggaccactatgtcagcccaaccgtttatattacaaaatcccttgattggttggaaagcgatcttgaatctgctcagacaagaggaaaagctgtagttttaaattttcacgatgggtatgaccattttattaataacagcagttatgctgaaaaagaaaaatttaagtcgctgattaaaaaatacaacgttatggctgttttcgttgggcattcacatttccttaaagaatacaccgcctcgatatttggaaatgcaagagtctatgacagtggagcactatttaaaggtgatttctttatcattgatgttaacaaaaaatgcatgcaaatatctgcatataatggaatagacggtactccaaagtttgttaaaaaaatgaccactgtttgtggtaaatag

SEQ ID NO: 6634 - DNA, 156 bp, Photorhabdus luminescens
atgaatgaacctgttcgaaataaccgttatttcgctgataaacatgaatttcgagacaaagtcttcaaatttttcaccacaacgctacctgatatagcggactcgctgatgtctggaattaacgaccattttcaggtgctaaaaacggcatcttga

SEQ ID NO: 6635 - DNA, 393 bp, Photorhabdus luminescens
atgactaaattcatccttacgctgtctattatccttggtcttacagggtgtgtttcgcagaaacaaccactttctcttgattacatcgcaggtaatgaaacatttcatttatccaaaccttgtatagaacaagctcttcctgtaggagaagtcggtgatgatttagctgtgaatgccaataacatttttattaaggttaaaaaaggactgaattgtagtgaccggttcaaactttttttagcaagaaacttagggaaagagttgtttatttactttgacggtaagccagtcataaaaaccagacttgtttctatgattcatccagaagaaggcttccatcaagcagtagaatcgaaatcattgtcagatggaattcttagatccttgaattaa

SEQ ID NO: 6636 - DNA, 708 bp, Photorhabdus luminescens
atgttaacgcgcctatttgttacggggacagataccaacataggtaaaacaattgttacccgtgcattattacaagcttttaatcgtgatggagcaacggcagtagggtataaacctatagccacagaagggtatgaaacagaagaaggtatgcgtaatcgagatggtgtgattctacaaaaatcttctcctgttccgcttaaatatgaagaaattaaccctgttatctggaaaaacagctattgtgaaggcaatcaggttgatttcgaacagatgaaaaaaggattaaataatcttagtaataaagcagatcgcgttattattgaaggtaacggtggttggcgcgtattattggatgatgaaactttttattttgattgggtgattcaggaaaaaatccctgtcattttagttgttggtattcagcctggctgtgtaaatcactcaattttaaccgcacaggcaataataaatgatggattgcaattagtaggatgggtagctaacagaattaatcctggtttatcacactatacgaaagtgatggataggttacgccgtcacattaatgcaccacagttaggtgaaattccttatattttacgtccagaagaaaaagatttatcctgctacctggatgtcgccactatatttaaacaagttgggggaagtgagagtgaagttggtatagagagccaatatacataa

SEQ ID NO: 6637 - DNA, 1212 bp, Photorhabdus luminescens
atggatggacaaccagggcatattgatcagattaaacagattaatattggtactgtttatcggttaattgatcaatatggtccaatttcccgtattgagctgtccaaaaaagcgcaacttgctccagccagtattactaagattgtccgtgaattggttgatgcacacttagtcatggaaacggaatttttggatttaggatttagagggcgcccggcgaccggactaaagcttgattctgaaagttggcatttcctgtgtgtcagtattaacttgggaagtttaatattgggactgcgtgatttaagtagcacgttaattgttgaagatgttttaccattaccggccaacaaggaaaaatcctttttagatagcattattgatgagattgatgcattttttggtcgctatcaatctcgtcttgagcgtctgacggcaattagcatgacggtaaatgcgattgttgatccgactcaaggtttaattcacagtttcccttattaccaggttcaggaattgccaataggagaatatctgcatcgtcgcaccggattaccggtatttcttcaacatgaaataaccgcctggacgatagctgaatcattatatggcacagcaaaaaattgtcagaatgttatccaaatggtcattgatgaacatgttggtgttggcgtgattattgcggggcaaacattgcatgctggcaaccgtggtgtcatggaggtagggcatattcaggctgaacctaatggtgaacgctgttattgtgggaattttgggtgtctggaaacggttgtaggtatcagccatattttatccagagccaaacggcagttggcaatggtacccgattctttactaaacggtgaaccactgaccgttgagtcattctgtcaggcggttaataacggtgatactctggcagtcgatattattcgtgatattggagtaaaaattgggcatattattgcaattatggtcaatttatttaacccagaaaaaattttgatgggttctcctcttaatgcttcacaacaagttttgtatccggtgatcagtgaatgtattcaacaacacgctttgcctgcctatagcaaacagattgaattagttccaacaaaattcaataattcaggtacattatccacggtagcatcagttaaaaaagctttatatgatggttcattgttgatcagtttaatgaaaggataa

SEQ ID NO: 6638 - DNA, 915 bp, Photorhabdus luminescens
atggctatcgaattacggcatttacgctactttattgcagtggcagaggaattacattttggtcgtgcggcagaacggcttaatatttcacagccgccattaagccaacagattcaatcacttgaaaatagtataaatgcgcggttgttagagcgtaataaccggaatgtgagcttgacgccggcaggtaacatgtttctgaaagaagcttatcagatcctggcccaagttgatgctgctgcagcaaaagcagcaagaatgcaaaaaggggaattaggcgaaatatctatcggtttcacctctacgataccgtttatgaataaggtcactctgagtttacggcaatttcgggaacgttacccggaagtcgctattcatatgcatcagatgaatactaaacagcagattgcgccattgctgactggacggattgacgttggcatcatgcgcaatactcaattacccgataaccttgagtatcggctattatttcgggaaccttttatgcttgctgtttatgatggacatcctttgttggaatatgctccacagggaataaagctcgaaatgttatcgggctatccgatggtgttttttgagcgcgaagtagggacagctttatatgatgaaatcatcacattacttgctcaagcaggtataacaccgatgatttcacaggaagccggcgaagcgatgactattcttgggctagtttctgctggattaggcgtcagtgttgtgactgaatcttttacccgaatgaaagtggatggtgtccagtatatttcattagttgataaccactcttgttctgaggtctggttggtaaatcacaaaaaccggccaatatcggccgccgcagacaggctgataaacctactcatatctaatattttgcatggaaaaaataagtag

SEQ ID NO: 6639 - DNA, 1275 bp, Photorhabdus luminescens
gtgagcgccagccctggtagtaataatcgcagtatcaatgaaaatctgactcttggtaatcatcttgtccaaaatgctcaaaataagaaaaatcatattcagaaggacgatcctctgtatgttaaagtgacattgtcactctttaccgtagggttagctgcatttgccctactctatttcgttcaacccatcttacccatgctgtcggatgattttggtgtttctcctgctaccagtagcttatctttatccctttcaaccggaatgctggcattgggcttattaatcaccggtcctctgtctgatgctatcggccgtaaaaatgtgatggtaacagcgctattcgccgctgcacttttcactttactcagtgcatttatcaccagttggcatggaattctgattgtacgcgctctggttggcttgtctctcagtggcgtagccgccgttgcaatgacttaccttagtgaggaaatccatcctaactttgttgctttatcaatgggactttatgtgagtggtaattctattggtggcatgagtgggcgattaatatcaggcattatcactgattatttctcatggcgggtttctgtcatcgtattaggtttattggcattaattgcggcaatgatgttttggcgtatgttacctgaatcgcgccattttcggccaagttctctcaaacctcactctttattaatcaatctgaaattacattttcgtgataaaggattgccattactgttttgtgaagcctttttacttatgggcggctttgttaccctatttaattacataagttatcgtttattagattcaccctatcactttaatcagtcaattgtcggtatgttgtctattgtttatttggcaggaacatacggcgcatccaaagtaggtccattaacccatcaatatggactcggaaaagtgctgatcgcgacgataagtatgatgctaatcggtacgcttattaccttattctcatctgcggtgatgattatcattgggatgatagtcctcactttcggtttctttgccgcacatgcagttgccagcggttgggtcggacgtcgtgctcgccgggccaaagcacaagcgtcttccctttatctgttttgttattacttgggttcaagtgtagcaggcacttttggcggtatattttggctccaattaggttggaatggtgttgttttatttattaccattcttatccttttggctctactcttagggtttaaactcgccaaacttccagaggcaagataa

SEQ ID NO: 6640 - DNA, 1017 bp, Photorhabdus luminescens
atgggaaattccagatttgaaggtttcactaaagaggaaataaaattggcatatgaatttgatatgctaaatcaatctatggtgatggcagaagcgaatgcctatgcgttgcaaaagcagttatatcgccttagccaaccacaaaaactgctaaataaaataggtcggaatgcactggtagagattaaagatacgatgatacgttcagtgcctgcttcaatatgtgcagggttggcaggtactgctacagcatcaggtggccccgcgatctcttttctcgccagtgcggcagcgggaagtattggtggagaattggcaaaacctattacgtcaagaaccggtgttcatactcagttgtatccgacctgtaccggtaatacgattaaagacattgagcaagaggtacagggaaaattacagggaaaattgagtggttaccccaagctacatgaactataccgtacctatatcaacaaagaatatgcgcgggattttgtgcttgataccgcactggcaaatacacctgatgtggttaccagtgttataacagaaggtgtcaataactggacggcgggtactttcagttccatgctgaaatatggcccaatacctattgtggctttaactgcggcggcgggattagatcctcgtggtatttataataaaggcaaagatacatttcatgctatggctagcataaaacctggcccacacgcagggggtaatctgaaagcgaaaaaactggaaaaattactatgtacttatcaagaatatttaccctatctggagcaaaatttatttcgtgcacgagattgcttaacgaaattgattaaattgctgaacagcaatctggatagaaaattaaatgttgaagcattcatgaaaaaatcccctaatcttgtcttatcatataagaacgctcacatggcatctcaagaaattatcaatatgcttgagttattgattatgctggaaaaagaaagagaaaatcaggtagttagggaaacctgtttataa

SEQ ID NO: 6641 - DNA, 4878 bp, Photorhabdus luminescens
atgaaagttaacgatatatattccaatgcatttaattttggatcttatattaatactggtgtcgatcccagaacaggtcaatatagcgcaaatatcaatattatcacgttgagaccaaataatgtcggcaatattgaacaggtacttaatttatcattctcgccattaacaacattaaataatggatttggtattggctggcgattttcattaacaatgttagatgtaaaaacacttacatttagccgctcaaatggagagcaatttaaatgtaagccattgccacctaataataatgatattagctttaaagataaaaaattaaaagatttgcgtgtatataaactcgatagtaataccttttatgtttataacaaaaatggcattatagagacacttaaacgaattggatcaagtgatattgcgaaaacggttgcacttgaatttcctgatggtgaagtatttgatttaatttataattcaagatttgcattatccgaaataaaataccgtatgacgggtaaaacttatcttaaactcaattactctggaaataattgcacatcagttgaatacccagatgataataatatctctgcgaaaatcgcattcgattatcgcaatgattacctcattactgtgactgtaccttatgatgcttctggtcctattgattctgccagatttaagatgacttatcagacattaaaaggaatatttccggttattagcgcttttcgtacaccaacaggttatgttgagctggtaagttataaagagaatgggcataaagttacagacacggaatctattccttatgctgctgcattgactattcaacctggtaatgggcagcctgcgatcagcaaatcctatgaatatagttcagtacataatttcttgggctattcttctggtcggacaagctttgattccagtcaagataatttatatctggttacagggaaatatacctattcatccattgaacgtgttttaaacggtcaaaatgttatttcagtaacagaaagagtgtttgataaatttcatttaatgaccaaagaagcaaaaacacaagataataagaggatcataacagaaattacttataatgaagatccgtcaaaaagcttttccgaacaaccagaaaatttacaacaaccctctcatgtgttaacacgttacacagacttacagaccaatacttcacgagaagagagtgttaatattaaaagcgatgattggggaaatactctacttattactgagaccagtgggatacagaaagaatacgtttattatccggtgaatggtgaaggtaataattgccctgccgatccattgggtttttcccgatttttaaagtcagttacgcaaaaaggatcacctgatgctgctcaaagtgtcgcaaatagagtgacttcctacacgtatcaaaaactgcccacttttaccggcgcttatgttaaggaatatgtcagtaaagcctcagagacgatagacagtaaaatagtgaggacctttaactatgttaattcaccgacaaacaaatctcatggttcattagcaaaaataacgtcggtgatgaataaccaacaaacggttaccacatttaaatatgaatattcagatagtgagatgactacaaactctacggtgacgggttttgatggtacacatatggaatcgaaaaatgtgacctccatttatacacatcggcaactccgtaaagttgatgtaaaccatgtcattacggaccagtcttatgatctttctggccgaattataggacaaattattgaccccggcacgacaaaagaaattaaacgtagctatatatatcaatatcctggtggtgacgaaaatgatttttggccggtgatgatagaaattgattctcaaggcatcagacgtaaaacccattacgatggaatggggcgtatttgctcgattgaagaacaagatgatgatggtgtttggggaacatcggggatttatcaaggcacatatcgaaaagttcttgccagacaatatgatgttttggggcaattggtcaaagagatttcaaatgattggttatgggatttatctgctaatcctttgactcgcttgacgacgcctttggtgacaacgaaaacctatcaatatgatggttggggaaatcgttacagtactgagtacagtgatggtcggatagagctggaaatccatgatcctattacgaggacaattactcaaggggtcaaagggttggggatgttaaatattcagcaaaataactttgaacagcctgcttcaattaaagttgtgtatcctgatggtgcgatatatagcactcgtacctatcgttatgatggatttggtcgtacggtgactgaaacagatgcagagggttacgctacccaaattgagtacgatctatttgatcgtatagtgaaaaaaacgttgccagacagaacaatattagaatccgcttatgcaagctttagccatgaagaattaatttctgcactgaatgtgaatggaacacaattgggttcattagtttatgatggtcttgggcgggtaacccgcgatacggtgggtggccgcaaaacggaatatttatatggatctcaaggtgataaacctattcagtctgtcacgcctgcgcataataaacaaaacatcgattatctttacgctctcggtagtgtgatgtccaaatttaccacagagacaagccaacaaaactttagttactatcagaaaacgggggcattattatctgcgacagaaggtgtatcccagagcaattacagttattttccatcgggtgtattacagcacgaatcattttcgcgggataataaaccgatttcatcgggcgattaccgttatacgatgtctggtttgattcaacgtcataaagatagttttgctcatgatcatgtttatagctacgatgccgaaggaagattagttaaaacagaacagagttcgcaatacgctacatttgaatatgacaatgttggacggttaataacaacgacgacaaaagacacaacgtcattatcccaattagccacaaaaattgaatacgatgtttttgatcgagagataaaacgctcgctaattagtgacttctcaatacaagtcattaccttaagctatacaaagaataatcaaatcagtcaacgcatcacctccattgatggggtggttatgaaaaatgaacgttatcaatatgatagtaatcagcgcttaagccagtaccaatgcgagggagaacaatctccggttgatcatactggtcgtgtgttaagtcagcaaatttaccattatgaccaatggggtaatatcaaacggcttgataatacatatcgagatggtaaagaaacagtggattatcatttcagtcaagccgatccaacccaacttattcgtattaccagtgataaacagcaaatagagttaagttatgatgctaacggtaatctaacacgcgacgaaaaagggcaaacgcttatttacgatcagaataatcgcttggtacaggtcaaagacagtaagggtaatttggtatgccaatatcagtatgatgcattgaacaaattaaccgcacaagttttagcgaatggtacggttaatcgtcaatattatgcttcaggcaatgtggcgaatgttcaattgggtgatgaaaccattacctggctgagcagtgataaacaacggcttggtcatcagagcaccaagaatggcgagtcagtctactatcaatacggtactgaccataatagtacggttatagccagtcagaacgaaaacgagttgatggctttatcctacacaccttatggctttaggagtttaatttcttcattaccgggtttgaatggagcgcaggtcgatccagtcacaggttggtacttcttaggtaacggatatcgtgttttcaatccggttctcatgagatttcatagtcccgacagttggagcccctttggccggggaggggttaatccctacacttattgccaaggcgatcctatcaaccggattgatctgaacggtcatcttagtgctggcgggatattaggtattgtgctgggggcaattggtatcattgttggggttgtgtcactgggggcaggagcggcaattagtgcgggtctcattgctgcgggcggagctttgggggcgattgcttctaccagtgcgtttgcagttactgcgaccgtcattggattagctgctgattcaatagggattgcgtcagcagcattatcagaaaaagatccgaaaacagccgggatattaaattggattagtaccgggttgggggttttaagctttggtatcagcgcaataacctttacctcttcgctgataaaatcggcacggagtggttctcaggtagccagcacgagtgttatcgggtcagtacctattgaatttggtgaaattgccagccgttctagcagacgctgggatatcgctttatccacgatatcattgagtgcgaatgctgtggcgctctctacggggatagcggcttctgctgttgcagataacaatgctaatgcggctaatatcttgggatgggtctctttaggttttggggctgtatcaacaacggcggggctaattaatcttgcacgtacagcttatgcagtgaatcatcatacttgggaactcagctcatcagcaggtacttctgagggaagtgaagcctatactttatctcgttttacccaatcggagccagaagcgataaatgttcatccttctattcgagccgttgaagtgaaccaagcatttcgaaatagtaccggaaatctatttagtcaatcgtccattaacacccgtaatgtgttacgaggccgtttgacaatataa

SEQ ID NO: 6642 - DNA, 1023 bp, Photorhabdus luminescens
atggagagtgtgatggaaaagaaaataacaacatttaccatcgaaaaaactgatgacaatttttatgctaatgggcgtcatcaatgtatggtaaaaatctctgtacttaaacaagaatataagaatggtgattgggtaaaattagcacttagtgatgctgaaaaaagatcgattcaggtggctgcattgagtgatagcctcatatatgaccaattaaaaatgccttcaggatggacaacgacagatgcgagaaataaatatgatcttgggttattaaatggtgtttatagtgctgatatttttactgaggagccggtaataaatcgtgcgggagattgttgtacaaatgaaaactatcagaacagtgtgaagagtgttcctgaaattatctattgttatgttagtagtaataggacaagtacagaatacctaatggcaaaaatgacattcgaagatacgaatgggaagcgcacactaacaacgaatatgtcggttggtgatgaagtttttgacagcaaaattttattaaaagccattgctccttatgcaattaatgcaaatcaattgcatgaaagtaccaatatattgtttgataaaacagaagaaccaacgaaatcggatacccatcatcaaacaattaacctttatcgctggacattgccatatcatttgaggattcttgaagggaatgacaggactgttaataatatatatgtccttggtaaaagttcatcagatgatagattcttgacaagagcaagagtatttaaacgaggaacttcatatgtaaatgctagaaatgatatgagtggaggatgtgttatggactactcttatgatgtaactgttcctgacacacagcttgctgctgaggtactccatgtaacaggatgttcatggaccaccggttatgtcgatggatatcatgatgtcacaatcattgataactacggttgccagcataaatttagaatatcctcggttaatattgggcgtgcgctaagcatagcgagaataagttga

SEQ ID NO: 6643 - DNA, 561 bp, Photorhabdus luminescens
atgaacattctagaacaaggtaaggttgctgctttatattcagcatattcggaaacagaaggctcttcatgggttggaaatttgtgctgtttctcaattgatcgagaacatttgcctattatcgtgaatgggcgtcgtttcttgattgaatttgttattccagatcatttacttgataaaactattaagccaagaatattcgaattggatatcaacaaacagtttttactgcgtcgagaccatcgtgagataaatatttatcttttaggtgaaggcaattttatggataggacgacgacagatagaaaattattcgaattaaatgaagatggttcactatttattaagacgctacgccatgcgttgggtaaatatgtttctattaatccttcaaccacgcaatttatcttttttgcacaaggaaaatacagcgaatttatcatgaacgccttgaaggaatttgaagacgatttatcaaaacgttatcgagtcagaattattaccgaattgcaagggccatattatggctttgaacttgatattctttctattatagcttaa

SEQ ID NO: 6644 - DNA, 246 bp, Photorhabdus luminescens
atgccaacacaaagtgatatttttactgcaataaaaaatagaatattaatgatgaaggatatcgaagaggaagagataacaccagaatcttattttatttcacttaaatttgacagccttgactatgtggaaattcaagtatttgtattggaaacgtatggcattatgcttaaagctgagcttttttcagatcattctatttcaacattagatgagctcactaattatgtaaaatcaaaactgtaa

SEQ ID NO: 6645 - DNA, 777 bp, Photorhabdus luminescens
atgttgatttttgaaatggaagatattgaacattggtcgaatttctctggggattttaatcctatccattattcggagaaaagtgaatttttgcacaatatgcagcagtaccccgtgcagggaatgttgagtctgctttatgtcaggcaacagttatctcaattaacttccgcttttacatctggaatactgaatattgatacgtcattccgtcaatatgtttatactgcattaccacatcagttgagaattgatactaaaagcaaaacgtttaaattggaaaatccgtgcggaaaaagtgtgttatccggcaataccagtgtagaaaatacaatggagtcaattgaacattggattgttcaagataactgccaaaaattgacgataacaagggaaggcgtttgtgaaaaatatgctgtctttagacattatttccccagtgtcacatctattggatggtttctggatgcgcttgtttttcatcttgtcattaattcgacaagttttcttaattttgaacactactattttaaccagttacaggattatctgaatcaatcttttactttgcataccggacaagcgattaagatcaaggaggacattgttaatagtacaatattacgatcttctccaaatatttgtgttgaattaaatccacctttactgattaagaatggccctaaagattatatccgtattttttattaccgatgtttatatgataaaaaccctatttttgtatcaaagatttcaattatctctaagatgaaataa

SEQ ID NO: 6646 - DNA, 1266 bp, Photorhabdus luminescens
atggtaaccaatatgcagagaactcaaagagttgttattacaggtatgggcaccgtaacaccaattggtgaagatattgaatcatgttggcaaagtattatcgagaaacaacatcaatttcgcagaattgaatttcctaactcattcattaattcacgtttcttttctttccttgcacccaatccatcacgttatcagttattaccaaaaaagttgactcatatgctttctgactgcggaaaaatggcgttgaaagcgacttatcaagcttttacccaagcatttggcgtgaacgtatcacctgttgaatattacgataaatacgaatgtgggatcatacttggtagtggctggggagctgtcgataatgccggagatcatgcctgccagtataaggaagttaaattagctcatcccatgagtaatcttatcaccatgccaagttccatgacggcggcgtgttcgatcatgtatggactacgtggttatcagaataccattatggctgcttgcgcaacgggtacaatggcgataggtgatgcctttgaaattattcgctcagggcgggcaaaatgtatgattgccggggctgctgaatcacttattcgagaatgtaatatttggagtattgatgtactgaatgcattgtcgaaagagcaaacggaccccaatctcgcatgctgcccatttagtcttgatcgctctggatttgtattggccgaaggagcggcggtggtttgtctggaagattatgattcagccgtcgcgcgtggggcaacgattctggccgaaatcaaaggttacgctcaatattcagacgccgctaatttaacccggccgacagaagatattgaacctaaaatattatcgataaccaaagccatcgagcaggcgcagatttcgctggaagatattgactatattaatgctcatggtacttcgacaccgttaaatgatctttatgaaactcaggcaattaaagcagcactaggccaatatgcttatcaggtacctatatcaagcacaaaatcttataccggtcatctgattgctgccgccggtagtttcgaaactattgtctgtgtaaaggcattaactgaaaattgcttgccagcaacattgaatttacatcgggctgatccagattgcgaccttaattatttacctaatcaacattgctacaccgttcaaccagaagtggtgcttaatatcagtgcaggttttgggggacataatgctgcgttggttatctctaaggtaaggtaa

SEQ ID NO: 6647 - DNA, 1380 bp, Photorhabdus luminescens
atggaagtaaaaaagtcggctattgaatttttaattaataaagcatttgcttttgctttgctttttcttattgtccaacagttgattgtggcttcctctacttattggatagcggggctggcaaaacaggtaagtgctaatgagaattttactctgtatcttgtcctttttatactttctcttacactcgtctatattccttctagcttagctgcggtttttcttgagaagtctaagtttcttgcacttgaaaaatatgtagaaaggtttcgtcttaatttctggaatcgggcttctattcgaacgagtaaagagtttaaagactatcatttgccctatgtgtcctcagaagggtttctggtttttaatgaaagttccaaatttatctttgattgggcctctgttgttctaaatgtttcattgaatgtacttgctctttctcttgtccttgatacgtcgattgcatggtcctaccttgttggtcttgcctttgtttcgagcgtcatttttttctttagaaaaagaattcatgtaaagggcgcagaagcacaatctgccagaacagcccttcaacgtgttttatctttggcgtgggacaatttcctattgggcaataaatacaaccagtctctttatcaaagtgaactgaaagtccgacagagtttggctttaggaacagccgtccgtagccaatactggaataatcttgcttcagcgttgggaatgctactaatgatggcaccggtacttgtctggacaagtgttctcttcttggagaatatggacaatccttctgttctcacggttctagttgcaaccttacctcgccaggttcttattcttcagcacgcgtatgtcgtgattttctattctacgagttggtcggcattgagtgcgaggctcaaggggctaggacaggctgcagaaactccaaagacatcgcagaatttggaggaacgaatccaatggaatcgtttgaaatacgaaactcatggcactttgccagacttggcaagtttaaaagaacttattattaagccagtcccgtcgtctggccgaatcacaattagggggccgaatggagtgggtaagtctacttttctttgctggctcaaggagcaattgggtgaatcggcttattaccttccggcacatcatgaacttgtttttgaaaaaactaatgaaaggaatctgtcgactgggcaggaactgcgggaatttcttaaggaaatctctgttaaagcagtggataagatagagatcctgatgttagatgagtgggatgctaatttagatcttcaatctcgtcaggtattcagcaagcttatcgataagctaagtgagtctttgctgattgtggaggttcgccacaacgtgtaa

SEQ ID NO: 6648 - DNA, 879 bp, Photorhabdus luminescens
atggttgaaataaaaggctctatggaagcatttccgcttttgtaccattcgagaatgcttgctgatgaacatcgtttgaactgcttcaaaactgcaatcgataggattgttcaagaggattctcatgtagttgatttggggggaggaactggagttctaactcagatgttagctcagaaaactaatggattagttacttatatagacatgttggaagctagtagtattgttgctcaaatactcaataggggcttaagaaaaaatatccagtacattagcaaaaaatcttttgatgtccagttgaagaatccgccggatgttcttgtgacagaaaccttgggttattttggaatcgacgagggtattgttgagatctgccacgatttttgtactagacactcaagtatcaaagtgctgattccttctaaagtgagtcttaaatatcaatttatacacttgcctgaactgaacgctgattttgatcttttattgagtagttacgcctctcgatttggtcctgtcccggcagaactagtgtccgggtttgaatgtttattctgcaatttaattagaaaaaaaattatcaaatcagatggagtggaagtctgctctgaaccaaaacttattcgccgatttaatcttggactggataagagctcagatatagagtattccgtcgaatgcaaggcgtctcaacgtgcaaatgctatccatttttattttgaggctgagcttgcagacggagttaagttaagtaattacgtattcgaacctaagacgcattggcttcacagttatgcaggaattcccagaggaatttccagtggacaattgaagtttgtatctactgaaagaaaaataagattaagatggaagtaa

SEQ ID NO: 6649 - DNA, 873 bp, Photorhabdus luminescens
gtgatacacctcattggtattaacgaggtttacagaaatctagctgttcttagtgcattaaaatcaaaaacggctcccaaaacgtctgaagaattggagcttggatttcataattttttaaagggctatcaacccaacgttccgcggttagagagtgtaggaactcagatagtcgaggatcctgaaatggaagacaagctggtagagctttatcgaacagacgctttgttaaatgatagagatcaatcgtctctgattggcgatagtctaaaagacgatgttcgtaagcaacgactggagtttttgttagctgcattagaagaattgaagctaaggatgccacagatatacgctgtatttcagatggcgatagatagtttatttctgagagactcaaagaattcagggggcggttccacctcgaatgctgtgggtgtgatttggatcaacagccgtaaacactggcacgtacaagatctcacggaattattggtccatgaacttactcataatttagtttttatagacgaactccgatatttgcacttccatgactacaagcttctccagaatgaagccaattttgcaaaatcagcaatactcaacattaagcgccctatcgataaagtctttcatagtatcgtcgtagctgtagaagttcttttggtgagacgaaactatctcggagaaccagaaaaatgccacgttcatccgccatcggataagatgcttatacaggcgctggaagcattaaattctttggccgatcttcctaattataaggatttaatcacggaaagaggccagtcaattatgcagaagtgtcaggggtatcttgatctgatggtaggacgagagaagaagcttgcataa

SEQ ID NO: 6650 - DNA, 135 bp, Photorhabdus luminescens
ctgactattgaatacaaccataggatctggccgaataccattcgcgtacgtctttgttccattaaatttaaaactaaaatcccatttacagaagaaataatatcgggtattgcccaatttgtagtatcaatctga

SEQ ID NO: 6651 - DNA, 1611 bp, Photorhabdus luminescens
atgatgaaaaaaacaataaaaaacatatccttattcacaggaattgtgcttggaagcttgacattagctcatgcagcaattattccacccggtacacaactggcaaccaaccagaatattgttcgtcataatggctcagaacctgcttctcttgacgtgcataaagttgaaagtgatgttgagtttgatattataaacgacttttttagtggattaattagtataggaaatgatggtaagtttaatcctaatttagcgatccgttgggaaaccaacgataataaaacctgggtatttcatctaagagaaggaataaaatggtctgacggttcacctattaccgctcatgatgtggtttttagttggagacgtttaattgatccccaaatggcatccccgtatggcagttatattgaaaacatgtatatagtaaatgccaaagatattcttgctggtaagaaaaaagccaatgaattaggtgtaaaagcattggataatttaacggtagaagtaacattagagcaaccgctatcctattttttaaatatgctggcacacccagttatggttcctatcagccaaaaagcggttgagaagtatggtgaaaaatggactcaaccaaatgtgtttgtcagtagtggcccattcaaactctctgaatggatcgtcaatgagaaggtgattggcatcaggaatccacaatattgggataataaacacaccgtaattaataaagtcacctatcttaacgtcacatcagaaacagcggtggtaaaccgttatttagcaggagaaatagatattacaaagggtattccatcggttttatttaaatcattaaaaaccaagttaggtaatcaagttcatatttcacctaaattaggtgtttattattacgaatttaatacccaaaaagccccttttaacgatattagagtcagacaggcattaaatctggctttagacaaagatatcataacaaataaagtcttagggcaaggccaaaagccagcctataataatactccaccaaatataggcggaatgaacttaaaacagcctgattatgcatcatggacgttggcaaaaagaattgaaaaagcccggcagttattgaatgaagcgggttataacagaaataatccattgaaatttaatcttctttacaatacatcagaggatcataaaaggattgctattgcagtcacctcaatgtggaagaaaaatctaggtgtggatgctgttttacagaatcaagaatggaaaacaatgttagacaccatgcatcaaggtaattttgatttggtaagatacgcatggatagctgattacgataatcctgcttcgtttttaaataattttgtcaccaatagttctaataatacatcattatatcataatgatatttatgatgatctgatcagtaaagccaaagcaacaaacaacatagaatatttccagcaagcacaagatattcttacaaaagatgtcccgtcaattcctatttattactatgttagtgccaaattaataaaaccttatattggcggatattatatcagtccacttggtcttatgtcatcgaaagatctctatgttattaagcattaa

SEQ ID NO: 6652 - DNA, 90 bp, Photorhabdus luminescens
ctgtggggcatttatgtggcaaggaaaactgcctgttttccgttcagttattgggtgataaataataaatcgctttgcaatttactataa

SEQ ID NO: 6653 - DNA, 456 bp, Photorhabdus luminescens
atggctgaaactattgaccacggcaccctctcacatctagtggaggccggagccgttaaaggagcgcacatcgtaggccagccaggcggctgggccgtgatggtgcgctatggaatgcacgagcgaccactggccgcacagcgcagccgcaatgtgcggctgttccgcaagttcgaaacgctggtttcctaccttaaaaaaattggcattgcccgcttcgacgtggattcatcaaactacgcccccgctccccccaatacctcaacgcgcaggccagatcgtgccgaagcgctcaagcgtacccacgaggctgctgcatatgatgcgtggtttcgtgagcaggtgcagcaagccatagatgaacccggaccgggtatccctcacactgatgtcaaggccaaatttgccgccaaacgtgaagccttgcgtaaacgcattgtacagggtcgcgcatga

SEQ ID NO: 6654 - DNA, 318 bp, Photorhabdus luminescens
atgaaaatcatttggcgaaagatcgcggaagcagatcgagaacgtatctttgattacatcgcacaaaacaaccccagcgccgcgcttgagcttgacgcagactttgatgctaaaatcgaactcgctgcgcagcggcctaaactgtaccgccccggccgtgtgcacggtacccgtgaaatcgtcgtgcggcctaattatgtgattgtctatcgcatcaaggatgaaagcggtacggtagttgtgctgcgcgtgctccatgcggcccagcaatggcccccggccaagtcaagcgagagcgtttctggtgggaaagtctga

SEQ ID NO: 6655 - DNA, 1185 bp, Photorhabdus luminescens
atgcggaatcagacttttattatcgttggagcagggcaagcgggagctatggctgccgcaaccttaaggcagcagcagtttgatggcgatattattttaattggtaaggaatatcatgcgccttacgagcggccaattttatcaaaagactatttaatcaacccagaggaagcgcctaaatacctgttctccgaagatttttatctggaaaagcagatagatctgcgcataggccagttggttagccagattatgccatcgaaacattgtgttgttttagaaaatggcggcaagctcaggtatgacaaactcctgctcactatgggggcaagagccagacgatttccgctgctcgatcagctgggtgaaaatatttataccttgaggacgctggatgatgcgcaacgtttacgccaggcggtgaaaaaagacaaacggattttgattgttggtggtggtgtgattggcctggaactggcggcaacctcttgtgaattgggggcaaacgtgacggttatcgaacaggcagataacatcatggggcgttgtgctcctccattattgcaggattatcttttgaatcgtcatcaggaaaaaggggtacaattcttccttgataccaacattgtttccgcacaaaaacaagggagtgaattagtgcttatattgaacaccggtgaaaaggtgatcggagatattattatttatggtatcggcgctgaattcagggatcagcttgccgctgatgctggtttggtgactgatggcggtatcgtcattgacagccgttgccagacttctgaaccggatatttttgctgccggggatgtttgccttcagagagaaccgctgacaggtgatctacagcgccgtgaaacttgggaaaatgctaaccgtcaggcgaccatcgccgcgcatgccatgatggggttggcccccccgcagccaggcgcgccgtggttctggactgatcaatggggcattaacatccaaatggttggtaacatgcaggctgaagagtggcatattcagggtgatttgcaatcagataaggccattttatttggtacagaaaatgaagttttagtcggtgctgtcgcgattaatcagggaagagaaatgcgtaatttacggaaattacttgctaatcctgcgcaggtggtgtccggcgtagagtgggcgtga

SEQ ID NO: 6656 - DNA, 954 bp, Photorhabdus luminescens
atgaccgttaaattgatttgtacttcacacacacctttgatgggttttggttctccgcctgaagcgacggaaaagcatgttcggcaggtttttcagcaattggctgaacagataaaggactacgatccacaattgatagtgattttcgctcccgaccattttaatggttttttttatgatctcatgccggcattttgcgttggagtaagagcgaatgcagtgggggattgggatattggtaaaggcccactcaatgttcctgaaaacaccgcgaaggatttaatttctgccttatatgattcagggattgatgtggctcactcctggcgtatgcaggtcgatcatggctttactcagccattgatgctgctttgccagaatttacagcgttatccaactatcccaatatttattaactgtgcagctaaaccattgccgacctgccgtcgtgctgttgagttaggtcgtgcagtgggtcaattcctattcacaacagatcagcgggtattgctgttaggctctggtggcttatcacatgatcccccgataccacaaatgggacaggttccgccggaagttgaagaagggttgattgccgggagaaatccgacaaaagaagcgcgtcaaaaacggcaaatccgggtaattgaggttggaaaatcgttggctcgtggcgagaatatcgttgctccgttgaatccacagtgggatgacgagttattgcgtattttttgtagtggcgatattcggcgtcttgcttcgttaaccgagggtggaatcgccattcagggcgggaaaggtggacaggaaattcgctgttggatcgcggcttttgcggcgctttctgtttatggcgaatataaagcgcaacggcattattaccaacctattaaggagtggctggcagggatggcaatggtcagtgctcaacctgtcactcagataggagcataa

SEQ ID NO: 6657 - DNA, 843 bp, Photorhabdus luminescens
atgagttggatcaaagatcaagtcattttattaacaggcggtggctccggtttaggtttggctttaatagagcgttttattgctgaaggcgccaaagtgggcgttttggagttatcggcagaaaaagcgacagctttggcacactgttttggtaacgatatctgtgttattcacggtgatgttgtctcttttgaggacaatgagcgagcagtggctgaaactgttcggtgttttggcaaactagactgctttgttggtaatgccgggatatgggatcacaaaattagcctgcttgacgcctcaccagagcagattgataaaggatttgatgagctgatgggggttaacctgaaagggtatattctaggggctaaagccgcgttaccggcgctaaccgcatcagaaggcagcatgatttttacgttgtcaaactcgtcatggttttctggtggtggaggggtgttgtataccgccagcaagcacggtgcggtcggcatgatccgccagttagcttatgaattagcgccagttatcagggttaatggtgttgcgccttgtgggatgccaagtgatcttcgtggggcggcttcactatctcagcaagatagatgcattacagataacctgtcattagaaagtctcagtgcaattttacctttgcaattcatacctcagccaaaagatttcaccggtccgtatgtcatgttggcttcccgtgccaataaccgcactttaacgggggtgatgataacggctgatgccggattaagtatccgtggcattcgccaaacgacagcgggagtgatgtctccgaccaagaaggagagttcagatgaccgttaa

SEQ ID NO: 6658 - DNA, 318 bp, Photorhabdus luminescens
atgagtcaattattcgtatgtactgttgaagaattgcccgacggaggagcgcgtaaggttgaatacacaccggatattgcgttgtttcactatgatggcgaattctttgctgttgatgaccggtgcagtcatggtaatgcctctatatccgaagggtatttggaagacaatgcgacagttgagtgtccactgcatacggccagtttttgtcttagaaccgggaaggcactttgccttcctgctacagatccattgaagacctatcctgttgttgttaaagacggaaacatttatatcactgtatcggaggagcaataa

SEQ ID NO: 6659 - DNA, 543 bp, Photorhabdus luminescens
atgaaagagttaattgttaatcaggaaaaaagagtatcgccggaactgcactatgaaataagccagttcttgtattacgaaattgcattactggatgagtggagatttcgcgattggcttgagttgttatcagaagatctcagctataccatgcgtaccattgttaatgcccaaacccgcgatcgccgtaagagtatccagccgccaaccacttggttgttcaatgacaataaatttcagcttgaacgccggatagctcggttggagaccggtatggcatgggcagaggaacccccatcccgtacacgtcatctactgacaaacttagtgattactgaaacggatttgcctgaccaatttcatgttcagtccaattatttgctgtaccgttcacaaaaagagcgagatgaagttttttatgttggtaagcggctagattgtgttcgccgtaatccaaaaacggatagctggctgatttgcaaacgtgaaattaccttggatcaggcagtcttaactttccataacttgagtgtcttattctga

SEQ ID NO: 6660 - DNA, 1362 bp, Photorhabdus luminescens
atgacattgagcaaagattcagatatttaccgcctgattgatgcccgagccggtcgtgtaactcctcagatttatatcgatcccgagctctatcaattagaactcgaaagaatatttggccgttgttggctgtttctagctcatcagagccaaattcccaatccgggtgattttttcaatacttatatgggagaggacagtgttgttgttgtccgtcagaaaaatggttccgttaaagctttcctaaatcaatgtcgccatcgttccatgcgggtttgttacgcagatagcggtaatacccgtgcttttacttgcccttatcatggttggtcatatggtgtggacggtcgattaatcgacgttccgttggaagcgtgcgcttatccacatgggctttgcaaagagcaatggggacttcaggaagtgccgtgtgtggaaaattataaaggattgattttcggtaactgggatacgacagccccctccttgattgattatctcggtgatatggcttggtatcttgatggtgtgcttgatcgccgcgaaggagggaccgaagtgattggtggtgtgcaaaaatggctcatcaattgtaattggaaattacccgctgaacagtttgccggtgatcaataccatgctttattcagtcatgcctccgccgtacaggttttgagcgtaaaggatggcgacgataaaaaagcattaggtgctgatcagacttcacgaccagtttgggaaacggcaaaagatgccgtgcaatttgctcagaatggtcacggttgtggatttttcttgaccgaaaaacccgatgccaacgtttgggttgatggtgccgttgcccgttactaccgtgaaacctatgcagaggcagagcagaggttgggaaaagtcagggcactgcgtcttgccggtcacaacaatattttcccgacactttcctggcttaacggtactgcaaccatgcgggtgtggcatccacgtggacctgatcaggtggaagtttgggcgttctgcatcgcagataaagccgcttctccggaagtaaaagccgcttttgaaaacagtgctacccgtgcatttggtccggcaggttttctcgaacaggatgattcagaaaattgggtggaaattcagaaggtacttagaggttacaaagcccgtaacagcaccttgtgcatggaaatgagattgggacaagaaagagtgcgggatgatggaattccgggtgtgaccaattatgttttttccgaaaccgttgcccgtggtatgtatcagcgttgggctgacttactcaccagtgaaacctgggatgagatagaggaaaaaagccgggtttatcagcaggagttggtcaaatga

SEQ ID NO: 6661 - DNA, 885 bp, Photorhabdus luminescens
atggaattaagacacttacgctattttattgcggtggcagaagaattaaactttactaaggccgcaaaaaaattgcatactgcacagccttcgctaagtcaacaaataaaagatttagaagattatattggttctacactattagagagaaataaacgcagagtctctctaaccaaagccggagaagtttttttacaacaagcccggcttattcttgaaaatgcagagaaagcaaaaaaaatggcccgcagagcggcacaagaacaaattgtgctaactatcggatttgtcccatcagcagaagttaaagtattacctgaagtcatcccaatatttcgcttggctcatcctggagcaaaagtagaacttattagtttatttaatccaggacaagaagagaaattattacaaggtgacattgatgtcgctttcatgcgcccgccaataaagagtgattctattgattttaaagtcattcttaatgaaccgctggtggttctgatgcctgctaatcacaggctaagatattgtgagaaaatttcagtcaacgacctacaaggagaaaattttattactcctgatccaacacaatctggtgtattacaacagattatagaaaattattttactgaacataatgtcgtacctaatattattcaaactgctaataatatgctattaattttaaacatggttagtctaaatttagggtgtgcaatagtacccttctatattaccagcatcatgacagatgccgttatttgccggccattatcaggatattctcccacaatagagttaataatggcatggcgaaaagacaacacatcagaattattattgcacttaatagatgttgttgaaaataaatatctgcaagaataa

SEQ ID NO: 6662 - DNA, 900 bp, Photorhabdus luminescens
atgtcaatatcagcgaatcttcaacataaacttatacagcccgaattacgttcgctttggtctgccattgccagcggtgaaatccatctacatcatctcaatgtaaaagggataaaaactcgtgttcttgaagcgggtaacggacctactctgattttcttgcatggtattgcaggtcatttagaagcttatatgcgcaacatactgccccatgctgcccattttcgtgtactggcaattgatatgctgggacatggcttcacggataaacctgtccgttcctatgagattatcgattatgtggaacacctacgggatcttattgaaacattaaatctgaagaaaattcacctttctggcgagtcgctaggcggatgggttgcagcccggtttgcggcaaaatatccgcaatatattcaccgtctggtgttgaacaccgccggtggcatgattgctgatccaaatgtgatggaacgcctgcgcacactgagcttaaatgcagtgaaaaaccccgatcgggaagctacccgcaaacgtcttgaattcctaatggaagatcctgcaatggtgacagaagacttggttgaaacccgttttgccatttatcgtcagccgggtatgttgtccgcaatggaaaacatcatgtgcctgcaagatatggatacccgtttacgtaaccttttgaccaaagatgaactggcaaagatccaggctgaaaccttagtgctatggaccacacacgatccgactgctgcggtttcagtaggccagcgtcttgccgggcttatcaaaaatagccgttttgtcgtgatggaaaaatgcggtcactggcctcaatatgaagacccggacacatttaaccggctccatatcgattttttactcaacggcaacaaataa

SEQ ID NO: 6663 - DNA, 783 bp, Photorhabdus luminescens
atgaataacgtcataacccatcttggtaaaaaattgtttcaatcatggcagagtcatcaagccatcgatcctatctctgatgaatatccagaattaacgttacacgacgcctatctcatccagcaaaaagttattgcttaccggttggaaacaactggagagcgaattgtcggtaaaaaaatcgggatcactagccaagcagttatggatatattggacgtcgatcaacccgattttggcattctcacctcagatatgcattacaaaaacaatgccactgtacccattgagcaattaattgcaccgaaagctgaaggtgaaattggttttatcctgaaacacaatctgtgtggacccggtattacagcaggagatgtactcagagcaacagattatgtcgtgccctgtatcgaaattgtcgattcccgtatccgtgactggaaaataaaaatcacagatactgttgctgataatgcttcatcagggttatttgtcattggcaatggcacccgtctgccctcagaaattgatttagctgccgtgacaataacgctagagaaaaacggtaaactggttgacactggcattggtgccgctgcactagggcatccagccaacgcggttgcctggctagcgaatatgctaggaacactgaatatggcgttactccgtggagaaatcattctctctggctccctcaccaccatggtgccagttaatacgggtgatcagttgaaaattaacttactcggtgtgggatctgccaaggtcagttttgcttga

SEQ ID NO: 6664 - DNA, 1344 bp, Photorhabdus luminescens
atggatgaaattatcagtctttcaattaatgaattaggagaaagaatacggagcggagtgatatcacctgttgagattttaggtgagtacatgaagcgtattttatgttacgaccataagctgaacgccttttcagagatctatgaagctgatgcgcgggccgcagcaaaacatgccgaacaggaaatacgatcaggaaattggcgtggtcctctccatggtattccttttgctgttaaggatttttttgatctgaaaggtaaggtcacaggaggaggcacgaactgttttagtcaaaaagcatatgttacggcaccagtggtagccaccctcttgaaacagggaatgattctgacaggaaaacacagagcagtagagctcggtatgggagcaacgggcatcatggaaaatagcccgacgccactcaacccttggggacaatcacagagagttgctccaggcggctcaagcaatggctcagctgtagcagtggcagccggtttgacaccgattgctcttgtaactgacacggggggatctgcacgtatacctgccgcttggtgtggcgtaagtgggtttcggccatcaatgggcaatttgtcatcatcaggtatgcttccattaagccagacgatggatactgtgggaattattgccaagcatgcatctgatatattcattgtttataatcagctgaacccaaatttagcgtatcattcatgcattaataatctgaatattggcatattaccgtcagaagaatatattttagataaggaaacaggtttgcattatgtgtcattgctggaagttttttctcaaatgggtatggtaactcaaaagaaacctttcccatatcctttatcgcagtgcatgaaggctaattctatcattactgcgtttgaggcttggcagaattatggatatttgtgtaattcacagaactccctcagcgatacaattaaagtaagattagaacgtggcaaagagataaaagagaaagagtattcggaagcattgatattctgtcgtcacgtacggaagatattttcgaattggtttcagaatgtggatgctttagtaattcctacaaccccagaaccttcttggcctatagctgaaaaagatgaacatcaacccccaaatgacttcacccgtttcgtaaactttgctgacttatgcgcggtctccatcccaacaggattaaacagtcaggggttaccattttcattacagatcgtatgtaaccgaaaaaaagaaaaaaacgcccttgctcttgcggaattgattgaatgccgtatcggtttcagcaatacagaacttaaaatacgactcaagacatga

SEQ ID NO: 6665 - DNA, 1386 bp, Photorhabdus luminescens
atgaagcgtaacaagcgtaatgttctgctcgcagctaatataagttacatactcgtcattctggattcgtccatagttaatgtagctttaccgactattaaagagagcctttcacttggtgtaacaacgttacaatgggttgtaaatgcctatctggttttatttgcaagtttgttactatcagggggagctctttgtgatcgttttggttcaaaaagtgtttacattacagggcttggattattcactctctcctccgctttgtgtggaattagcagtgaagccgctattttattaaccggtcgcgtgcttcagggtatttccgccgccatactcgtaccaggttcacttgctttgatcactcatacctacacagataaaacagaacgaacccgtgccattgccagctgggcgagctggggaggtatcgctctggtggcggggcctgtcataggagggtggctgaccgaatatctgtcgtggagatcgattttcctagtaaatgtgccgctctgcttagcagggatctttttgacacttagggtgcagtctccagagcatgaacataaaagtttaactatggatataaaaggccagctacttcttttcctgacaatatttctatttattgctggtgtcatccggctgaatgactctcctcaaatcaatttgaactcagttatcttgttgtgcttgtctttaatcatcatgactgcattcatagtggtagaaagaagaagtaaagctcctatgcttccactggagctgttcaggcggccaaattttagcgctatttcatggattttcttttctggcgctttttccttttttggtgccatgtttattctgaccttttggtttcaggatattcagcacctgagtgcaacgcaaacgggtatggccctgttaccgctctcaatcagtgtcatattgggaaataaggtctctggatggcttgcacgccgttaccagacgagccacatgatgattgttggggccatgataagattagtcggtttcagtggattactggttacacagttcaacaatgactatgcttatctttttgttccacttgtgttgattggttttggtggagggctgggatcaccaatgtcaacatctttatttatgcaaagtactccgaaacagtacactggcgttgcctcaggagtttcccgtgcaactggtcagataggttccgcttttgccgtggcagtttttgggcaaatggtaaacagtgaaaaactctttgttttaaacatgaagtatgcggttattactattatcatagccacactgtccatcttgattatcaattttctttttgtaaaaaatgatattgatgaatatcacaattctataacactaaaggcagataaatga

SEQ ID NO: 6666 - DNA, 1263 bp, Photorhabdus luminescens
atgaaaatccttatagcaggttcaggtgccggcgcacaggcgctggcatggaaattattacaggacccagcagtagaaaaagtatggttagccccaggtaatccggctacgtcatgcgcacccggaatggaaaatattccagtgtcttcaggagatgttgaggggctggctagggctgctctggaactaaaagcagactttacgcttatcacaccgacccaaactttggcagctggggtagccgactactttaaatctcgtgggttaccaatcattgccccgactcgtgaagcctcccgacttgaatggtcgaaaggcttttccaaaaaattcatgaaaaaatatcaaatacctacaccttacagcgcaatttgtgaatcacaggaacaggcccaaaaatttgccgacacattacctttacctgtggttatcaaagcagacggtatggttcatgggggaacgggtgtagtgatagcccaggatcgccagcatgttaaaaacacgctggaagagtttttcacaagaaatgtcggaccaatgctggttgaagaattcattgaaggtgaagaagtctcttacaccatcctctttgacggaaaaaactatctaccactggctgaaagccgagattataaaaagctgcttgatggggataaaggccctaacactggtggtatgggagcttattccccagtactgtcctccgcacagcatgaggctatcattacccaaattgtagaaccttgtctggcagctcttaattctgaaggaatcgaatatataggattcctctattttggtgtcatgattgacaaaaaaggaatgccgagccttcttgaaatcaactgtcggctgggtaatccagaggtcttcacgatccttgaacgacttgagagtccccttcatgaattattcatattgaccctacaaaaacagctgggcaaagcaaatgtacgctggagtaagcttgtttctgttgccttacaaatatcgtctgaaggttatccttttaccgagcgaaaaggtgatgagctcatcttgccgttaccttcagaagatactcatatctttcattcctccgttgtatctgatgatggaaaactaataagtcatggaggaagagttattgcattaagttcaatagccctgacgttcaacgaggctagagaaaagttgtatgaaacggtcaagcaagtccattttgaagggatgcattaccgtaccgatattgcgctgaatatcaatactcctagtggaatgtaa

SEQ ID NO: 6667 - DNA, 1188 bp, Photorhabdus luminescens
atggcaatactatgcctcggaagaagcatcaagattaactttgcagaatggttggaggaatgccgtgatgacctgtggcttatcagttctgcaccacaatttcctcttcagcaccgttaccggtacgtccggcagatcgacagccttgatgacggtgaaggtgttttatctatcgccacagaattaggacgtcacacctcattcagccagattctgcctcattcggaatttgaccttatccgagctgcacaacttcgggaatattatggcctcccaggccagaacgttgaaagtgccttggcgtatcgagataaggttttaatgaaagattatcttcaacgtgcaggcattgaagtggctccgtttagacgacttggcagttggctggatgttctaactttcagtgaagagcataatttcccagttgtgataaaaccggtggatggatgcagctcgaaatacgttaaggtatgtaggagtctcagagaagtatccgattttttccgcgacagaaccgttgatggctggatggtagaaaagtttatctctggaaatatgtatcatgttaacggtgtaattaatgaagcaggagattcattttttgctccctgcgcttatatcaataatgctcttgattaccagcatgcaggtatatttggtagccgtactattgatcctgctacccccttggcagagcgactgaacagtattacctatcgaactatatcagcgttgcctgctgcgcctaccctcgggtttcatgccgaaatattccacaccgccgatgaccgattaattttatgcgagattgcggcccgtactgcgggttcacttacgggggagttaatagaacacacttgggggataaatatacataaagcttggatacagagttgtgcaggtatcaatgatgtactgaaagtccggactgaaccaagagaattcgcagcatcaattcgcgttcctgttcgtccggcatatctgatttctttgccagattcagttccttatgattggatatccacactctgcttatcagggagagtcgggcaaatttatcaacaggcaacaacttataccgatgacgttgttagcgccataattaccggcaatagtgatgtacaacttactgaacgaattgaacattttgccgactggatcgatgatttagtcaggtggcaaaactga

SEQ ID NO: 6668 - DNA, 894 bp, Photorhabdus luminescens
ttgttcgatgtgctttcccttgcgaataatcatgccatggattctggattgcagggtctgactgacaccttgaaagcattacattctgcaggagtgcaaaccaccggggccggtctgacatttcagcaagcttgggaacctgctttaattgaatgtagagggatcagggttgctgttttcggcgtaacgggcatttattatgtcggaactgaagccggtagttttcagggaggcgttgcagcgttacgttcaagagattattacagtcctcctttttccggagctgtggttcccggagcgttacccgatattatgactgtcatcaatgaagatgattgggcacatttttcatgcttagttggcaatatccgtagccaagctgattttattattgcagcgatgcactggggcgatcatactcgtaaagacattattacaagatacgaaaaggaaatatcaaaacgattatcacaatgtggtgtgaacctagtgataggtcatcatcatcattccttgcgaggtgttgaatggcacaaaaacatgctgacatgttttggactgggaaacctcattttcgatcaatctctctcatgctcaataaatgaatggtcgaaaaccggttttcagttgcctgattatgcacgatataccgcagccattctgacaagatgttcaccgaacgaaattttatctgctcatttgctcccactttatattgaagcggatacccctgtccctgtttcccatggaagcgatgaatggcatgcttttttacgcattatgaggcgttgtgctcggcaggacatgacggtcaatcatcttgttgataacggtactcgatggggcgatttcactgtattggatattatcaaacccatttctgacgttatgtga

SEQ ID NO: 6669 - DNA, 237 bp, Photorhabdus luminescens
atgtcgagtattactattgcttcatttggggatgtgctcattaatcgtgaagatcccgcttctgctttcagtcacatgacgtctttagttgagaatgccgatatcgttatcggtaactatgaaggtgtactgactgacaaacctgagccaattcccggacggcgagggattgacgatatcatcagtaaaaaacgccaaaggcgtggcattgttcgatgtgctttcccttgcgaataa

SEQ ID NO: 6670 - DNA, 441 bp, Photorhabdus luminescens
atgaatcgagatattctggactccgggcactccatcaaaagttccgatcagggtgatgttgaaagccggggaaaaattagtcagttacttgatatatggaatgtggaacaaaccaatatttctgacaaccagccgctggatttctatgtctatgaccagcaaggtgaagtcgttggtggcttggtgggtcgtacctctctgggtgtgcttttcattagttatttctttcttccggaagaactgcgtcggcagggactgggaagtacattgctgaaacgggccgaaaaaaaagcaactctacgtggatgtcatatggcggtgctgtttaccatggcgattcaggcacctgacttttatctgaagcatggttacagcatttttggtgaggtgtcctctttaccggatggaaatgcccgtatttttatgcagaaaaggctttga

SEQ ID NO: 6671 - DNA, 1008 bp, Photorhabdus luminescens
atgaacgaatcatatcagattattgatgacgatccggcagtatggtgctcagcgcagttggaaagcaagaaagacgtgctattgcctgtttcagatgaacaaatcgaagcattcaggcatcacctatccgctatggaagatagacccagtgaagcgttcaatgcttcagattttagctttgaggaaataactatcttacaggagcgcattcatcagcgtttgactgaaggacgcggggttgtggtagtgtcaggtattccgcgagaaatgtttactgactcaatcctgagtcatctattctggggaattggaacaggtcttggacgtccagtcgtacaaaactcacagggtcacaggataggtcatgtaaggaatgagaaaaataatccgaataatcgaggctatatgtctaatcgggagcttggatttcattcggatgcctttgaaattgttgggcttatgtgtttgagggaggctgcttcagggggattgactcaaatcgtaagtggcctagctatctacaatcaaatgttaagggaaaaaccagaactacttgacgccctttttgaaggatatcattacgctacagctgaacgctcttcgagtaaacttccctacacgtcatacaaaattccgattttctcaaaaatgtcaggcagggtgagctctatgtgtctcggtgcttatatgcgagcagcagcaaaacttcagggactagctctccctgacgcacttgatgctggactccacgcattttatgaaatatgtagccgcccagagttcagactcgaatttatgcttgagcctggcgaaatcctttttctcaacaactataccacactgcattcccgcacggagtttcaggatgatgcactcaaccagcgccatttattaaggctctggatcgaattatccgatggcagacctgtggtgcccgcactaacagctcgcggtcgtgattatgagcagttatttctggaaacgcgtttggcgagtacggcaacttaa

SEQ ID NO: 6672 - DNA, 1119 bp, Photorhabdus luminescens
atggcgaattccatttcacttaacaatccacggcttcagccaacggttgttgctgttccgattagcaataatgccattgcaatacattccggtacccgtcagggtgaagcaagcaaaataattccagatcccgatggctggaaaatagttgcgcttaaccacatgcaaggaaaattgaacagcagtggtcttcttaaagtattgaagcaaaacggtcatgacgttgaagagtcggcgttaacacaattgatcgaggaacttcaatctcacaacctcgttcaggatgagaaatatttcgattatcaggctctcggtgccgatcaaagagagcgttattcccgaaatctcaatggatttgctgcgttaagtgacaatggcatttcacccgctgagtatcagcagaaacttttcaaagggcatgtgctactgttaggatgtggtgggcttggaagctgcacggcaacggcgctggcaatgactggctgcggtaccatcactgtcgttgatttcgatgatattgaacttagtaacctcaacaggcagctttatatcgttgatgacatagggatgcggaaagtcgaagggttaaaatctcgtcttaataagatcaatccggacgtcacggtaaatacagtattcaagcgtataaccggttcagatgttgttaaggaattaatttctcaattcaaacccgatatcgtcgtagctgcaattgaccgaccggttatcgctgctgaccgctggatcagtgacgcctgttttgacatgggaattccgggtgttttcaacagcgtttctgccggaatgggtatgttctggacaaaattccctgaccagagcggttgtttccgctgcgacgaaaagtggtcacggactcaggatcctgaccattactccatgcgcgcctggcgagaagaacatgatttaatccctgcgacttcggctttcagttattcggcaatgattgtcggagggatgatgtctgcggatatcatcaggaaacttgttggatggccaatgatttcagcagggaaactggtaactatctcattcacaactctacaaacgaatgttgaggataaaccgcaacatccagattgtgaactttgtgcatattga

SEQ ID NO: 6673 - DNA, 3420 bp, Photorhabdus luminescens
gtgagtgaacaaaatcagactgtaactttacccgataaaaaagatataggattactgaccgaagaaggactctgggataactggctggatatagatgcggtgaaaaaactggttaaccacccgttactcatcgcaatgagtgaagaacgaatcactctgtccggaatgcgttatttcttgattcaacatcattattattcacgtaactttactcgctttttgtgtgctctgatcagccatattgataacttcaatgatattcatcatctgatggaaaatttacgtgaagagatgggggtaaatggagagggaaaagtcactcacgctgagttgtttcagcgctcattgatggaaacaggtgcacaggtcagttctattcctgcacttgaagaaacctctcatcttgcttcgtgtgtcctgaattattgccgctcaggagaaattgctgatggtttagctgcactttgcttgggggccgaagcaattgttccaatgatctacaagcccgtattacatgctcttacgcacttaggtgttgctgaacggggattagaatttttcaaattacatattgaagaggacgaagatcatgccattaccatgatgcatattcttcacaatattatagaaaataacgaacagttatcgaagcgagtaaaggcggttggtaaaaatacgatattgctgcgctgtagaatgtttgatgctgtgtatgaaaatataaaaaatgagatacttttcactgaagacgcgtgcaggacttttgaaaagtacgaatcaaatgtgcgtagctactgccgtaactatccggccatatttactacggcaagcaatgccttagtgactgacaagcagggtaaatcatggattgattttttatcaggagctggatcattaaattacggccacaacaaccctcgattaaaatctcatcttattgaatatattgaaaaagatggcataactcattctctggatttatataccaatgcaaaacgggcattcattgaaagctttaatcagcagatactgaaaccacggggcttgcagtatcgttttcagtttaccgggccgacaggaaccaatgcagttgaagctgcaatgaaaatcgcacgcaaagttacagggtgcagcgatattgttgcgtttaccaatgcgtttcacggaatgtctctgggtgcccttgcagccacagccagagagaaaaaacgaaatgctgcaggtgtttccctaaacaatatagtacgccttcctttcgaaaatttccttagtcagaatgacacgtcactggacgttttggagaaaatgctagtttctccgggctccggtattgacttgcctgcagcaattattcttgaaactattcaagcagaggggggcgtcaatgtggcaagcgtagaatggttacggggtgtagcagaaatcgcagctgcaaacaatatactgcttattgttgatgatattcaggctggttgtggtcgtacaggaactttcttcagcttcgaagatgctgggataaaaccggatatcatctgccttgcaaagtctatttcaggatatggactccctatgtctcttgttctaatgaaaccggaactggatatatggcaacctggagaacataacggaactttccgtggtaataaccttgcatttattggtgccacatatgctcttgattactggcatgatccacatttcttgcgaagtcttaaagacaaatcggaaattgtgcataaatatctgctgggtctgcatcaacgatacccccaattgatcagaacaatccggggaaaaggaatgttatggggcttagaactcttttcttcgcaggcagcagaaaatgtcagaaaccaagccactgagttaggactcattatagaaacatgtggtccgctgggacaggtcatcaaattacttcccccgttgactatcgaaatcaatgtccttgagcatggattattattacttgaaaaatctctaaaacaagtttccgttcagttaggtatggagaataaaataaatacttcatcattaacacctcatgacactctgttttatcaagacgaaatcttgattgaaaaaaaattacttagtcttgacgaaaatgaaaaatcctctttattagaagcgcagaaaagcctaagccaaaaactcattgatggaggactaaattttgagggaaaaaactatccggtttcaattcgtcctcttcttttgtctgataacctaattcggcaactcgccagcatcggtgagcgttttacagaagtatttgaaaaatttgctcatgcatgggtggaaaatgtctcgatacgtgaatattttccgacttataagaaaagcgaacattatttatttaatttgccaaatcatacccctttgaccagaattttccgcctggatggtcttttcagtgaagatggaacttatcagatcttggaaactaataccgattgccccgggggagtgatccaaaatgggattgcaggtgcattatggtcagaggtgtcaaaccctttactgaacggtattgaagccagtgccgattttcagccctttgtccaaaatccggatttatttcttgagacattactggaaactcatcgcgaacgtaccggagagccagccagaagagcagccattgtcacttataaaggccggttcaaaaatgaggtaacctggatggtaaatggtttcaatcgtctgggggttcctaccgaggaaattgatgcgtctctattacgtcgacataacaacaaggtaatagatccgcagggtcgtgttattgatgtggtctataacaaactcgatttgcgcgatttgatcgatgaacctgaagttgaagaataccttactgcaacatctcatggagaagtcactttcatcaatcctctcatctgccaatggccgctcgcagataaagctataatggctgtcctaagtgatccgcaaatgctctttttcctgcctgaagaggaaaaggctttttgtcttaaacatattccctggacacgcatcctccgcgcatgccaaacgacatcccctcagggaaggcaaatcgatctagttgattgggcaattcaagaacgagggactcttgtgctcaaaccttctaatgcaacaagaggagaaggtctgttggtcggtccgtttaccaccgctcaggaatgggaaacggccttacatcttgcagcgcaaagcgacgaaacatgggtcattcaacgatacattcgcgggcgtgtgatttccgtagttcatcctgatattggcgttacagattcaatgtggtcaggtgtggatacctatgtatatggtggccggtttgcaggttttcaggcacgtgccagttttgatccggtcatgaatgtagggtgccggggaattcttttgccggtagtaaaaattaaagaggcataa

SEQ ID NO: 6674 - DNA, 321 bp, Photorhabdus luminescens
ttgtttcaatcatggcagagtcatcaagccatcgatcctatctctgatgaatatccagaattaacgttacacgacgcctatctcatccagcaaaaagttattgcttaccggttggaaacaactggagagcgaattgtcggtaaaaaaatcggtatcactagccaagcagttatggatatattggacgtcgatcaacccgattttggcattctcacctcagatatgcattacaaaaacaatgccactgtacccattgaacaattaattgcgccgaaagctgaaggtgaaattggttttatcctgaaacacaatctgttatga

SEQ ID NO: 6675 - DNA, 405 bp, Photorhabdus luminescens
atgatcaacgaagcaattcaggcagcaaatggcttggtaagcattgtccctctcttagggggcagcacttcacgcaaagattatgatgaggctataaagctggtagaatatctggtcgagcaccatccagatagtccgctggtcgatatgcttacagctaaaattgacacatacgaaagtaatgcgccagagttcaatgaacgtattgctagcacacaaagcggtgtcgcaattctacgtacattgatggatcagtacggcctgaatcagactgattttgaggatgaaatagggaagcgttcccttgttagtcgtattttgaaaggtgaacgttcgttaacgcttgaagctatgcgtaaactctcagttcgttttggtataccggttagtgtttttattgattaa

SEQ ID NO: 6676 - DNA, 171 bp, Photorhabdus luminescens
ctgcgcgaggaggtggtccgccgcagcactaccggtgagcatctgaccgtgcaactggaagaggttcgatcggcgctgaaagattcgcaggaagaaatttggagcctacaggccgaattgctgcaactggcctgtcagacaataaaagggaagaaaggggaaattgcatga

SEQ ID NO: 6677 - DNA, 957 bp, Photorhabdus luminescens
atgaatatcagcaataaggttccatttaaattcagccttgaggtaaaagaagcacttgaatcaggaaagcctgttgttgctctggaatctaatgtgattactcatggtttggattatcctgataatgtcacaacagctaagaatgttgagcaggctgttcgtgaaagtggggcaatacccgcaacgataggaatagataagggggaatttttgattggaatgtcagatgagcaaattgaaaaatttgcgacagcatctcacgttccaaaggtcacgagtcgagatattccggtcgtgttagcgagtggcggtatgggggcgaccactgtggcatcgtcaatacttgcagcagaaatagcgggtattaaattcttctgttctgcgggtattggtggggtacatcgaggggcagagacgagtatggatatatcggcagacttgactcagttaacgcgttcccgagttgctgtcgtatgtgctggtgcaaaaaatatcctcgatattggattaacattggagtttttggagacatggaatgtgccagtcatctcctatcagtcggatgattttcctgcattctattgccgttccagcggattcaaaagcccacagcgccttgatgaacttgccgtcattgccaaagctattgagataaattggatgctgccaggaggaaaaggggtattaattacgacgccaactaagcctgaggatgctctggataatcaaaagattgatataattatacaggaagctgtattagaggctaagaagaaaaatattgttggcaactcgttgacaaagtatttgatgagaatggtggatcgagaaaccgatggaatttctgcgaaagccaatatggctgtattagttaataccgcagaagttgctggaaagttagcggtagccgcttgcttgcaatcatcgaccttttttgctcgcattaagagccaatga

SEQ ID NO: 6678 - DNA, 3855 bp, Photorhabdus luminescens
atgttagaaaataatattacacaatgtgactcaatcaatgatgtttatcttaaagaagaagcaataacattgatggatatgcttgagagtcaacttaagcaccaggcagatggatatgttgttattgatcaagaagaatctctcagttacgctgatttctatttgagggtgaaagagatagggtattgtctgtcagaaattagctcaaagaattcggtgggtattgggcttttttgtgatccttctatagatttaatttgtggtgcatggggtattttgtcagcggataaagcttatttgccgttatcgcctgactatccaactgaacgcctcaaatatatgatagaagattctggtattgatgtgatttttacgcaatcgcacttaaaagcacagctacaggacattgcaccaaaatcagtattaattatgacaccagaagatgtcgctctgacgataaaaacacgaacaatagaagatattctgggcacagttcaagttcctaaacccactagtctggcttatattatttatacctctggtagcacgggtaagccaaagggagtgatgattgaacatcacagtattgtaaatcaaatgagatttcttgcaaaagcgttcaaattaggatgtcattcccggattttacagaaaacaccaatgagttttgatgcggctcaatgggaaattctagcgcctgcaattggtggtcaagtgattatgggtcctttaggttgctatcgcgatccggatgcaattattaaaaccattcttcagcatcaagtaacgactttgcaatgtgttcctactttgctacaagcgttactggataatcctaattttttggattgcttatcattgactcaagtattcagtgggggagaagcgctgacaaccaaattagccacgcaatttttgaatagttttactcactgtgaattaatcaatttatatggcccgacagaatgtacgattaattcatcatttttccgggtgacaaatgagactttgccgaattatcaaacctctatttcgattggtgcacctgtagataataccgaatactacgttcttgatgatgatagattacctgtggcggttggcgaaattggcgagctttatatttcgggtgctcaattagcacgtggttatttgcataaaccagaaatgacaaaagataaatttatttgtaatcaccttgtatcaggaactcaacatcaatggttatatcgaacgggagatctggtaaccagaggggctgatggtaatacttattttgttggtcgggttgatagccaggtcaaattacgaggttaccgtattgagcttgatgaaatacgccatgcgattgaagaacatagctggataaagacggcggcaatgttaattaagaaggatgccagaacgggtttccaaaatctcatcgcgtgtgtggaattagatgagaaagaagctgcattgatggatcaaggtaatagtagctcacatcacaaatcaaaagccgataaactacaggtgaaagcccaactttctaattctggttgtcgaagtgaagagttatgtgaaaatcgccctacattcttacttccttatcaagaaggggagataaaacagagagaatatgcatttggacgcaagacatatcgctattttgagggaacagaaataacggtagagaaattaaaaaaattgctgacagccactcaatcgaatgaaattagctctttgccactgagtcatctaaccctgaatgatttcggttatgcattgcgttattttggtcagtttaccagccatcaacgtttattgcccaaatatgcctatgcttcaccgggtgctctctatgcgacacaaatgtattttgaattgcataatgttctcggtttggatgcggggatttactattatcatccagtgacacataagttaataaaaatttcaacattgagtcgtcggcaaatgccaacgataaaagtgcattttattggcaagcatgaagccattgagcccgtttataagaacaatatacaagaagttctggaaatggaagcgggccatatgatgggtctttttgatgacgtattaccggaaattggcttgagtattggtaaaagtgaatatcaagatgaatgtccagattggtatgatggtgatattcaggattattatcttggtgcatttgaaatatgtagctatgaacatggattgccgccatttgagactgatatttatttacaaacacatgcccataaaatacctgagatgccgtgtggtttatatcacttttctaacggggaatttgtacgaataagtgatgatattgtccgaaaaaaggatgttattgcgattaatcagcaagtttatgatcgctccagttttggcgtgtcaattattccacgctgtgtccctgaatggcattattatataacactgggtcgtcggttacatgcgttacaaagtaatccattgtatattggattaatgtcatctggttacagttcgaagagcaataacgatttaccttcggcgaaaaggatgcgatctattctcaatgcacttgatagacctatggcggcattttatttctgcataggtgggggtattagccaagcgcaatatatgtgtgaaggcatgaaagaagatgttgttcatatgaaagggccagttgaaatcattaaagatgatcttcaacaacaactccctcaatatatgattccaaataaggtattagttttcgataaattacctttgacggccaatggaaaagtggattatcaatctttatcagaatctaaagccgtggagaatgtttcaacacagcgtctattggtgccattacatacagatactgaaataaggcttggaaaaatttggatggaagtactgaaatgggattcagtatctgccctcgatgattttttcgaaagtgggggtaattctttgatggccgttgcaatggttaataagatcaatgcggcctttaatattcgttttccgttacagatactttttcaatctcctaatatagcagaattggctaagtggattgaacagacagactctaaaacaatatcaagattaattttattgaatcaggcaagcaaagaccccatttactgttggccgggtttgggcggatatcctatgagtttgagattgcttgctaataaagtcgttcctgatcgggcattttatggaatacaggcatatgggataaacgagagtgaaataccgttttcttctatccagagaatggcagaagaggatattaaagagataaagaaaatacagccagaagggccatatatattgtggggatattcatttggtgcccgagtagcatttgaagttgcataccagcttgaacaagcgggagaagaagttaacgcattgaatttattggctccgggatctcctcatcttgatatgaagcaagcggaatatatggataaaggcgctgaatttactaatccggcttttgttaaaatacttttttctgtattttctcgttcaatcaacagcccaatggttaaaacttgcttagaacaagtaaatagtgaaacgacatttattaactttatatgtagtcgttttaaaaacttggaaccatcattagtaaaacgtatcgttaggattgtgactttgacttatgatttcaagtacagtattgatgagctttatcacagacacctaaaggcacctataactattttcaaggcgaatagagataatgattcatttatcgaggaatcggatgtgatttcatcaatgtcgcctaaaataattgaattaatatcggatcactatcaactgttggaaagtgaaggtgttgctgagattgagaaaataatctaa

SEQ ID NO: 6679 - DNA, 1179 bp, Photorhabdus luminescens
atgattaataaactacttaatgatcgctcatatcacattgaatttaacggtcacctgacgaatcacattaaacatgctgttatagcactgcatggtttagggatcagtgctagcagaattaaagactattatgataattatgttaaattgacgccttatggtatggggctggaaccccctaaaacattaaagcacgtggtagatagttcgaactggaaacatttcttgggtaagcgaacaagttattcttcttactgtgattattttgaagaagaaattaaacagaaagggattgaacaagtattacaagaatatatgccaacgcttttgtctgggtgggctggtgcattaactcacggtaccattcatttaggttgggcattggatattaatcatccgtggatgattattgaaggacttgcttacatggcattctcgtacgttccttgccattcagaacgcgcttttattgatagttcgctaaacgataagaatgcttttgattctatattgcgaatttcaacactgtgggagcagaggagagcagaattgaccgattgggtgaattcgttgattgataatgaagatttggccgatactgatttaatacatcctgaattaaaaagatctggtcttcaatatcgtattgcacgtattttaatgcaaggtcacccagaaatataccgtttgccggtttggattgagacgcaaaatgtagaagaaagttgggcgcagttattttatgtcgtgacattaatttatctcgctaaacccggtgattttttgtttcttcatttgattacctcgttgtttgcaatgaaaaatatcgcttcacgtttaccggctgaggaaagtaaaaatattattaaatgttactgggttggcatgttgtgcattctgttttcaacaactgatttatcgaagcctgccaaattttcggcgcttaatcagacttattcattcaggcaagacgaaatgacttatcctgtctgggaacaggagtggtcgcatattattgccagggcattagaggaagaggaagaacataatccgaaactggtttatgtgatgaatcaattgtggaaagaacagggtttaactatttatagggcagcatccagtcaatttacaagtactcctttgcttcctccttctttcgaagaagcaccaattgaataa

SEQ ID NO: 6680 - DNA, 438 bp, Photorhabdus luminescens
atgctgagcttgatttttattgcctttttaaatggcatatttatcgcggcgacaaggacgattaatgggcagttaagtgtctcgataggttcttttggtgcttcgctttggaatcatataggtggtttttttctcttaacagtgatattaacacttttatcgagctggcaatggaataaatgggattttagcgttatcccaaccgcggcttatatgggtggggtgtttggcgctttgtttgtagcagtcagtagctatatttttcctaaattaggggcgatgaatgccgctgtccttgttattgccgggcaaatgttatcagcggtactacttgattggctatatcaggggatgacgcccgggttggtaaaaattgttggagtactgtttgtgttaattggaatttatctcactagaaaaacaactgagttaaaataa

SEQ ID NO: 6681 - DNA, 477 bp, Photorhabdus luminescens
atgattaatacgataagaaatatcttactggcagttattggtggaagtctactgacgttgatgatttacaccaatagtatgctgtcagaaagtacaacacccttttttgcatcatgggtggctcatggcattggcgcgattgttgctttgatattgtttattattgtatctaagctcttttctaggaaagaaatagatgaaagtaaacataagaaatcaaatattcctatatggttttatcttggtggtattcctggtgcatttaccgttgtgctggcggctattgctattaatggtggactaccattatccagtacaatttcattagggttagttggacaaatactttttggtttggttgctgatcgctttgggtttttaggaacaagaaaaagaaagatagtgatacaagatttttatgtgattttctttgttctatttggcagtatattaattctatttgggggaagtaactaa

SEQ ID NO: 6682 - DNA, 669 bp, Photorhabdus luminescens
atgaataaaataatcattttcgatttagatggtacattgtttgatacttctcgcgcaatagtggaaacattcaatgctgtttttaagggattaaacattccattggtaggaaatgaaaacatctgtactacaattggtctgcccttagagaaagcatttgcaacgctcttgaatatatcgcctgaagaggcgttaatcgctaaagctgttgaacaatatcaattacagtatcgtcgatgtattctgccgaaagcaaaggaattattatttcctggtgttgaagatggattaatctctttaaataaaaagggagtgaaattatctgtagcgaccagcaaatttaccgcaagtgcaacagcattacttcaggctgctggtatagacgttgtatttgatgaggtaattggtgctgatcacgtttcaaaacctaaacctgatccagaatcaggaaggaaaattttggaatattacggtgctacaccagagatggcagttatggtaggtgatacaactcacgatattcatatggcaaatgccgttggtctgcgatcaatagcggtgacatatggtatacataatgtcgatatgttgaaagaagccaagccaacttggatagctaattgttttgatgacgtacttcgtattattgaggaaaatatacttaaatga

SEQ ID NO: 6683 - DNA, 225 bp, Photorhabdus luminescens
atgccacatattaatataaaacattttcctgctaacctcttacaagaagataaagatatcttatctttagaattgacgaaggtggtaaaaaaagcgtttggttgtaaagaggatgttatttccatttcattagagccgatcgaaaaggctaaatggaatgaagaggtttattttcctgaaattaaatttaaagaagatttgttgattaagtctccaggttattaa

SEQ ID NO: 6684 - DNA, 657 bp, Photorhabdus luminescens
atggagaattataaaaacgtgcatgttttgccgaaaagtcaatatttgacttctttgcatacaaaagcgcgtaatcgtaaagccgaacaatcggagtttgtattttattctgatcgtatcattcgtttattattagaggcagcatctgagttgctaccttatacctctcataatattcaaaccccaattggggatatttataatggagcgattttaaatactaagctttgtggtgtttcggtaatacgtgcgggagaaagtatagagggcgagtatcgaagaatgtatcctgattccccaatgggaaaaattcttattcaaagggataaattaacaaaacttcctcattattattattcgaacttacctgatgatattgcggagagaactattttactttttgaacctatgttggctacaggaggatcattagctaaggctatcgatttattaaaagaaagagaagtacctgaagataatattattgttgttaattttctttcttctcctgttggtcttaatagaatcatgacatcatacccgacaattaaactgattacctcttcaatagagaatgggcttaataaagatgcttttatgaatcctggcataggtgattttggtgatcgatattttggaacgtataaaccatcgtga

SEQ ID NO: 6685 - DNA, 756 bp, Photorhabdus luminescens
atgatccaggaaaaacgtgttattcgtcgaatccagtctggtggttgtgcgatccactgccaggattgtagcattagccaactgtgtattccttttaccttgaatgaacacgagcttgaccagcttgataatatcatcgagcgtaagaaacctatccagaaagggcaaacgttatttaaagcgggcgatgagttgaaatctctttatgctatccgttctggcaccattaaaagctacaccatcaccgaagaaggtgatgagcagattacaggtttccacctcgcaggggatttagtcggttttgatgcgatcctcaatactcagcatccaagttttgctcaggctctggaaacatcaatggtctgtgaaattccgtttgaaacacttgatgatctgtccggcaaaatgcctaatctccgccagcaaatgatgcgcttgatgagtggagaaattaaaggcgaccaagaaatgatactgctgttatctaagaaaaacgcggaagaacggttagccgcgtttatttataatctctctcgtcgtttcgctcagcggggtttctcaccgaaagaattccgtttaaccatgacccgcagtgatattggtaattatctgggtttaacggttgaaactattagtcgtctgcttgggcgtttccagaaaaaccaaactctcggtgtaaaaggtaaatacatcacgattgaaaacatggataagttgtctgagttagtcggaaaaaaatctgtttcaattacctaa

SEQ ID NO: 6686 - DNA, 945 bp, Photorhabdus luminescens
atggcaaactatcaaaaccttttagttgtaattgacccaagtcaggacgatcaaccggcattaaggcgtgcagtttatatcgtgcaacgtaacggtggccggattaaagctttcttgcccatttatgatctttcttatgagatgaccaccttactctccccagaagaaggtagtactatgcgtaaaggtgttaccagccaacgcacggcctggcttaaacaacaagcgtattactatctggaagccggtattgatattgaaataaaagtggtatggcataatcgaccttatgaagcgattatccaagaggtcattacaggtaatcacgatttacttctgaaaatgacgcataaacatgacaagctaggctccttgatttttaccccacttgactggcaattactccgtaaatgtccatgtccagtatggatggtaaaagatcagatctggccggaccaaggctcggttgtagtcgcggtcaatttatccaatgaagaatcataccaccatgaattgaacctgaaattggttaaggaaactcaggaactggcaaatcaagtcatgaaaaatccggaaattcatttggtcagcgcttatcctgttgcaccactgaatatcgctattgagctacccgatttcaacccaagtgtctataaccatgctctacgtggccagcatcttattgccatgaaagaattgcgccaaacattctgcattgatgaaaaatatactcatatccatgaaggattaccggagagtgttattccccaaatgtgtgatgagatgaatgcgggcattattgttcttggtatcctcggcagaactgggctgtccgctgcttttctgggaaataccgcagaacatgtgatagaccatcttaaatgtgacattctgacaatcaaacctgatggttttgaatgtccaattaaagccgctaaagagtaa

SEQ ID NO: 6687 - DNA, 966 bp, Photorhabdus luminescens
atgacttccacccgcttgccacaaaatattggagaagcgtgtcaacaggcaaataatcttggtgtcaacgcgccggaacttgcacgatttcaggatgaaccgccccagatggcaagcggtgatgtcggtaaaagtggttatctacggttgggatttgcccggcgtggtgatcgcagcattttggcacaaatgaaacgtcgggttccttatttggtccagcgggcattgtattgggatgaggcactgccgcagatgccgtgcgtatttatgatctccacatcgggatgtatcttgcaaggggatagattggcgctggacattcatgtcgctccagaggcgtttggtcatgtcactacccaatcggcgactaagattcattcgatggaaaataactacgcagcgcaagtacaaactatccagatagagcagggaggctatctggaaatgatgcccgatccggtaatacctcacagcggctctcggtttattaccgatactcaaataaccatccatccgaccgccacccttatttattctgaaattattatgtccggtcgcaaataccaccttgctgatcaggggtttaaatttgatgtttactcatcacgtattacggcaactgattttgatggcaagatattgtttacagagcgttatgtactggagcccaaaaagcagtcattgaacagtgtgggggtgatggggccgtttcatgtatttggcaatgtgatcttgctgacacctcagcttcatcacgatcgtattctggcgcggatggctcctcagtacgatgctgaaacaggtatagcgagtggtaccagtcgtttaccccatcagtgtggtctaatctttaaggtattgggaaaagaaacttatcaagttaaagcgggtattcgtcttttctggcgtatagctcgtgaggagatcctcggtgtgacactgcctgaaccgtttatctggcgataa

SEQ ID NO: 6688 - DNA, 636 bp, Photorhabdus luminescens
gtgaaaaaaattacccgaattggtattggcggtccggtgggttcaggcaagactgccgttattgaagtgatcacccctatcttaattcagcgcggaataaaacctctgattatcaccaatgatattgttaccactgaggatgctaaacaggttaaacgtaccttgaaaggcattttggatgaagaaaagatacttggtgtggaaaccggtgcgtgtcctcataccgcggtgcgtgaagatcccagtatgaatattgctgcggtagaggagatggaagcgcgttttcctgacagcgacgttgtgttgattgaaagtggtggtgataatctgacactcacttttagtccggcgttggcagatttttatatttatgtgattgatgtcgctgaaggggagaaaattccgcgtaagaacggtccgggtttggtacaggccgatattttggtgatcaacaaaattgatttagcgccttatgttggtgccagtctggcggtgatggagcatgacactcaagttgtacgtggtcagcgtccttatatccttaccaattgcaaaaccggtgagggtgttgaaacgttggtaaatatgatcatgcgtgatttcctgtttacccattcattacaggcgacacaatga

SEQ ID NO: 6689 - DNA, 687 bp, Photorhabdus luminescens
atgaatgctctccgcttaatcagaatcatgcagtttgcggattcagtactgcctgttggcgcattttctttctcaaacggtttggaatcggccattcagagcaaaatcgtatatgacgtggcaacattaagcgactttacgcgtacagcgttgttacaggcggtgagtagtgatggccgcgcggtaatggctgcgtgtcaggcgctaaatagtgggcagcatgatgcggctatctcccatgattgggcaatattcaaccgcaaattaaatgaagaaagtcgcactatggtcacgcggatggggaaaaagttagcggaaatggcggttgaagtcaccggtgagtcattaattgcatggtggttagcacaaataaagagcgatattgccgccggtacctatccgattactttggcggtcgtcatgagtgcattgggtgcggctccacgtgaagtgatcgtcatgcatcaatatggcgttgcaatgacgatactcagcgcggctatacgcctgatgcgtgttacccatattgacattcaacgtatcttgttctcattgaatcaagatattgaactgttttgtgatgaggcggaaaagggagggattgaacagatgacatcttatgcaccgatgaccgatgttctggcggcattgcacgttagcgcatttacccggttattcagtaattaa

SEQ ID NO: 6690 - DNA, 597 bp, Photorhabdus luminescens
atgattgttattgaacagattcttggtaatgccaaaaaggatgttttctggcgagatcgcttgcaagggatctcgccagatatcttggtgctttcgcaatgggaagcgcaaaaaagccgttgtcgtaaatccacccttaacgggttggatttgggtatttcccttgaccgtcatcagatattgtctgatggcgacgttttattgtgggacgaagctaaaggactggcagttattgttcaaatgagcttgcgtgatgtgatggttattcacctgaaatcattgctgtcattagatgtagagacggtaatgaaaacgagctttgaacttggtcatgctttaggtaaccagcattggaaatcagtgattaaatataatcagatttatattccgctgacagtatcaactaaggttatggattcagtcatgaaaacccacggttttcatgcattgccttactcctttgttaaaggtgaagagatattgccttctcttaacaactcagaggctcgcctgttattcggtggtgcagaggattccgcgacacacgttcatgtcgataatacatttctgaaccagcatgtgatcaaactaaaatga

SEQ ID NO: 6691 - DNA, 1716 bp, Photorhabdus luminescens
atgccaaccatttcccggcaggaatatgtaggtctttttggcccgacgactggcgataagatccgcttgggtgataccaatctatttattgaaattgaaaaagatctgcgcggttacggtgatgaatcggtctatggcgggggcaaatcgctgcgtgatggtatgggtgcggataaccgaatgaccagcgaaaacatcttggatttggtgattaccagcgtcactattttggatgcccggcaaggtgttattaaagcggatgtcggcataaaagggggacgcattgtcgggataggtaaaagtggtaatcctaacatgatgaatggtgttacccccggtatggtagttggtgttagtactgatgcgatatccggtgaacatctcatcctcacggctgctggcattgatacccatattcattttatttctcctcaacaggttgaacatgctttatccaatggtgtgacgactttctttggcggtggtgttggtcccactgatggcactaacggcactactgttaccgctggtccgtggcatatccaccgcatgctgcgtgcttttgagagtttaccggttaacgtaggtattttgggaaaaggccatgctgcggtggctatgccgctggttgagcagatcaaagcgggtgttgccgggttgaaagtgcatgaggactggggcgcaactaactccgcattgcgtaatgccttacgcgtagcggatgaaatggatatccaagtcgcggtgcacaccgatagcttgaatgaaggtggttatgttgaggataccattgatgcttttgaaggtcgcaccattcatactttccacaccgaaggtgccggtggcgggcatgcaccggatatcattaaagttgccagccagatgaatgtgttgcctagttcgactaatcctaccctgccttacggtatcaatagccaggcagaattgtttgatatgattatggtttgccataaccttaatcccaaagtgccggctgatgttgcattttcggaaagccgtgtacgtccagagaccattgcggcggagaatgttttgcacgatatgggcgtactgtcgatgttttccagtgattctcaggctatggggcgggtgggagaaaactggttgcgtgtgatgcaaactgctcatgccatgaaagcggcgcgtggcaagttgccggaggatgcagcacataacgataacttccgtgtattacgttacgtcgccaaaattacgattaacccggctattgctcagggaataagccatgtgctcggttcagttgaagtgggaaaaatggcggatcttgtgctgtgggagccacgtttttttggcgtaaaacctaagttggtcatcaaaggcgggatgattaattgggcggtgatgggggacccaaatgcttcactgccgacaccacaaccgacattttatcgtccgatgtttggcgcattgggcaaaactcttcaggaaacctgtgtcacttttgtatcccaagcagcaatggaactgggggtaaaagagagccttggtttggagcgccaagttatggcagtgcacaactgccgggctatctctaagaaagatatggtgcgtaatgctgaaacgcccacgattgaagtggatgcagaaacctttgccgtcagggtgaatggtgaatatgccacagtaaaaccggtcaggacagtcgcgctcaatcagcgctatttctttagttaa

SEQ ID NO: 6692 - DNA, 390 bp, Photorhabdus luminescens
atggaaaaaaataataaagaagatgttactccgttgggggggtatattctggctaaagacccgatctcctttaatgaagatcgtccggttattcaattaagagttcgtaattcaggtgatcgccctattcaggtgggatctcatttccatttttttgaagtaaataaagcgttgcaatttaatcgtgcggctgcgtttggtaaacgacttaatatcacagcaacaactgctattcgttttgaacccggtgatgaaatcgaagtgtcattaatcccgattggtgggaaacaaaacgtttatggatttaataatttagtcgatggttgggcgggtaaaagtccggttgctattgatgagcctgtggagacaacctggttacatgccgggtag

SEQ ID NO: 6693 - DNA, 303 bp, Photorhabdus luminescens
atgcaattaacaccaagggaaatcgaaaaactcatggtatatacactggctgatgtcgcattaaagcgtaagtctcgcggtttaaaactcaattatcctgaagccgtcgcaattattactgcggctgcattggaaggtgcccgagaggggaaaacattggaagaagtgatggatgattccaggcatgttctgactaaagaggatgtgatggatggcgttgctgatcttattccgcatgtacaggttgaagcaatatttactgatggtagtcgtttggtcacggtgcatgaccccattcaataa

SEQ ID NO: 6694 - DNA, 1026 bp, Photorhabdus luminescens
atgaataattcaacggataaaaaacgtgctgtatctcttctggttgttttgattgccgccaacatattggcttggatttgggcatttatcgctttccgtcatcatgcggttatgatgggagtagccctgttggcttacggttatggactgcgccatgcggttgatgctgatcatattgccgcaattgataacgtcacccgtaaattgatgcaacagggtaaatcacccattgccgtcggcgctttcttttctcttgggcactctaccattgttattctggcctgcttcgccatcgttctaacctctatggcgtttaaagatcaaatgggctgggttcatgactatggcggcattgttggtaccttagtttctgcctgctttctgctagcaatagccctgattaatttactgatattaaaaagcgtctatcagaagtttcaggagatcaaacgtggcagaaatctggctaaaagtgatttaactacactagaaacgacgccgggggggatcatgacgcgcctgtttcactcagtcttccggctggtaagcaaaagctggcatatgtatttggtcggttttctgtttggcttgggttttgacaccgctaccgaagttgggctattaagtatatctgccgccggttctctcagtggacttcctctgtggtcgttgatggtattcccggcgctatttaccagcggtatggcgctcattgactcactggataattttgtgatggtgggagcctatggttgggcattttcccaaccgacacgcaaactctactacaacatgaccattaccgcggcttccgttgccgtagcgctgttcattggtggattggaagcacttggacttattgctgagcaatgggatttgcacggcgttttctgggataccattgggacattaaacgataacatgggcaatgttggtttttgggtcgtcggaattttcattctgttctggaccttatcagtgatgaattatcgctggcgggggtacgatacgctggaaattaaataa

SEQ ID NO: 6695 - DNA, 297 bp, Photorhabdus luminescens
atgccatctgtaatagtcactcccgcagcaacaagggatataaatcgtcttattgatttcttatatcaacgcgatacagttgctgcgaagtcggcacttagtatcattagcaaacacatccaagcactggaatctaacgtcttatctggacggccaacagaaatttatccactctttgagttaattatcccttttggtggtacaggctatatattgttatacagagaacttcccggaagtaatacgcgttacattttggctatccgtcaccagcgagaaatcaactataagcactaa

SEQ ID NO: 6696 - DNA, 1389 bp, Photorhabdus luminescens
atgtcgagtggagtcgttacagcagcttatattgttgccgccattttatttattttcagcctggcaggtttatctcgtcatgaaagttctaaacgcggaaatatttttggtatcaccggaatggcaatcgcattgattgcaactattttcgggcctgataccggaagtgttgtctgggttattctggcgatggtgatcggtgcggtgattggtattcgtctggcaaataaagttgaaatgactgaaatgccggagctggttgctattctgcacagttttgttggtttagccgccgtgctggtcggttttaatagctttattgctcacgatagttttgcagaacctgtgatggaaaatatccatctaacagaagtcttcttaggggttttcattggtgcgattaccttcaccggttctgttgtggcatttggtaaattatgtggaaaaatttcctctaagccgttgatgttgccaaatcgtcataaattaaatcttgccgcgcttgtgatctcctttgtgctgttgattacctttgtgaaaacggacagtacagggctgcaagtgttcacgttattgcttatgacagcaattgcattggtatttggttggcatttggttgcttccatcggtggtgcggatatgccagtggtggtttcaatgctgaactcttattcgggttgggccgcagcagcagcgggtttcatgttgagcaatgatttgttgattgtaacgggtgcactggttggttcttcgggggcgattctctcttacatcatgtgtaaggccatgaaccgctcttttatcagtgtgattgccggcgggtttggtacggatggttcttcaaccggtgatgatcaggaaatgggtgagtaccgtgaaaccacagcggaagacgttgctgaactattgaaaaactcaacttctgttatcatcacgccgggatatggtatggctgttgcacaggcgcaatatccggtacatgacatcacagccaaactgcgggagaagggagtcaatgttcgctttggtattcatcccgttgcgggacgtctgcctgggcatatgaacgtgctgttggcagaagcaaaagtgccttacgacgttgttctggaaatggatgaaatcaatgatgatttctctgataccgataccgtactggttattggtgccaacgacaccgttaaccctgcggcacaggaagatcccaacagcccaattgcgggtatgcccgttctggaggtttggaaagcacaaaatgttgttgtgttcaaacgctccatgaacacaggttacgctggtgtgcaaaatccactgttctttaaagacaatagccaaatgttgttcggtgatgcgaaggcgagtgtagaggaaatcctgcgtgcactgtga

SEQ ID NO: 6697 - DNA, 1530 bp, Photorhabdus luminescens
atgcgtattggtgtaccgaaggagcgacttgccaatgaagcacgtgttgcagccacaccgaacaccgtggaacacctgctgaaattgggatttaatgtcgttgttgagagtggagcagggcatttagccagctttgaggatagtgcttaccaacaagtaggtgctgaaattactgatcgtcataatatctggcgttcagatattattttaaaggttaatgctcctgaggatgatgaaatagcattaatgagagaagggagtacgttggttagttttgtttggccagcgcaaaaccctgagttattgcagaagttatcagaccgcaaagtcacggtgttggcgatggattcagtgccgcgtatttccagagcacagtcgctggatgcattgagttctatggcaaatattgctggttatcgtgcaatagttgaagccgctcacgaatttggtcgtttctttacgggtcagattactgcggcaggaaaagttccgccagccaaggtgatgattattggtgccggtgttgcgggtttagctgctgtgggtgcagcgggcagcttgggtgcggttgttcgtgcatttgatactcgtcctgaagttaaagaacaagttcagagcatgggggcggagtttcttgagctgaattttgaagaagaggccggtagtggtgacggatatgcaaaagtcatgtccgaagccttcattaaagcggagatggcgctttttgctgaacaggcaaaagaagttgacatcattgtgacaacggcacttattccgggaaaaccagctccacgccttatcaccaaagagatggttgaatccatgaagccgggtagcgtgattgttgatctggccgctcagaccggaggaaactgtgaattaacgcaagcagataaattggtgattactgcaaatggtgtgaaaattattggttacacagatttgccaagtcgcttgccaacacaatcttcacaactctacggcactaatttggttaatttgctgaaattactgtgtaaagagaaaaatggcgaaatcaatattgattttgacgatgttgttattcgtggcgtgacagttgtcaaagagggcgaaatgacctggccggcaccacccattcaagtttcggcccagccgcaggcaaaaccggcatcaattaaagcagaaaagccagcggcgaaacccgtttcaccttggttgaaatatggtttattggcattggcggttatcttgttcggttggttagccaatgttgcgccaaaagagttcttatctcactttactgttttcgcgctggcttgtgtggtgggttattacgtggtctggaatgtcagccatgcgttgcatacaccgttaatgtcggtcactaatgccatttcggggattattgtcgttggggcgttattacaaattggtgatggtggatgggtaagtttcttctcatttattgctgttcttattgccagcattaatatcttcggtggcttcactgtcactcaacgtatgctgaaaatgtttcgtaaggactaa

SEQ ID NO: 6698 - DNA, 954 bp, Photorhabdus luminescens
atgaagctgaaaacaacgatcattgcagcagcggtactctcattaacgggtattaccactgttcaagcagctcaggagttatccccggagaaagcagcagagctgaaaccatttaaacgtattacagttacaggcccttttaatgctatttatgaagctgccgatgcggtttcccgtcgtgcagacaaaatgggtgcagatgggttttatatccaaagccttgacgatctaaataatagcggcaatctgcgcgttacagctgatctgtatcacaaagatgcagagaaaattgataattcacctaaatatcgtctgttccgcggcatcaaagaattacccaaagcagaagctgtaacgttggaaccattcgatacggtcactattaacggcttttacgacaatgaacccgatttgaatgaagccattgccaaagaagctaagaaaaaaggcgctgcggctttctttattgttcgtcaggttgcaatcaatgatggcggtaatcagacggtgacagcttatgtttataaagatgatgcaccaaaacgccaaattcaggctgatgaagccgttatcccggcagattccgattctggacgtattgcattggctgctggtggcgaatcagctaagaaagtagaaattcctggtttagcctcttcaacttcaaccagtaattctgttggccgcttctttgaaacccagtattctaaaggcaaacgctacactgtaactcttcctgatggcacaaaaatccaagaattaaataaagtcagcgctgctcagatggttccttttgattccatcaccttttcaggttactacaacagcatgcctgatgtttcttatgaagtggctaaacgtgccgcggctaaaggtgctaagtactatcatattacccgtgaatggcaatccagtggtggaacctccactatcagtgcagatctgttcaaataa

SEQ ID NO: 6699 - DNA, 243 bp, Photorhabdus luminescens
gtggaaaatttagagaatcgcgtcaaaagtgttgttgcagaacaacttggaatacctgaaacccagattcttaatacacaaacattcgaggaattaggtgccgactcgttagataatgttgaactgattatggctctagaagagcatttcgggataactattgatgatgaagaagcggaaaaaatagtgacgatacagaacgccattgattgtatcggttcaaagttggaatccgctaactaa

SEQ ID NO: 6700 - DNA, 1149 bp, Photorhabdus luminescens
atgagtaacaacgtttatatcactaaagtttccgcgtttatgccgggaaacccgatagataataatacaatggaatctgtccttggttttgttggtggtcgtccatcaagatctcgtcatatagtccttcgcaataatgggatcaaatatcgccattatgcactggatccagagaccggtgaggcaacttatacatctgctcaactagcggctgaggcagtaaaaggtttggttgatgaacacttctctttagacgatatgcaaagtctggcagcaagcagtggtacttctgatcaaattataccgggtcatggtgtcatggttcatggagagctcaaaaataaaccctgtgaagttatctcaacttccggtgcttgtgctgcgggtatgacagcgatgaaatatgcttatttgtccgttctttcaggagcgacaagtaatgcggtttcaacaacgtcggaagtaccttccactgtattgcatgcccgcaatttccagagtgaaaacgaagctcgggttgcagaactggaacgacgccctgaaatcgcttttgaaaaagattttctgcgttggatgctttctgatggtgccggcgctgctttacttgaaaataaacctcgacctgatggtgtttcattacgaattgattggatagatatttactcttttgctaatgagcaagagacatgtatgtattcaggtggagaaaagttagcagatggcagtttgaaaggttgggctcaaatgagtcaggctgattggcttgcatattctgttttctgcatcaaacaagatgtcagatatttaaatgagagggtcgttaaattcacacttaccgaaccattgagacggatagttgctgatcgtaacttatcttcagaatctattgattggttcttgcctcattactcatctgaatatttccgcatgaaattttccgagggtcttgacgatattaattttagtattgaacaagagcgttggtttactaacttaacagtgaaaggaaataccggatcggcttctatttatatcatgttggatgagcttatgaagtcgggtaaattgaagaaagatcagcgtctgttatgttttatccctgaaagtgccagattcacaggagcattcatgcatctgacggttgtgtaa

SEQ ID NO: 6701 - DNA, 948 bp, Photorhabdus luminescens
atgaaacgtgttcttgtagtgtcgtattcccaaagcggccaattgatcgaggtggtaaaaagcttaatttcacccctgcaagagtctgacgagatatacatccgtgaagttattctgaaaccgattcctgaatttgaatttccctggaagttttctaaatttgttgatgttttcccagaaacagtgcagttacatccgcctgagctagcgcctttgaatctggaagacgaagaaccttttgatttggtcatattaggctaccaagtttggtatttatcaccggctcctccgatagtggcatttcttaagagtgaagaaggaaagcgtttacttaatggtcgaccagtggtgacagttattgcttgccgaaacatgtggttgatagctcaagaaactgtcaaaagattgttgcatgaaagtggagcgtatttgcgtgataacgtggtctttgttgataaagcaaacttttttgcgacagtattcacaaccccgatatggctaatgacaggaaaaagacagccattccctaacttaccccgggcgggtgtatcggaggaagacgttaaagatgctacacgttttggtgatgcattgttggcagcgctcaaaacggataaagagaaagttgatgctccaatgttgaaaggtatgggagcggcggttgtcgaccaagcttttattttcggtgaacgtgcggcacatcgaggatttagattttggtctgggttgatttgccgtgtgggcaaacgagggatatgggtaagacgctctttattagcgttgtttgtaacctatttgatattgatggtactggttgtttttcctatttcagtggttgtgcgccgtttgctttccccattactaaaagaacgtcttaatgaattacagaaatactatgaacaaccttctggttctgcccgctatgatgataaggagataaataagtaa

SEQ ID NO: 6702 - DNA, 1392 bp, Photorhabdus luminescens
ttggaaaagaaactaggtctcacagcgcttactgcgctggtactcagctctatggtcggtgcgggtgttttcagcttaccgcagaatatggctgaaatcgccagcccggcagcgttaatgatcggctggggaataacaagtgtcggtatcctgttcctggcgatcgcactgttactgctctctcgtcttcgtccggatcttgatggagggattttcacttatgccaaagagggctttggtgaactaataggcttctgttctgcctggggatattggttatgcgcagtcgttgccaatgtttcttatctggttatcgtttttgccgccctgagcttctttactgataaagggggcattgtcatctttggtgacggcaacacttggcagtccctattgggagaatctattctgctctggttcgtacattggttagtactccgcggcgttcaaaccgcagccggaatcaacaaattggcgacaatggcaaaattgctgcctttaggtgctttcatcatacttgccgccattgctttcaaaatggacatctttcatttcgactttaaaggcatcgatttaggggttcctgtctggcaacaagtaaaagataccatgttgattaccctttgggttttcattggtattgaaggtgctgttgtggtgtcagccagagcgaaaaaacggacagatgtgggtattgcaaccatgctggctgtcgttgcggcgttaacaatatacatcttggtcaccctactctcccttggattagtaccacgacctgagttagcagcaatgcgcaatccatcaatggccaacctgatggtggggcttgttggctccgccggtgaaatcattattgctgccggattgattgtctccgtctgtggggcttatctgagttggacaatcatggccgcagaagtgccatttatcgctgcccaacacggctcttttccaaaagtatttaaccggcaaaaccgcaataatgcgccatcatcttcattgtggttcactaatggcgctgtacaactctctctggttttgatctggttgagtggaagcaactacaattcattgctgacaattgcatccgaaatgattttagtgccctatttccttgtcggggcatttcttttaaaagtcgcttttgatcgtagcaataaggggttattactcattgctgttggagcatgcatttatggcatatggctgctttatgcatccggtttgatgaatttgctattgtctgttgttctctatgcaccaggtcttattgtttttttgtatgcacgccgccaaaacccgcagaaaaatagcttacatctggctgaaaagctcactattaccgcattgctgataacagcaatccctgccactgggttgctaatcaagtaa

SEQ ID NO: 6703 - DNA, 228 bp, Photorhabdus luminescens
ttgaggagaatatctgatctttatcagggcattcgtactgaatttgttgcggtgcgaatgctccaggcagagacgattccaataggacaaaatagatatctgttttacatctttgccgatgatgatcaggaatacatctatcaacatagtcgctttgaaaatcatcttgatttgctccttcaacacggggtgaataattttagaattcgacaaaaattgattaaataa

SEQ ID NO: 6704 - DNA, 837 bp, Photorhabdus luminescens
atgaaacagttcgtcttgatattaggctttttgtccatcgtgtttgccgtcgcgcatccggcttcggccatgcaagcagagcagaaaactgtcaccaatggcgtggcatcgatcgaatattcggtgcgagggaaggggccactgctcgtggtgattgcttcaaccgggcggggaaccgcggaattcgcgccactcgcagatcgactggcgaggcgcggctatcgcgttgctctgccggaaccacgcggaatctcggggtcgactggtccgatggaaaatgtgactttccacgactttgccgacgattttgcggcagtagttgcggcggaaggaggtaaggcaattgtggtggggcacgcttatggccattggatcgccaagacgattgcctcggattatcccgaaatgacgcgtggcatcgtacttttggctggggcggcgaaatcttggccctcggagctctcggatgcgatcatggtgataagtgatccgaaatctacccgtgaggagcggctgacgaaacttaagcttgccttcttcgcggcaggcaatgacccgacgccttggcttgaggggtggcattctgatgttataaaaagtcagtcctcggcgcgtaagctaaccaatcgcaaggattggtgggctggcgggacggcaccaatcctcgatctacaggcgggttccgatccgtttcgacctgaatcgtctcgaatggaggcgaaggatgagttcggcaaccgcgttactgtcgcagtgattgaaggtgccagccatgcgctaccggccgaaaagccgatcgaggcggcaatgcaattgccgattgggccgataaactga

SEQ ID NO: 6705 - DNA, 531 bp, Photorhabdus luminescens
atgaaagctaaactgattatttcatccttacttgcatcttctgtatttatttctgtagcaaatgcagcagacggaaaaatcaactttacaggtaatatcatcgcgaatgcctgtaaaatcgataccgactctgcaaatcaaaacgtaaacatgggaacaattagctcaaatgcatttagtggcgtagatagtaccgcggctgcaacaccctttagcattaagatgagtgattgcccaccagaatatactcatgcacaagttaaatttgatgggcagatagataatagaaataacaatctcctggccttatccaatgataaaggccaggaagtcgccgatggcgttgctattggtatctatgaagaagataactcaacgctgattcctttggcaaaagcttccaaatcccaggcttttactgatcaaaaaacagcagaattgaagttcattgcaaaatatgttgctacagctcaagcaattagcccgggctcaggtgatgcagtcgccaattttacgattgtttataactaa

SEQ ID NO: 6706 - DNA, 675 bp, Photorhabdus luminescens
gtgcagtatcaacgcctattcacagtaatttttctatatattatcagtataaatttcgctatcgctggtgtcgtcattggtggaacccgtgttatttacatgagtgacaaaaaagaagcgtctatttctataagcaacccggagaaagatgcaccttacctaattcaatcttggatccaagatgaaaatgataatatgaagactccttttatcgttactcctccgatctttaaactcgcagcagaccatgaaaatatcctgcgtattgtaaaaacagaaagtaacctacctcaagatcgggaatcacttttttggttaaatgtaaagtctattcctacctcggtgaaatcaaatcagaatcaattacaaataacagttaagtcaaagtttaaattgttttaccgccctgcaaatttggcagaaaagtcaagtaccgcatacaaagagctcaaattccgtacggaaaataattcattgatcgcagagaaccccaccccttacttcatttcattctcttaccttaaagtagatcaacatgaaataaaacctgcgggcatgattaaaccctttagccaactaagctggcctctgccggcaaagaacataaaacaggtaaattggaaagcaattaatgattttggtggtgctactgccgaggaaaaaacaaccatttaa

SEQ ID NO: 6707 - DNA, 2541 bp, Photorhabdus luminescens
atgggaaagtgctcacagcataagattaataagcaaccatacaatattgaacattcatggctcttattattgccatttataactgttggcgtacttttttacccggctaaaacttattctgaagattatttcaatattcatgctctggaaataggtactgattttggttcacctgaagacattgatctctctattttcacgcaagatgactatccgcccggtatttactgggtagatatttaccttaatagagataaaatagatactaggaacgtaacctttgtcacgataaataataaattgctacccaagctgacaattcagcaattacaagatatgggagtaaaaattgatagctttccagagctgatcagtttaccaccagaaacagagttgtctgatctaagtcaatatattccatcagcaagcaccaccttcaattttagtcagcaaagactggatatcagtattccacaagcaatattaaacagtcaggcaagaggttatgtttcgcctgaattatggcagcaaggattaacttcattactgattaactataattatagtggttcaaatacctggcaagataatccatctggttctacgcagacccattatctgaatcttcgaacaggtgctaattggcaagcatggcgcttacgcaattattctacctataccagtcgtgataagagttggaaaagtattaacacctatttacaacgagatattcacgcactaaaaggacaattaacgctaggtgacagctttaccccctcctatatttttgagggtgttcaattccgtggcttacagttagtttctgatgacaatatgttaccagacagcttacaaggtttcgcccctagtgtccgaggaattgctcaaagtaatgctcaagttacaatcaagcaaaatggctatatcatttatcaaacttatgtttcaccgggtccatttgtcattaatgaccttttcccaaccacaacaagtggaaatttggacgttattatcaaggaagcagatggtcaggaatatcgatctactcagtctttttcgactataccgattatgttacgggaaggaggcttgcaatattcgataacactaggccaatatcaatcatcaaataatcgtgggagagagcctaattttacccaaggcgcattagtctatggtttttctaataatatcactgcctacggtggtacgattttttcaaaagattatcaatccgttgctttaggatcaggttataattttggtatattgggttctctctcttttgatatcactcacgctaacaccgatttaccatctaatataagtaccaaagggcaatcctatcgttttcaatatgcaaaagacctctcattaacaggaactaattttactctagcaggctatcgttattcgactcacggtttttatgattttaaagaagccaatgatatagagaattccaataaaagcgactggcgttaccgcaccaataaaagaagcaaattacaactgcatattaatcaatctctgggaaattttggcagtttatatctgtccgcctttcaacaaaattattggcaacaacctggctatgaacgtaatatcaacgcaggttatagcaccaattataataatattaattacagcctgaattatacctatagccaacttccagatacgaataaaaatgagcagcttttttcattcagcatacagattccattagatcgctggctaaagaatagctggaccagttacaattttaataccaataaaaacaaagatatttcccaccaagtaggtttaagtggcacagcgctgcaagacaataatttaatttatagtttacagcagagttacaccaatcacggtactggcgctggcggtcatattcatgcggaatataaaggcgcttatggtcaacttagtactggttatagttatgatcgtcattctcaccaattgaattatggccttcaaggaggcattgttgctcacccatacggcatgacgctttcacaacatttgggagatacattggcattagtccgggctgatggcgctcaaggaataaagatccaaaataatgttggtattgctaccgattggaatggttatgcagttattccttatgtcagcagttaccggaaaaatcggattgcactggatacgcattcattagcagataatgtcgatattgacgttaatgcccaaaccgttattcctactcgtggggcattagtcctggccgattttaaaacccggataggtcacagagttctcatcaatctctattatcaagaaaatcctattccttttggtgcagttgtcacattagaaaaacaccatgacattgatgaagtaaatagcgctattgtcagtcatgaagggcaagtttaccttactggtttacccgatagtggacgattattcgttaaatggggctataaagatattcaggaatgtgtcgttaattacaacttaccggaaaaaactcctttatccggtatttatataatagcagctcactgtaaataa

SEQ ID NO: 6708 - DNA, 993 bp, Photorhabdus luminescens
atgtttaatatttacaataaatttaaatattttctcattatcaccaacttattaattggtttgatagtcagttcttatagttttgccgctaactgccagtttgagaaaggatttaaaccagaaatcactcatctctcctttggaaccttatatgtgccaagagatcaagctattggcacaaccatttacgaatatcgtgcagatgaattagataataaaaataatatcttctattgcgatacaaacattaatacatcatggggatacacatcctacaaaagtgcagaatacaacaaggatgctgtttacgagtccggcgtccccggtgttggtatcagaataaatacttggggccccggctatggtatcgactggttaccccgtattgctaataaccctgtaagctgtgacaattctggtcgttggtattgtggtaaaacatggggttatctgacaattcagctaataaaaatagcaccaacaacaggttctggttttgtcagaaacgaacaattaattcaggcacgggtaaataatcatatcgtgcatacttaccgtttgggaaatacccgaattattactaaaagctgctcactgaaaaataacaacgttactgtccctatgggcgatatcaaaaaaagcgatttttctggcattaatagtatcgcaggagggaaggattttgaggttattttagattgtgatgatgatgtccagattcaattaatgcttgacggaaagaaagcaaaaaataacttatatcatgtctgggcgcttgatcaaaatgataatcgcacaactgcttccggtgtgggtatgcaaattctttacaacaaccaacctgtcattatccattcacaaataaatattggtaatagctattcaggtgggaagttatctatccctttacacgcccgctattttcagaccgatcgcaatattacccctgggcaggcaaatgtaactgcaacaatgactttaacttatcagtaa

SEQ ID NO: 6709 - DNA, 321 bp, Photorhabdus luminescens
atgtcgcaatttgatgtttatcgtaatccttcagcaaaatctaataaattttggccttattatctggttattcagcatgattattttgaaaatttatcaacaagattaattgttccactgacttcaacaggagaaatggaactaactcgtaaacgtattacgccggtagttgatatcaatggtgataaatattatgtatttactccggctattacattccttgacgccaataaaataaagaaaaaagattttatatgtaatgttgtcatttcccgaggagaaattctctcagcaattgatgctattatcactaatgcataa

SEQ ID NO: 6710 - DNA, 249 bp, Photorhabdus luminescens
atgagatctacaattgttacgcggcctggagccaagaagggcactaacgtatacctcacaacagatctggtagacgcggcccgtagcctgaatatgaacttatcggctacgctggatgaacttttggcgcaggctgtagaagctaaaaaatgtgagcaaaaggaagatgcgcagagtatacaggtaattaataagttcttagaacgtgcagggataattactgatgatgagttttttgggagcctttga

SEQ ID NO: 6711 - DNA, 261 bp, Photorhabdus luminescens
atggaacaggttgaaggtgaagggccaattcctcgtggttattacagaatcaacggttattctaactcaataaccaaggttaccgtgatattagatcctattatgggaactaatacgtttggacgctctctttttagaatacatggtgacagacgggatggaacataccgtcaggcatcacatggctgcatcattataaacggctataatctcagaaaagagatagccaactctagcgatacaattctggtagtcgaatga

SEQ ID NO: 6712 - DNA, 744 bp, Photorhabdus luminescens
atggctaagatttacgaattctctgccaatgatatagcaactattgaaagtcataaacatttgcccaatactatgaagtatggaaacggcaatggtggtggaggtggtgatatgttggaagctcgtgtagcaaaacttgaatcagacgttgagcatatcaaagccacaatgagcgatgtgaaggctgatctgaaatcagtcatcagtgatgttggcacaatgaagaccgacgttgctgttatcatgcaaaaattagatgtaatcaataatactttgtctaagaaaccaagtgaagaacagcttaatgccagattaacaaagtcagagaatagatttgattccaaatttacagaagtagagggcaagtttgacgccagattaacaaagtcagagaatagatttgattccaaatttacagaagtagagggcaagtttgacgccagattaacaaagtcagagaatagatttgattccaaatttacagaagtagagggcaagtttgacgccagattaacaaagtcagagaatagatttgattccaaacttacagaagtagagagcaaacaaacagaatcagtgctaattgaaacattggaatcatcaagaatagataatactccgtttacgtttttaggtaatgcagttgctaatgctgttgatagcgtttctgatgaatgggcatcacttccctttgcaagtaaaggagccaccttgagccatgttatatctccacttgcaatatga

SEQ ID NO: 6713 - DNA, 453 bp, Photorhabdus luminescens
atgacgttagagaaaatatcatttgcttacccggtacatatcagacaaggaatgttaattgatgtgatgcaccctcctagtatgtggatatatgctgatagttttccatctgtagagtatcttaatgtagctttaggcgttttcttgcgtaaagatgagttgtattacactaaaattgacgtgttcgttgatgataaatcggttcttgatgatcaagataagggaaatgatacagcatacattcacttgtctggttttacgtctacagaccaatatattatggtttcatcaatgacattaaagagggttcacttgcccaatgaaggtgtttataagcttattggtgagctgtattcgggggaattaggcagcgcagatagcaaagttatataccctatggatttcgagatgcatcgcgacggcaagggagcgaatccccgggagcatagataa

SEQ ID NO: 6714 - DNA, 3744 bp, Photorhabdus luminescens
gtgaaagagtctcagaaaatcattaaccgtcaggctgcttgtccaacgatcaaatatccagaaaacttgcccgtcagccagaagaaagatgatatctacaaagctattcgtgaccatcaagttgtcattattgccggtgaaaccggttcgggtaaaacaacccagatcccgaaaatttgtcttgaactaggtcggggaataaagggccttatcggtcatactcaaccccgccgattggctgctcgcgcggttgccaatcgtctggcggaagaattggaaacctccgtgggttctgctgttggttataaagtccggtttagtgatcatgtgggtgataacacgttgattaaactgatgaccgatggtattttgctggcggaactgcaaaatgacaggctacttaaacagtatgacacgctcattattgatgaggcgcatgaacgcagtctgaatattgattttattctgggttatttgcgccaattactgccaaaacgtcccgatctgaaagtgatcattacctccgcgactatcgatcctgagcgcttttctcgccattttaatcatgcgccaattatcgaagtttctggtcgaacctatccggtagaagtgcgttatcgtcctgtcatgggggaagataatggtggagagcgggatcagcttgaggccattattgatgctgttgatgaactcaaccgtgaagggcctggggatatcctgatctttatgagtggagagagggagattcgtgatacagccgatgcgctgaataaactgaatctgcgtcataccgaagtactgccattatttgcgcgtctttctaacagtgatcagaatcggattttccagtcacatacggggcggagaattgtgctggcaactaacgtggcagaaacctcgttgacggtaccgggaattaaatatgtgattgataccgggtatgcacgtattagccgttacagttatcgcacgaaagtacagagattgccgattgaacccatatcacaggcgtcggctaatcagcgaaaggggcgttgcggacgtgtatctgacgggatctgtatccggctgtattcagaagacgatttcctttctcggccagagtttactgatccagaaatcctgcgtactaacctggcatcggtcattctgcaaatgacggcaattggtcttggggatgtcagtgcatttccatttgtgcaaccgcctgataaacgtaatattcaggatggtgttcggcttctggaggagcttggggctattgatcaaggcgcaatggctaagagtcattaccgtcttacatcaatagggcgacagcttgctcagctcccggttgatcctcggctggcgcgtatggtattggaagctcgtcaacatggttgtgtacgtgaagtgatggttatcacttctgcgctatctattcaggacccaagagagaggccactggagaaacagcaggcttctgatgagaaacaccgtcgatttgctgataaagactccgattttattgcatttctgaaattatgggattttttgaaagagcagcaaaaggcactctcctcttcgcaatttcgcaagctttgccgtcaagattatcttaactatctgagagtcagagagtggcaggatatatatacccagttacgacaagttgtgaaagaaattggtctgtcggtaaatagtcaggaggcagattaccgaggtattcatactgcgttactttctgggctgttatctcatatcggccaaaaagataccgataaacaggaatatactggtgcgcgtaatgcccgttttgctatttttcctggttctggcttattcaagaaaccacctaagtggtcaatggcagcggaattggttgaaactagtcgcttgtggggacgtattgctgcgcgaatagaacctgaatgggttgaaccgttagccgggcatctggtgaagtatcattatagcgagccgcactggcaaaaatctcagggtgcgataatggctagggaaaaagtcactttatatggtttgccaattgtggctagtcgtctggttaattacagcaaaattgatccaatgctctgccgtgagttgtttatccgccatgcgctggtggaaggcgactggcaaactcgacatgcatttttccgagcgaatctgaaattacgtgaggaaattgaggagctagaacataaatcccgtcgtcgtgacattttggtggatgatgaaaccttgtttagtttctatgatcaacggctacctcaggatgtggtttctgctcgccattttgatcgctggtggatgaagacaggtaaagagcaaccggacttgcttaattttgaaaaaaatatgttgatcaaaggcgatgccgataaaatcagtgcgctggattaccctaattactggtatcagggggcattgaaattacggcttagttaccagtttgagccgggcatgcaagctgatggtgtgacagttcatattccgctgccggtgttgaatcaggttaaggatgaagggtttgattggcagatccccggtattcgttatgatctggttgttgcgctgattaaatcattgccgaaaccggttcgtcgtaattttgtccctgcaccaaactatgctcaggcatttatggagcgggtacctcaaccgcaatcaaccttgttagatagctttgagaaagagttacggcgaatgacgggtgttacggtgtcacgtgatgattggcagttagagcaagtaccagagcacctcaaaatgacatttcgagtggtaggagagaagaatcggactatcgcggaaggtaaagatttatctgcactgaaattacgcttgaaagagaaagttcaggagacactttccgctgttgctgatgatggaattgaacagagtgggctgcacatttggagttttggtgaattaccgggacggtatgagcagaaacgtggtggttactcggtcaaagcatttccagcgctggtggatgaaaaagagagtatcggtatcaaattgtttgaaaccgaaccggagcaaaaaattgccatgtgggaaggtacccgtcgcctgttgttgctcaatattccctcaccaattaaatacttacatgagaaattgccgaataaatccaaattggggctctattttaatccttatggcaaggtattggatttgattgacgattgcatctcttgtggtgtggataaattgatgacagtgaatggtgggcccgcttggaatgagcaaggttttattcagctacaggacaaagttcgggctgagttgaacgatactgtcgtggaaatagctaagcaagtggaacagatactcaccaccatttttgctattaataaacgccttaaggggaaaattgatatttcgctggccttggcgttatcggatatcaaagagcagctttctggtctgattttcaaagggtttgttaccactaatggttggaaacgtttgccggatgtcctgcgttatctgcaaggcattgagcgccgtattgaaaaattggcgattgatccgcacagagatagagcgcaaatggggcgtgtcgaaaatgttcagcaacagtggcagcaatggctggcgaaattatcactgcaacagaaacagttacctgaggtgcaagagattcgttggatgattgaagaactgcggatcagcttgtttgctcagcaactgggcacgccatatccggtctcggataagagaattttgcaaacgatggagcaaattgcttcctga

SEQ ID NO: 6715 - DNA, 603 bp, Photorhabdus luminescens
atgagtaaagttctggttcttaaatccagcattatggcgcagcattcacatactaaccaaatggcagatttcttcattgaaaagtggcaaaccaatcatgccgatgacagcattacagtacgcgatctgactgcacaatccattcctgctctggataatgaactggttcatgcattgcgtccgagtggcaatgaaatgaccgctcgccaaaaagagacgttagcactatctgacgaactgattgcggaattgcaggataatgacgttattgttattactgcacctatgtacaacttccacattccaacccaactgaaaagctattttgatatgatagcgcgtgctggcgtgactttccgttataccgagaatggcccagaaggtctgctaaaaggcaaacaagtcatcatcctgaccagccgtggcggcatccataaagatggccccagtgatctgttagtgccttatctgcgtctgttcctaagtttcattgggctcactgatatagagtttgtatttaccgaaggtgtcgcattaggccctgatgccgcaaatcaagcgcaacaaaccgcccgtgaagttttgcaagcaatagcttcctga

SEQ ID NO: 6716 - DNA, 327 bp, Photorhabdus luminescens
atgaagagaacaggtacgggaatattgttattggctagtgtattgttcagctcttccgttgtaggaatgactctgaatgaggcaaagcagaaaggattggttggtgaaactttcagtggttatctggctatagtgaaaacagataatcaggcacaagctttggtggcagaaattaatcaagcccgtgagaaaaaatacgcagaaattgcggctggcaataatatttctacagagcaagtggctaaacttactggcgaaaaattggtgaatagagctgaacctggtgagtatgtgcgtggtattaatggtaagtggttgaagaaataa

SEQ ID NO: 6717 - DNA, 198 bp, Photorhabdus luminescens
atgacaaaacaaactggaatgaagctgttcttactatcaatggggcctttaatgctgtcaggttgtatacgccttgaagtggcaacaccggagaagcccattaatattaatatgaatgtcaaaattgagcatgaaattcagataaaagtagacaggcaagttgaagagatgctcaagaataacacgggtttattctag

SEQ ID NO: 6718 - DNA, 2628 bp, Photorhabdus luminescens
ttgataaccaaagggttaaaaatattcattaccatactgatgttatcggtattgctgatagcagtgggatggttttctattcctcattggttacctaaggtcactggtcgctggttacctccaggtatgatggtttcattgaaacaaccaaaatggaaaaatggggctttgcaattggatgatatttcattgcaggtgaaggattgcaggcttattcgtgtatcgcgattatctgttagttacccatattcagagatagataacagttatcattggcgattaaatgccgcagatattagcggggatatcaattgcctaaatcagttacctaaatcgacacaaagccatgatccactgtctgttgctgatattttagctcttattccacagggaagtttgtccgtggaaaatctttcttttcatccctggcaagattttgctggaagactagaattcaattcctcttctcaggggcaagaactcagttatcaggggaagaaggttaaattgtcagcgcatatttatggtaaggaatcgctagttattgaccaactggcaattaaattaccagaacaggaaatcagccttaatggtgaaatgacattacctcttaatgtggacaaattaccgcctcatggtgatgtaaaaggtaaaattattgccaggcaatatgcgcacccgctgaatatcaagttaggttggcgagggacatccggcaaacttattatcggcgaagaggggacaacagtacctttggccgaattgccttggcagtttaaccaagaccagtttgatattactgatggtaaatggcagtggacgagtgcggaacaacctcttgcgggaggagtgaatattaagattgctcattggcaacaagggttggataacctgctaatgagtggtcgtataaatttggtcactcagggtaaacgtggtaaagcgaatattgtgttaacgataaaaccgggccggataaattcattaaatacgcaacttcctttgcaattaacgggtcagattaatgtgcaggatatgatgatggctatgtcattgcctgcgataattgatggtccgctggttaatccgaaaatgactttccagtcaggttcgttgtttcgggtttgggggcgattgtctgatgagtttatggttaaagatgcccgatcaccgttagcgggaacttatctgacacgtgaaggttttacgggtcggttacaggcgattgttaatgcgcaacaccgtgactggggaaaattccgtttgcatctagatggtcatgccgaggattttatgccggataaaggctattggcgttggaactattggggagatggctatttgccgccactacaggctaaatgggatatcgttggaaaagggcgttggcatgacacattgattaacgtcaacgaaatgactaccggttttaatgtgattaagcacggtatgattcgggtggatacgccgcgtctacaattaacaaaaccattggaatggcaacgttcagagaaattgcccgcctttaagggtgagttacggctgacagcgaagaaaacatcatttcggtccggtggctttttgccccctgctgagctgacagcaaaattgacaggagaaagcccgaataactttattgttaatggtgatctttcatcaagaaatattggtccgatccctttttacagtcgttgggatggagcaagattgcgtggtgaagcgcgttggcctactcaatccttacttgcatttcagccgttggtacctaaagatttaggcataaacttacgatcaggtgatctttatgcgcaggccgctttttctgccacacgagggcaaggttttgttgcggggggacactgggtagtaaaaaatggcagcatgtggcttaaagagggtgaaatcagtggacttgattttgtcttaccgtggcggctgaaagagagtatctggcaatttggtgttaaatcgccggttcaactacgagtgaaaacgattaataacctgtttgaaatgcgtaacttgacggcggacttacagggattttatccaccatcggaacaaaaaccgctggaattgactaatgtgaatgtaggtatattggatggacagattaacttagataaattaaggcttcctcagcatcatcctgctattttggcgcttgataaattggagttaagtcgccttcttactgtgttgaaagtcaaacaatttgcgatatccggcaaaatcagcggaaaattgccgttgtttattaataatgaacgttggatagttcagcaaggtcagattaccaatatcgaccatatgaccttacgtctggataaagacacggtagattccattaacaaagataatatttccgctggtgccgctatggattggttacgctatttagaaatcagtcgtttacgggcgcagctcagtcttgataatttagggattctggcacttagcgctgaaattcaaggtgttaattcattaagagataaaaaacggcaagtcaagctgaattaccatcatgaagagaatatctttcacttatggcgcagcttacggtttggcaacaatcttgaagattggttacagcaaaatatctctgtattaaatgggagtgataaatga

SEQ ID NO: 6719 - DNA, 1005 bp, Photorhabdus luminescens
atgaaattagtcgtttacagtaccaaacagtatgaccataaacatctggagcaggtcaataaaaagctcggatttggttatgatttcgagtttttcgatttccctctcagttcaaaaacggccaaaaacgctattggtgcagacgctgtttgtattttcgtcaacgataatgctgaccgtaaagtgcttgaagaattagctgaaatgaatataaaaatcctcgcattacgttgcgcaggttttaataatgtcgatctagatgcagctgaagaattgggtattcaggttgtacgggttccagcctattcccctgaagctgttgctgaacataccgtcggattaatgttgtgcttaaaccgccgtatccaccgagcttatcaacgtacccgtgacgccaatttctctcttgaaggcttaattggcttcaatatgcacagccgtacagcgggaattatcggaaccggcaagattggtattgcaactctacgtattcttaacggatttggtatgcgtctgctagctcatgatccctaccccaatcaagctgttttgaatctcggtgctcaatatgtcgatctggatacgctgtatgcacaatccgacgtcatatctcttcattgcccgttaacaccagaaaatcatcatctgctgaatgaagttgctttcagtaaaatgaaaaacggcgtaatgatcatcaataccagccgaggggctctaattgattccgtcgcagccattaacgcattaaaacaacaaaaaattggcgctctgggtatggatgtttacgagaatgaacgcgatctcttctttgaagataaatctaatgacgtaattcaagatgatatttttcgtcgcttgtcttcgtgtcataacgtgctgtttaccggtcatcaggcatttctgacagaagaagccttaaccagtatcagtgaaactacgctgagaaatatccagcaattaatcaacggaaaaaattgcccaaatattgttagtaagtacccttaa

SEQ ID NO: 6720 - DNA, 414 bp, Photorhabdus luminescens
atgaaaaaaatactacctttggcaacagcaactttattgttagccacattccaagcgtctgcggtagaaaacgtgtcagttgatgatttacaacgtcacaaatttgttctagtgagcgttaatggcgaaggcgtgaaaaatcaagatggtcgcgtaccaaccattgaattcggggaaaaaatgcatgtttctggttccatgtgtaatctcttcatgggtcaaggtaaactgaaaaatggtgtactgaccgttaaaaacctggccagcactcagatgctttgctctgatgaaaaattgaatagatgggattacctgattggtcaagtattagccgatggcgttaaggtgaagttgaaagatcaaaaactgacactatctcaccccgacaatacattggtttataaagttaagtaa

SEQ ID NO: 6721 - DNA, 621 bp, Photorhabdus luminescens
atgtccaatattgcactgactgatattcaatttatcaacctcatgaacgaaatgcgccaacacgcaagacatatgttaagtggttctaaaactgaaccatttatgccatcaacacctgaactccaggcatatgcaaatatgcttggggaacaatacgaaagtatagatgttactgaaaacaaggaagtagatggtattattaatcaattgaaagattctgtgaaatctggtgctaattcaacagtaaacgtctctaagacaagtgtaactaatagcacacagaaatatcaggaagcgattgccactgatccagacaatgcagaccaagactggatcgataacatgaataaatctcgtcaaagaaccaaagatgagaacaacagacaaattgatacaagttacgataaagccattcaattcggattacaatttcctaatgccagagcagcaatacaaagttttatggaaaaaactaatgcattcttctccagtttatttggcagactttcaaattttatacttgatgccgccaggcaactctctgaatggataagcagagcatgggaatcaattaaatcgttctatgataaaattaatgtttggatttccggcgctttgtaa

SEQ ID NO: 6722 - DNA, 642 bp, Photorhabdus luminescens
atgccaatacatgtgggaaacatagaaaagattaccaatgatttcatccaattgagtgagttagagttcaatcgtgttctgtatgatgctcttgattcctctggtactaatattgtgcatgatgtggatgaactcatttttccacctggttaccggttgatcagggttgataacaggttagatttggatgatatagatgagccctactttgaattagcgctacttagtgacgaaacaaaagaagtcgtttattacaacaaagttattatattaagtgatttggtgcttaactgtcgtctcgcttcgcagatacttgtgtggcgaacgaggaagccacaacataaagcggcattaagtgatttggccgctaaaatctttttccactatctgattaaagcctatgatgttgttgcttcaaatatgagtcaaataatagaaggcacctctttttggcaagccagaatgtatgaggcgttacagtttgggctttatgtttatggctatgatgttatgacctgtgaattaagaaatattttagctgaagatgatgttagtaaagagcagagttggttgtggggtcatgcggaatattatatggatagactggcaattatttccaggatcaaactgcctaataagtaa

SEQ ID NO: 6723 - DNA, 432 bp, Photorhabdus luminescens
atgtctcagcctttctggcaggtaaaaaccctagatcagatgacggatgaagaatgggagtcattatgtgatggttgtgggcagtgttgtttacataaattgatggatgatgataccgatgaaatttattttactaatgttgcttgcaatcaactcaatataaaaacgtgccaatgtaaaaattacgaagatcgtttcagatatgaaccggattgtatcaaattaacccgttataatttgccgacttttgcatggttaccaataacttgtgcatatcgtttgctagaagaagggaagccattattaccgtggcatcctctgattaaaggttctaaatcagcaatgcatagcgaaagaatttcggttaggcacatcgctgtacgggaaattgatgttgtagaatgggaagatcatattattaataaaccttga

SEQ ID NO: 6724 - DNA, 657 bp, Photorhabdus luminescens
atgtatcaacacagagactggcagggggcattactggatcttcctgtcaataaagtggtttgcgttggtagtaattacgctaaacatattaaagagatggggtctaagccagcggaagagccagtcgtttttattaagccggaaactgcactgtgtgatatacatcagccaattgccattccaaaggattttggtgttgttcatcatgaagttgaactggctgtactgattggtacgccgttgaaacaagcaaatgaagagcgagttggtgccgctatcgcgggtttggctgttgcattggatctcaccttgcgtgatttgcaatctaaattcaagcaagcgggtcaaccgtgggaaaaaagtaaggcgtttgatggctcttgcccgatatctgggtttattcgaataagccactttggtgatccacagaatgtccagttttcactgacggtcaataatgagctacggcagaacggtaatagtaacgatatgttgacacccatcgttcccctgatcagccatatgtcgcacttttttactttgcggccgggagatgtgattctcactggtacaccggaaggtgttggcgcactgaaacctggtgatgtgttaaaggttactctgaatgataattcactcactaccagagtgatttga

SEQ ID NO: 6725 - DNA, 105 bp, Photorhabdus luminescens
gtgaatattgtggtggttaataaaaccgcgccgacggttaattttgctcatcaaacctctggattcttcttatttttccatctggctcagatgtgcattcattaa

SEQ ID NO: 6726 - DNA, 297 bp, Photorhabdus luminescens
ctgaatttaaaagagtttattataatgatttgtgcgatctacagcagtccgaaaagggagcaaacatatctttatgttgaaaaaagagataatttctctcgtgttcccgaagagttactgaaaagttttggacagccccaatatacaatgatgatctctctggcagacagaaaaaagctagcaggcgctgacatcgaaaaggtaaaaatatcgttaattgaacagggtttttacctgcaaatcccccctccggttgaaaacttaatgaatgcacatctgagccagatggaaaaataa

SEQ ID NO: 6727 - DNA, 684 bp, Photorhabdus luminescens
atgtcacagtcgccaattgagctaaaaggcagtaattttacgctttcggttgttcatttacacaatgaccaaccagaaatcattctacaggccctacaggaaaaagtggaacaagcaccggatttcctgaaaaatgcaccggttgtcattaatatctccgctctgccggcagacgctgatctgaaagcactgcatcacgctattgattcagcaggattccgtattgtcggaatgagtggttgtcgtgatgagcaacaacgcagggcggtaataaaagcctccttaccactactgagtgaaggaaaaaaacaaaaaacctcggcaaaggaagataaaccggccgaacccgcgattaaaaaaacccgtgtaattaatttacctgttcgctcaggtcaaaggatttatgcccaaggcagtgatcttattgttaccagtaatgtaagcgccggtgccgaattgattgcagacggcaatattcacatctacggtatgatgcgtggtcgggcattagccggtgcatccggtgatcaggagtgtctggttttttgcacccacttaaatgctgaacttatctctatcgcagggcaatattggctcggcgataaaatcccgactgaattagcaggaaaagccgcaaaacttagcctggtaaataatgaattaactattgaacctttaatctag

SEQ ID NO: 6728 - DNA, 813 bp, Photorhabdus luminescens
atggcacgcattattgttgttacatcaggtaaaggtggcgttggcaaaaccacttcaagcgcggccattgctaccggccttgctcaaagaggtaaaaagaccgtcgttatcgattttgatatcggcctgcgtaacctcgatctgattatgggatgtgaacgccgcgtagtttatgacttcgtgaacgttatccaaggtgacgtctcgcttaatcaggcattaattaaagataaacgtaccgagaatctttatatcttgcctgcatcacaaacccgcgataaagacgctctcacctctgaaggcgttgagaaggttttagttgatctggataaacaaggtttcgattttattatctgcgactccccggctgggattgaaagtggcgcgttgatagcactctattttgctgacgaagcgatcatcacaaccaatcctgaagtctcttctgtacgtgattcagaccgtattctgggtattctagcttctaaatctcgacgagctgaacggggtgaagatccgattaaagaacatctgctattaacccgctataacccaggtcgtgtaagtcgtggtgatatgctcagtatggaagacgttctggaaattttatgcattcctttaatcggtgttatcccggaagatcaatctgtactgcgttcatctaaccaaggagaaccagttattctggatacagaatccgatgcaggaaaagcgtatacagatactgttgaacgtttattaggggaagaacgtcctttccgcttcattgaagaagagaaaaaaggcttcttaaaacgcctgtttggggggtaa

SEQ ID NO: 6729 - DNA, 270 bp, Photorhabdus luminescens
atggccttgctagatttctttctgtcgagaaaaaaaacgacagcaaatatcgctaaagagcggctgcaaatcatcgtggcagagcgtcgccgtggtgactctgaacctgcttatctgcctgatatgaaacgggatatcttggcggtaatctgtaaatatatacaggtcgatcctgatatgctctctgtacaatttgaacagaaaggtgatgatatttccgtgctggaactcaatataacattacctgaggcagaagaaactcaaaaataa

SEQ ID NO: 6730 - DNA, 1128 bp, Photorhabdus luminescens
ttgaattatcagttgatcaccacagatgctcagttgcaacaagtttgcgaaggggcaaaaaaatactcaaaagtagcattggatactgaatttgtacgcacacggacgtattacccgcaattaggtttgatacaactgtatgatggcgaacaactttctctgattgatccacttaatatcaccaactggcaacctttccgtgagttaattactcatcctcaaatattgaagctgttacatgctggcagtgaagatttggaagtttttctgaatgcttttcaatgcttgccagaaccgatgattgatactcaggtcctggcggcttttattgggcacccgctttcatgtggctttgccgcgctggtggctgaatatattcatgtcgagctggataaaagcgaatctcgcactgattggcttgctcgcccgttaagcgaaaaacagtgtgaatatgcagccgcagatgtttattatctgttgcctttggcggatatcttgatgactgcaaccgcgcaggccggatatatggaggctgcgacgggtgagtgtcggcttatcagtcgacgccgtaaagagatattggaaccggaatctgcttataaacagataggcaatatttgtcaattacgtccccaacagcttgcgtgtttgaaaaaactggctgcatggcgtttgagtcaggccagagaacgcgatttagccgtaaacttcgtcattcgtgaagaaaacttgtggcaggtagcgcgttatatgccaacttctctggcagagttggatgcgttagggttaagcgggcaggagattcgttgtcatggtcgccgtctattggcaatggttgctgaaagtggaaatattccagaaagtgaatgcccgccgccaatgacgaacttgattgatcaaccgggttatcgcaaagcatttaaggatattaaggcgctgatccatcaagtcagtgaacagcatagatttaattctgaattattggcatctcgtcgtcagattaatcaattacttagtgttcactggaacttgaaacaattaaatgacaaacctgaactgcttagtggatggcggggagaattgctggctgagccagttgcagagattctggcgaactatcctgattaa

SEQ ID NO: 6731 - DNA, 1683 bp, Photorhabdus luminescens
ttggagaaagtctggctaaaacattatccggcggatgttcctgcggagattgacccggatcgttatgcatcattggttgagatgtttgaaaatgccgtagcgcactatgcagatcaacctgcatttatcaatatgggtgagattatgaccttccgtaagttggaagagcgtagtcgggcgtttgcagcatatttgcaaaatggtttgggattaagtaaaggagatcgcgttgcgctgatgatgccaaacctgctgcaatatcccgttgcactgtttggtgttctacgtgcaggtatgattgtcgtaaatgtaaatccgctatatacgccacgggagcttgaacatcagcttaatgacagcggcacttccgctattgtgatcgtctccaattttgcccatacattggaaaagatcgtttttaatactaaagttaagcatgttattttgacgcgtatgggtgaccaactatctcgtcctaaaggtacgctggttgattttgcggtgaaatatatcaaacggctggtaccgaagtataatctgcctgatgctatttcatttcgttgtgcgatacagaaaggttatcgcatgcaatatgtaaaaccagagattaacggtaatgatttggcttttctgcaatatactggtggcaccactggcgtagctaagggcgctatgctgactcaccgtaatattttggcaaatcttgaacaggcaaaagcggtttattctccattattacgtgtaggccaagagctgattgttacggcgttgcctctctatcacatatttgcgttaatggtgaattgcttgttacttatttacttgggtgggtgcaatcttctgattactaacccgcgtgatattacgggtacagctaaagaattaggtcgttatccgtttacttctgtcaccggggtaaatacattgtttaacgcctggttgaataatgaagaatttaagaagcttgatttttctacgctgcgtctggttgttggtggtggtatgccggtacagaaagcggttgctgagaaatgggcaaaagtgacaggcaccaatttgcttgaaggttatggtctgacagaatgttcacctttggtttcctgtaatccttataattcgaaacattacactggcagtattggtttcccggtctcttcaacagaaatcaaacttgtggatgatgatggtaatgaggtagagatgggccagcagggagaattgtggatacggggcccacaggtgatggccggttattggaatcgtcctgatgcaacagaagaagtgttgaaagatggttgggtagcaacgggtgatattgcgaatgttaatgaacagggttccattcatatcgtagatcgtaaaaaagatatgattttggtttctggtttcaatgtgtatcctaatgaagttgaagatgttgtatcagctcaccctaaagtgctagagtcagcagcaataggggtatcaagcgaaagttccggtgaaactgtcaaagtatttgtggttcggatagatcctggtttgaccgaggatgaacttaaaacccattgtcgtcgttatctaacagggtataaagtaccaaagatcattgagttccgggatgaattacctaagtctaatgtaggtaaaattcttcgtagggaactgcgtgatgaagaggaaaaggtcaggaatgtagcatag

SEQ ID NO: 6732 - DNA, 126 bp, Photorhabdus luminescens
ctggttggatttgcgctaatccgccgcttaaatcaattgatgctgctagctgagattgatgtgttgccgaaatatcatggccaaggtattgccagtaccctgcttagcgtaatcattgagcaatga

SEQ ID NO: 6733 - DNA, 120 bp, Photorhabdus luminescens
ctgcaatcgcatgatattcctaatgaactacagaaaattctagtagaagtgatgactgcgggtttcggtgcaagaattgcgatgaaattaacgatcaatccaaagatagagaggaaataa

SEQ ID NO: 6734 - DNA, 579 bp, Photorhabdus luminescens
atgttaagagtaataaactaccggacgagtgttaaggcgctaatcttgttaggtgttgtaatgcttacaggctgtatcaccgttcctgattcagtaaaaggaacgtcaccaacgcctgttcaagatctgctttctgttaagagtacgcctgagttgtttatcggtcaggaagggcgattcggcggcaaggtacttggtgtagtgaatgaaaatcatcgtactcgtctggaaatatcgtcattgccattagcatcggatgccagcccagaattagatgagccttcccttggccgtatctatgtttatgttaatgatttccttgatcctgccgattttaaaggaaattacgtcactgtcgtaggtccgatagtgggattgaaaaaggggaaaattggttgtgcggattacgattatgttgtgattaatgtaatgggttatcaacgctggaaagttgttcagagagtattgatgccttatggcccggggccttggaattattatggctatccatattattcaggttggggatggaattggtattccgaccccacacctgttgagactattttgaccagatag

SEQ ID NO: 6735 - DNA, 696 bp, Photorhabdus luminescens
atgcctgtacgaattctggctattgatactgcaacggaagcctgttctgttgctctttggaatgatggtgccgttttggcacagtttgaaatttctccacgtgaacacacgcaacgcattttacctatggttcaatctgttctggcagaagccgggatgagtttacagcagcttgatgctttggcttttggccgtgggccgggtagttttaccggtgtgcgtattggtgttggtattgctcagggcttgtctctgggggctgaactgccagtgattggtgtgtcaacgctcaatgcaatggctcaaggtgtttttcgtctgctaggtgcaactcaggtattaaccgccattgatgcccggatgggagaggtttactgggggcaatatatccgtaatcagcaaggtgaatggcaaggacgtgaaacagaagccgtgctgaagccggaacaggtacaggcattcatggcttcattgagtggcgattgggtggttgcgggtactggctggcaggcttatcctcagttgatggcaagtcatttaacgctaactgatagtagtatcacattacctcatgctgaagatatgttacctctggcaatacagatgtggcaaaacggtgaggtgacggctgtagaacatgctgaaccggtatacttgcgtaatgaagttacttggaaaaaattaccaggccgttaa

SEQ ID NO: 6736 - DNA, 318 bp, Photorhabdus luminescens
atggttaaaaagtatcgtagtgatgcgtttgctgcaattcacgaaacgatggaggcattaagcgaaataggggctgtcagtaagcaaactatgcgtgagtttgatgctgcctgtttgactcccatagaatcactatctccagaggaaatacgttctcttcgtgagcgggagcatttgtcacagcctgtttttgcccgatatttgaatgtgagcaaaaatcttatatcagactgggagcgtggagcaaaaaaacccggaggcccagccttgaggttgcttacgatagttaagaagaacggaattcaggctattgcatga

SEQ ID NO: 6737 - DNA, 375 bp, Photorhabdus luminescens
ttgaaagtatttaaaaatgcatggttcgagcgttttgccagaaaacagcgtattccagatgaggttttacttgatgctattgaaagagccaatagaggtcagattgatgctgatttgggcggtggtgtaattaagcagcgggtggcacgtaaagggcaaggaaagtctggtgggtttcgcacagtgattttgtaccagaccgcagagcatgctttttttgtttacgggtttgctaaaagtgatagatctaatattgaatatgatgaagagatgcagtttaagaagatggcgtcccacgttttagggttatcagatgaacaattagctagactaattgaaaaaggtcatttttcggaggtgattaaatatggttaa

SEQ ID NO: 6738 - DNA, 1923 bp, Photorhabdus luminescens
gtgtcagacgattttgcgaaaaatggtgcccttgctaaagcaataaccggttttaaaccccgtgatgctcaaagagaaatggcagtggctattgagtgtgcgattaaaaatcatcaacaattggttgtagaagcaggcacgggaacaggtaagacatttgcctatttagcacccgcgttgcgttctgggcagaaagttatcatttccacaggttctaaggcattacaggatcagctctataatcgtgatttaccgacagtcgctgaagcgattaatttcaccggcaaattggcgttgttgaaaggccgtgcaaattatctgtgcttggaacggttggaacagcactcttttgggggcggacaattggaagcagaaattctgtcagatattgttcggctaagaggctggtcttcacaaactgaagagggtgatatcagtacttgtcaccaagtggcggaagatagccaggtttggccgttggtaaccagtacgaacgataactgtctaggcagtgattgtccgcgttatcaggaatgctttgttctcaaagctcgccgtcgggcaatggaggcggatgttattgttgttaaccatcatctgtttatggcggatatggtagtgaaagaaacgggatttggtgagttgatcccgcaagcagaagtcaaaatatttgatgaggcacatcaaatccctgatattgccagtcaatattttggtcagcaattaagtagccgtcaactgatggatctctccagagacatcactatggcgtatcgcacggaagtccgggatcaagttcaattacaaaagagcgcagatcgtctgagtcagagtacacaagatttccggctagcgttgggagagaacggttatcggggtaatttgcgggagttattgcaaaatccgcaagtgcagcgggcattggtattgcttgatgatgcgcttgagctttgttatgacgtgatgaaattatctttagggcgttcagtcatgttggatgcggcatttgaaagggcaacaatttatcgtaatcgtcttaaacgcttgaaagaggtgactatccccggttatagctattggtttgaaagttatggtcgccattttcttttagcactcacaccgctgtctgttgccgataaatttagtgagataattaatgagcaatccggttgttgggtgttcacctcagcgacactctctgttaacgagcaactttcccatttcactgaacggctaggtttaaaacaggcgaaaatgttgctactaccaagtccatttgattatcaaagtcagacactactttgcgttccccgtcatctaccatcaccaaatcaacctggtagtgcaaaatggttggcagagatgctcaagccactcattgaagccaataaaggtcgatgtttctttttatgtacctcacaccagatgatgcgcagtctggctgaggcattccgtgccaacatgacattgccggttttggttcagggggaaactagcaagggtcagctactttcgcaatttattgctgccggcaacgctttattggtggcaaccagcagtttttgggaaggtgttgatgtgcgcggtgaggcgctttcctgtgtcattatcgataaattgccctttacggcaccggatgatccgctgttaaaagcccgtattgaagattgccaacttagaggtggtgatgcatttaatgaagttcagttaccagatgcggtgattagcctgaaacaaggtgtcgggcggcttattcgtgatattgatgattatggcgtcgttgttatttgtgataatcgtttagtgatgcgtccatatggtgaagtgtttttgaatagtttgccgccttcaccacgaacccgagatttaacgaaagcggtcgctttcctgcaagcccggcaatctcctaacattaaagattaa

SEQ ID NO: 6739 - DNA, 345 bp, Photorhabdus luminescens
atgacaattgaacgtattgatcctcaagatcgctggtccgaagcggtagtttacaataaaaccatttactacaccgccgtaccggaaaacctggatggtgatattactgagcaaacagcgaatacactggccgctattgatattatgttacagcgtctcggttctgataaaagcaaaattatcgacgccactcttttcctggctgatggaaaagagtttgctggcatgaatgccgcctgggatgcatgggttattgcaggaagcgcaccagtacgctgcaccgttgaagctaaactaatgaaccccaaatataaagtcgaaataaaagttatcgcaggtatttaa

SEQ ID NO: 6740 - DNA, 333 bp, Photorhabdus luminescens
atgttaaaacatagagcctattcaaaattctctcaagaggcagttatgttactcggagaacaaatcaagttaggtagaaaacaacgccattggtcagaaaagaatttggcagaacgtgctggtatatccagaaccacactacaaaaaattgaaaacggggatatgggttgttccataggattagcatttgagctggccaaccttgtaggtatcagcttgtttgacagtgataaatttcctatctcagcacgtatagaacaaacaagagataaattagctttattaccacagcgtattcaggaagaaaagagagaggtatacgatgatttctaa

SEQ ID NO: 6741 - DNA, 462 bp, Photorhabdus luminescens
ttgatggctagatatgctagttatgaaaaatttgccgagattatacgatatcgtttcactaatcctcagaaaacattagaagaattattttcacgattagtttttaatatactgtgcggtaatacagatgatcacgctcgaaatcatgctgcattttgggatggaaaaaatttaagtttaactccggcttatgatatatgccctcaaggtagatcgggtaatgaagcatctcaagcaatgttaatagtcgaaaataaaaacctcagccaattacaaacctgtttagaaactgcacataactttaatatctcagagaaaaaagcaaaagaaatctttaatagacaaatattaatcatccaagataattggaataatatctgtgaagaagctgagttaagtgaaatagataaaaaattgttctggcatagacaatttttaaatccattctccataattttttga

SEQ ID NO: 6742 - DNA, 237 bp, Photorhabdus luminescens
atggatgtttgttcaggttgtcatgattcccttcatgattccgttgttgcggaagtagaaggcaagatctataaaagttgcccatgttgttccgccgcaatgggtcaacatgttttttatcgctatgaagactttggtatgagggatatgggtgatggccgctatattgttcagtcttggtgtcctggttgtcgagtaaaagatggccataaaccagacgtctgttttacctgctaa

SEQ ID NO: 6743 - DNA, 330 bp, Photorhabdus luminescens
ttgcaacaatttgaatggtggcatgcggcgtttttattccttgctgtcgtattggatattttagcgaatattttactgaaactttctaatggttttagacgtccttggatggggattctctcgcttattgccgtccttggggcgttcagtgcgcttgctcaggcagtgaagggaattgagttgtccattgcttatgccttatggggcgctttcggtattatcgcgacggttgctgctggctggattatgtttaatcagcgtttgaattataaaggttggggtggaattgccttgttgctgttgggcatggtgatgatcaagatggcttaa

SEQ ID NO: 6744 - DNA, 417 bp, Photorhabdus luminescens
atgatttattggttattccttgcaatggcaattattaccgaagttatcggtaccttatcgatgaaacatgccagcgtttccggtggtgtagttggcatggccgttatgtacatcatgatcgccacatcctatatcttgctggcaatggcggtgaaaaaagtggcattgggcgttgcgtacgctttatgggaaggggttggcattctatttattactgtttttagtgtcatgtggtttgatgaatcattgtcattgatgaaagtagggggattggctctgctgataacagggattatgttgattaaatccggtacgagaaaagccgcagtcaaaaaatcggcagaggtagtgaagcagatggcaaataaggctgtcagtgttgcaacaaccaaaagcagtaaaataaaggaggcgtaa

SEQ ID NO: 6745 - DNA, 1476 bp, Photorhabdus luminescens
atggcggttacttctacagctcaggcttgtgatttagtcatttttggcgctaaaggggatttggcacgccggaaattattgccttccctttatcagcttgagaaagcgggttatatccacccagaaacccggattatcggtgttggccgggctgattgggataaaaaagcttataccaaggttgttgaagaagctttaaatacattcttgccagaaaaattagattcagaattatggaagatattgagtgagcgtttggcgttctgcaatctggatgttaatcaaaaagaagactttgccaaattgaaggcaattcttaagcaggataatcggcctgcaatccattattttgcgatgccacccagtacttttggttcggtttgtcacggattgggccttgcagggctaaataaagagccaaatcgagttgtgatggaaaagcctttagggaccgatcttgaatcatccaaagccatcaatgatgaagtagctaaatatttcaatgagcgtcaggtttatcgcatcgatcattatctgggtaaagaaaccgtattgaatctgttggcgctgcggtttgccaattccttgtttgtgaataattgggataaccggacaattgatcatgtacaaattacagtagctgaagaagtcggtattgaaggccgttggggttattttgaccaagctgggcagatgcgcgatatgattcagaatcacctgttgcaaatattgaccatgattgctatgtctcctccggcagatctgacgacagaccgtatccgtgatgaaaaagtaaaagtattgcgttctctgcgctgtattgatcatacgaatgtgcgggagaagacggtacgaggtcaatacactgctggttttgttcaggggcataaggtaccggggtatctggaagaagagggggcaaaccagtccagccggacggaaacttttgtctctatccgtgtcgatattgatgactggcgttgggccggggttcctttctacctgagaaccggtaaacgtctgccaacgaaatgttccgaggtggtagtttatttcaaaaagcctgcactgaacttgttttctgagtcttatcaacaactaccgcagaataagctaacgattcgtttgcagccggatgaaggtattgatattgaagtgctgaacaaagctccggggctggaacacaagcatcgtctgcaaaccactaagctagatctgagtttctctgaaacgtttaaccatattccgttggcggatgcttatgagaggttactgctggaggctatgcggggtattcaggcgctatttgttcgtcgtgatgaagtggaagaagcgtggaaatgggttgattctattatgaatgcatgggcggcggataatgatgcgcctaagccttatcaggcggggacgtgggggccggtcgcttctgttgcgatgatcactcgcgatggtcgttcgtggaatgagtttgagtaa

SEQ ID NO: 6746 - DNA, 861 bp, Photorhabdus luminescens
atgaatacactggaacgggtccaaaacagtatcgaatttttgagtaagtcagaaaaaaaagtggcgcagacaatcctggcttcaccgcaaactgcaattcataccagtatcgcaacactggcaaaaatggcggaagtcagtgaacccacggttaaccgtttttgccgccgtctggatactaaaggttttcccgatttcaaactccatctagcccaaagtcttgccaatggcacgccttatgtaaatcgcaatgttgaagagagcgatacagtgagtgcctacaccaataagatatttgaatcggtaatggcaactctggataccgtcaaaaacaatttggatattacagccattaaccgagctgttgatttactgactcaagcccggaaaatctcatttttcggcttaggggcttctgcggccgtcgcacacgacgcaatgaataaatttttccgcttcaacatccctgttatctattttgatgacattgtgatgcaacggatgagctgtattaacagtgccgaaggtgatgtcgtcgtactcatatcccataccggcaggactaaaagcctggtcgaagcagcacaacttgcgcgagaaaatgatgcgacagttatcgcaattacctcccaagattctcccctcgcccacgaagcaacactcgccattcttctggacgtcccggaagatacagatatttatatgccaatggtctcaagaatcgctcaattaactgttattgatgttttagctacgggttttaccctgcgccgtggttcaaaattcagagataacttgaaaagagtcaaagaagcgctacgaaattcacgctttgataaaattgactttcccccgacctga

SEQ ID NO: 6747 - DNA, 903 bp, Photorhabdus luminescens
atgaatctcaagaatgattttaaagctttttctattggtaataatgctaatatagtcagtcaagaagcctatgaagaaagccgaagtttgaaaactgggttccccccaagcgatatcactattcatgtgctaaacaaagtattacgtcagtcatcaaccatctcctctgtcatcgctaattttatcacgacccaatctggtagtgatattttggatgatggtgatatcgctaaacttattactcaattaaatagcgcgttagaacaaaaaattacaacaactgtgccaaacgcctcattaacacaacaaggcattattcaactcacagataaaacaggcaatagtaatacccttgcggcaacacagaagcttgtttctgatataaacgataacgctaataatcggctagcaaaagaccaaaacggtgcagacattcctgataaaaatgcttttgtgagaaatctcagtttgttcgaaaaattgatcccggtaggggtaccacttccctggccgactaccaccccaccagaaggatgggcgcaatgtaacggcgctccctttgataaaacaaaatatccgaaattagcgcaagcctatcctaatggagcattacccgatttacgtggtgaatttattcgtggtttagataatggtcgtggtattgataacggccgtaatatattgagttttcaatatgatgcgttcaaaagacataatcatagtatttataccactgacagcccaagctccacccgtgcaaatacagatcccgtgcggggtagtctgcatggcagtataagcgatcggggtgactcaggggaaaataaaaccattgggatgaatggtgataatgaaacacgtccaagaaatgtggcatttaattacattataaggaccgcctaa

SEQ ID NO: 6748 - DNA, 1014 bp, Photorhabdus luminescens
atgagtaaaaaaaatgattttaaagccttttccattagtagtaatgctaatgtaattagccaagaaagatatgaacaagatcagggtttgatgactgggtttccaccaaaaaatattactactcatttgctaaataaggtattacgtcagtcatcaaccatatcctctgttatcgctgattttatcgcgacccaatctggtaatgatgttttagatgatggagatatagctaaactcattacccaattaaatagagcattagaacaaaaaatcacaacaaaagtaccaagcgcctcactgacacaacaaggtgttattcaactcacagaccaaacaggcgaaagtaatgcccttgcggcaacgcagaagcttgtttctgatgtcaatcagaatgcaaataaccgtctggaaaaaaaccaaaacggcgcagacattcctgataaaaatacgtttttgaagaatcttggcttaatagaaaccattattaatacccaatatcctgtaggaattgtgatttggttcgctcaaaataaaaaccccaatgtgctatttccgggtactacatgggaatatattggtgaaaataaaaccattcgattagctagcgccaatggctccgatattttatcaaccggtggcaatgatttgataagcctgacagcagcacaaatgccagcacataatcatacattttttgggacaacgagcacatttgattatggcaccaaaaccaccaatatcgccggagagcattatcatgatagtgggtggggtgaaactactggtgggcgttatggtcatttcgacggttctaagaacaatcagggatcaaaatctacagattggaacaatgccaaatttaacactagcactaatggtgcccactctcatacggtatcaataggagcacataaccatacaatttcaggtaacaccggagattctggtggcaatgcagcgatttcaattaccaattcatatattaagttaatgggatggtatcgaaaagcataa

SEQ ID NO: 6749 - DNA, 201 bp, Photorhabdus luminescens
ctgtctcttgatcataagtctgacttaagagacagtgccaactcgtcctcctcaaagaaaacttatcatttgcatactttacagcatacccaccctggacgtttcgtgctttccagccctcaagtgttgctgaatcccagtaaatttcagaaagcttgtatcagactcacacggcaagacggggagcagtcacattattga

SEQ ID NO: 6750 - DNA, 1443 bp, Photorhabdus luminescens
atgtccagacggctcagaagaactaagattgttactacacttggtccggctaccgaccgcgataataatcttgaaaagattattgctgcgggtgcaaacgtagtccgccttaacttttcccacggtaccgccgaagatcatctccagcgagccagcaaagtccgcgagattgcagcccgcctggggtgccatgtcgctattcttggcgatcttcaaggacctaaaatccgcgtatcaacgtttaaagagggcaaaattttcctgaatatcggagataaatttctccttgatgccaatcttggtaaaggcgaaggcgataaggagaaagtcggtatcgattacaaaggactacccacggatgttgtaccgggcgatattttgttgctggatgacggacgtgttcaactcaaagtattagacgttcagggaatgaaagtcttcacggaagtcactgtaggcggcccgctatctaacaataaaggcattaacaaactgggtggtggattatccgcagaagccctaactgaaaaagataaagaagatattattacggcggccagaatcggcgttgattaccttgccgtctctttccctcgcaccggtgaagatcttaactatgcccgccgtctggcacgagacgcaggctgtgaaacgcagatcgtggcaaaagttgaacgcgcagaagccgttagcagtgataaaaccatcgatgaaatcattctggcttctgatgtggtcatggttgcccgtggtgaccttggcgtagaaatcggcgatccagagttagttggcgttcagaaaaaattaattcgccgtgcccgccagctaaatcgtgtagttattaccgcgacccagatgatggaatctatgatcaccaatccaatgcccacccgtgcagaagtgatggatgtggcaaatgccgttctcgacggtactgacgccgtaatgctctccgctgaaaccgcagcgggccaataccctgccgaaaccgttgccgcaatggcacgagtctgtctcggagcagaaaaaatgcctggcctcaacgtatcaaaacatcggctagacacaatttttgacagtattgaagaagccattgcgatgtctaccatgtacgcggcaaaccacttaaatggagttaaagccattattgccatgaccgaatcaggccgcaccactcgcatcatgtctcgcattagttctggtctcccgatattctctatgtcccgtcatgagaaaaccttaaaccaaacggcactttaccgtggcgttacaccggtttattgcagtagtcatactgacggcattacggcggccaatgaagcagttaatcgcctgcgtgataaaggttatctagtttccggtgatcttgttctggttactcagggtgatcagatggggacgattggcagtactaacacctgccgtattcttgaagtggaataa

SEQ ID NO: 6751 - DNA, 969 bp, Photorhabdus luminescens
atgcataaagaaacagatacagacagtaaagctggttatgtgccgacatttcataaatcttacctgcatcctcgttactggggattatggctgggcattggtgtgttggccgggctggcttacctaccagttaaagtgcgtgatcctctgctggctaaaataggctggttggcgggtaagttagcgaaaggggcacgtcgtagagcaagaataaatctgtgttactgtatgccggaactgacggagcaacagcgtgaagcattgattgatgagatgttttctaccgcacctcaaccttttgttatgttggctgaactgtgtttacgtggtacaaaatcaacgttaagccggacgcaatggcatggggaagagattattcttcaactgaaagcgcaggggaaaaacgttattttcatggtgcctcatggttgggctgtggatattccagcgatattactgtctgtgggcggacagaaaatatcagccatgttccatcaccagaaaaacccggttgcagattatctgtggaataaagttcgccatcattttggtggccgtttacattctcgtgatgctggaattaaaccgtttgttgctgctgttcgccagggtttctggggatattatctgcctgatcaagatcatggtgaggagcacagtgagtttgttgattttttcgcaacttataaagcgacattgccggcaattgggcgattgatgaaggtttgtcgtgctgctattgtgccgctgtttccggtttataattaccgtactcatcagcttgatatttatattcgtccgccaatggatgatattgatggcaaagatgatgcttttattgcccgccgaatgaatgaagagttggagcaattggtgcgaccgaaccctgaacaatatacctggatacttaaattacttaagactcggaaagcgggtgatattgggccctatgggagagaagatttgtga

SEQ ID NO: 6752 - DNA, 1308 bp, Photorhabdus luminescens
gtgcaacagatagttaaaactatcgttctggtgtataaggagttaccgcgaccgcataaaattatgttgggttcgctgactgtagcaacattggttgtcactatgtggcaacctattgcttatcatcatgaacaagaagaaacaacagtcggcagcatcgctatcaatcttccggtagatagtgatgagattattgcagatagcagtgaacagctaccggatgaaggtattcctgatgaagagacgaactcagaggttacggctcaaactccgcatgaatatattgtctctgacggtgacaccctcagtaatattctgacccaatttggtatcgactcttctgatgtcgcgttactcgcgagtcagcataaagcgttacgggggctgaatattggtcagccattgtcatggacagtcaatgaagcgggtgacttgcaaacgctgacttggggtgtttcccgccgtgaaatgcgcatttatacccgtgagggcgatctgtttaaagaaacaaaagagtttcagaaaggggaatggaaaaacagcgtcgtcgttggcgttgttgatagtaattttaccagcagtgctttaaatgccggcttaaccagcagtgaagcacgtgaagttaccaaggcactgcaatggcaaattgatttgcgtaaattacatgaaggtgatcgtttctctgtattgctgtcccgtgaaatgttggatggtcacagtgaacagagccaattacttggtgttcgcctaaatagtggtggtaaagattattatgctatccgggcggaagatgggcgtttttatgatcgtcaaggttccggtctggagcgcggatttttgcgttttccaaccgccaagcaatttcgggtatcttcccaatttaatcctcggcgtgtgaatccagtcactggtcgggttgcgccacataaaggggtggattttgctatgccggtgggaacgcctgttttggcggtaggtgatggtgaggtgattgtctccaaatataacggagcagcaggtaactttattgccattcgtcatgggcgccaatataccacgcgttatatgcacttgagaaagctgttggtgaaatcagggcagaaggtaaaacgcggtgatcgtatcgcgttgtccggtagcactggtcgttctaccggtccacatttgcattatgaattctggatcaatcagcaggtggtaaacccattaacggcgaaattgccgcgttctggcggtttgagtggtaaagaacgcacagaattcttggcaatggtaaaagaggtaacgccccagcttctgttagattga

SEQ ID NO: 6753 - DNA, 948 bp, Photorhabdus luminescens
atgttacacaaatcatataaactagcgcacaaatttctctgcaagaccgcgattattgctgttttcatgtcgggaacgatacaatcggttaatgctgatgttgtgacatcaatccgtccattgggttttattgccgcggcaataactgagggtgtaactgatacgcaggtactgttacctgatggggcatcaccgcatgattatgcgttgagaccgtctgatcttaagaaagttaaccgggcagatttagttgtgtgggttggacctgagatggaaatctttttgtctaaaccgttagccaaagttccacaaaataaacagttagttttagcacaattgccaacgattaggccattattgctgaaaaataatgaagatttacccgaaccggatcagcataaacatgaagatgaccatgaacatcattctcatggtgaatataatatgcacatctggttatcaccagaaatagcaaaacaggtggcacaggggattcatgaccaattacaagcgcgttatccgcataaaaaagcagcgctggacgtaaacctacgtaaattcaatgcgcagcttgcgcaaactgacaaaaatattgctaatattcttaagctggtgcgtggtaaggggtattttgtttttcacgatgcttatggctatttcgagcagcattatggcctgacgccattaggacattttacgattaatcctgaaatacaacctggcgcacaaaaattacatcatatacgaacacaattggttgagcagaaagcaacctgcatttttgctgagccacaattcaggccgaccgttattaatgctgtggcgaaggatacgggagtgcgtatgggcactttagatccgttaggaggccgcatcgtattggataaggacagctatatgaaatttataactcagttgtcggaacagtacgcgggttgcctgaattaa

SEQ ID NO: 6754 - DNA, 798 bp, Photorhabdus luminescens
atgttcacgcaagatatatttaacatgtcgacactcatcactttaaaaaatgttgctgttaatttcggcgatcgtcgggtattaaacaatatctctcttcatttgcaacgagggaatattctgactttgctaggtcctaatggtgccggtaaatcaactttagtccgcgttgttttagggcttattgagccatcatccggcactattgaacagaccgatggattgaaaatcggctatgttccgcaaaaattgcatcttgatcccaccctgccattgacagttaaacgcttcatgatgctaaaacccggtgtcaaatctggcgatatattgccggcacttgaacgggtaaatgctgctcatctattgcaacagcccatgcaaaaattatccggaggggaaagccaacgggttttattagccagagcactattaaatcaacctcaattacttgtccttgatgaaccaacacaaggggtcgatgttaatggtcaattagcactttatgatttaattaatcaaatcaggaccgaattgcattgtgctgtactgatggtttcccatgatttgcatctggtcatggcgaaaacagacgaagttttatgccttaatcaacatatttgctgttccggcacacctgaagttgtttcaactcaccctgaatttatcgctatgtttggtcatcacggtgctgagcaattagcaatatatcgccatcaacacgatcaccatcaacacaatcaccatcatgatctgaaagggaaaattatcttggaaaataacagggaatgccactcatga

SEQ ID NO: 6755 - DNA, 786 bp, Photorhabdus luminescens
atgatcgaattattattccccggttggttggccggcgtattattggctattgctgccgggccattaggttcatttgttgtctggcgcagaatgtcctattttggtgatactctggctcatgcttcattgctgggcgttgctttcggattattgttaaatattagccctttttacacaattatcgccgtcactttgatactggcaatgatgttggtttggctggagaaacgtcctcaattggcaatcgatactttgttggggattatggctcacagcgcattatcattagggctggtggttgtcagtttaatgtctaatgtgcgagttgatttgatggcttatctatttggtgatttgttatcagtcacctatgaagatatttggttaattgccatcggtgtcaccattgtcaccacgctcctgttctggcgatggaacgccctgctctctatcaccgtcagtcaagaaatggcttttgtggatggcattaaaatacagcggttaagagtgctgttaatgctggtaacagcgttgacaatcggcttggcaatgaaatttgtcggtgcactgattatcacctccctgctcattatcccggccgccactgctcgccgttttgcccgcacaccggagcaaatggccggtattgctattgcggttggcatgcttgccgtcaccggtggattagctttctccgccatttacgacacaccagcaggaccctctgtcgtgctatgtgctgcggtgatgtttattgccagcctgatcagtaaagcaaaaaattaa

SEQ ID NO: 6756 - DNA, 1008 bp, Photorhabdus luminescens
atgattgaagctgaccgtctggtttctgcggaagttttgcaagacgatgaagcgattgaccgcgcaatcagacctaaattgttgtctgaatatgttgggcaaccgcaagtctgtgagcagatggagatttttattcaggctgccagacagcgtggtgatgcccttgatcacctgctgatttttggtccgccgggattggggaaaacaacgctggcgaatattgttgccaatgagatgggcgttaatcttcgcacaacttctggtccggtgttggaaaaggcgggcgatctggcggcaatgctgaccaatcttgagccgcatgatgtgttgtttatcgatgaaattcaccgtttatcgccggtagtggaagaaattctctatccagcaatggaagattaccaactggatattatgattggcgaggggccggcagcccgttcgatcaaaattgatttgccgccttttaccctgattggggctaccactcgcgcaggttctttgacttcgccactgcgtgatcggttcggtatcgtgcagcgccttgaattttataatgtggacgatttgcaaagtatcgtttctcgcagtgcccgttttatgggagtagagattactgacgatggtgcccggcaggttgctatgcgttctcgtggaacgccgcggattacaaaccgtttactgcgccgggtacgtgattttgctcaagtaaaagggaatggtgcgattgatggcaatattgccaccagagcgctggatatgttgagcgtagatgctgccggttttgattatctggatcgtaagttactgattgccatcattgataaatttatgggcgggccggttggggtagataaccttgccgctgctattggtgaagagcgggaaacgattgaggatgtgctggaaccctttttgattcaacagggctttattcaacgtacttcccgtggacgaattgccactgaacatgcttatcgccattttggcatggtcagaaatcaggaatga

SEQ ID NO: 6757 - DNA, 618 bp, Photorhabdus luminescens
gtgatagggcgtctcagaggaattgtgctggaaaaacaaccacctttggttttactggaaacaaatggtgttggttatgaagtccatatgccaatgacctgtttttatgaattgcctgatgccggacaggaagctgttctgtttactcactttgttgtgcgtgaagatgcgcaattactttatggttttaatgataagcaggagcgggcgctattccgtgaattaattaaagtgaatggtgtagggcctaaattggcgttggctattctttcgggcatgtctgcgcagcaatttgtttctgctattgaacgagaagcgatcgtttctctggttaaattgccgggtgtaggtaagaaaaccgctgaacggttggtggttgaaatgaaagatcgctttaaagggctcaatggcgatctcttcaatcagagcagtgatattaatttgccggcaacggccaaacagacaacttctgacgctgatagcgaagcagaagctgctgcggcattagtctctctgggttacaagccacaagaggctagccgcatggtcagtaaaatcgctaaaccgggtgctgattgtgaaacacttatccgcgaagcacttcgcgctgttctctaa

SEQ ID NO: 6758 - DNA, 522 bp, Photorhabdus luminescens
atggcgattatcttaggtatcgacccgggttcccgcgtcactggctatggtgtgatccgtcagcaggggcgtcatttgagctaccttggcagtggttgtatccgaacaaaagttgatgatctgcctaaccggttacagcggatttatgcgggtatccttgaaattattacgcaatttcaaccagatgcttttgctatcgagcaagtctttatggcaaaaaacgccgattcagcgctgaaattagggcaagcacggggagtggctattcttgccgctgttaatcaatctataccggtttttgaatatgctgcgcggcaggtgaaacaaacggttgttggaaccggggcggctgaaaaaagtcaggttcagcacatggtgcgttctgtgctgaaattgtctgctaacccgcaatccgatgcggcagatgcattggcgattgcgataacccattgtcactttaatcagaatcttttgcgggttggtgatcccagattaattttggcacgtggacgtttaagataa

SEQ ID NO: 6759 - DNA, 744 bp, Photorhabdus luminescens
atggcaggtcatagtaaatgggccaacaccaagcaccgcaaagctgcgcaggatgcgaaacgcggtaagattttcaccaaaattatccgggagctagtaacggcagcccgtctgggtggtggagatccggcatctaacccacgtctgcgtgctgcaattgataaagcactgtccaacaacatgacccgcgacactctgaatcgtgctatcgcccgtggtgttggcagcgatgaagcggataacatggaaaccatcatttatgaaggttatggtccggggggaacggcggtgatggttgagtgtctgagtgataaccgtaaccgtactgtttctgacgttcgtcatgctttcactaaaaccggtggtaatttgggtactgatggctcggtggcttatctgttcgccaagaaaggagtgatttcttacgcgccagggctggatgaagatgcggttatggaagcggcgttggaagccggcgctgatgatgtagaaacctatgatgatggcgcgattgatgtttacaccacaccagaaacctttggtgacgtgaaagatgcgttagatgcagcgggttttgtggctgaatcagcagaagtttcaatgatcccttccactaaagcagagttggatgcggaaactgcacctaagttattgcgcttgattgatatgttggaagattcagacgacgtacaagaggtttaccataacggtgaaatctctgatgaaattgcggctttgctgtaa

SEQ ID NO: 6760 - DNA, 438 bp, Photorhabdus luminescens
atggcttataagcgccccgagtctgtgctggtggttatttatgcgatttccagccgacgggtgctaatgttacagcggcgggacgatcctgatttttggcagtctgtcactggcagccttgatggagatgaaacgccgtgggagacagcattgcgtgaagtgcaagaagaagtcggtattgatattataggtgaaaatcttgaattgatagattgccggcgttctctttattatgagatttttacccatttgcgccatcgctatgctccaggagtcacccgcaataaagagtactggttctgtctggcattgccggaagagcgagaatgcctgttgactgaacatcaggcttatcagtggctggatgcggataaagcagtaaagctcactaagtcgtggagcaatcggcaggcgattgaagagtttgttattgaataa

SEQ ID NO: 6761 - DNA, 1773 bp, Photorhabdus luminescens
atgcgtactgattattgtgggcagttgaatctgacccatgaaggccagaaggtgactctttgtggttgggtaaaccgccgccgtgatctgggtggcttgatttttattgatatgcgtgatcgtgaagggatcgttcaggtattttttgacccggatcagcaagccgcattttctcaggctgctgaactgcgtaatgaattctgtattcaaatcaccggtactgtacgcgcccgtcctgacagtcaaatcaataaagatatggctaccggtgaaatagaggtttttgcggaaagtttgaatatcatcaaccgttccgaacctctgcctttggatagcaatcagacgaacagtgaagagcaacgtctgaaatatcgctatattgatctgcgtcgacctgaaatggcaaatcgcctgaaaacacgggctaaaatcaccagttttgtgcgtcgtttcatggataatcagggtttcctggatattgaaacgccgatgctgacgaaagcaacacccgaaggtgcccgtgattatttggtgccaagtcgtgttcataaaggcaaattttatgccttgcctcaatctccgcagttatttaagcaattgctgatgatgtccggttttgaccgttattatcaaattgttaaatgcttccgtgatgaagacttgcgtgcggatcgccagccagaatttactcaaatcgacgtggaaacttcctttatgactgctgagcaggtaagggaaatgatggaaaaaatgatccgcgaattgtggtttgaaattgacggtgttgatctggggcatttcccggtgatgacgtttgctgaagtgatgcgtcgtttcggttctgataaacctgatctgcgtaacccgttggagttggttgatgttgctgatctggttaaagatgtggaatttagtgtttttgctgagccggcgaatgacagtaaaggccgcgtagccgtcattcgggtacccggtggtgctgaattgagccgtaagcagattgatgaatatggcaaattcgttgggatttatggcgcaaaagggctggcgtggataaaagtcaatgcgcgtgctgccggtctggaaggggttcaaagtccgatagccaagttcctgaatgccgaggtgattgaaggtctgctttctcgtaccgatgcacaggatggcgatattttgttctttggtgctggcagtgtaaaagtggtcactgatgctttgggagcgttgcgtctgaaattagggcgcgatctgaacctgacaaaattggatagctggcggccactgtgggttatcgacttccccatgttcgaagatgatggggaaggtggcctgaccgctatgcaccatccgtttacttcaccgtgtaatatgtcagcggcggagttggcgcaagatccggtttcggctattgccaatgcttacgatatggtgattaacggttacgaagtgggtggtggttcagtgcgtattcaccgtaatgaaatgcaacaggcggtgttccgtattttgggcattaatgagcaggaacagcaggagaaatttggcttcttgctggatgcactgaaatttggtacgccaccccatgccggtttggcatttggtcttgatcgtttggtgatgctgctgacaggaacggataacatccgtgatgttatcgcattccctaaaaccaccgctgccgcttgtttaatgacggaagcgccaagttatgccaatccggcgtcccttgaagagttatcaatctctgttgttgctaaaaaagagagtgaataa

SEQ ID NO: 6762 - DNA, 396 bp, Photorhabdus luminescens
atggttagctcgctttatgttgtgttgggcgcactattattgattaagctgtcttttgatgtggttaagttaagaacacaatatcgtgtctcatatggagatggtggtttttacgaattacaaacagcgatccgcattcacggtaatgctgtggaatatatccctatctctatgttattgctggtcatgatggagatgaacggctcaaatgtctggatgatacatgtctgtggtttgattctgcttaccggcagagtcttgcattattatggcctgtaccaccgtgagttctactggcggcgttcaggcatggtagcaacctatctttcaatcgtattaatggtgataacaaatatttactacttgccttgggaacagatattttctctctactaa

SEQ ID NO: 6763 - DNA, 291 bp, Photorhabdus luminescens
atgatctatagtctgcaatttgaaaagcgggccttaaaagagtggaagaagttaggtcatccaattaaggagcagctaaagagaaaattggctgaacgcttagaaaaccctcatgtgccgtcagcaagattaagtgggcgatcgaaccgatacaaaattaaattgcggtcttctggcaaccgcttggtttatgaagtgaatgacaataagattatcttgctggtaattgctattggtaaacgtggtaaacgggtcggagatgcggtttataccctcgccaatgagaggtaa

SEQ ID NO: 6764 - DNA, 252 bp, Photorhabdus luminescens
atggcatatcaaatcttaacaaatttagcggcaagtattaccgatttgaaacgtaacccaatggggacatatttgcagggggaaggtgaagcggtcgcaatcctgaatcggaatgaacctgcattttattgtgtgcctcctgaattattcgcctactatcaggagctagcagaggatgccgcactaaacaaaattgcagatgaacgtttagaaaatgctgaatttgttagtgtgaacctggatgatctatag

SEQ ID NO: 6765 - DNA, 759 bp, Photorhabdus luminescens
atgtcaaatcaagatcctcaccatcaaagggatagcctgtttgctacgcctattgccaatctgggagactggcgtttcgatgaacgggtagccgaagttttccctgatatgatccaacgctccgtgccaggttattcaaatattgtttccatgattggtatgctggccggccgtttcgtgacatcaaacagtcaaatttatgatatgggttgttctctgggcgcatcaaccctggcaatgcgccgcaatattgtcgctgaaaactgcaaaattattgccgttgataattccccggcaatggtggaacgctgtcgtcgccatattgatgctttccggtcgcaaacaccggttgaagtcattgaagccgatattcttaatatcgatattcaaaatgcttcgatggtcgtactgaatttcaccttacaattcctcaacccgcaagatcgacaaggtttactaaaccggatttaccaaggattacgccccggtggtgttttagttttatcagagaaattcagctttgaagatcaacagattggtgagttactgtttaatatgcaccacgattttaagcgtgctaacggatatagcgaactggaaatcagccagaaacgcagcatgcttgaaaatgtcatgttgactgattctgtagaaacacacaaatcccgtctccatcaatccggttttaaccatgttgaagtctggtttcagtgtttcaactttggttcactgctggcgataaaaggagccgatgaatga

SEQ ID NO: 6766 - DNA, 972 bp, Photorhabdus luminescens
atgatcgatttcggtaatttttatcaacttattgcaaaaaataacctccagcattggcttaattgccttcctgctcaactgcaagagtggcaaaaagcagccctgcacggtaattttaaatcatgggtaaaaaccctggaaaacctacccgaaatttcaccgactcaattagacttgaaaaatggcgtgatcgcagaacgcgatccgcccctatccgcaggtgaaaaaatttgccttaccaatatattgcgaatattcatgccgtggcgcaaaggcccattctcgctttatggtataaatattgatactgaatggcgttcagattggaagtgggatcgagtactgccccatatttctccattaaccggccggacaattcttgatgttggctgtggcagtggctatcacctgtggcggatggtcggtgaaggggctgaacttgccgttggtatcgatccaactcagctcttcctctgccaatttgaagctgtcagaaagttacttggcaatgatcaacgcgcccatcttttacctctgggcattgaacaattaccggcactggccgctttcgatacagtcttttcaatgggagttctctatcaccgccgctctcctcttgaccatctctggcaattgaaaaaccagcttatatccgatggtgaactgatattggaaagtctggttgttgaaggagatgaacatacctgtttaatcccaggtgaacgttatgctcaaatgcgcaacgtctacttcattccttcggcaaaaatggtgaaaatctggctagagaagtgcggttttgtcgatgtgaaaattgtcgatcaggcagtcacagccacggaagaacaacgtcgtacagattggatgaaaactgaatcactatctgatttcctcgatcctacagatagcaataaaaccattgagggttatcccgcccctctacgggcgatactgatcgcccgtaagccctaa

SEQ ID NO: 6767 - DNA, 747 bp, Photorhabdus luminescens
atgacaaagttagaaatttgttgttttagcgtaggttgcgcattaatcgcacaacaggcgggtgctgaccggatagagctctgcgccagtccggcggaagggggattaacaccaagttttggtacattgaagcaggctattgagcaattaactattcctgtatatcccattgtacgtccaagaggtggtgatttttgctacagtcactcagattttgaggtgatgaaaaatgatgtggctcagatccgtgatatgggatttatgggcgtcgtttttggtgtattagatgaagaagggcatattgatttgccccgtatgcaacaattgatggcactgtctggcgatatggccgtcacttttcaccgtgcatttgatatgtgttttaatccttatgtggcattggatcaactcactcaacttggtgttaaacgaatattgacttccggccagcaacagaatgccgaattaggattacccttattgaaagagctgcatcaagccagtcaggggccaattattatggcaggtgctggtgttcgtatgagtaatattcataaatttatcgatatcgggttaacggaagttcacagttcggcaagccggattatgctttctaccatgacctatcgtaaagcgggagtgacgatgagcgcggacaatgaggtggatgagttttcacattattgtgttgatggtggtgtggtagaggtgatgaaagggatgctgagtttgactttatttgaataa

SEQ ID NO: 6768 - DNA, 168 bp, Photorhabdus luminescens
ttggggatagttaaagagagtcaacccaaaggggaacaagagcggttgcctaatccgaccttagctatcactgatggtgagatctccgtcaagtttcacccatttacattgcgtgaaattgttaaaagtgagcaccagtcagcaaaattaactttttcatccttgtga

SEQ ID NO: 6769 - DNA, 336 bp, Photorhabdus luminescens
atggaagctgtttttattgaactaccaccttttgaacgttaccgtcataactacctgagtgatgaggagtttcgaaccttccaaaatatgctactgaaaaatccaacaacaggagatgtaatccaacatacaggcggattgcgtaaagtacgttttactgattcccgaaggaaaaagggaaaacgaggcggtattcggataatttactattggtgggtatctaaatcgcaattcatgcttttcactatctatgataaagatgaaatgtcagacttaactaaagagcaatgcgaatccttgcgtaaaatgttagaaatgagaaaaaaaggagcataa

SEQ ID NO: 6770 - DNA, 315 bp, Photorhabdus luminescens
atgaagcgtgatctatttgcagaactcaatgaagggatgaaagcttgggaagaggctaacgaaggcaaactcacattgaaaactcataagaggaggttaaaaaatgatatcttcatcagtccggatgagttgaaatctatccggagtaaactgaatatttctcaggctgtttttgcccagtacctgcataccggtgagacgacataccaaaactgggaacagggacgggctaaaccgaataaacaagctgtgttactgattaaaatggtggagcgcaacccgcaggcactagaatttcttgccagcctcacataa

SEQ ID NO: 6771 - DNA, 564 bp, Photorhabdus luminescens
atgacacatttttcttctattgttgaattacaggatttagtggctgaactggcaatatttgagcaaaaattggtacggttcaaacaacggcttaatttgaatgttgagcaatatcaagccgatcatatctccttacgttgtcacgatatctctgtagcggagcgctggcgtaaaggttttttgcaatgtggcagtttgatgtcagaaactatcattaatggacgtccaatctgcttgtttgatttagagtacccaattgcggtgcttaattggcaaattgattgtgtagaattgccctatcctggcaagaaaacttacttgcatcagggatgggaacatgtggagctggtgctgccggtggcacctgagatcttatcaacagccgcaaaagcattattaccgcaacctttgccggcaggtttttctgttaaagagagtcaacccaaaggggaacaagagcggttgcctaatccgaccttagctatcactgatggtgagatcaccgtcaagtttcacccatttacattgcgtgaaattgttaaaagtgaatgctcagctacatga

SEQ ID NO: 6772 - DNA, 369 bp, Photorhabdus luminescens
atgtctgattggtcaggaagtgttccagctaacgctgaaaatggtaaatccacaggacttattctcaaacagggagatacaatctctgttgttgctcatggatgggtgaaatatggccgtgataatgttgaatgggcagcacctgatggtcctgtacccaataatccacaaccgtcatcaatagccactctcgtcgctaagatcgccaacaagaagtttgcaattggcaacggagtacttcataaaacggttcctgtagatggcgaattaatacttttattcaatgacgtaccgggtacttttggtgataattcaggtgaatttcaagtcgaggtcataatagagtctcgatactcccctttaaaataa

SEQ ID NO: 6773 - DNA, 579 bp, Photorhabdus luminescens
atgttgaagaagacgctacttggcctgactgcgggtgcattgttactaaatgcaagttctgcattagctgccaattataaaattgatatacccggccagcatgcctttattggatttcgcattcagcatttggggtatagctggctatatgggacatttaaagattttgatggttctttcacatttgatgagcaaaatccggcggaaaataaagttaatgtgacgatcaaaatagccagtttggacactaaccacgccgaacgtgataaacacctgcgtagtaaagattactttaatacagagaaataccctgaagcaaaattcacgtcaactgaagtgaaaaaagagggcgagaaatatgttgttacgggtgatctgactttaaacggtgtgacaaagccggtgatactgaatgcagagctgatgggtgaaggtaaagacccgtggggtggttatcgcgcaggttttgaagcttctggtaaaatcaaactgaaagactttaatttcaaagcagatttgggacctaaatcacaggaagcagatttattgatttctatcgaaggtgtccgggaaaagtaa

SEQ ID NO: 6774 - DNA, 555 bp, Photorhabdus luminescens
atgctttggaagaatacttccaaccagtttggtcacttatctgtccttttacattggctggttgcattgatcgtatatggcatgtttgcgctaggactgtggatggtgacattagggtattacgatacgtggtatcataaagcacctgaaattcataaaagtatcgggatgttgctgtttatcatgatggctgtgcgtgttatctggcgttttgtttctccaccacccaagccattagccagttatagtcgcctgattagagtcagcgcggttttaatgcatattttgttgtatatcttactgtttggcattttgattagtggttatttaatttcgaccgctgatggtcagccaatttctgtttttgactggtttattgtgccagctacattaatcggtcagggtgaacaggcggatactgctggaatgattcatctttaccttgcttgggcagtggtaattttatcgttattacatgctgttgcagcattaaaacaccattttattgatcgtgatgcaaccttaaagcggatactgggtttccgtcctgaataa

SEQ ID NO: 6775 - DNA, 738 bp, Photorhabdus luminescens
atgtcaaatagcattttacaagcactcacggtgttgaagtcaaaaaaatgggtcgatttgacgcatagcttcgataaagattctccacatttttttatgcttgattcagcagaatttaaaacactgtttgattataaggatggcttttttactcagcaattttcttttcccggccaatatgggactcacattgatgctccctgccactttgttcctgatacccgttatgtcgatgaattggaattaaaagaattagttttacctctaatcgtacttgatcaatcagaaagagcaaaacaggaccctaatttttcactttctaaagaagatattcttaaatttgaagaagaatatggaattattgaggcaggtactttcgttgcgctcagaacggattggagtaaacgctggtcatctcagaaagcaatggataataaagatgattctggcaataaccaaacacccggttgggggatagatgccctcaagtttttatttgaagaacgccatattaaagccattgggcatgaaacatttgataccgacgccgctaaagattttagaaagaataatgccttgttaggcgaagattatgtcttaaagcaagatacttatcagatagaacttttagctaatttggaccaagtacctgtacgtggcgccgttattttcaacattgtagccaaacctaaaaaagcctctggttttcctgttcgtgcgtttgccatactcccataa

SEQ ID NO: 6776 - DNA, 1731 bp, Photorhabdus luminescens
gtgaatattcaggcgattctttcagaaaaagtcagccaagcgctgattgcagcaggtgctccagccgacagcgaagctcacatccgccaatccgcgaaagcgcaatttggcgactatcaggccaatggtgttatggccgccgcgaaaaaagtgggtatgcctccccgacaactggcagaaaaagttgttaacctgctaaatctgcaaggtatcgccagtaaagttgaaatcgctggtcccggctttatcaatatcttccttgataaagcatggattgcagccaatatcgaaactgcactgaaagatgaaaaactaggcgttacgccagccaaaccacaaactattgttgtcgattattccgcccccaatgtcgcgaaacagatgcacgttggtcatttgcgctccacgattattggtgatgccgccgtccgtacattggaattcctcggtcataaggttatccgcgctaaccatgtgggtgactggggaacccagttcggtatgctaattgcctatttggaaaaagtgcaaaatgaaaatgccagcgatatggcattgtccgatctggaagcgttctatcgcgaagcgaaaaagcattacgatgaagatgaagagtttgccatccgcgcccgtggctatgtggtgaaactgcaaggcggtgatgaatattgccgcaccatgtggcgcaagctagtggatatcacgatggcccaaaatcagcaaacctatgatcgtctgaatgtcacgctgactaaagattctgtcatgggtgaaagtctgtacaacgatctgctgcccagtattgtcgcggatctgaaacagcaagggctggcagtagaaagcgatggtgcaaccgtagtttaccttgatgaatataaaaacaaagaaggtgaaccgatgggcgttattatccaaaaacaggatggaggttatctttacaccacaaccgatatcgcctgtgcaaaataccgttatgaaaccctgcacgcggaccgcattctttactacatcgattcccgtcaacatcaacatttgatgcaagcctggaccatcgttcgtaaagcgggttatgtaccagaatccgtgtcactggaacaccatatgttcggcatgatgttgggcaaagatagcaaaccatttaaaactcgcgccggcggtactgtcagattgaccgatctattggatgaagctattgaacgtgccaacacccttatccgtgaaaagaacccggatatgccagaagatgaattgaaaaaagtggtttctgctgtcggtatcggtgccgtgaaatacgctgatctctccaagagccgtaccacagattacatcttcgattgggataatatgctcgcttttgaaggcaataccgcaccttatatgcaatatgcttacacccgtgttgcctccatctttaaacgtgccgaaatcgatgaaagcagtctgaccctaccggttatcctaaatgaagatcgtgaacaaacattggccacccgtttattacaatttgaagagaccatcaccaccgtcgcccgtgaaggtacgccacatgtgatgtgtgcttacctgtacgatttggctggtctattctcctgtttctatgaacactgccaaattcttaatgcggaaagtgaagagttgcgtcaaagccgcctaaagctggcgctcctgactgctaagacattgaagcaaggtctgaatacattgggtattgagacggtagaacggatgtaa

SEQ ID NO: 6777 - DNA, 1536 bp, Photorhabdus luminescens
atgaatttattgaaatcgctggctgcggttagctctatgaccatgttctctcgggttttaggctttatccgagatgccattattgcccgcatatttggggctggtgttgcagcggatgctttttttgttgcatttaaactgcctaatttactgcgccgtatttttgcagaaggtgccttttctcaggcatttgtgcccattttggcggaatataagaatcagcaaggtgatgaagcgactcggacgtttattgcttatgtttccggtatgctgacgttaattctggccattgttactgtactgggagttttggcagcaccgtgggtgatttatgttaccgcacccggttttaccgataccgccgataaatttacgctgacaacaaatttgttaagaattacttttccctatatttttctgatatcactggcctcgttggcaggtgcgatattaaatacctggaatcgattttctgttcctgccttcgctccaacattacttaatatcagcatgattgtgtttgcattatttgtcgccccttattgtaatccgccggtgatggcattgggttgggcggtggttgcaggagggattttacagctcttatatcagcttcctcatttaaaaaagattggcatgctggtattaccgcgtatttcttttcgtgacagcggcgtatggcgggttatgcggcagatggggcctgcaattcttggggtttcagtcggccagatttcattaattattaatacgattttcgcctcatttctggtgtccggttctgtctcctggatgtattacgctgaccgtttgatggaattaccctctggtgtattgggtgttgcgcttggaacaattcttttaccttcattagcgaaaagtttttccagtggaaatcatgaggagtacaccaaattaatggattgggggctgcggctctgttttttattagcgctgccttgtgctgttgctttaggtatgctggcagaacctttaacagtttctctattccaatacggtaattttacggcatttgatgcagtaatgactcaaaaagcgttgattgcttactgttttggactgatggggctaattattgttaaggtactggcaccgggtttttattctcgtcgagatattaaaacgccggtgaaaattgcgattgtcactttgattttgactcagttaatgaaccttgcctttgttggcccgctgaaacatgctgggttagccttgtctattggtctggcatcttgtttcaatgctagtctgctttactggcaattacgtaagaaaaatatttttaagccgttagcgggttgggggaggttcttatttaaactggttgtggcaattacggtaatgattgccgtattagctgttactttatggttgatgccagcatgggagcagggaaatatggctacgcgcctgttgcgattgatggtggttgttatcgctggggcaagcagctattttgctgcgttggtgctgatgggttttcggctaaaagattttgcccaccgcagtttttaa

SEQ ID NO: 6778 - DNA, 204 bp, Photorhabdus luminescens
gtgcgtcaaataaatcaactcattgaagcttactcatttctaagctgcctgtacggcagtgaacgagatgagattatagccaccgggtttacttgctttctaagctgcctgtacggcagtgaactatcggcccggcaacacttagcccttcaaaagtttctaagctgcctgtacggcagtgaactgttgatgtattcattttga

SEQ ID NO: 6779 - DNA, 231 bp, Photorhabdus luminescens
ctgtacggcagtgaacccagctactacgttgttcttaagaataaacaatttctaagctgcctgtacggcagtgaactgggaatacttgtctttggtatcgttcttacatttctaagctgcctgtacggcagtgaactgttacatattaactttaagctactgacaattaaagcatatattgataaaacaatgaaaaaacccttttttacaagagaaataatatcccattaa

SEQ ID NO: 6780 - DNA, 585 bp, Photorhabdus luminescens
atgtttggttatcgttccactttaccgaaagttcgtctgattacggaacgaatggtggtgcgtttggtgtacgagcgggatgcttatcgtttggctgagtactattcagaaaatcacgagtttcttaaaccttgggagccgactagagatagaagtcattgccagccttccggttggataaatcgattgaatttaatcatagaaatgcaaagacagagtgcggcttttcattttctgctgcttgattcaaatgagagtgaagttattggtgttgccaatttcagtaatattctgcgtggggcttttcatgcctgttatttgggatattcgcttggtgaaaagtggcagggaaaagggatgatgtacgaagctttacaaccagctatccgttatatgcaacgccaacaggggatgcatcggattatggctaattatatgccggataatcatcgtagtgggaagttgttggaacgattgggttttgaacgtgaaggctatgctaagaaatacctgatgattaatggagtttggcaggatcacgtattaaccgcattgacagatgaaaaatggagtggaaaaagttga

SEQ ID NO: 6781 - DNA, 1206 bp, Photorhabdus luminescens
atgtcactggtttcacaagcacgtagcctgggtaagtacttcctgttattcgataacttgctggtcgttctaggtttcttcgtcgtttttcctttaatatcaatacattttgttgagcaactgggttgggccgcgctggttgtcggttttgcgcttggtttacgtcagtttgtacaacaaggtttaggcatttttggtggcgcaattgcagaccgttttggcgcgaagccgatgatcgtcaccggcatgctgttacgcgcccttggttttgctttcatcgccttagccaccgaaccgtggatactgtggcttgcctgtatattatccgcactgggaggtaccttatttgatcctccccggactgcactggtcatcaaactaacccgaccgcacgaacgtggccgtttcttctcgctgctgttaatgcaggacagtgccggtgcggttatcggcgcactgattggtagctggctgctgcaatatgatttccaatttgtctgctggacaggtgccggtgtttttgttctggcagccatctggaatgcattattcctccctgcctaccggatttctactactcgaactcccatctgggaagggatggagcgcgttattaaagatcgtcgcttcttcacctatgtattgacgttaaccggctattttatgctgtctgtccaagtgatgttaatgttcccaattatcgtcaacgaaatcgccggcacacccgctgcggtaaaatggatgtacgcaattgaagcaaccctatcactcactttgctgtatccaatcgcccgttggagcgaaaaacgattccggctagaacagcgtctaatggccgggcttttcctgatgagcctgagtatgttcccagtcggtttgattggtgaaataaataccttatttggccttatttgcctgttctatctcggcaccgttaccgctgaacctgcccgtgagacattaagtgcttcactcgctgatccacgtgcgcgtgggagttatatgggattcagccgtcttggtctggcattgggtggtgccttgggttataccggcggtggttggttatatgataccggccatgcgctgaatattccgcaattgccttggtttctgcttgggattattggcttgataacgctgtatgccctgcaccgtcaatttaaccaacgtaagattgaatctgccatgctgagtggcaattaa

SEQ ID NO: 6782 - DNA, 564 bp, Photorhabdus luminescens
atgagaaaatttttcttgggggcagtattgctgctagtggggttaatcagtggttgtgatcagttcaaagatatcagtatcagcgaagagttaattaatggttatctagcaaagcacgtccattaccagaaacagctcgaattacatggtattgccaatgcggatattgaattgacagaactctccagccaaattggtcgaacagaaccaaataaaatagcattaactggccgtgcaaatgtcaatgttacatccttgcttggcccggctaaagccgatatgaaactcagcctgaaagcacaacctgtttttgatcaggaaaaaggggctatttttctgaaagagttggaaatcgttgattaccaaatcacaccggaaaaaatggaaaaaccgattaacgcattagttccttatctgaataaatcactcagcgctttctttgatattcatcctatttatgtaataaaagcagatcatagtaaagctgaagccgcagctaaaacattagcaaaaaggttagaagtgaagcctggcaaattagttattatgctgaccgataaataa

SEQ ID NO: 6783 - DNA, 540 bp, Photorhabdus luminescens
atgaatgaattttcaatagtctgccgtattttagggactttatttaatcgtcaaccgcaagacccgattctgaaaccacttctgacggtgattgtcgaaggtaaattgaagcaatcatggccattggagcaagatgcattgttggatcgtttgcaacaaaactgcgatctatccgcaatgcaagctgattatatggcactgttttatggagataatgctagcgtaccgagccgccgttctgactataccggggagagtgaaaacgatattcgtcaatttttgattgaacgaggcatgccattgtccgatgggcctgtcgatcagtttggttctctgttattaggggcttcatggctggaagatcaggcagcagaagatgaggttcaggggcaaattatgctgtttgatgaatatttgctgccgtggtgtgggcaatttttggggaaagtggaagcccatgcaataaccagtttctaccgaacattagcaatgattacccgtgaagcgttacaggcgttaagagaagaactggattcttaa

SEQ ID NO: 6784 - DNA, 942 bp, Photorhabdus luminescens
atggagattatcttttaccaccccttttttgatgctgctcagtggattcaaggtatgcagcaacgattacccaatatcaatatccgccaatggaaacgcggcgataataagcatgcggattatgcaatggtttgggctcccccctatgagatgttggcaaatcgctctggattgaaggggatttttattttaggagcaggtgtagaggcgattttaaagcaggaacagcaaaaaccagggatgttacccgccggtgtgccactgatgcggcttgaagatgcaggtatggggctgcaaatgcaggagtatgcggtagcaatggttttacattatttgcggcgcatggatgagtataagctgcaacaagggcagaggaggtggaaacaactcgaaccttatgatcgcaaagattttgttgtgggtgtgttgggtgccggtgttctgggtcgccgtgttgcacagacgttagttgaatggggctttattgtgcgttgttggagccgcactccaaaacagattaataacgtagttagctttcacggtgaagatcaattgggcgattttctctccggcagtaaggtgcttatcaatttgctgcccgatacaccaaaaacccgtggtattctgaatttatcgctgtttagccagctaaaaccaaagtcatatctgattaatatcgcgcgaggtgcccatttagtagaacatgatctgttggtggcgattgataaaggttatatcgtcggggcttcattggatgtgtttgttgaggaaccactaccagagatgcacccgttctggactcacccccgtataacggtgacgccacatgttgcggctattactattcctgatattgctatggatacgattagtgaaaatattcgacgaattgaaaaaggagaattatcaaccggcgttgtggatataaaactaggatattaa

SEQ ID NO: 6785 - DNA, 303 bp, Photorhabdus luminescens
atgaaaatgtttaacccacctcacccaggcgaaattattgctgactctttggaagaactaggtttaggaattcgtgatctagcgcgagcactaaatgttgctccatctacggctcaacgtttagtgtcgtgcaaagcagcagttacaccagagatggcaataaaactgtcaaaagtacttggtagctctccacggctgtggctaaaactgcaagaaacttatagcctcgataaagcagaaaagacggttgatatttccaaactgactccgttatttaagcctgtccatttatctcacacctaa

SEQ ID NO: 6786 - DNA, 582 bp, Photorhabdus luminescens
atgaaaaaattagcagttatgcttgcattgggaatgattagctttggtgcaatggcagttgatgggtataaagatgcaaagtttggcatgacagaagaagaatttctttcgaaaagattatgtgattttgaaaaatttgagggaaattctcaaatagaagaagtatcactttattcatgttctgacttttcgtttgctaacaaaaagcgtgaagcaatggcattttttttaaatggaaaatttaaaagattagagattaatattggccgcctcgtgaagccagtaagcaaatcgttaacgaaaaagtacggagatgaatcatcgtatccatcacaagaagaatttgaaaatgcgctaaaatacaatggaactatgtctataggttatgataataatacggtattagttgatatacatataatgtgtggcaaagaaggcatagaaaccagtcgactgatttatacgagtccagatgttcatacgatccccgatttagagaataaaatccaggaattaaggggattaaaggaattccaagaattactggaattagatcgtgaaaaactggatgaagatgtttga

SEQ ID NO: 6787 - DNA, 1113 bp, Photorhabdus luminescens
atgacttcatatgttgataaacaagagatcatagcaagctcagaaattgatgatttgattttttccagcgatccattagcttggtcttacgatgaacaggaaaaaatcagaaacaaatttgttcttgatgcatttcgtaatcactataaacattgtcaagaataccgtcactactgtcaggtacacaaagtagacgacaatattacggaaattgatgacatacctgtattcccaacatcagtttttaagtttactcgcttattaacttctcaggagaacgagattgaaagttggtttaccagcagcggcacgagtggtttaaaaagtcaggtggcgcgtaacagactaagtattgagagactcttaggctctgtgagttatggcatgaaatatgttggtagttggtttgatcatcaaatagagttggtcaacttagggccagatagatttaatgctcataacatttggtttaaatatgttatgagcttggtagaattattatatcccacgacatttaccgtaatggaagaacgaatagattttgttaagacattgaatagccttgagcgaataaaaaatcaaggaaaagatatttgtcttatcggctcaccatactttatttatttgctctgccagtatatgaaagataaaaatatctcattttatggggataaaaacctttatatcataacggggggcggctggaaaagttatgaaaaagagtccctaaaacgcgatgatttcaatcatcttttattcgacacgttcaacctcaataatattagtcaaatccgcgatatatttaatcaagttgaactcaacacttgtttctttgaggatgaaatgcaacgtaaacgtgttccgccgtgggtatatgcgcgagcacttgatcctgaaacattgaaacctgtacctgatggaatgccgggtttgatgagttatatggatgcgtcatcaacgagttatccggcatttattgttaccgatgatgtcgggataatgagcagagaatatggtcaatatcctggtgtacttgttgagattttacgtcgcgtcaatacgagggcacagaaagggtgtgctttaagcttaaaccaagcatttaatagttga

SEQ ID NO: 6788 - DNA, 975 bp, Photorhabdus luminescens
atgaaatttggattgttcttccttaacttcatcaattcaacaactgttcaagaacaaagtatagttcgcatgcaggaaataacagagtatgttgataagttgaattttgaacagattttggtgtatgaaaatcatttttcaggtaatggtgttgtcggtgctcctctgactgtttctggttttttgctcggtttaacagaaaaaattaaaattggctcattgaatcacatcattacaactcatcatcctgtccgaatagcggaggaggcttgcttattggatcaattaagcgaagggagatttattttagggtttagtgattgtgaaaaaaaagatgaaatgcgtctttttaatcgccctgttgaatatcaacagcaactatttgaagagtgttatgaaatcattaacgatgctttaacaacaggctattgtaatcccgataatgatttttatagtttccctaaaatatcggtaaacccccacgcttatacccaaggcgggcctcggagatatgtcacagcaaccagtcatcatattgttgagtgggcggctaaaaaaggcattcctctcatctttaagtgggatgactccaatgatgttagatatgaatatgctgaaaggtataaagccgttgctgataaatatggtattgacttatcagcgatagatcatcagttaatggtattggttaactataacgaagatagtcacaaagctaaacaagagacgcgtgcatttatccgtgattatgttcttgaaatgtatcctaatgaaaatctcgaaaataaacttgaagagataatcacagaaaacgctgtcggagattatacggaatgtatagctgcggctaagctggcaattgaaaagtgcggtgcaaaaagtgtattgttatcttttgaaccaatgaatgacttgatgcaccaaaaaaacgtaatcaatattgttaatgataatattaaaaagtaccacatgtag

SEQ ID NO: 6789 - DNA, 1080 bp, Photorhabdus luminescens
atgaaatttggaaactttttgcttacataccaacccccccaattttctcaaacagaagtaatgaaacgtttggttaaattaggtcgtatttctgaggagtgtggttttgatactgtatggttactggagcatcatttcacggagtttggtttgcttggtaacccttatgtcgctgctgcatatttacttggtgcaaccaaaaaattgaatgtagggactgcggctattgttcttcccaccgctcatccagtgcgccaacttgaagatgtgaatttattggatcaaatgtcaaaaggacgatttcggtttggtatttgtcgggggctttacaataaagactttcgcgtatttggcacggatatgaataacagtcgcgctttaacggagtgctggtacgggttgataaaaaatggcatgacagagggatatatggaagctgataatgaacatatcaagttccataaggtaaaagtaaacccgacagcatatagtaaaggtggagcccctgtttatgtggttgctgaatcagcctcgacaactgaatgggccgctcaatttggtttaccgatgatattaagttggattataaatactaacgaaaagaaagcacagcttgagctttataacgaggtggctcaagaatatgggcacgatattcataatatcgaccattgcttatcatatataacatctgtaaattatgactcaaataaagcgcaagagatttgtcgggattttctagggcattggtatgattcttatgtgaatgccacgaccatttttgatgattcagacaaaacaagaggttatgatttcaataaagggcagtggcgtgactttgtattaaagggacatagagatactaatcgccgcattgattacagttacgaaatcaatcccgtgggaaccccgcaggaatgcattgacataattcaaaaagacattgatgccacgggaatatcaaatatctgttgtgggtttgaagcgaatggaacagtagacgaaattattgcttccatgaagctcttccagtctgatgtcatgccgtttcttaaagaaaaacaacgttcgctattatag

SEQ ID NO: 6790 - DNA, 924 bp, Photorhabdus luminescens
atggaaaataaatccaaatataaaaccatcgaccatgttctttgtgttgaaggaaataaaaaaattcatgtttgggaaacgctgccagaagaaaacagcccaaagagaaagaataccattattattgcgtcgggttttgcccgaaggatggatcattttgctggtttagcggaatatttatcgcggaatgggtttcatgtgattcgctatgattcacttcaccacgttgggttgagttcagggacaattgatgaatttacaatgtctataggaaaacagagcctattagccgtggttgattggttaaatacacgaaaaataaataaccgtggtattttggcttcaagcttatctgcacggatagtttatgcaagtctatctgaaattaatgtttcatttttaatcaccgcagtcggtgttgttaacttaagatatacgcttgaaagagctttaggatttgattatctcagtttacccattaatgaattgccgaataatttggattttgaaggccataaattgggtgctgaagtctttgcgagagattgccttgattttggctgggaagatttaacttctacaatcaatagcatgatgtatcttgatataccgtttattgcttttactgcaaataacgacaattgggtaaagcaagatgaagttatcacattgttatcaaatattcgtagtaatcgatgcaagatatattctttgctagggagttcgcatgacttgggtgaaaacttagtggtcctgcgcaatttttatcaatcggttacgaaggctgctatcgcgatggataatgatcgtctggatattgatgttgatattattgaaccatcattcgaacatctaactattgcgacagtcaatgaacgtcgaatgaaaattgagattgaaaatcaagcgatttcgctgtcttaa

SEQ ID NO: 6791 - DNA, 1443 bp, Photorhabdus luminescens
atgactaaaaaaatttcattcattattaacggccaggttgaaatttttcccgaaagtgatgatttagtgcaatccattaattttggtgataatagtgtttacctgccaatattgaataattctcatgtaaaaaacattattgattataatgaaaataataaattacggttgcataatattgtcaattttctctatacggtagggcaaagatggaaaaatgaagaatattcaagacgcaggacatacattcgtgatttaaaaaaatatatgggatattcagaagcaatggccaagttagaggccaactggatatctatgattttatgttctaaaggtggcctttatgatgttgtagaaaatgaacttggttctcgccatatcatggatgaatggctacctcaggatgaaagttatattaaggcttttccgaaaggtaagtctatacatctgttggcaggtaatgttccattatctgggatcatgtctatattacgcgcaattttaaccaagaatcagtgtattataaaaacatcgtcaaccgatccctttaccgctaatgcattagcgttaagctttatcgatgtagaccctaatcatccgataacgcgctctttgtctgttgtatattggccacaccaaggtgatacatcactcgcaaaagaaattatgcaacatatggatgttattgtcgcttggggaggggaagatgcgattaattgggctgtagaacatgcaccaccctatgctgacgtgattaaatttggctctaaaaagagtttttgcattattgataatccagttgatttaacgtcagcagctaccggtgcggctcatgatatttgtttttacgatcagcgcgcttgtttttctgcccaaaacatatattacatgggaaatcagtatgaggaatttaagttagcgttgatagaaaaacttaatctatatgcgcatatattaccaaacgccaaaaaagattttgatgaaaaggcggcctattctttagtccaaaaagagagcttatttgctggattaaaagtagaggtggatgttcatcaacgttggatgattattgagtcaaatgcgggtgtggaatttaatcaaccacttggcagatgtgtgtatcttcatcacgtcgataatattgagcaagtattgccttatgttcaaaaaaataagacacaaaccatatctatttttccttgggaatccgcatttaagtatcgagatgcgttggcattaagaggtgcggaaaggattgtagaagcaggaatgaataatatatttcgagttggtggatctcatgacggaatgaggccgttacaacgattagtgacatatatttctcatgagaggccatctcattatactgctaaggatgttgcggttgaaatagaacagactcgattcctggaagaagataagttccttgtatttgtcccgtaa

SEQ ID NO: 6792 - DNA, 276 bp, Photorhabdus luminescens
gtgattgtagtttacggcacctcgcagaaaacccatcagatttaccctggcgaatttcttattcagacaacggacaccgattttgaactgactggccttgcttacgacacaaaattcaatttaaaccacgaagtaaaactgttttatgattctaactggtttgaaattgtgccagcttggcgtacgttgccaatctctgttacgccgtgtatggggatactgccagccagctactatgatgctgtacgacaagccgcggcacacctcaaaaagtag

SEQ ID NO: 6793 - DNA, 285 bp, Photorhabdus luminescens
atgcacaatacccaaggaaaaaccatatccagtttcttaatccgtttacgtaatcaggatacgcccacagggatcagcgccgggacgctcgatgaactggttaaagtcactggtctgagtaaaactgaaatcgcacaccttgctttgcgcaactttgctgaccgctacctaccgcactacgagaaagatgacggaccattgagtgatgagcagatctgtaccatccgtgaagcgagcgcagctagcgacattgcggatgataactttactcaacgcctgttctga

SEQ ID NO: 6794 - DNA, 1752 bp, Photorhabdus luminescens
atgattatattagggatcagtggccttcctaatgctcaacgttttctgcgagagaataatccagaggtgagtaaattagatgaacgtatttgccagggagtcgatagtgcagcctgtgtgattattgatggaaaaattgttgcagcggcggcggaagagcgttttacgggagagaaaggaacagggcggtttcctgctaatgccattaattattgtttggcggaagcaggtcttacgcaagatgatatacaggtgattgcccacggttttaattatgataattatcgccgatttttcatgtctaatgaagcgttattcgaggaggtttttagtggaaaaactatgattaatgcattaactgctgagggatggcagaatattgaatcgcgttttcaaggggtagatcatcatttggctcatgcggcatcaaccttttatcctagtggcttcccttctgcattgtgcattatttcagacggtatgggtgaaatagaatccttaagtgtttatcttgctaaagaccaacaattccagaaattgtacagccagccaattagctcttcattaggcatattttattctatctgtacccggttccttggctttgtatttaatagcgatgaatataaagttatgggactttctgcgtatggtaaccctgaacgatatcgtgatattttcaatgaattagctcaattcgatgtagagagcggaacgatacagataaactggttaccgccagcatttgataatgcggaatatggttttcccgctgcaatggcacaacttagtgatatgtttggttttacgccgagaagagaagatgacactttacgggatgttcatcaggattttgctgccggattacaggaaaaatttacactgctgctgaaacagttagtaacctattggctgggaaaaacgggtgaaacatcactctgtcttgctggaggatcattcttaaactgcaaagcaaatcaagttctttgtcagcttgatggtgtggaaaacgtctttgttcaaccggcatcgggggatgatggttcggctttgggcgctgcgctttttgtggctggtgaatatcacaatggtgccgattcttgctttaatccttacctcggtcctcgtttctctaccgatgaagtccgtaatgtattattccgacatggtggcaatgcaggaatgaaatggcgttatttagggctgaatgatgattattttgcgaccgcggctaaagatatcgcagaagataaaatcattgcttggttccatgatcggatggaatttggcccaagagcactgggcaaccgttcaattttggctttgccggcaggtgaaagaataaaagatagaatcaatagtacagtgaaattccgtgaggctttccgaccatttgccccggcaattttggatgaggattgcgacactatttttgagacacgcaatttaatgccgactcgatatatgctttgcaccgccaaagtaaaaccagaaatgatgaagccggtgtcaggtattgtccatgctgatggaacggcgcgtattcagcttgttgaacgtgcttttaacgcaactttttggcgattattgaaagaggtacagaagataaccggttatggttgtctggtgaatacttcattcaacgttagaggacagccgcttattatgtcaccggagattgcaatagagacgtttttgaaaacttcactggacaaactttatattgagggatttgtcgtatggaaagaataa

SEQ ID NO: 6795 - DNA, 693 bp, Photorhabdus luminescens
atgcataaatataacagcaagatacttattattggctcatcaagtgaaattgggaatgcaatttgccggcatgcggttgcaagtggttatgaagtattaggcacttcacgtaaaccgcgtaatgaagaaatttatttagatgttatgtcggataacagtgttagagaagccattggcattgcagttgagaagatgaaatgtattgacgcggttatctatacaccggcaatctcattggatggtttattgcatgctcaggatattgagggttggcatgacgtttttaatgtcaacttatttggtgcagcaagagtagcaaaatatttgctgccacattttatgaagaatcgtaatggcgtgatgcaatttatctcttctacagcaagtttacgtggagagaccggtgccaccgcttattcttgttcgaaagccgccatgaatgcattggtaaaaaacatctctaatgactatggccgttttaatattagggcctacactgtcatgccgggatatgttgatggtggtatgttgcgtcatatttccccagaaaagaagatggaattcgctagaagcaccgcattaagacgaatggcagatattaatgaaattgccagtttttgtgtggggacgttgagtacatcaacctatattacaggaacatctctttgcattgatgggggattaagtggttaa

SEQ ID NO: 6796 - DNA, 1701 bp, Photorhabdus luminescens
atgaacggcatacggccgtttagtgctgtaattgatgcttgttggaaggaatcttactcttttgctcgtttaactaaagatattattgccggtattactgtcggtattatcgccatcccgctcgctatggcgctagccatcggcagtggtgtcgcgccacagtatgggctttataccgccgctatcgccgggatagttatcgcgataaccggcggctcacgctatagtgtttccggccctaccgccgctttcgttgtcattctctatccggtctctcaacaatttggtctgagtggtttgctcattgcaacattaatgtcaggcattattttgctggtgatgggattagcccgctttggtaaattgatcgagtatattccgctacccgtcacactcggttttacttctggaatcgcgataactatcgcaaccatgcaagtaaaagatttttttggtctgcaattggaacatatgccagagaattatatcaataaggttgtggctctgtttcaagctctgccaacgctgtatgtgagtgatacgctgattggcctgacgacacttgctgttctgatttattggcctaagcttaggctgaaattacccgggcatcttcctgctctcattgcaggaactgctgtgatggggatcatgaacttattcgatcaacatgttgctactattggttctgaatttagttatatattgaatgatggtacacaagggcaaggtatccctcccatcctaccgcaatttgttttaccgtggcatttacctgatatgggtgctcatcaggttgatataagttggtcaacggtttcagccctattacccgccgccttttcaatggcaatgttaggtgccattgagtcactgctttgtgccgtggttttggatggtatgaccggtaagaagcatcactcaaacagtgaattgattggtcaagggttgggaaatattgccgcaccattcttcggtggcattacagctaccgccgcaatcgcccgctcagccgccaatatcagagccggcgcaacatcaccggtttcagccattgttcactctctgctcgtgttattgactttactggcattggcccccatgctctcctatcttcctctggccgctatgtctgccttgttgcttatggtcgcctggaatatgagtgaaatacataaagttatcgatctgatccgccgtgcaccaagggatgacattattgtgctggtgctttgtatgtcgctcacggtgctgtttgatatggttatcgcaattacgatcggtatcgtattagcttcactgctgtttatgcgtcgaatagctaatatgactcgcatcagtcaattgccacaaaccaatgtcgataaagctctgctggttgttcgtatcaatggcccgctattctttgccgccgctgaacgtatcttcaccgaattaaaggaagaaagcgccagttatcagacaattctcatgcaatgggatgccgttcctgtgctagatgccggtgggctgcacgctttccagcgttttattgatgaagtgggtaaggataaatatattgctgtttgtgatattccatttcagccgttaaaaacactggccagagccagaatacaattgattgaaaatcaccttagctttcatgcaacattgccacgagcaatggaagagttgaatttcaatagcaaaacagttaactaa

SEQ ID NO: 6797 - DNA, 855 bp, Photorhabdus luminescens
atgcaacagaaagtggttcatattggtgatatcaaggtcgcgaatgatctgccgtttgttctctttggtggtatgaatgtccttgagtcacgggatttggccatgagtatttgtgagcactatgtgacagtgacacaaaaattgggcattccttatgttttcaaagcctcctttgataaagcaaaccgatcatcaattcactcttaccgcggcccgggtctggaagagggaatgaagatttttcaggaactgaaacaaactttcggtgtgaaaatcatcactgacgtgcatgagtcggcacaggcacaaccggtggcggaagtggttgatgtcatccaactgccggcatttctggcgcgtcagactgatttagttgaggcgatggcgcgtaccggtgcggtgatcaacgttaaaaaaccccagtttattagcccgggtcagatgggaaatattgtggataaattcaaagagggcggcaacgatcaggtgatcttatgtgaccgtggcagcaactttggttatgacaatttggtggtggatatgttgggcttcaatgttatggctcaggcaacgggggggcatccggtcatttttgatgtcactcattcactccaatgccgcgatccatttggtgcagcgtctggtggtcgtcgtgctcaggttgctgaactggcgcgtgcgggaatggcagtcggcattgctggcttgttccttgaagcgcatcctgatccggcgaatgcaatgtgcgatggtccatcagcattgccgttggcaaaacttgagccattcttgagccagatgaaagcgattgatgatgtggtgaaaagtttccctcaactggataccagtaaataa

SEQ ID NO: 6798 - DNA, 810 bp, Photorhabdus luminescens
atgaaagccatagctgattatgaatttaataatgcatcgttaagtagcggtatcctgttaatttcccgaacattgcgttctgattttcctcagcattcagtggaaatgcagcttcaagcattgattgatgaagccagacgtgaaatatctccgcagttaactatagaagaacggttggaaaaattactgaggcttttttatcaaagctggaaattcggcggtgccggtggtgtttattgtctgtcggatacattatggctagataaagtactgcaaactcgccaaggttcctctgctgttttaggggtaattcttatccatattgctcaggctttagcgctaccgtttatgccggtggtttttccaacccagttgattttgcgtgttgattatccagataacacggcgaggtttattaatccactcaatggtgaagcgttaagtgaatatgtgcttgatgtgtggcttaaaggcaatattagtcagacagctaaattaacagccgatgatttgcaaggagcggataacgccagcattatacgtaaagtgctggatacaataaaagctgcattgatggacgaagggcagatggaattggcactgagaacgagcgaagctgtgctgatatttgatcccgataacccctatgaaatacgtgatagggggctgatttatgcggaacttgattgtaatcatattgcggtttctgatttaaattattttgtggagcactgcccggaggacccggtggcagaaatggtcagaatgcagatatatgctattcagcagcaatgcattgttttacattga

SEQ ID NO: 6799 - DNA, 849 bp, Photorhabdus luminescens
atggattatctatcttggcttaaacaagccacaatgcagttatcggcaagtgacagtcctaaacgagatgcagaaattttgttggggtttgtcactcaccattcccgaacttatctattggcattcggtgaaactcagttggctccagagcagttcagccagcttgaggctttactcgctcgccgggtgaaaggtgaacctattgcctacatcaccggtgagcgtgaattctggtcgttgccattaaatgtctctcccgctacgttaatcccacgtcctgatacagaatgtctggtagaaaaggcacttgaacggctatcgctgacaccttgccgcattctggatttgggaacgggaaccggcgcaattgcattggcaatcgcgagtgagcgccctgattgccgggttaccggggttgatatcaatcctgatgcggtgatgctggcgcagggcaatgctgaaaaactcaaaatacaaaatgtggattttttgttaagtaattggtttttttcgttgaataatcaacagtttggtatgattgtcagtaatccgccttatatagatgaaaccgatccacatctatctcagggcgatgttcggtttgagccagatagtgcattaattgcggcaaaacagggaattgctgatctgaataccattattgatctatctcgccattttttgttacctggtgggtggttgttattggaacatggttggaaacagggaaatgttataagaagcctgttttctgaaagtggttatcggcaggtagctacttttcaggattatggcggtaatgagcgaataacacagggtcagtggaaaagtgatgaaagccatagctga

SEQ ID NO: 6800 - DNA, 1083 bp, Photorhabdus luminescens
atgaagccttctattgttgctaaattggaagcattgcaagaacgtcacgaggaagttttggctcatctcggtgatgccgatgtgattgctgatcaggaacgttttcgtgctttgtcgcgggaatatgctcaactgactgatgtgacgaactgttttaaggcctggagtgcggttcaggatgatcttaaagcagccgaaataatgcttgatgaccctgaaatgcgggaaatggcacaggaagagatcagggacgctaaggttcgcaatgaagaattagagcagcaactgcaattgttgctgttgccgaaagatcctgatgatgagcgtaactgttttcttgaagtgcgtgcaggaaccggtggtgatgaagcggcgattttcgccggggatttgtttcgtatgtacagccgttatgctgaatcccgtcgttggaaagttgaagtcatcagtgctaacgatggtgagcatggtggctataaggaaattattgcgaaagtttccggtgagcaggtttatggtcatttaaaatttgaatcgggtggtcatcgtgttcaacgtgtaccggaaaccgaatcgcaggggcgtattcacacttctgcttgtaccgttgcggttttgccggagatcccggacgccgagttgccggaaatcagtccaagtgatctgcgtattgatacgttccgttcatcgggtgcgggtggacagcatgtcaacaccacggattccgccatccgtatcactcatattccaactggcattgtcgttgaatgtcaggatgaacgttcacagcataaaaacaaagcgaaagcgatgtcggtattggcggcccgtattcgcgctgcggaggttcgtaaacgtcaggaagcggaagcttctgagcgccgtaacttgctgggttccggtgatcgttcagatcgcaatcgtacttacaatttcccgcaagggcgggtgacggatcaccgcattaacctcactttgtaccgccttgatgaagtgatagaaggcaaattggatatgcttgttcagccgattgtgaatgagtatcaggctgatctattatcggctttgtcagagcaggattga

SEQ ID NO: 6801 - DNA, 1263 bp, Photorhabdus luminescens
atgactttgttagcacttggtattaaccataaaacggcccctgtatccttgcgtgaacgggtgactttttctccagatacgattggtgaagcgcttgataacctcctccagcatcccttggtgaaagggggggttgtgttgtcaacgtgtaatcgtacggagctttatctcagcgtagaacagcaagataatctgtatgagcagttaattggctggttgtgtgaataccatcaactgaatcccagagagctaaaatccagtatttactggcattgtgataatgaagccgttagccacttgatgagagtggcgagtgggctggattcgttggtacttggggaacctcagattcttgggcaagtgaagaaagcatttgccgagtcgcagcacagccactctttatcgagtgaactggagcgactatttcagaaatcattttctgttgccaagcgcatcagaacggaaacagagattggttcgaatgcggtttctgttgcatttgccgcttgtaccttggcgcggcagatttttgaatcactttctgaactgaatattttgctggtaggtgccggagaaaccattgagctagcggctcgtcatttgagagagcatcgtgtgcaccatatgatgattgctaacaggacaaaagagaaggcacaggtattggctgatgaagttcaggcggaagtgatcaccttgcctgaaattgatatacgtttagctgaagctgatattgttatcagttcgacggccagcccgctgcctattattggtaaagggatggttgaacgtgcattaaagttacgccgtaaccaaccgatgttgctcgttgacattgcggttcctcgtgatatagagcctgatgtggaaaaactcaataacgtctatctctacagtgttgacgatttgcaggcaattattcagcagaatcttgcgcagcgcaaagcagcggcggttcaggctgaatgtattgttcagcaggaaagccgttattttatggattggttgcgttcgcagagtgcagtgaattcaatccgtgagtatcgtaatcaggcagaacagatgcgggctgagatggcggctaaggcactgactgctatcaatcagggagctgacgtagaacaggcaatcaatcaattgactcatcaattgatgaaccgcttgatacatgctcctaccaaatcactccagcaagcagccagcaatggtgatctggagcgtcttaatttattacgtgacagcctggggctggaacataattaa

SEQ ID NO: 6802 - DNA, 627 bp, Photorhabdus luminescens
atgaagccaatacaaaaattatcactattccgcctattgccactctcttgtgtactactgttgaccgcctgtacattaacacaacctggcggaacaggttcggcggattctcctcaatggcgagcacatacccaacagctacagcaattaaatcaatatcaaacacgtggatcttttgcctatctgtctaatgagaaaaaagtttatgcccgctttttctggcaacaatatcatcctgaacgctaccgtttattactgactaacccactgggcagcacggaattagaactgatcgttcagccaaacatgacgcaattaaccgatagtcaaggtaaaaaatattttagtgataaccccgaagagataatttatcagttcaccaatatggatattccattagataatctgcggcattggataacgggtctccccggtgatgccaaaaactttaaactggatgctaactatctattgaaaaccgtcaattaccagcaaaatggcgcaacatggcaggttaactatcaatcctacgatacctcaaccacccccgcccttcccaaccgtctggaactgattcagggtgatcgccgcattaaactgaaaatggataactggaccacaaaataa

SEQ ID NO: 6803 - DNA, 876 bp, Photorhabdus luminescens
atgacattcacttggccctcaccggcaaaactgaacctatttctctatatcaccggtcgtcgcgctgacggttaccaccagttacaaacgctatttcaatttcttaattatggtgatgaaattacgattacccctcgtcaggataatgaaattcgtttactgacacccgtggagggagtggaacacgataacaacctgattgttcgcgcagcacgtctcctgcaatcctatagcgacaaacaccatgcgggtattgctcataaaggtgctgatattcatatcaacaaacgtctgccaatgggcggtgggttaggcggaggttcatccaatgccgctaccgtactcatagccctgaattatcactggcaaaccggtttcacagacgaaacactggccgccctcggcgtaagtcttggtgctgatgtgcccatctttgtcaaagggcatgccgcattcgcagaaggtattggtgaaatcctgcacatagccgagccggaagaaaaatggtatctggttgcgcatcctggtattgaaatctcaactctgcgtgtcttcacagatccagaattaaaacgtgatacaccaattcgccctctggccgcattattaaaggctccgtacctaaatgattgtgaatctcttgtaagaaaacgtttccgtaaggttgaacagcttctttcatggctgctagaatacgcgccgtcacgcctgaccggaaccggtgcatgtgtattcggtgaatttgaatcagaagcatcggcccgtaaggtgttaaatcaagcccctgagtggttgcagggttttgttgcgcgtggcgttaacaattcacctttgcacaatttccgctctgggatacccgtgttattgagccaatga

SEQ ID NO: 6804 - DNA, 948 bp, Photorhabdus luminescens
gtgcccgatatgaagctttttgctggtaacgctatcccggaactagcacaacgtgttgccaaccgcctgtacactaatcttggagatgctgctgtcggccgtttcagcgacggtgaagtcagcgtgcaagttaacgaaaatgtgcgtggtggtgatattttcatcatccagtccacttgtgcaccgactaacgacaacctgatggaattagtcgttatggtggatgcactgcgtcgtgcttccgcaggacgtattaccgcagtaatcccttatttcggttatgcccgtcaggaccgtcgagtccgttccgcccgtgtgccaattaccgccaaagttgttgcagacttcctgtccagtgtcggtgtagaccgcgtactgactgttgatctgcatgctgaacagatccaaggtttctttgatgttccggttgataacgtatttggcagtccaattctgctggaagatatgctacagaaagagttagaaaaccctatcgttgtttccccggatattggcggggttgtccgcgcacgtgctattgctaaactgctgaatgataccgatatggccattatcgataaacgccgcccacgcgctaacgtttctcaagtgatgcatattatcggtgatgttgctggccgcgactgcgtgctggtcgatgacatgatcgataccggaggcaccttatgcaaagcggctgaagcattgaaagaacgcggagcaaaacgtgtatttgcctatgctactcacccgattttctccggcaatgcggtggataacattaaaaactcggtgattgatgaagtggttgtttgtgacaccatcccattgtctgctgagatcaaagcgctcaataaagttcgtactctcactttgtccggtatgttagctgaagcgatccggcgtatcagtaatgaagagtcaatttctgcgatgtttgagcactaa

SEQ ID NO: 6805 - DNA, 276 bp, Photorhabdus luminescens
atgaaacgtcaaagtgccttcatagtcggtaatgtattgatgggtgtcggtatgttcaccatagtgagtagcctggtttatacattactgcctcacatcttcggttttggctggcctgagtttttatctgaagcagcgctattgggcgtttttattggtgcgcttgtttggttggctggtgccggtgtgggaggccgggaaggtgtggcagatcgttattggtggctaagaaactatgatgagcgttatcgtcgtggtagtcatcggtatccataa

SEQ ID NO: 6806 - DNA, 969 bp, Photorhabdus luminescens
atgaatgacgaacaagcaccaaaagaggctaaaacattaaattggctatcaagtgaaaaaacggaaactgcggataaaccgatagatatcggtgtaagcgcaatccaggatggttatttattgcatggggtgaatataattttcacgttagataatcaatctatggtatttaaagagaataatgatcgtaaaattataaaaggtacaggagtactgggtaaggtatcagttgaaataatctctactgattcaactccgtgtcaagggaatgtgtatgcttgcttggaagatgatactgaaatagaagcccctcctctccaggtcgagtttactgttgctcctcaatcggtggcagtgcttaatcttgacttagaaaaaaataatgcatggactaagggtgccgatgagaataaggtagttgcaacggtgtatgatcggttgggtaatggaattaaaaaccaagaaataaccttctatgcagatagtggagcaacagtagttccgtcgtcggggatgacagataaagatggtaagataacggcgtcaatacaatctagtcgtgctggtgaagtgatactaatggcacaagcgggagctattgaaaaggctatagctatgtgtttcacgtataatccatatcagttaaagattatagaatttccggctgtgctgtattcattttcaagcggtattatagctggatatttatataagaatggcgtaggtgaacctaatgtcactataggagtatctatgggatcttatctgtcattgagtgatcaagacaagcatatgactaccgataaaaatggctattttagctttagagtttcttcttcttattctcgggggtattcgcctcataatcatgtacctcccatgagtgaattttcatcggtgtatataagttgtattgatgggagggtatattctcaagcgtggatagaattaaccccagggctatattag

SEQ ID NO: 6807 - DNA, 1326 bp, Photorhabdus luminescens
atgattaccaataacgacaatacacctatttctttatcgtcgccagaattgccgcaagcagaacacgatggcctgattgatgtttctgttcaacagaaccaagatttaattatcaaagtaccttatcatgagtggctaagaatcggggatatgatcgtggtaaatgttggggggatattttctcggccctattatattcagaatattaatcttgatttttttactgtaactattccgttctctgaaataccggatggttgctataatgtgacttatacatcagccgatgatttcgagaatgaaaatttctctaaaccggctgttattaaaattattaattccccatcgataaaattattaccatccatttatccagattcaacatctggcgtgattcactattcatctcttgtacaacatagtgggttaaatgtgcatattagttatcagcagatgcagaaaggcgatagcgtcatattccactggcaagggcataattttgactatgatccgattgcgagggcggcctgggatgcacaaccaataacagtcagtgatgaggatgttaagcagggttatgtttctttagtggtgccggcggaaaatgtgctttgtttgggtcaagagggcgtgggaacagggtattatgaggttggtaataatagttctgctccaggttcagtgatattgtcgctaacggatatgtcatctgccatgatatcaattagtgaaggtgcgccgatggtatctaatgaatatcccagaataaacccgaaaaatttagctgtggtttatgggccgccaggaaagagattatcggccagtgttgaatcaggcagtattgttgaagggggtggtgcaaaatatcagttttcccctaatagtttcgggctggcttatttccatttgcaatctgaggtagcgggtagttttcgttgtactgtttcggcggaggatggttctataacaccgggtgtaagtcaggcagtatttagtgagtggagagatggaggaaatattatcagtgcttatgcatttacctctgaagtacctgctgatggcgtgagtgtttgtagtggttatgttattgtggaccgtactgtctattccggtaaaagattacttgttcgtactgatggctccgcgataatttcaggttatggtgataatgaaagagagttgcaggttgcgattagtaaagatggttgtacaactttccatataactaataccaaagcagaaaaaaataatgtgataataagtttacccgatactgataagtcgattcaattttctattaattttaaacactttccttttgtttag

SEQ ID NO: 6808 - DNA, 1599 bp, Photorhabdus luminescens
ttgtggaagtgtattaattttgatagaaaattagatgttttttacttattgatgtttaactttaatatgagattgaatatgtctacacttacagcagatatcgtttcaggaataacgattttagaagggtgtccagttgttatcactgtgacttattcaggtgatgaggttcataaagtaacggaagcgactgatatagtgtacagtgaccagcaagatgtcagttttgatgagattccgcgtatttcaagggatgtcaagaataatatctacactgcaaaatttgttgtttctgcttattctgatgccagtgatttcaccataatgttttcaatggataaagctaccgatcctgatgctaaattagagattgagtttcattctattggtaaaaatgatttttcatacgaagggtttacccctataattattggcgattcgtgggtaaaagatttttctccggcagaagataattggcgaccttcactatttaatgacagactgcttattaatatttatgctttgaataaaaaaaatgatccacttccttattttcaaattcctctggtaacggataagccagtgcgtatttttggttataatagagggcaaattagggaagaaatattgccgtttattagtgaaaaagataattgtcaatattatattaatacagatagtaaaggatttattgccttaatagttttccctaagaaatctgagggtaactattcagtgaatatgttgacaaaactgccatatcttttaaaaagcgcttcatcaaacattttgatgattaccgaagatattgagccaacgcttccagcgccagatattgcagaactgaatggtaataaattaatgccatcagtaggaaatagcaatacagattttcatgtgattattccattttatgaaggtgttaggccgagggatagagtttttttaataattagagaagatgatgacgaaacgcaaggtgcgtctgctgtcattactgatctgaatcagttggatatgtcatttatttcagttccatatgccaatattccaaatactggcaataatgagttgtattattatgtggctgatgcaactggaaacgtcgctgtatcatctgcccgctattttaatttaacgaagccagtactaaatgtaccaccagagattaggcgtatattagcggtacccagaattttcagtcataaagatcaggtagaatttagacagtcaagcaagattaatcttgcaagtattttaggaggagggttggatgctcatattgctgtgggtgaaaagaatgggatagagataaataatgtcattaatgtacgtatttacgttaatggtattatcaatgagaatccattttcaaagatttattctcttgcacctcatacggtaactgccgacgtaatggacgctggagaagctattattccacttggtcgggcgatttttactaatgtaaattcatatcgtgatggtacgccaggctgggtttatatcacttatagtgtaggcatggagtgtagtgaaagtacaaagcactctaagatttggtatggacgcattgatacggttccccccggacgataa

SEQ ID NO: 6809 - DNA, 1503 bp, Photorhabdus luminescens
atgtcgatacttacagcagatatcgtttcaggaataacggttttagaagagtgcccggttgttattacggtgacttattcaggtgatgagtctcataaagtaacggaaacgacggatatagtgtacagtgaccagaaagatgtcagttttgatgaaacccctcgtatttcaagggatgtcaagaataatatctgcactgcaaaatttgttgttactgctcattctgtcgccaatgatttcaccataatattttcaatggataagactacggaccccgatgctaaattagagatagcatttcatcctattgataaaaatggtttttcacatgcagcgtttgaacctatgattattggcgattcgttggtaaaagacttatctccggtagcggatgatgagcaaccttctgagtttaacggcagcctcattgttaatatctatgcgctgaataaaacagatgatccgttgccttattttcaaattcccttggtaactgataggatggtacgtatttttggttatgaggaaggacaacttacggaagaaatatttccttttattcaagaactcaataatagtaaatactatattaatacgaatagtgaaggttttgctgccttaagagctttccctagcaagggagaggggggtaactatacagtcaatatgtttacagagttgcagggtttttcaaggaaatcttcgtcaaatattctgtttattacagaagatattgctccaacccttgtgatgccagatattaaagagttagatggcgatagattaataccatcagtgggaaatagtagcacgggttttcatgtgagtatcccattttatgaaggtgctaaaccgaaagatagaatcttcttaatgatcagggaagataatgatgaaatacaaagtacatctactgtcattactgatctgaatcagttggatagtccgtttatttcagctccatatgccagtattccaaatattggcgataatgagttatactattatgtggctgatacaatgggaaacgtagctatatcatcttccctctatttttatttaacgaagtcagtaccgaatcaaccgccagagattaggcgtacattagcggcagctagaatttttactcataaagatcagagcgaacttaaacagcgaggtaagatcaatcttgtaaaaattttagggggagggctggatgcgcgtattgctgtgggtaaaaaaaatggaatagatgtggatagtattatcaatgtacgtatttacgttaatggtattgtcaatcatagcccatcttcaaaaatttattctcttgaacctcatacggtaactgccgaagaagtggcggcaggagaggctattattctgcttggtcaggcaccttttaccggtgtggactcgtatgatgatggaccaggattagtttatgtcacttatagtgtaaatataaagaactccaagatttggtttggacgcattgatacggttccccccggacaataa

SEQ ID NO: 6810 - DNA, 1503 bp, Photorhabdus luminescens
atgtcaatacttacaacagatatcgtttcaggaataacggttttagaagcgtgcccggttgtcattactgtgacttattcaggtgatgatacacataaagtaacggaaacgactgacataatgtacagtcacccaaaaaatacccgttttgataagacccctcgtattttaagagatgtcgagaataatacctgtactgcaaaatttgttgttactgctggttctgacgctggtgatttcatcataacattttcaatggataaggctacggaccccgatgctgaattggggattgcatttcattctattgataaaaatgatttttcacatgcagcgtttgaacctatcattattggcgattcgttgataaaagacttatctccggtagctgatgatgaacgaccttctgaatttaatggcagcttgcttattaatatctatgcgttgagtaaaacaaatgagccgttaccctattttcaaatccctctggtaattgataatttagtacgtatttttgggtatgatggagaaaacattacggaagaaatattgccttttattaaagaaatcaataataataaatactatattaatacggatgataaaggttttgttgctttaagggttttccctcgtaaggagaagattggtaattataccgttgatatgttcatagaattgccgggttttttaaagaacgcttcatcaaatattcttttcattatagaagacactgctccagcgcttcctgcgccagacattgaagagctggatggaaatagattaacgccatcagtaggaaatagtagcacggggtttcatgtgagtatcccattttataaaggtgctaaaccgagagataggatttttttagtaattagagaagataatgacgaaacgctaggtgcgtctactgtcattactgatctgtatcagttgaataatccatttattttagttccatatgccagcgttccaaatattggcgacaatgaattatgttattatgtggctgatgtagtgggaaatgtagctatgtcttctgctctctattttaatttaacagggtcagtaccgaatgaaccaccagaagttaagcggacattagcagtacccagaatctttgctcataaacagcagttagaatttgaacagtcaggtaggatcaatcttgaaaatattttaggaggagggttgaatgcccatattgctgtgggtcaaaacaatggaatagatgtggatagtgttattaatgtacgtatttacgttaatggtattgtaaatgataacccatcctcacgactttattctcttgatcctcatacggtaactgccgatgaagtggctgctggagaaactattattcagcttggccaggctccttttactaaggtaggttcgtattgtgatggtacaccaggctcagtttatatcacttatagtgtagacacgaaggagtctgagatttggagtgggcacattaatactgctccagtaggataa

SEQ ID NO: 6811 - DNA, 1503 bp, Photorhabdus luminescens
atgtcgacacttacagcagatatagtttcaggaataacggttttagaagcgtgccaagttgttatcacagtgacttattcaggtgatgatgctcataaagtaacggaaacgactggcatagtgcacagtacccccaaaaatacctattttgataaaattcctcgtatttcaagagatgttgagaaaaatacctgcactgcgaaatttgttgttactgctaattctggcactggtgattttaccatagaattttcagtggatagggctacggaccccgatgctaaattagaaattgcatttcattctattgataaaaatggtttttcacatgcagcatttgaacctatcattattggtgattcgctgataaaagatttatctccggcagcagataatgaggagccttctgattttaatggtaacctcctcgttaatctatatgcgctgagtaaaacaaatgatccattaccctattttcaaattcccctggtaacggataaattagtacgtatttttaggtatgatagggaaaaaattacggaagaaatatttccttttattcaagaactgaataataataaatactatattaatacagatgataaaggttttgttgccttaaagatttttcccagtcaggaggaagatgggaactatgcagttaatatgttcactgaattgcagggtttttcaaggaaatcttcatcaaatattctgtttattacagaagacattgctccagcgctggtgatgccagatatagaagagctggacggtgatagattaacgccatcaacaggatatagcaatacaggttttcatgtgagtatcccgttctatgaaggtgttaaaccgagagatagaattttcttaatgatcagagaagataatgatgaaacgccaagtgcgtccactgtcattactgatctgagtcagttggatataccatctattttagttccatatgccagtattccaaatattggcaataatgggttatactattacgtagctgatgtaataggaaacataactatgtcatctgccctctattttaatttaacgagatcaacaccaaatataccaccagagattaagcgtatattagcgagacctagaatctttaatcataaacgacagaaggaatttagttggccaggtaagattagttttaagtatattttaggtggagggttggatgcccatattgctgtgggtaaaaacagtggaatagaggtaaatcatgtcattaatgtacgtatttacgttaatggtattatcaatgataatccatcttcgaaaatttattctattgatcctcatacggtaactgccgacgaagtggcggcaggagagactattattccacttggtcaggcgttttttactaatatagattcatatgatgatggtacgccaggcttggtttatatcacttacagcgtaggcaaaaacgaatctaagatttggtttggacatattgatactgttccacctaggtaa

SEQ ID NO: 6812 - DNA, 5088 bp, Photorhabdus luminescens
atgctactaaaaagttatcctgctttatctgaaccagtaaagtctttgattggtattgaaaattgccaggaatacccagaggcagttatagagcataatattgatagcaaaaaacagataaccgagcaggctagcaataagttacacgaaaacgttacttataaagagaaaaagcgatcagagccgaggagatgtggtaattttttatcaaagagaagcgtagtaggaaaaaacgatagcggtgaaaaaccaaaaatactgtggttagacgaagatagtcataaagacggtaatcaccccctccctcctttaattttatctcatggcactaaaatccttggattattaaattcagatccgaaaaaattggcacaggattatattgttaataaattaaacagtcagataacaagtaatacccagaagtggttatcacagtttggtacagctaaaattaatttaaatgttgatcatcgtgggcgactggatgaaagttctgtagacttactcgttcctttttatgatgataaagatcattggcttgtttatagtcaatatggctatcgtcataaagatagccgtgacactgtgaatttaggcattggcacccgtttattcataaataactggatgtatggggcgaacactttttacgataatgatttaactggtaataatagccgattcagcttgggtggtgaactatggactaactacctaaagatgtctgctaacgcctattttcgcctgagtgattggcataacgcccgtgatttagtcaattattatgagcgccctgccaatggttatgaccttattgccgacatgtatttaccttcaatgccgtcactcggtgccaaaataaaatatgaacaatattttggtgataatgttgcattattcggaaagaacaagagacaaaaagatccctatgcggcaactattggggtaaattataccccaattccactgatcacagcagggattgactataaattaggaaaagagggaaaaagtgatggtatattttcattcaatgtgaattaccgatttggtgttccgttgtcagaacaactttcaccagaaaatgtctcttcactacgaagcttggccggcagtcgttacgacttagttgaaagaaataataatattattttgaattatctgaaaaaacagcaacattttaggttactggtccctgtaatagaaattagtagttacggtggtgaagttaaaccaatacaaattcaatctgatactccattcaaaaatgtgacttgggatatacctgaattattccagaagaatggcgggatgataaatatagaaagtactcatggttataccattcagttaccggaatatcagcctgatggaaaaaatgactatactataacaggtacaagtaaagatgatcagctgagggtgcaaatacaagctcatgtattacaacgtaatatctctttgagtgttaatacaaccgatcctttaattgctgatggaaatgcgaaatatgtctatacagctaccctgcttggcgctgacaaaaaaacgccgatagaaaatgccaaattgatttgggatacggataaaaaagatcctggattgaaattaaagcctgattcagaagcaacagataaaaatggacaacagactgcaacattaaccagtacaacgccattatccgatatacaagttagcgtcaggattaatggcgaacgtgttactacggataaaaaagtcagttttacggagtccagcagcagctatcgagtcaccggcgtgacggtgggtgtggataaagacaagaagcgctacaacaacggtgctgacagttataccttcacggcgacggtggtagatgggcatggcaagccggtggcggataaactaatcgacattgactggcagacagactcaaaggttgacggactaaaactgacgaaacagaacaactcggtgagtaacgcgcagggacaggtgactgcgaccttaaccagcacggcggcggtggagaatgtgcaggtatcggcgaaaacagccagccagcagacggcggtgaacgcgaacggcaaagtcagttttacggagttcagcaccagctattatgtcgccagcgtgacgatggaagtggataaagacaaagtacgctacaacaacggcagtgacagttataccttcacggcgacagtaaaggacgggcacggcaatctggtgatgggtcaaccggtcaacattgactggcagacagatccaaaggctgacggactaaaactgacgaaacagaacaactcggtgagtaacgcgcagggacaggtgactgcgaccttaaccagcacggcggcggtggagaatgtgcaggtatcggcgaaaacagccagccagcagacggcggtgaacgcgaacggcaaagtcagttttacggagttcagcaccagctattatgtcgccagcgtgacggtggaagtggataaagacaaggcgcactacaacaacggcagtgacagttataccttcacagcgacagtgaaggacgggcacggcaatctggtggtgggtcaaccggtcaacattgactggcagacaaatccaaaggctgacgggttaaaactgacgaaacagagcaattcggtgagtaacgcgcaggggcaggtgaccgcgaccttaaccagtacagtggcggtggagaatgtgcaggtatcggcgaaaacagccagccagcagacggcggtgaacgcgaacggcaaagtcagttttacggagttcagcaccagctattatgtcgccagcgtgacggtggaagtggataaagacaaggcgcactacaacaacggcagtgacagttataccttcacggcgacagtgaaggacgggcacggcaatctggtggtgggtcaaccggtcaacattgactggcagacagatccaaaggctgacgggctaaaactgacgaaacagaacaactcggtgagtaacgcgcagggacaggtgaccgcgaccttaatcagcacggcggcggtgaaggatgtgcaggtatcggcgaaggcggtggcgaacccgtcatgggtcgaggctgatcgaaaggtgagctttgaggagctgagcctcagctatcaagtcaccggcgtgacggtggaagtggataaagacgagaagcgctataacaacggtactgacagttataccttcacggcgacggtagtggatgcgcatggcaagccggtagcggataagccaatcgacattgactggcagacaaacccgaaggctgatgggttaaccctgacgaaacaaagcaatccggtgagtaacgcgcagggacaggtgacggcgatcttaaccagcacggcggcggtgaaggatgtgcaggtatcggcgaaggcggcggcgaacccgtcatgggtcgatgctgatcgaaaggtgagctttgaggagctgagtctcagttatcaagtcaccggcgtgacggtggaagtggataaagataaggcgcactacaacaacggcactgacagttataccttcacggcgacggtggtggatgggcatggcaagccggtagcggataaaccgatcgacattgactggcagacagagccaacggttgaggggttaaagctgacgaaacagaacaactcagtgagtaacgcgcagggacaggtgacggcgaccttaaccagtacagcggcggtggagaatgtgcaggtatcggcgaaaacagccagccagaagacggcggagaatgcgaacggcaaagtcagttttacggagttcagcgccagctattatgtcgccagcgtgacggtggaagtggataaagacgagaagcactacaacaacggtactgacagttatatcttcacggcgacagtgaaggatgggcacggcaatctggtggtgggtcaaccggtcgacattgactggcagacagatccaaaggctgacgggttaaaactgacgaaacagaacaactcagtgagtaatgcgcagggacaggtgaccgcgaccttaaccagtacagtggtagcgattgatgtacaagtgtccgcaaaaacagctactcagcagacgccggtgaatgtagataaaaaagtcagttttatcagccctgatgagcttgcttctcttactgttagcccagatcacgtaacagaaggagaaggcgaggggcatacttataccttcactgccacagtaaaagatttttccgggcaggcgaaaagcggtattacggtggcctggagtgcagcaaatagtaagggagtcaccattactgataaaaacttggtaactcaggtagtgggtgatggtaaaacagatgctgatgggaaagcgcaatatcaggtatatagtaaaagtggcgggtttgttgctgttatggtaacggccaaagtgaatgattcatctgttggttctaagaataaaacggtagaaattaaggctaatgagcaggatgttactgacttctttataatggattatgacactaaagatggaaaaggacccgggcgttcggttccaaaagaaagaatgaattttgcttggccaaaaatgaggtttgaacccgagtatttgcctggagaattaactatagctggttatactggagtatatgactcaagtaataggaacgtagttgatgtggatggacattattttcaagttaaaaaagcaggaacggctacattaactacgacgtttacacacccagaatctggccggtatttaaaatatattattcccgatgtgaaaattgatcactttgtaattgttgattctagctcgacagggccggggattggttccgcttactcgaaggatcgtattgacacgagtaagcctttacctagttgtacaagaggaaataggataaaggagagtgatcttggtggttcaattgattatttggttaaggatttgaatttgaatcttattgataagggtttattaggagatccacgagcttcgttaaattctaacggaataacaatgggagggctacaaataaatgacgaaagtattcaggttcatttgttgaaggagaaagatccaaatgcaattttttatgtggttttatgtgaagagtag

SEQ ID NO: 6813 - DNA, 1941 bp, Photorhabdus luminescens
atgaatcaaaaaaatgattttaaagctttttctattagtaataatgctaatgtggtgagtcaagaaggatatgaagaaagccagagtttaaaaacgggatttccaccagatcatattacgattcatttactaaacaaggcgttacgtcagtcgtcaaccataacatctgttgtggctagttttatcgcaacatattccggtaatgatgttctggatgatggggatatagccaaacttattgtccaattaaatagagcattagaacaaaaaatcggaatagcagtaccaagtgcttcattaacacaaaaaggtgttatccagctcacagatacaataggtaatagtaataccctcgcggtaacgcagaaactggtttctgatgtaaatgataatgcgaataaccgattggcaaaaaatcaaaatggcgcagatattcctgataagagcgggtttgtgaaaaacctcggcttatcggaaacagtggaattggcgaaaaatgcggtatcggccaatggcgggaattatccacagtattttaggtttaaacaggttgaaacactgcccaccgaacgtaatgcgacgatgttagtttctttgcagggagccagaccgcaaaatgggctagtcgggtttacgcattacaactggtatgacaattatattaaaacaggtattgtgcgtggtggtaatgttaatacctacggatatgcgatagatattaatgacaaacgggttttttctgtttctcctgagggtttgattgaagccgcgtcagcgaatataaatgggaacgctaggtttaaacaggttgaaacactgcccaccgaacgtaatgcgacgatgttagtttctgaatctggtttaagatcgacgggtacaatagtctcgtatacgctttacaattggtatgacaattatgctaaagccggtattgtgcgtggtggtagtgctaatacctacggatatgcgatagatattaatgacaaacgggttttctctgtttctcctgcgggtctgatggaagccgcgtcagcgaatataaggggaaatgcgggggtttttaacataacccatgatacgggtaaacatgcatattttcagtttattgaggaagcaaaaaggacggcctatgttggattcccgagtgacggctcaccggattttgatatttgtaacgaaaaaaaatctagcaaattaaccattggtcgagagttggcggcatatattaataataatcgggttttctctgtttctcctgcggggcagattgatgccgggtcggcaaatttaaagggggccgggggtatttttaatataatatatgacacgggtagacacgcatattttcagtttgttgagggaggaaaaagaactgcctacattggagttccaggtgacggctcatcggattttgatatttgcaacgaaaaaaattatggcaggctgacagttggcgaaaagttgaaatataacggtaatcctattgctgtttttaatgataactgtattgctgatactaacggcaatcttaaaatatccagccctgtagtgagtattcatccagacggcacttatgaattaactcgcgaagcggaaggtatgactgtcgagcggatcgagacagggaaatatcgcatcagcggctgcaacggtttcgctaaagatggagcatggggaattcacggtggtacaattgtcccggcagatagcaacggattaaatttgatttgggtttgtgaatcagtagatccatctaatggcaatataaccatcgaatgttatcatcgtcaaaataaagatgcgccgatatttgctcaaaataaacgtgttaagagcgttaatagtgatggagaagtcatttattataatgatggtgaactctgtgatatccccgatggacgagtgattaatgttcgagttcaactgccggaaaaatcataa

SEQ ID NO: 6814 - DNA, 591 bp, Photorhabdus luminescens
gtgagtaacataaaattaatcgtcggtctggctaatcccggtgctgaatatgctcaaaccagacacaatgccggagcctggtatgttgatctactcgctcggagccacaatcaatcactgaaagaagagagtaaatttttcggttataccgcccggattaatatctgcggtcacgatgttcgtctgttagtcccgacgacgtttatgaatctcagtggtaaatctgtcgtagccctcgcctccttctaccgtattcaaccggatgaaattctggtggctcatgatgaactcgatttaccgcccggggtggcaaaaatgaagctgggtggtagtcatggcggtcataatggcttgaaagatattcagaacaaatttggcaataaccctaacttttatcgcttacgtattggtatcggccatcccggcgataaaaataaagtggttggctttgtgctaggcaaaccaccagccagtgaacaacagttgattgatgatgccattgatgaagcacggcgttgtactgatatcctgatgaaacaagatatggataaagcgatcaaccgtttacatagctttaaagccagcgtttga

SEQ ID NO: 6815 - DNA, 1092 bp, Photorhabdus luminescens
atgggattcaaatgcggtatcgttggcctgcctaacgtcggaaaatcaaccttattcaatgcgctgactaaagccggtatcgaagcagcaaacttcccgttctgcaccattgaacctaataccggtgtcgtccctatgccagatccacggcttgaacaactggctgaaattgtgaaacctcagcgaatcttaccgaccacaatggaattcgtcgatattgcgggtctggtgaaaggtgcatcaaaaggtgaaggcttgggcaaccagtttttaactaacattcgtgaaacagaagctatcggccatgttgtgcgctgctttgtcaatgacaatatcattcacgtttccggtcaagttgatcctgctgctgatattgagatcatcaataccgaactggccctttccgatctggacacctgcgaacgggccattcatcgtgtgcagaaaaaagccaaaggtggcgataaagaggccaaagcagaattggcagctctggaaaaatgtctgcctcatctggaacaagcgggtatgttgcgggcgttggatctcagtaccgaagagaaagcggctatccgctatttgagtttcctgacgctgaaacccaccatgtatatcgctaacgtcaacgaagagggtttcgaaaacaaccctcatctggatgcggttcgtgcgatcgcagaaaaagagggttcagtggtcgtaccggtttgtgcggcggtagaagcggatatcgcggagctggaagatgatgaacgcgaagaatttatggctgaacttgggctggaagaacccggtttaaatcgcgttatccgcgctggctatcagttactgaatctgcaaacttacttcaccgccggcgtgaaagaggttcgggcatggaccatcccagttggcgcaaccgcaccacaagcagccggtaagatccatactgattttgaaaaaggttttatccgcgcacaaaccatcccttttgaagatttcattacttacaaaggcgagcaaggggccaaagaggccggcaagatgcgttcagaaggtaaagactatatcgttaaagatggcgatgtaatgaatttcttgtttaatgtctaa

SEQ ID NO: 6816 - DNA, 1698 bp, Photorhabdus luminescens
atgttgctgaataatgtctttttcactattcaggctggtgaccgtattggtctgattggtcataacggcagtggaaaaagtacgctattaaaattattgacagcgcaactacttcctagcgttggcactattcactatgccagccattgtgtgactgcctatattgagcagcatttaccggaagacgtggaaaatcagccattaattgatgcggttttacaaaaattacctgttgatgaacgtgtgacagaacgctggcgtgcggaaattcttctgacacagctcggttttgctgaaaccttgtgggcacaacctgccagtcagctcagcggtgggcaacacacacgtctgctattaggcagggcattaatacaggagcctgatctgctattactggatgagccaagtaatcatctggatttacctactctatggtggttgggcaattttcttcagtcctggaaagggagttttattctggtttcccacgatcagactctgctcgataaggtcactaattgcacatggatattgcgcgacaagaccctctatttttatcgtttaccctgttctgaggcccgtcaagctctcgcagaaaaagatatgagtgatgaacatcgccatcagtttgaacagaacgagattgatcgtgttacgtccagtgccaaacgccttgcaaactggggacgcatttatgataacgaagatctggcacgcaaagcgaaacagatggaaaaacacattgaacgtttgaaagatgcgcagacagtattgactgaaggttaccagtggcagttgacattaaccggccagcctattcaggctgatcgcgttcttgaacttgactatgccaccataacagtacagggtggctcaataccactgtttaccaccggctttcatcaggtaaagagtggtgatcgcattgctatcattggtgccaatggttgtggtaaatcaaccttgttgcgactgttgtggcaacgttatctctcagcgatgcgccacagtcctgatataaagttccatccggccattacagcaggttattacgatcagcaattacaccaattgcatgataacgacagcctgatagatgcattacggccatttgcactactgacagacgaacagcgcaagatggcgctgattggtgccggttttgcttactcgtgccatcagcagaaagtggctactctcagtggtggtgaacgttcaaggttgctgtttgtgggactgagtttggcgaagtatgaattgatcatgctggatgagccgaccaaccatctggatattgaaggtaaagaagcattgtgtgagcaaattgcgacatttagtggtgcattacttgttgttagccatgatcgctggttgatcgaaaatagctgtcagcgtttttggtttatcaataacaaccagttggaagagtatcacgatgttgaggctatttatcagcaaattgaacagatgagtcagcagcaaagtaaacacaaagagtatggccgctatgcttcccacattgctgatgacaggttacaaccatccttattgctggaagagcaattactggagcgcctgttttatcttgaagaaaaactggaaatcgataggaaacgtaagattgctcaccaaaagccacatcttcagcagcagtggataaaggagatagaaaaaatacaggctcagttgaacctgtaa

SEQ ID NO: 6817 - DNA, 300 bp, Photorhabdus luminescens
ttggttaaaatattttgttgtatggtgggctttatttattcttggaaagtaaatgttattataaatattttcgaaatgaaatggatggaaaagagttactttcatatattggacagaaatggttttaatatatgtctggttttagggagtttaaaatttattgctatctttgcgcaaaataagcgtgttaagagtattaatgatgatggggaagttgtttattacaatgatggtgagttatgcgacattcctgatgggcgagtaattaacgttcgagtacaactgccagaaaaaccataa

SEQ ID NO: 6818 - DNA, 222 bp, Photorhabdus luminescens
atgccaatagttagccagaaaaggcaggtaacgttaccgcttgagcaatgttcgatagctaacattcagccaggtgatgagtatgagagtttcgtcagccgaaaaggagtcatctcaattgtcacaaagcgcaaaggggccgcgaaggggatattaaagggtatcctggccgatcaccaggtgagtgaagaagaatcacttgagagtgccatacacaaatga

SEQ ID NO: 6819 - DNA, 435 bp, Photorhabdus luminescens
atgattgcggtagatacaaatattgttctcagatatcttctgcaagatgacgcgaaccagtctcaaaaggccaatgcactttttgaaggcaaacaaaaaatcttgatcaccgatgtggtcttagtcgagacaatttggacattgagaggcaagcgttacttgctacctaaagaggcgctgatagaagtgttgcacaggctcattgaagagcctaatgttgtcttcgaagatggtcatgcgctctggtgtgcgttggatgactacatcaatgccaaaccgattaaatgcggcggcaagacgaagcaggccgactttgcggatgcattgatagtgaataagtctcagcggtatggcataaaaaacaaaaaatcggtttcgccgctttatacatttgataaagccgccttggagatcgatggtacagaagagccttag

SEQ ID NO: 6820 - DNA, 1212 bp, Photorhabdus luminescens
atgagttctaaaaatgattttaaagccttttctattggtaataatgctaatatagtgagtcaagaaggatatgaagaaagccggagtttaaagattgggtttccaccagacgacaatattactgttcatttgctcaataaggtattgcgtcagtcatcgacaatatcatctgttgtggctaattttattgcgacatattccggcgatgatgttttggataatggggatatcgctaaacttgccgcccaattaaatggcgcgttagaacaaaaaattgccaccgaagtaccaaatgcctcattaacacaaaaaggtgttactcagcttacagataaaactggcaacagtaataccctggcggtaacacagaagctagtttctgatgtgaatgataatgctaataaccgattggcaaaaggccaaaacggcgcagacattcctgataaaaaagcctttgtggaaaatctcgctttagaagtgattagtacaaaaccggttattgttgggaataatacagcttctacaatcgataattttgataacattcctcagaattcgacatattttggctatccagtagggttaaatggtccaggtgtacatggtcccggaatgagattttcaggagggtatgggacttttaagggttatgagctgatgattcactcctcatacttgccgaagagcgaattatactatagaacgcacaatggtgacggtaacatcaataaatggaatccgtggtataaagtctggtcaacaagcaacgccaaaccagatactaatggcaaccttaaagtttccagtccagtggtagatattcatccagacggaacttaccagttaacttgcgaagcggaaggggtgacggtcaagcgaatagagacagggaaatatcgtatcagcggctgcaatggttttgctaaagatggggaatggggaattcatggtggtactattgttccggcagatagcaacgggttaaatcttatttgggtttgtgaattggtagattcagccagtggcgatataaccattgaatgttatcatcgtcaaaatagagatgcgccgatatttgcgcaaaataagcgtgttaagagtattaacgatgatggagaagttgtttattacaatgatggtgagttatgcgacattcctgatgggcgcgtcattaatgttcgagtgcaattgctggaaaaatcacaagaataa

SEQ ID NO: 6821 - DNA, 807 bp, Photorhabdus luminescens
atgaaagatatactcacaaattctgatcataaaattaaaactgtccaagagtggagagaatacgttaaacacagaggagaaaaatattctaaaacgcagcaacattcagataacatttttactcatttcttagaaattgagaatctttctgatatacaaagtccagccagtgtagccgcgacaaataaatacacactattcgccaagaaatcggccacatcaaataaatacccagtcagtgtcactgaagggctgcaaactatcattaacttatgtcgagtggcctcaggttatgacccgctggaaccggaaggtaatggcaatgcgcagaaattcacagcattcacagaagaaatagaaaaggttccctttctctctttactatgggcagacacaaatacgattactcaacaaagtcatgacacagatgtcttgatcgattcttttgttgaagcctttcaagggttatctcctcaggataaaattactattaagatttatttgaaaaagttgattcataccgctttatcatatgccgatcaaaaggaaaaaaaatccaatctggtgcaatatgctctgactaaaaccccaaatggggtgtcactcttactctattcttctatattgataataaagaaagtagataacaagggtactattaaattcacctctcattataatctttgccaggcagaatataatctcagccagaaaacgtgggaaatagtaagatcagtattcgagaaagaagataagataaccatagagtatttaattgattgtatgacaaccaaaatgaaagcataa

SEQ ID NO: 6822 - DNA, 1026 bp, Photorhabdus luminescens; identical to SEQ ID NO: 5914

SEQ ID NO: 6823 - DNA, 843 bp, Photorhabdus luminescens
atggaaaatatcttaaataatcctgattatgcagttaaaaaagcccaagaatggatagaacatattgaaaaaggaggcacaaggctccttaaagattgggaacgctcaggtaatattattatggagtatcctgaggctggcgattattctgatgtacagagcccagcgaatggcgcagctacaggaaattatacccagttggcaaaagattctgcctcaccctctaaaaacccactcagcattaccgaaggcttgcaaactgttattaatatgtgccgtgcggtttcaggctataatcctttagatcctcaaggccaaggtaataaaaagaatttcttctcatttacagcagaattatctggcgttccattcctttctttactgtcaacaagtacacaaaatgttattcaaaaaagccatgatgccgatgttttgatcaactctttcctggaaaacttcctaggattatcgagtcaggagagagagcagatgaaaaccccactgagacaattggctatcgctgcattatcttatgctggtagaaggcaaactcaatccaatttcgtacaaagtgttcttgctacatcaccaagaggtggcgtgtcattcttcttgtattggtctgagttttcaatcatcgcttacgaagatgataaaggtcttatcgaattcaaatctcattacttcctgccacaagcagaatataacctaaggtacgaatcatgggtaaatgtaaggcccgcattcgagaaagcacagaaggtatcattagaagattggattgacagtatgaccactcggagaaagcaaggaagtaacgtaagagcgctttgtatagaataa

SEQ ID NO: 6824 - DNA, 201 bp, Photorhabdus luminescens
gtggagaaagcaacggtatttaaaagtaaccgttctcaagtaagccgtccgactttccaaagtcgtggttttcccgaaggtgtgagacaggttgatatggctggtgagtcttgggacagttggtttgatggtcttggtgttacggcagatttcttgacagaacgtgaccaaccgccagtacaagaacgtgagggattctga

SEQ ID NO: 6825 - DNA, 1425 bp, Photorhabdus luminescens
ttgatgaagcgttatgaacaatttgccaggcaaattcttcaacatattgaagatggtacctggctggtgggagatagattaccttcattgagggaatcagtgaagttatcaggtttgagtttgatgaccgttgttcaatcgtatcaattactagaaagtcagggatggatcatttcccggcctcaatcgggttattacgtcgctaaacgtttgcagccctttgccgcagcaaaagggggaaagcgattacatttaagtgaaagcgtggaaataagcgcttctatttttgatgtattacaggcgtgcaaagatcctgcgattattccgtttggtttagcatttccagatccatccttattgattcaacctaaactttccaaagcgttagcggctgctgccagacgaatagcaccacatagcgctttagctaatttaccgccgggtaatgataagttacgccgtaacatatcgcgccgttatgcaatgcatggtattcatgtccctcctgatgaaattgtcatcactgcgggtgcgatggaatcactgagtttcagtttacagtcggtgacagaaccgggggattgggtggtgattgaatcaccggctttttacggtgctttacaggccattgaacgtttacgtctgaaagcggtagccatcaaaactgatccacaaaacggtattgatttggatgcgttggaggaggtgatccagaaatacccaataaaagcttgttggttaatgactcactttcagaacccgctagggggaacgatgtccgctgaaagtaaattacggctggtgaatatcctgaacagtaatcaggtggtgctgattgaagatgatgtttatggtgaactctacttcgatcagcaacggcctgtaccggcgaaagggttagacagtgaaaacaactttatgcactgctcctcgttttctaaatgtctggccccgggattccgtgtgggttgggtggcagcaggaaaacatgccaagaaaatccaacagttacaaatgatgagtaccgtttctgccagcatgccgacgcaattggcaattgctgattatcttgcggaggggggatatgacaaccacttacgtcgccttcgtcgcatattggagcaacgtcagcaactgatgttacgagcaattggtgactatatgcctgcttcagtcaaagtgaatcgccctaaaggtggctattttctctggttggaatttgagcctctgttcagtgcacagcggctttatcaactggcattggcagaagggatcagtattgcaccgggcagtatgttttgcaccagcgaacagtttaaccatgcctttcgtctgaatgcctcttttgattggaatcagcaaatggaacgtgcgatgcagactttgggcaatatttgtcatacattattggttgaaatagcctga

SEQ ID NO: 6826 - DNA, 1338 bp, Photorhabdus luminescens
atgtttggtttaagtgccttggaactggccagaattcaattcgcgtttaccgtctcgtttcacattatttttccggcaattaccatcgggctggcaagttttttagcggtactggaagggttatggctgaaaacgcgtaatagtgattacaaagtgctatatcatttctggtcgaaaatttttgctgttaacttcgggatgggcgtggtttccggtctggttatggcttatcagttcggtaccaattggagttttttctccgattttgccggttcaatcaccggcccattgctgacttacgaagtactgaccgcgttctttcttgaagcgggctttctcggcgttatgttatttggctggcatcgtgtgggtgaaaaattacatttcttcgccacctttatggttgcactaggtactctaatatccactttttggatactggcttccaatagctggatgcaaaccccgcaaggtcacgaaattgtcaataatcaggtcgtccccgtcgactggctggcagtgatatttaatccctcctttccctatcgcctggctcatatgtctactgcggccttcctcgcctcagcattctttattgcagcttccgcggcatggcatttattaaaaggcaatgactcgacagcaatgaaaaaaatgctatccatgtcgatgtggatgatcttgattattgcgcctttgcaggcattgattggtgatgctcacggtctcaacaccctcaagcatcaacccgctaaagtcgcggcaatggaaggccactgggaaaatcttcccggtgaagccacgccgctgatcctgtttggtatcccggatatggcgcgggaagagacgcgttatgccgttgaaattccttatctcgccagtctaatcttaactcacagtatagataagcaggttccggcgctgaaggagtttccaccggaagacagaccaaacgcgcttatggttttctggtcatttagagtgatggtcggcctcggtatgttgatgatagttgccggcttttggggactttggctacgctataagagacgactttatcagtcaaaagctttcctgcgttttatcttcttaatggcaccttccggcctgatcgccattcttgccggttggtttactaccgaaataggccgtcaaccgtgggtagtttatggtctgctacgtaccaaagatgcggtatccgcacacggtgaaatacatatgaacatcagtttgttgcttttcatcgcggtctacagctcggtattcggtgtgggttacgcctacatgatgaaacttatccgcaaaggtcccaaaaaggagttaaacaatgggtattga

SEQ ID NO: 6827 - DNA, 1008 bp, Photorhabdus luminescens
atgggtattgatctgccgttaatctggttcatcatcattgtgttcagcatcatgatgtacattgtcatggatggttttgaccttgggattgggctgctctatcccacggttaaaagcgataaggaccgtgatttaatgatgaacagcgttgcgccggtgtgggatggtaacgaaacctggttggtgcttggcggcgcaggtttattcggtgcttttcctttggcttatgccgttatccttgatgcattaacgatccccgtgacattaatgttatttggcctgatcttccgtggtgtcgcctttgaatttcgtttcaaatgcgcgcctgagcatcgtcatatctgggacaacgcttttatcagcggctctgtgatggcgacgtttgttcagggcgtggtggtgggtgcctttattcaagggttcccggtggaaaaccgagcttacactggcggctattttgattggttctcacccttccccctattttgtggttttggcctgataattgcttacgcactattaggctgtggctggctaattatgaaaaccgaaggtcacctacaacaagagatgtaccgtgtcgcccgcccgctcacttttctgatgctgacagttatcgccattatcagtttatggacaccattcattcatccggcaatcactgaacgttggttcagcttacctaacctgttgttcttccttcctgtgccactgttggtggtctggtctggctggaaactactgcactccatcaaacgtaaagctcattacacaccgtttctggtcgcactattgttagttttccttggctacagtgggttgggcatcagtatctggcctaacttgatcccaccgaccatcagctatgaagccgcggcagcgccgcaacaaagtttaggttttatgctggtcggtgccctacttatcatcccagtgattctggtttacacctattggagctactacgtttttcgggggaaagttaaccatgaacaaggctaccactaa

SEQ ID NO: 6828 - DNA, 1233 bp, Photorhabdus luminescens
ctgatgaaaacaagttcaaataacaccatcttcaaaaaccaaaaactgtttgtaatcaactctattataaatttgtttttactttttatactgttgttgattgataaaccgtcgattccagatttaattttaccgttattgataatgttaagtattacaaatatctacttcctgataaaagtggtacataactctgctcctgtcaaagaatggcaacatgcaagatacaaagcagaaattaacgcactgaaacaaaaaaatagctatttggattttctctgtcaaagccatttcaaactacaaaattgtaaactgctacctgaaaagcttcaggagattttttctcacctcaatcgtctgatccctttctgtgaagccaaaatcatcttttatccatcacaacaagaatatttctttcgcaatccccatcaatgtccctattttgatatgccgctgattatgagatggaatctagatgataatattgatagctatgggacactctggataaaaacacacaggaatagtgatctcactcccgatgaaaaaagtctggttcaggatgtggtgacgttaatgacaaataaactattacgggaaaatcagatccaatgccaacaccagagtatgttggccgcagagagaaccgctatttctcgtgaactccacgattccattgcccaatccctctctttccttaagattcaagttaattgtctatatatcggcagtgataatttacccaagcaaagtttaacctcgttgaatatgattaaagatgagttaaatattgcctatcgccagctcagagaattactggcaacgttcaggaacgaacaacctcaatgtaatctacaagaatctttacagaccttgattagtgaatttaaccatcgtctaggcttcaacattgaattcaattaccgcctgacacatcagcacattcctgacagttacagcaaacatttgatacaaatcattagggaatgtttgaacaactgttataagcatgccaatgccaattggatcagtatccgtatttatcctatcgatgacaaaatcattaccgttgtcagtgataatggtcagggtatcaatctggactccgctaataaaaacaaatttgggctggctattatgcaagacagagtttctatcctaggtgggcaattacagataaaaaaccgtaaacatggtggtacagaggtagaaattcaattttcagtggattga

SEQ ID NO: 6829 - DNA, 834 bp, Photorhabdus luminescens
gtgaccaataaaacaattgaagaaaaaaacatttaccgacctgccccccctagacttgttcaggtgaaaaacattttcgacgtgacacctaatatgcgcagcatgactttcaccggtgaatgtctggatagttatcccacggaatgtgaaggcggacacctaaagatattcttaccgcttccgggacaaactaaaccggtattaccgactttatcgccagaaggcccgatatggccgccgagtgaactgcgtccaataacgcgcacttactcggttcgagccatccgcaccgaacaaaaagagatcgatattgaatttgcactacatcacaatggcggcccggcggtagaatttgcttatagagcccaaattggtgactggatgggtattactaaccccggtggacctgatccattactgccaaaagtcagccactattatatggctggcgacccaagttctttgcctgctattgctgcgctattggcaacagtaaaaccagatgcaaccgggcaagtcattattcgtatcgaaagtgagcaagatattcaggaattaaaaaaaccggcaggaataacagttcactggatcactggtgacgttgaaataactgacacaatcgtatctgaattcaaatcctggtcattaccaacagaaaatgtcactttctggctggccggtgaggataagctggtaaaagaacttcgtcactatattcgccgggaaaaaggctatgaacgccaccagctatatgccattccttattggaggcatggctttgatgaagaaggttatcatgccctgcgtcatgaagtggtggatagcgacgattaa

SEQ ID NO: 6830 - DNA, 789 bp, Photorhabdus luminescens
atgagtagacagaaagcagtgattaaatcgcgtcgagaggcaaaacggatgatgaaaagggatttgcgccatcaatgttatcgggatgataatgtaacctctttagtgcaacccggtggcgtagaagctattggtatggcacgtgataaccgggatacttcggaaattttgccacggactgaaacgcaatggcgttatatgcgcgcaataaactataaaaaactgattattgccagtggggaggcgggttgcggtaaaacgtttattagtgcggcaatggctgcggatgcattgattaataaggaaattgatagaatcattgttacccgtcctgtattacaggcggatgaagatctcggctttttgcccggagatatggctgaaaaatttgcgccttatttccgaccggtttatgacgttttattaaaacgtatgggcgcatcgtttttgcaatattgcttgcggcctgaaattggcaaagtggaaattgcgccttttgcctatatgcggggcagaacatttgaaaatgcatttgtaattctggatgaagcccagaatgtcacggttaatcagatgaaaatgtttctgacccggcttggggaaaatgttactgtgattgtaaatggtgatataagtcaatgtgatttgccagtgggagtggtatcaggattgcgtgatgcactgggaagattttcagatgatgaagtcgtcagtgttatccattttaatcaagaggattgtgttcgttctcaattgtgccagaaaacgttgctggcttattgtaaataa

SEQ ID NO: 6831 - DNA, 150 bp, Photorhabdus luminescens
ttgccatccggtgaagaagagtgctttcagatagtgacttctttgccggatagtagctggatgtatcaataccatggtagtcaaatcaataatggctactatgatgttaagtcattagcttatattaagtcatattattcaatgaattaa

SEQ ID NO: 6832 - DNA, 999 bp, Photorhabdus luminescens
ttgaaacgtaaagttattttttgggcaattcacattgggtgtttcagtttaattgctcctttatcttcttttgccgcaccggctacttttgaacaagctaaagttgaattgcgtaaacgcatataccatgatcaatttaagtcaggggaagggacattttactgtggttgcgattggcaatggacaggtaagagcggtggacgcgcaatcctttcttcgtgtggttatcaagtcaggtcacaacagaatcgtgctgaacgaattgaatgggaacatattgttcccgcctgggtttttggtcatcagcggcaatgttggcggaatggagggaggaagaattgtgtctcttccgatcctgtttttagggcaatggaatctgatatacataatttggttccatcaattggcgaggttaatggcgatcgtagtaatttcagttatggaatgttaccaaaaaatatgccgaataattatggtcgttgtaccagtaaagttgattttaaatctcgaacgtttgaaccgagagatgaagtaaaagggcaggtcgctcggatcaatttttatatgcacgatcgttacaatctttccatgtctcgccaacaacagcagctatttatcgcctgggatcgtcaatatccaccgagtaaatgggagcgggagagagataaccgaattaccggtattatggggcatcataacccttttgttaccggtgaacagaaatggcaattatggcataaaaactccgcctctggcattccaaaaagcgagcagataaaagggcagagaaatagtcaaacagatacccagaaacaacgggtattatctgattcatcctctagaggattaattaaagggaataacaacagcaaaatctaccatttttctcattgttcaggttataaggtgattcaggagaagaactcggtctattttaaaacagaaattgaagcaagaaatgcgggttttcggttggctggaaactgtaaggggacttaa

SEQ ID NO: 6833 - DNA, 1287 bp, Photorhabdus luminescens
atgagtaaaaatgattttaaagctttttctactagtaataatgctaatgtagtgagtcaagaaagatatgaagagagtagggatttactgagtgggtttccaccaaatgatgttcctacccatttgttaaataaagtattacgccaatcgtcaaccatagcttctgtcgtggctaattttattgcggcacaatctggtgatgatgttctggatgatggtgatatagctaaacttactgcgcaattaaatcgagcattagaacaaaaaatcacagcaaaaattcccagtgcctcattaacacaaaaaggtattgttcaactgaccaatgagatgggtaataatgacacactggctgtgacgcagaagctggttcaggaaataatcaattcgttgcgtgaaaatattaatgccaaagtacctaatagccggaaaataaacggtaaggcgttgactggggatatcaatctgactgcgggggatgtgggtgcggtactagctaatgatgcaatgtattcaatgaatattgatcgtttggatggtcgggaaaatctatacaatggttgtgctggatttaaaccgaatgcgccgttcctcactcgatatgggctgccatctgatcgttttggcgttcagctaagatttagcaatataaatggtccatcaagtgaaggaatagatcaagtatggagtcataggctaatttttgttcatggaagcgatacatatcgtacagatcatataaatttagattacaaaattacccgtaaattctgggacgatataaatgctaagccagacgccaacggaaacctcaaggtagcctccccggtaatagaaatctaccctgatggcacattctcgactaatgacgaatctgaaggtgcagaagtgataaaacagggaaccggcatatatcgtatatcaaatatcttgggctataacgctgatggtggttggggtgttaatgggggtatttctgttcctcgcgacaataataatctcgaactgatttttgttgatgatcaggttcagtctgacggctctattattattgagactttccatcgccaacatacgcatttaccggagagattccaaaattggcgactcaaatctattgatgacagtggtaacaagatattctatcaagatggggagccctgtgatattcccgattcttgccgtttagatattcgggtccaaatgccagaagattcactctggaacttgaatcgaaagaggttacaggaagaaatggagagtaccagcgcttctgctaataaatga

SEQ ID NO: 6834 - DNA, 627 bp, Photorhabdus luminescens
atgacacaagaaaatattttagatactgaaaccgctgtattaggtgaagacggattagcaattcaagctggctggataaaagtttatcatgctaattcctatacgagagaattctctggctctgatttcgaatatgttgcggaaggcgtgggtttgtcagcgcattcttatttggacgcaccaaacctgtccgattctgatgatatggctgtgcgtcgcagtgaggatggaagttattgggaaattgtcccggaccaccgtggaaaaatagcttacaacacgcaagcgggtgtacaggaagaagtgactgtactgggtgaattgccagaaatattaacattcgagcaaccgtccaccgattttgatcaatgggatggtgaaaaatgggtaacggactttgaagctcaaaaagtcagtcaaattgaacaggcagagcaacaacgggctatttttcgtcggcaagccgatgaagccatcactgtattgcaatatgcagttgaaactgaaatggcatcggaagaggaaaaaactttattgttagattggaaaaagtatttggtattattgcgtcgggttgatgtttcatcggcaccagatattaattggcctgaacagccgcaagaataa

SEQ ID NO: 6835 - DNA, 720 bp, Photorhabdus luminescens
atgagccaaaaaaatgattttaaagccttttctattagtgataatgctaatatagtgagtcaagaaaagtatgaagaaagtcagaatctaaagacgggatttccacctgagaatgtttctactcatgtattaaataaggtattacgccaatcctcaacaatatcatctgttgtggctaattttattgcgacacaatcaggtgaggatgttttggatgatggtgatatagctaaacttactgtacgattcaatagggctttagataaagctttagagcaaaaaatttcaggtatttccagtattcccgttggctctcctattccttggccgttgtcccatccaccttccggttatttcacttgtaatggttccgcttttagtagatcacagtatccgaagttagcagaagcttatcctgatggcagaatacccgatttaagaggcgagtttattcgtggctgggatgatgggcgaggtgttgatagtggccgtgttattttaagcgcacagactgacaacacaaaaagaatacaacttacgaaaggactccctgatgggcaatttctttctagttatcaaggtcctgtagatagataccagttcccgctggggcgtgatgttcttgagagtgccactgttacatcaattgctaacaatacaggcggtcatgaaacccgcccccgtaatatcgcatttaactatatcgtaaaagcagaataa

SEQ ID NO: 6836 - DNA, 696 bp, Photorhabdus luminescens
atgttaagaaaattagcggctgaattacttggaacttttgttctggtttttgggggatgtggtagtgttgtattcgctgcggcatttcctgaattagggattggttttgtcggtgtatctttggcatttggtttaaccgtattgacgatgatatatgctgttgggcatatttctggcgggcattttaaccccgctgtaacaattggtctttgggctggtggtcgtttcagggcagtggaagttattccttatattatttctcaggttatcggtggtattcttgctgctgcggtattatatgttattgccagtgggcaagtgggttttgatgcgaccacgagtggctttgcctcaaatggttttggtgagcattcaccgggtggattctcgcttcaatcggctattgtagctgaaattgttttaacggctattttcttaattgttattattggtgcgacagatagacgagcacctccgggttttgcaccattagcaataggtttggcgctggttttaattaatttgattagcattcctattaccaacacgtcagtcaatccggcacgaagcacggctgttgcgatattccagaatacctgggctttagagcagttgtggtttttctgggtgatgccaattattggtgggattgttggagggggaatttacaggttattgttcgctgaaaaacaatga

SEQ ID NO: 6837 - DNA, 438 bp, Photorhabdus luminescens
atgtacaaaacgattttagtaccggtggatatttcagaagatgagttgaccgataaagcgattgcacatgcagagtatttggcgaagttgtctgatgctaatatacatcttttccatgccgttcctgatatatcaagattttcaattagttatagttaccattatgatttgctcaactcttttgccaagaaatctattgcaagatcagaagaggaattggcaaaagtggctgaaaaaatagatttgccaaaagagcgagtctctttctccgtagcctgtggatcaccgagggataaagtattatcgacagcagatgagattaaagcagatttaattgttgttggttcccggcggcctaatatttccacccatttattaggctcaaatgcttcaggaattgtcggatatgcaaatatttcagttttggtagtcagatga

SEQ ID NO: 6838 - DNA, 339 bp, Photorhabdus luminescens
gtggaaaaatttactgataaactgattcgtttggaccattttgtatggcgggtgatacgcttttactttattgctgcaacgtttttctttattggaataattccgggtgtcctagggttttacctgatagaagagcatacattttctgaatctttgcttaacgctttatttatgctgggatcgcaggggttagatcccgttcctgttagtttatccggtaaatattttattgccatatatggggtatttttggaaagtgtgttctttattactttggggcttgttgtaacacctttcattcatcgaatattacataagtggcatcttgactctgagtga

SEQ ID NO: 6839 - DNA, 429 bp, Photorhabdus luminescens
atgtacaaaactattttagtaccggtagatatttcagaagatgaactaacgagtaaagcggttaagcatgcactgtctttagcaaaagaaacgggtgcgaagctccatattcttcatgtactgccaatttcatccgcgattgttaacgcatattcgttgggatatgatgaaattaaggataaagcgacaattaaagccgaagatgatttaaaaacgctgattgatgccatcgattttcctgctgacaggttatcttattctattgcatttgggtcgccaagagatgaaataacagcagcagcgacagaaattaatgctgatcttatcgttattggctctagaaggcccaatattacaacgcacttattaggatctaatgcatcaggtgttgtcaaatattcgacaacatctgttttggttatcaggtaa

SEQ ID NO: 6840 - DNA, 225 bp, Photorhabdus luminescens
atgaataaaatcgatttaattccttcatctgatactgaaaccttggcaacagaggtgacatgtttgaaagttctgttggcctctattcttaaaactatgggacaagctcatgcagggagagttgtactgaatctggaacgtgttattgcagaaatgggcgatgaaaaacaggccaagatatttgaaaataccgttcagcaaataaaagcgttatatcggcagtga

SEQ ID NO: 6841 - DNA, 666 bp, Photorhabdus luminescens
ttgataaatgttttgttagtcgatgatcatgagctgatcagagttggtgtaaaacgtattcttgatgacgtaaaagggataaccgtagtaggagaagctaattgtggtgaagatgcgataaaatggtgccgagctaataaagtagatatcgtgttaatggatatgaacatgccaggcattgggggcctggaggcaacaaaaagaatcctacgctattgtcccgatgtccgtgtcatcatgttgactatctatactgaaaatcctttgccaatgaaggtgatgcaggctggtgccagaggatatctcagtaaagcctctacccctcaggacatggtaaatgcaattcgtgcagttaatgccggccagcgctatatcgctcccgatattgctcaacaaatggctcttagccaaattagcccacagcaagacaatccattaagttgtctgtctgatcgtgaattacagattatgctgatgatcacgaaaggacaaaaagtgagcgatatctctgaacaacttaatctcagcccaaaaaccgtcaatagctatcgctaccgaatgtttagtaaactaaatatcaacggtgatgtagaattaacacatatggcaatacgttatgggctattcgacacagagagtctattaaatagtgacggaacaatttga

SEQ ID NO: 6842 - DNA, 1833 bp, Photorhabdus luminescens
gtgacggaacaatttgattcaaaaacatttttaaaaacagtaaccagtcaacctggcgtttatcgtatgtatgacacctcaggcacggttatttatgtcggtaaagccaaggatttaaaaaaacggcttgccagttactttcgcgcacaagtcaccagtcgtaaaaccgaatctctggttaaaaatattgttcagatagatgttacggttacgcataccgaaaccgaagcactgctgctggagcataattacattaagctctatcaaccccgatataacgttttactgcgagatgacaaatcctacccttacatttttctcagcgcagataaacatccacgactggcaatgtaccggggagctaaacatttcaaaggtgaatatttcggcccatttccaaacactcatgcggtacgggaatcattaatcttactgcaaaaactttttcctatccgacaatgtgaggatagtgtctaccgcaatcgctcgcggccatgcctgcaatatcaaattggtcgctgccttgggccttgcgttaaagggttggtaagtgaagatgaatatcagcagcaagttgattatattcgtctgttcctttcaggcaaagatcagcaagttttaaccagattaattgaacgaatggagcaagccagccagcaactgaaatttgaagatgctgcaagataccgtgatcaaatccaggccgttcgtcaggttactgaaagacaatttgtttcaggaacagacgatgacctcgatgttatcagtgttgcctttgacgcgggcatggcttgcctgcatgtactgtttatacgtcagggcaaagtactgggtagccgaagttactatcctaaaatcccgacagggacaacgcttgatgagattgtacaaacattccttggccaattttatttacaaggcagccaaaatcggactttgccctcagaaattttgctggattttactctgccagagaaagacattttgtctgattctttatctgaaatatccgggcgaaaaattcatattcaaacccggccccgcggagataaagcccgttatctgaaacttgcccgcacaaatgcaacaattgccctatcgacccgcttatcacaacaatcaactattcaccaaagattagactctctcaccaaattagttaagttagcaaaaattcagagaatggaatgttttgacattagtcacactatgggagaacaaactgttgcatcctgtgtcgtctttgatagcaatggtccactacgttctgaataccggcgctataatatcagtggtattactcccggtgatgattacgctgccatgaatcaagtactacgccgtcgatacgggaaagcattagatgagtcaaaaattcccgacattattttcatcgatggtggtaaagggcaattagctcaagcaatcgatgtctttcagtctcttgatgttgaatgggataaaacgcgacctcaattaataggtgttgccaaaggcagtgatcgcaaagccgggcttgaaacgctatttttcgcaacggaggataaaagtatcgcattaccgccggactctcctgccctgcatgtgattcagcatattcgtgacgaatcacataatcatgcaataaccgggcaccgtcagcgtagatctaaagttagaaacaccagtacactggaatctattgaaggcgttggaccaaaacgccgacaaatgttactgaaatacatgggaggtttgcagcctttacgtaatgcaagtgtcgaagagatcgcaaaagtaccgactatttcctatgcattagcagaaaaaatttataatgcattgaaacactaa

SEQ ID NO: 6843 - DNA, 549 bp, Photorhabdus luminescens
atgcaattaaatataccaacatggctcactctatttcgtatcgccctgatcccattttttgtcctggcattctatttgccattcacatgggcgccgatggtttgtgccataatttttattgtcgctgcggcgacagactggtttgacggttttctcgctcgcctttggaaacagacaactcgctttggcgcatttcttgatcctgtcgcggacaaaatcatggttgcggccgcattagtcttagtttccgaacactatcatacatggtggataaccctgcccgcagcaaccatgatagcgcgtgaaattatcatctcttctctcagagaatggatggctgaattaggcaaacgcagtagtgttgccgtttcctggatgggtaaggtaaaaacgacagcacagatggcagcgttaattgctttattatggcgccctaattttgaattcgaattgggtggattcatattactttatgttgctacggtgatgacattttggtcaatgtttcaatacataaatgcggcttggtctgatttgcgtgaagcttga

SEQ ID NO: 6844 - DNA, 165 bp, Photorhabdus luminescens
ttggatgctgaattagtcgttgaatatagaaaggcgcgttggcagagtggccatgcagcggattgcaaatccgtcaacctcggttcgactccgggacgcgcctccaaattcagcccaggtggtgaaatcggtagacacaagggatttaaaatccctcggctgtaa

SEQ ID NO: 6845 - DNA, 273 bp, Photorhabdus luminescens
ctgcctgtacggcagtgcaccgcccactctccctttgtgtgcgggagaagtttttctaagctgcctgtacggcagtgcaccggtcacgccattgcttcagggagttttcaaatttctaagctgcctgtacggcagtgcacatcaccggcattgttgccgttcgtcggcatcatttctaagctgcctgtacggcagtgcactaaccctcactatatagaagagtgcaaacgtatttctaagctgcctgtacggcagtgcacctttaaagagtaa

SEQ ID NO: 6846 - DNA, 750 bp, Photorhabdus luminescens
atgagtcccaagaatgattttaaagctctctctgttattaataataaaaacatagtgagtcaagagaaatataaaataagttcggatttgcagacagagtttccttcaaatgatgttcactctcatttgttaaataaggcgttggatcaatcatcaactatatcagccgtcatagctaattttattgcggaacaatctggcgaggatgttttagataatggtgatataaccaagcttaccgctcaattaaataaagcattagaacagaaaatttcagatacctctaacattcctgtcggtattcctgttccttggccgactgccgtgccgcctgctgggtggttgcagtgtaatggggcggtctttgataagtcgaaatttccgaaattagcagaagcttatcctgatggtaacttacctgatttgagaggagaatttattcggggttgggatgatagacgaggtattgatagtggccgtagaattttaacgcatcagggggatgctatccgaaatattcagggttcgttcgccggcatgatagcactaaattatcatttggcaacaagaggggctttttatgctagtcaagttcttggaatagcgacagatggcagtttcaaatcgataaatatttctgacacagatactccatacggctttgggttcgaggcgtcaagggttgttcctgtagcctcagagaaccgccctcgcaacatagcatttaattacatagtgagagcggcgtaa

SEQ ID NO: 6847 - DNA, 1482 bp, Photorhabdus luminescens
atgagtcaaaaaaatgattttaaagctttttctattagcgataatgctaatgtaattagccaagaaaaatatgaagaaaatcagaatttgcagactgggtttccacaagatggtattaccactgatatgctaaataaggcattacgtcagtcttccacgatatcctctgtagtcgctaattttatcgctacacaatctggcaatgatgttctggatgatgggaatatagagaaactcaccagccaattaaatagagcgctggaacagaaaatgacaataaaggttcctgatgcttcattaacacagaaaggtattgttcaacttacaaatgtggttggcaatagcaatacattggcggttacacaaaaacttgctcaggaaataataaattcattacgtgaagaaattaatatacctgtgggttcccccattccgtggccgttaccctatccacctgtcaactatctcgtttgtaacggtgcatttttcaataaattgcagtacccaaagttagcagaagcttatcctgacggcagattgcccgatctaaggggagaatttatccgtggctgggatagtgggcgaaatgtggatccatctcgttcaatattgtcatggcaggaaggggcttatttggtacagaatgttgatcgggctaataattttatgattaccctctcacgcaatgagtttgcaaaattgcagtgggatattccacaaaataaaaatacttcggtaaaagctgtatattataaagctcaggcagactggattgcgaattccgcatttataggggtatcgaggccccgtaatatagcatttaactacatagtgagagcagcagcatgcagcataatgacagaacaaaaatacgcgttagaacatgaaaccgctgtattgggtgaagacggattagcaattcaacccggttggataaaagtttatcacacgaatcaaataacaagagaatttattaacgctggtattgaatatgtcatgctcggtgtcagtttatcagcacattcttatttagatgcaccagactttcccgattctgatgatgtggctgtttgtcgcagtgaagacggtaagtgttgggagatcgtccctgattatcgggggaaaatagcttacgacacgttaacattaactcaacagaaaatcactgaactgggtgaattacctgaaactctgaccttcaagcaaccgaccaccggttttgataaatgggatggcacaaaatgggtcactgataatgtagctctaaaagcaaatcaaattgaacaagcggaacagcagcgtgtaactctgttgcgacacgcgagtgaatccattgcattactgcaagatgctgttgatttaaatatcgctaccgaagtagaaaaatccgccttactgacatggagaaaatatagggtaatgctcaatagagtaaatatttcattgtctcccgatattgaatggccggaacagccgaggtaa

SEQ ID NO: 6848 - DNA, 918 bp, Photorhabdus luminescens
atgagttataagaatgattttaaggctttttctactagtgataatgcgaatgtaatcagtcaagacaaatacgaggtaaatcagagtttacaaactggattttcaccagataatgttcccacccacttattaaataaggtattacgtcaagcgtcagcggtatcatctgccgtgactgattttatcgcgacacgatctggcaatgatgttctggatgatggaaacatagccaaactcaccgctcaattaaataaagcgctagagcaaaaaatgacaacagatattcccagtgcttcattaacacaaaaaggtgttgtccagcttacaaatgtggttggtaatagcgatacattggcggttacacaaaagcttgttcaggaagtaataaattcattacgtgaatatacccgcgaagagatagacaaccggatgaaaacagccaatgaaattcctgtcggttctcctattccgtggccgttacctcatccaccattcggttatttcacttgtaatggttcagcttttaataaattacagtatccgaagttggcggaagcttatcctgacggtagattacctgatttaagaggcgaatttattcgcggatgggatgatggtcgtggtattgatagcggccgtggaattttaactcatcaaggggatgccattagaaatattgtaggttcatttcctggggcaatagcacttcattttgagctggcagcaaaaggggttttttacggtaacgcaacttttggcgtggctacagatggtaatcctaaatcagtagatcattttacccgggatgctgtatacactacatacggttttgggttcgacacgtcaagggttgttcctgtagcttcggagaaccgtcctcgcaacatcgcctttaattacatagtaagagcggcgtaa

SEQ ID NO: 6849 - DNA, 597 bp, Photorhabdus luminescens
gtgcagggttttgatagaaaaatgaacaaggtattatcacataaagaagagctaagccatttaacagcatgtttactcagcgaagttatctgttcacggacatcgttttcatggttcaaagcaatccatcgagcccttaaatgcccagaccgcaggttctatttctggtggagaattgctaattacttatataggacaaataaagccaagaaaatctcgattcgtatcaatagaaatttaagaaataaatatggatgtgatttaggattaggctgctatataagaaaaaatttacgtatatctcattatgttggcattgttatttcccgcacttgcattattggtgataattttcatgttttacaaaatacaaccattggcgttcttaatgaagatattcaagggaaaataagtataggtaatgatgtaaaaataggtgcaaattcttgtattataagtgacaacataacaattggagataatgtctacataggcgccatgtcatttatcaataaagatatccctgctgattgtattgcatatacgcctaaatctcaaaatgagataaagataaaaaagcaaaaaataattaattga

SEQ ID NO: 6850 - DNA, 909 bp, Photorhabdus luminescens
atgtttttaaaatataaatatcttttaaaactaggtatgctctgtaagcagaatataacaaaatcaatatacagaaatgtatccagtaaaaaaatgaaacacaatatgaacttttggcctcacataaagatctcaagaaacattaatggcaaaatcgacgccgtttcattcaataagaaaagtataaacatcaatgaattcccaaaaaaatcagaaaaacccttaatcattattgcatctggaccgtcggtatctaccatcaaaacagatttttttgatgataccaaatttgatattatgggtgttaacggctcgtatgaattatcaccagaggtaaaattcaaatatcatgttataattgaccgaacattcattctaaataggaagaatatcgttttaaatatattaaaagataatgaattgatactcttcacaacaatggattgtctcaatgatatcttaattcattacggttatcttgaattaaaatgtaaagtcattattattgagaacattgaccagccagtttatcaacaggaaaaagaactttttgaaataaagagtgatgaaataataatacagaacagtgtcgccttctcattgaacttaaatctcggattctacaacggaacaacagtggcatattctgctttgcaaatagcattttttttggggtataaagaaatatatttcgcaggtctagacatgaacaatttttcaaaaccaaggttttatgaaacccaaaatgacaagctagataccaaattaaataataacttacatgatttcatcattccttgtttcaacctggctcatgaaatagccataagaaaaggagttaaaatttataatctatcgaaaaatagcgctataaattcatttgaaaagttagattatagaaaaatttaa

SEQ ID NO: 6851 - DNA, 675 bp, Photorhabdus luminescens
atgaaaaaaattaatggaacatacatttcatcacaaataataaacacaatggaagcaagcaatgaaccgtggggaatcaaagataaaaattcacgctttatttatggtaacccggccctaaaatctattcaaaacattccaacatcatttgattatgaagggctttttgatgacgaacttccttggggtggagcggcgtttgcaaaagaatttattgatcatgataaaattgtaatgacaaaagggaaaagaatctgttcacttgaaacatatacatatggaaaagaaaacattttatcgtcttacttccaagaaaaattaccactatataacgatgcaaaggaatgtataggcatactttttcatggatggaaagccaaagatttttcattaataaacttatatcaatattataacgttctccccacatctattatatttcaaccaccaacagatacttttacccaacgtgagtgggatattattttcttctttttacaaaaatataccaggaaacagattggaaaaatattaaatatctcttaccgtacaattgaatcccatatggccaatatatatcataagataggtgttgattccaaccaacaactggaagaatattgtctcatcaacaattttaaacgttatgtacccgaaaaatttttactattttaa

SEQ ID NO: 6852 - DNA, 117 bp, Photorhabdus luminescens
ttgaacctgggcagtgctcaaaatcctcacgtactacgtgtacgctccggtttttccgcgctgtccgtgttcaaactgcctgcaacaattacgcctattttatttttagaaaaataa

SEQ ID NO: 6853 - DNA, 627 bp, Photorhabdus luminescens
ttggcagtaagcaacgagccttggggaattaaagataaaaactcatgctttatttacggtaatctagcattaaaatctcttcagaacttttcaaattcatttgaatttgaaggggcctatgaaaatgaacttccttgggatagcgctaaatttgcggaacaatttattaatcatgataaaaaggtaatggaaaaacagcagagaatatgttcaatcgaaacccatatatttggcagagagcaaatcctatcgtcttactttttcgaaaaatcacctttttaccataaagatggagattgcatcggagtcatatatcatggttggaaagcaaaaaactattcattagcctatttacatcaataccacgacaaactaccggcctcaattatgctgcaaccaccaacggatctttttactcaccgtgaatgggatatcattttcctctttttacagaaaaataccagaaagcagattgggcggatactgaatctagcttatcgcactattgaatattatatgactcggatataccgtaagataggaattaattccagccaacaactggaagcgtattgtcgagccaataattttaattactatataccggaaaagtttttattgtcttaa

SEQ ID NO: 6854 - DNA, 288 bp, Photorhabdus luminescens
ctgagtaaaattgcggaacggtccggtaaggcgctgactcgtattcgctttcgttggatcagagatgaaaaaaacggaaagatgacggttcagggctatcatgtcagcccggaaagtggtttggataacgtgctggttcgtatgatgagattgaatccgactaccggtaattatgaattctgggagccgggagaaaatcgaccgacgattttatggacgccgaatgaacaggaatgcaaggctccaccgcataccggaaatgaagagcagtcgtttattccgtcgtaa

SEQ ID NO: 6855 - DNA, 693 bp, Photorhabdus luminescens
atgcaacatataaaaaatagacctaataatatcaccccacaattaattcatatgtgggaaaacagtgatgaaccttggggagctaaagatctccaatcgagatttatttacgccaattccgctttttatcaactacacaatttacctgacgatttcgagattaccgggcttaccacaggtgaattaccctcacctattgcagaatatgaaaaagaattccatcgtcaggatcaaaaagttcttcaaactatgcaacgtgttagttcactagaaacgcatccatttgaagaacataagattaagcaaatctatctttgtaataaatacccactttgcgatgaagatggcaattgtattgggctcacttttcatatgtgcaaaaccaaaaacttttctactgcctactattatgataaaacccctccggcaacgttggaatttatcgcccctaatgacaaattgacacaaactgaatgggaagttctctttctaacgctacgttcattagatgaagagaaaatcggtgaagcgttaatgataagtgccgaagatgtggttaatcatattcagtcaatctaccaaaaattcaatttatcattacacgaagaattaaaagatttctgtaaagaaaataaacttgacgcttatattcctgcaagatttgtcactatcggcagtgtggaattaaattga

SEQ ID NO: 6856 - DNA, 678 bp, Photorhabdus luminescens
atgagtaacaagataatttcatcgcaaatcattaacacaatgaagcaatgtaatgatccttggggaataaaagacaagaactcatgctttatttatgctaatcaatcatttaaaaccctccaaaatctttcaaattcttttgactatgaaggagtttttgatgatgaaattccctgggatggagctgaatttgcaaaagaatttattactcatgataaaactgtaatgacaaaagaacaaagagtgtgttcacttgaaacgcatgtatatgggaaaaatcaaattctgtcatcctatttttttgaaaagctacctatttatcatgaagatggtagctgcatggggattctatttcatggttggcaagctcaggatttctcattcacccggctattttatggaaaactgccggcatctattatgttccaaccaccgaccgatctctttactcaacgggaatgggatgttattttcctgatgttacacaaatataccagtaagcaaatcggtaggatgttaaatatttcctatcgtacggttgaaacccatatctcacgcatatataaacgaattggtcttcattctactcgtcaattagaagattattgccgtaccaatgattatgatctctatgtaccagaaaggtttgtgcatccagaaagcagaatgtttccctga

SEQ ID NO: 6857 - DNA, 147 bp, Photorhabdus luminescens
atgaagaagaactacgcactatcacctcagattattaatacaatggaaatggaaaatgagccgtggggaataacggatagttcttcaaactttatttacagcaatgcagctaaagaaaaaggggtaatagcatggacaataaactaa

SEQ ID NO: 6858 - DNA, 681 bp, Photorhabdus luminescens
atggacaataaactaattatttcatctcaagttattaatacaatggagcagagtaatgccccgtgggcaataaaggataaaaactcacgcttcatgtatgccaatcaagcatgtaaacatcttcaaaacatttcaagctcttttgactatgaaggactttacgatgatgaaattccttggggtggggccgaatttgccaaagaatatatcattcatgatcaaaaagtgatggaaaaagaagaaagaatatgtttgcttttaacacataaatttggaaaagaacaaattctttcgtcttatttttttgaaaaataccctctttatcacgaagacggaagctgtatgggaacgatgtttcatggttggcaagttcaggatttctcattcacccggttatttcatggaaaattgccagccaatattatgttccaaccaccgaccgatctctttactcaacgggaatgggatgttattttcctgatgttacaaaaatataccaataagcaaatcggtataatgttaaatatttcctaccgtacagttgaaaaccatatctcacgcatatgtaaacgaattggtcttcattccagtcggcaattggaagaatattgtcgcaccaatgattatgatctctacgtgccaaaaagatttgtgcaacctagaagcaaaatgtttccttga

SEQ ID NO: 6859 - DNA, 681 bp, Photorhabdus luminescens
atgagcaataaactaattatttcatctcaagttattaatacaatggagcagagtaatgatccttggggaataaaagatgagaattcatgccttatttatgttaatttggcattaaaatctcttcataatgttccaaattcttttaactatgaagggcttttcgatgatgaaattccttggaatggtgctgaatttgctaaagaacatgtgactcaagataaaatagtgatggaagaaaaagaaaggatatgttcactcgaaacacatctatttgggaaagaacaaattctgtcatcctatttttgtgaaaaataccctctttaccacgaagacggaagttgtatgggaacgatatttcatggttggcaagtccaggatttttcattcacccgactattttatggaaaacttcctgcctctatattatttcaaccaccgactgatctctttacccaacgggaatgggatgttattttcctcctattacacaaatataccagcaagcaaatcggtagaatgttaaatatttcctatcgtacggttgaaacccatatatcacgcatatataaacgaattggtcttcattctactcgtcaattagaagattattgtcgcaccaatgattatgatctctatgtaccagaaaggtttgtgcatccagaaagcaaaatgtttccttga

SEQ ID NO: 6860 - DNA, 681 bp, Photorhabdus luminescens
atggacaataaactaattatttcatctcaagttattaatacattgaagcaaagtaatgacccgtggggaataaaggataaaaactcatgctttatctatggcaatttggcattaaaatctcttaagaatttttcaagttcatttgaatttgaaggactttatgagcatgagttaccttgggatggggccgaatttgccaaagaatacatcgctcatgatcaaaaggtgatggaaaaagaagaaagagtatgtttgtttttaacacatacttttggaaaagaaaaaattctttcatcttatttttttgaaaaatatcctctttatcatgaaaacggaagttgtatgggaacgatatatcatggttggcaagctcaggatttctcattcaccagactatttcgtggaaaattgccagccaatattatgttccagccaccgaccgatctctttactcaacgggaatgggatgttattttcctgatgttacaaaaatataccaataagcaaatcggtataatgttaaatatttcctaccgtacggttgaaaatcatatctcacgtatatgtaaacgaattggtcttcattccagtcggcaattggaagaatattgtcgcaccaatgattatgatctctacgtgccaaaaagatttgtgcaatctggaagcagaatgctcccttaa

SEQ ID NO: 6861 - DNA, 681 bp, Photorhabdus luminescens
atggacaataaattaattatttcatctcaagttattaatacattagagcaaagtaatgatccttggggaataaaggataaaaattcatgctttatttatggtaatttggcattaaaatctattaagaatatttcaagttcatttgaatttgaagggttttatgatgatgaaataccttgggatggagccgaatttgccaaggaatacatcgctcatgatcaaaaagtgatggagaaagaagaaagagtgtgttcactagagacacatgtatttgggaaagaacaaattctgtcatcctacttttgtgcaaaatatcctttttaccatgaagacggaagttgtatgggaacgatatatcatgcttggcaagctcaggatttttcattcactcggttatttcgtggaaaacttccagcttctatattatttcaaccaccgactgatctctttactcaacgagaatgggatgttattttcctgatgttacaaaaatataccaataagcaaatcggtataatgttaaatatttcctaccgtacggttgaaaatcatatctcacgcatatgtaaacgaattggtcttcattccagtcggcaattggaagaatattgtcgcaccaatgattatgatctctatgtgccaaaaagatttgtgcaatctggaagcagaatgctcccttaa

SEQ ID NO: 6862 - DNA, 684 bp, Photorhabdus luminescens
atggaaaatgaattaattatttcatctcaagttattaatacaatggagcagagtaatgatccttggggaataaaagacaagaactcatgctttatttatggtaattcagcaacaaaacagttcattcatgattttaaaaaatcatttaattatgaagggctttatgatgatgatctcaactgggatggagctgaatttgcaaaagaatttattgctcatgataaaagtgtaatggaaagaggaggaagggtatgttctcttgaaacacatctgtttggcaaagataaatttctatcgtcttacttttgtgaaaaaacgcctatttaccatgataacggggattgcataggaactatatatcatatgtggaaagctcaggatttttcattcacccggctattttatggaaaacttcctgcttctatattatttcaaccaccaactgatctctttactcaacgggaatgggatgttattttcctcctattacacaaatataccagtaagcaaatcggtaggatgctaaatatttcctatcgtacggttgaaacccatatatcacgcatatataaacgaattggtcttcattctactcgtcaattagaagattattgtcgcaccaatgattatgatctctacgtgccaaaaagatttgtgcaacctagaagcaaaatgtttccttga

SEQ ID NO: 6863 - DNA, 681 bp, Photorhabdus luminescens
atggaaaatgaattaattatttcgcctcaagttattaatactatgcaacaaagtaatgaaccttgggcaatcaaagacaaaaactcatgttgggtttttggtaatttggcatttagacaaatccaaaatctcccagatttatttgattatgaagggaaaaatgatagtgaactcccctggaacggggctgaatttgcaaaagaattcgttattcacgataaaaatgttatgaaacaagagaaaagaatatgttcacttgaaacacatacatatgggaaagataaatttctatcatcttatttttcggaaaaatatccaatctataatgatgaaaacgaatgtatcggtctctttctccatgcatggaaagcccaagatttctcacttactcgactattttatggaaaacttcctgcatctatattatttcaaccaccgactgatctctttactcaacgggaatgggatgttattttcctcctattacacaaatataccagcaagcaaatcggtagaatgttaaatatttcctatcgtacggttgaaacccatatatcacgcatatataaacgaattggtcttcattctactcgtcaattagaagattattgtcgcaccaatgattatgatctctatgtaccagaaaggtttgtgcatccagaaagcaaaatgtttccttaa

SEQ ID NO: 6864 - DNA, 681 bp, Photorhabdus luminescens
atgaagaagaactatgtcatctctcctcagattattaatacaatggagcaaagtaatgccccctgggcaataaaagataaaaactcatgccacatttatgtcaatcaggcatgtaaacgtcttctcaatatttcacgttcctttgattttgaagggctttatgataatgaattaccctggaatggggccgaatttgccaaagaatacatcgctcatgatcaaaaggtgatggaaaaagaagaaggagtatgtttgcttgtaacacatacttttggaaaagaacaaattctgtcatcctatttttttgaaaaacatcctctttatcatgaagacggaagttgtatgggaactatttatcatggttggcaagctcaggatttttcattcacccgattatttcatggaaaattacccgccaatattatgttccagccaccgactgatttatttactcaacgggaatgggatgttattttcctcctattacacaaatataccagtaagcaaatcggtaggatgctaaatatttcctaccgtacggttgaaaaccatatctcacgcatatgtaaacgaattggtcttcattccagtcgtcaattggaagaatattgtcgcaccaatgattatgatctctatgtgccagaaaggtttgtgcatccagaaagcaaaatgtttccttaa

SEQ ID NO: 6865 - DNA, 681 bp, Photorhabdus luminescens
atgaagaagaactatgtcatctcccctcagattattaatacaatggcgcaaagtaatgagccctggggaataaaagataaaaactcatgctttatttatgccaatcaagcatgtaaacgtgttcaaaatatttcaagctcttttgactatgaggggctttatgattatgatcttccctgggatggagccgaatttgctgaagaatacatgactcacgacagaatggtgatggaaaaagaagaaaggatgcgttcacttataacacatgtacatggaaaagaacaaattctttcatcttatttttttgaaaaacatcctttttatcatgaagacggaagctgtataggaacaatatatcatggttggcaagctcaggatttttcattcacccgactatttcgtggaaaattacccgccaatattatgttccagccaccgaccgatcgctttactcaacgggaatgggatgttatttttctgatattacacaaatataccagtaagcaaatcggtataatattaaatatttcctaccgtacggttgaaaaccatatctcacgcatatgtaaacgaattggtcttcattccagtcgtcaattggaagaatattgtcgcaccaatgattatgatctctatgtaccagaaaggtttgtgcatccagaaagcagaatatttccttaa

SEQ ID NO: 6866 - DNA, 681 bp, Photorhabdus luminescens
atgaataagaactatgtcatctctcctcagattattaatacaatggaacagagtaatgagccctggggaataaaagataaaaactcatgctttatttatgtcaatcaggcatgtaaacatcttcaaaatatttcaagttcttttgactatgaaggtctttatgaatatgaattaccctgggatggagccgaatttgccaaagaatatatgcttcatgatcaaaaagtcatggaacaggaaaagagaatatgttcactcgaaacacatttattcggaaaagaacaaattctatcatcctattttcttgcaaaatatcctctctatcatgaaaacggaagctgtatgggcgtgatatatcatggttggcaagctcaggatttttcattcacccgactatttcgtggaaaattacccgccaatattatgttccagccacctaccgatcgctttactcaacgggaatgggatgttattttcctgatattacacaaatataccaataagcaaatcggtataatgttaaatatttcctaccgtacggttgaaaaccatatctcacgcatatgtaaacgaattggtcttcattccagtcgccaattggaagaatattgtcgcaccaatgactatgatctctatgtgccaaaaagatttgtacatccagaaagcaaaatgtttctttaa

SEQ ID NO: 6867 - DNA, 624 bp, Photorhabdus luminescens
atgaagaagaaccatgccatctcacctcaggttattaatacaatggcgcagagtaatgaaccctggggaatcaaggatgaaaactcatgctttatttatgctaatcaagcatgtaatcgcgttcaaaatatttcacgctcctttgactatgagggtctttatgattatgatcttccttgggacggagctgaattttctgaagagtatatggccaatgataaaatagtaatggaaaaagaagaacgaatatgctcacttgtaacacataaattttttaaagagcaaattctgtcctcttacttttttgaaaaatatcctctctatcatgaagacggaagctgtatgggaacaatatatcatggttggcaagttcaggatttctcattcacccgattattccgtggaaaattgcccgccaatattatgttccaaccaccgaccgatcgctttactcaacgagaatgggatgttattttcctgatgttacacaaatatagcaataagcaaatcggtataatgttaaatatttcctaccgtacggttgaaaaccatatctcacgcatatgtaaacgaattggggttcattccagtcggtcaattggaagaatattgtcgcaccaatga

SEQ ID NO: 6868 - DNA, 681 bp, Photorhabdus luminescens
atgagcaataaactaattatttcatctcaagttattaatacaatggagcaaagtaatgaaccctggggaataaaagataaaaacacatgctatatttatgtcaatcaagcatgtaaacgccttcaaaatatttcaagctattttgactatgaagggctttatgagcatgaattaccttgggatggtgccgaatttgccaaagaatatatggcccatgacagaaaggtggtagaacaggagaaaagaatatgttcacttgagacacatatacatggaaaagaacaaattctatcatcttacttttttgcaaaatatcctctttatcatgaagacggaagctgtgtaggcattatatatcatggttggcaagctcaggatccctcatttacttggctatttcatggaaaactgccggcatctattatgttccagccaccgactgatctctttactcaacgggaatgggatgttattttccttatgctacaaaagcatagcagtaaacaaaccggtaaggtgttaaatatttcttatcgtacggttgaaactcatatttcacgaatatatggaagaattggggttcattctagtgatcaattggaagagtattgtcgcactcatgattatcatctctatatgccaaagaaatttatccatccaaaaaacagagtttttctttaa

SEQ ID NO: 6869 - DNA, 672 bp, Photorhabdus luminescens
atgaaaaataactattcactatcacctcaagttattaatacaatggaaataagtaatgaaccgtggggagtcaaggatagttcttcaaactttatctacggtaattcagccacaaaaaaatttatccataattttaaagcgtcatttgattatgaagggctttatgatcatgaattgccctgggatggtgctgaattcgccaaggagtttattctccacgataaaagtgtcatgactaaaggcgaaagagtctgttcacttgaaacccatgtttttgggcaagagcaaactttgtcatcctatttttgtgaaaaattgcctctttatcatgataatggtcattgtatgggaattatgtaccatatgtggaaggctaaagagtattcattgacctgcctacatcaatattatgataaattaccgccatccttgctattccagcccccctccgatctttttactcaacaggagtgggatattatctttctcttcttacagaaacagcccaaaaaacagattgggaaaatattgaatatcgcctatcatgaggttgaagaacatatgctaagaatatatcgcaaaatcgggattcactccagtcaacagttggaagagtattttcgagccaataattttgagcactatatcccagaaaggtttttattgtcttag

SEQ ID NO: 6870 - DNA, 696 bp, Photorhabdus luminescens
atgaataaatcaggattaaaacaagtcccttttattacccgccagttaacacatgtatgggacagaagccctgatccttggtttgtaaaagataaggaatcccgctttatttatgcaaataccaagtttattaaaatcattcagttaccggaaaactttagtattatagggtataccgttgaagaattaccaatagctgttaatggttttgcccatcactttaaagaacatgatcgcaaggtgttagaatgtatgcagaaagtatgctctgtcggcacttatcctcaaggtaatggtcggccgcctaaatcctatttttgcgaaaaatatccattgatgagtgaggataatcactgtgtcggcattatctctcacgccagagaattagagcactttacggtttatcattatattaaagagcatataccaacgtcagctagcctcaggccacctaatgatttgttaaatgagaaagagtggatggttatttttctattttgctgcggtatgaataataatgaaacatccattgaaatgaatgtttcatgccatgcggtggaaaaatattttgaaagtatttatgaaaaattatcggtcagctcattgactgagttacgattactttgcaaagaaaaagggtatgatctctatgttccatcaaggtattttctatcaataggccattttatattataa

SEQ ID NO: 6871 - DNA, 1137 bp, Photorhabdus luminescens
gtgaacacatatccattacctagtctgagcatggagcaggcgcagcacaaacagtttcatttagttgacattatttgccgccattttcccggtgctgatttcctcaccaccggagatttagggctggtgccgggattgaaccggccacagataacgcaacgtgttgaacaggtcattgccgatttcttttctgctgaggctgctgtgttagtacaaggggcgggaaccggggcaatacgttgtgggctatcggcattacttaatgcgggtgatcgcttgctggttcatgatgcgccgttatatccctcgacggcgattattgccgagcagatgggcttgcatctggtgcgggccgatttcaatcaatccgaacaaatacgagctgcgattttgcaacatttaccggtggcggggttggtacaacacacgcggcagaaaattgatgatgcttatgagctggcagacgttatatcactgctgaatgcggcatcactaccggttctggttgacgataactatgctgccatgaaagtggaacgtatcggttgtgaatggggcgcggcgttatcggccttctccagctttaaactgtttggcccgcaaggtatcggtgttgtggtaggtcaacaagcggcaatagagcgcattcggcgtagtatgtattccggtggcagtcaagtacagggatttcaggcattggaagtattgcgtggattggtatttgctccggtgatgcatgctgtgcaggctcaggtgagtgaaacattagtggtccggcttaatcaggggatcataccgcaggtgaaacaggcgtttatcgccaatgcacaatcgaaagtattgctggtggagttttatgatgagattgccgaacaggtacttcatgttgctcatcagcttggtgcactgccatatccggtgggcgctgaatcaaagtttgacattccgccactgttttaccgattatctggtacatttcgccaatctgatcccacgttagagaggcggatgataaggataaatcctaatcgaagtggtgcggagacagtgataaggctgctgagtcaaagctgtgcacaggctgcttccttgctacaccctcaaccactcccgatataccgctttccatcagtatga

SEQ ID NO: 6872 - DNA, 1335 bp, Photorhabdus luminescens
atggaaattgatccatttaaagcgggtttattggcggtgattggtgggatatctgccatgatggctaaccgcggtattgcagtatttcatgatgggctacgtcctttaatgccggaacatctggaagggcgtatgaatcgtaaaaccctggctgccaccagttttgccctaagttttgggttagttatcggctttggtattccgttctcgctgaccgccccgattattctggtgcatagcttattattgggaaccgatgtcattggtacttggtgtgcaaacagtaaaaaaggtttcatactttctgctgtcttgggagcgctgtatgccgttgccttgatgaccggtttacgatcggttgtcgatatctttgcccatttaccggttaatttcatgggcaacctgagtaaagttggcgatcctatcgtagcctgctttgcactatttcctgcgattgttgtggcctatcaatacggatatggcaaaggaatatgggtactgattgcgacattggtggggtatatcgcgaccaaagcggtaggatcattaagttttggtggggctctgagcaaaccggtgcaattggatcctaacgggatagccctgctgatctcaatgattgtgatgttctacttcgcgatgaaacagcgtgttcccaaagctggcgagggatctgctccggccaaaggggcgaatgagacgctggttgggttattctccacgcggatacagcgcattcaaaataacatttggttgctggtattaagtggtggtttgacggcggtagcggcttcaatgtcactcagtctgctggcggaaggtccggtatccttgcaactgatggcgcagggggaaggggctaatgccatgctggtggcgcttgccagagcgatcagctttgtgccgttagtcggtatgacagccattgctaccggggtttatagcccggtcggcatgaagtttgtatttgtcgccggattagtcacgaataatctgtggattgccttcattgccggtagtttgattatgtttatggaaatcaaactgctggcgagaattgctatctggttggataaatatcccggcgtcaaagcttgtggtgagcatattcgtactgttattacccgcatgttagaagttgccttattggtggggggaatgatggctgccaacgccattctgccgggcatgggatttatggtggtggcggggatttatctactcaaccgtacggctaaacgtcctttggttgaaatggcgattgggccgattgcaacgattgtagttggggtgctagctaacgttatttatctgttctccccctttattttgtga

SEQ ID NO: 6873 - DNA, 360 bp, Photorhabdus luminescens
atgagatttgttattggaggacaaattgagaaagaaaaaattgctgaaactttacgccatctggctggcgataaagcctcatccattaccgtgatgggtgacatagatgccgctatggcgcttaagagtggtgatgcggattactattttggtgcctgtaataccggtggaggcgctttggcaatggcaattgctattgttggtattgacaaatgcgccaccgtcagtatgccaggcaagatcctgcctgatgaagaaattattgcccatgtaaacgccgggaaaaccgcatttggttttaccggtcaggatatagacgcggttattctggtaattatcaaggctattcttttttcataa

SEQ ID NO: 6874 - DNA, 891 bp, Photorhabdus luminescens
atgacccagaaaaacagaattgacgcgtccggctatacctatgtacatgagcacctgcatctcgatttatcatcatttaaaaacaacattgactgccgactggatcaatacgagctgatttgtgaagagatgaaaacactggtcagcttgggtgtacacaatattgtggagatgaccaatcgttacatgggacgtaacccacagtttatgctggatctgatgcgggactccggcattaatgtaatagtttcaactggctattaccaatctgccttttttcctgaacatgtagcacataccacagctcgacaactggcggatgaaatgatcgctgagattgagcagggtatcgacgatacaacgctgaaagccggagtgatcggggaaattggttccagtaaaggggtaattacgccggatgaagagaaagtctttcatgctgcggctatagctcatctggcaaccgggcatcctatttcgacgcatacgacattaagcacgatgggccttgaacaactggcgttactgaaaaagcacggtgtagatgctgaacgtgtagttattggtcactgtgatcttaaagataatctggacaacattttgcgcatcattgaactgggggcctatatccagttcgacacgattggcaaaaacgattactacccggatgaaaagcggatcgctatgttacagaccttggcccaacgtggcttgcttaaccgcgtcatgttatcgatggatattacccgtcgttctcatttaaaagccaatggcggcaatggatttgattatttaatcaccacctttgtgccgatgctaaaccgggctggattaacgcaaaccgatattgatttgatgttacgtgataacccaatgctatttttcaactaa

SEQ ID NO: 6875 - DNA, 1179 bp, Photorhabdus luminescens
atgtttatacatgcactgaacaaacaaaatccggcactgattgaggcagcccagacattatgggcgcaaggggtcttactgcctgatacttatgtgattgacgtggatcaggttttagaaaatgccagacgattgcttgcggtagcggagcattatggcattgctctctatctgatgaccaaacaggttgggcgtaactcctggttggcacgtaaactgatggaattgggttatcagggtgtcaccgcggtggattttaaagaggctagagccttgatgagtgggaagatcccagtgactcatgcaggccatctggtacagatccctcgtaatatggtctcctcagtgatgcagcaacatccggaagtgatcacagtatattctttagaaaaagcggaggaaatttccagtctggcgcggcgtgagggaaatgtgcaacgcattatgctgaaaatctacgatgatcatgaccatttatatccgggtcaggaagcgggttttcacttgtcggaattgcacaccatcgttcagcacattatggcaatgcccggtgtaaaactgacggggttgacacattttccttgcttgctgtggcaagaggatcagcagcagacactgccggcaccaaacttatttactttactgaaagcaaaagacattttacgacaaactggggttgaggtgacgcagataaatgcgccatcggcgtcaagctgtagcacactgccgttactggcaaagtatggcgtgacccataccgagcccgggcatgcgctaacaggaaccatccttgccaattttcggggagagcagccagaacgcattgctatgctctatttgacggaaatatcccaccgatttaacggtaacagttactgctatgggggcggttattaccgtcgtggacgggcgcataacgcgctgatattcctgccaaacggccagatcgccgccacgcacctgttaccgatggataacaccagtattgattaccactttcctctgagcggtgaatttccggtcggctgtgctgtcgtgctgtgttttcgcacccagatatttgctacccgcagtgatgtggcgttagttagcggtatccagtcagggcatccggtcttggaagggctttatgacagccagggaaaccctatcccgattaatggagaacatggtctgtga

SEQ ID NO: 6876 - DNA, 357 bp, Photorhabdus luminescens
gtggaaaatcggctgaatctgctctatcagggaaatgtcattgatcaggatattcatgatggcatgttacaagttgtggcgcagcttgaaaacgattgggaaattcctgtcaggaatgcgttaggggaaatagtaataacacatatggccaacgcgttaatgcgctcacgccggggagaacaaatcagttcaatggataatgaactgctgatggaagtgcgtcaatcgagaatcttttctcatttgcaagcaattaacgcttcgctgctggcacattttgacgtgcaattacatccctgtgaagagggttatctgctggcaaacttgtttagcctttgggcggcaaaggggcagtga

SEQ ID NO: 6877 - DNA, 906 bp, Photorhabdus luminescens
atgagtcatgggctgcttaaaaaagagggggttgctcaagcgtgtctggcacgttatctgctaggtgagcgctgtggtaatcggttgaaaacgattgaagagctgtcatctgactatgggttatctgttgggttagttcagtttgcattaaaaaaactggagagttctggcgcggtttatgtggaacgacgagggcgtaatggtagctatttggtcagtatggatcacaaagcactgttagcccatgctgatattagcaacgtagtttgtgcaatgccgctgccttatacccgattgtacgaagggctggcgagcgggctgaaagcgcaatttgagggcattccattttacttcgcccacatgagaggttcagatgccagggtggaatgcttgcgtaagggtatttatgacttggcggtggtatcacatttggcggcgcaaacttatctggaacaaggtgatgtttgtactgtacttgaattggggccacatacctatgttggtgcacaccaactgatttatcgcaaaggaggtgaacataatatccgtcgtgttgggttggatcatcgttctgccgaccagaaaatcatgactgaagtgtactttgccgggcaggatatcacgttggtggatatttcttaccacgagagcctgtataaggtcgcgaaaggtgacattgatgccgtgatctggaacgtcagcagagaagttgaactcagttccagagagcttattgcagtaccgctcagtggaagtgcatgttttacccgagcctctgaagcggtgattttaaccagagctgatgacattctgatgcaacaacttttacgcacgatggtaaatacaacagagttattagttcatcaacaacgtgtactggcaggtcaacaggacccaagttattaa

SEQ ID NO: 6878 - DNA, 1671 bp, Photorhabdus luminescens
atgatgaaaatgctgcttatcgttgatccttcactcggacttgccggaagttatctggtgaaaacaatcctcagtgccgctgcggcggaaatcgggcagatactaacagaaaatccagcagaggccgatttggtggtcgtgaccggcagtcgcatccccaccgataacacattgaacggtaagcttgtttatctcggtgacacggaacaggcattgcatgcgccgaaaaatttctttcagcaggcaaaagctgacgccaagccgtatcagataccggcaactgacatcagttgtgatacaaaacggattgtcgcggtgactgcttgtcctacaggggtagcgcacacctttatggccgctgaggccatcgaaaccgaagccaaaaagcgcggttggtgggtcaaggtggaaacgcgtggttcagtaggtgcgggtaatgtgattacgccggaagaggtagaaaaagcggatctggtgctagtcgttgccgatattgacgtagatctggcgaaatttgccggaaaaccgatgtaccgtacctctaccgggctggcgttgaagaaaacagcgcaagaatttgataaggcgctagccgaagccaagcttttcgagccggaagggcaaaaggttaaaactgaccggagggaagataataccggtatctatcgtcacttgttgacgggtgtttcttacatgttaccgatggtggtggcgggtggcctgtgcattgcattgtcatttgcttttggcatcactgcatttaaagaatcgggtacattggcggcggcgttaatgcaaatcggtggtagctcagcttttgcgctgatggtccctgtactggcaggttacattgctttctcgatcgctgatcgcccaggtctgacacccggtttaattggcggcatgctggcaactagcacgaacgcgggatttattggcggtattattgcgggtttcctcgccggttacgtagcgaagttgcttaacagcaaagtgaaattgccgcaaagtatggccgcattgaaaccgatcttgatcattccgctatttactagcctgatcactggcctgattatgatttacgttattggtaaacccgtcgccggtattatggcggggctaacgtattggctttctcacatggggacaaccaacgcactcctgctaggagccattttgggcgggatgatgtgtgctgatatggggggagcgataaacaaagctgcctatgcgtttggtgtcggcttgcttagctcacaaacctacgcgccaatggcggccattatggctgcggggatggttcccccgctggctatgggagtggcaacactgattgcccggcagaagtttgataacgttcagcgggaaagtggtaaagccgcattggtgttaggactctgttttatttccgaaggcgcgattccctttgctgtccgtgatccgatacgtgtgctcccatgttgtatcgttggtggtgcggtgacgggagcgatctctatggcaataagtgcgcaattaatggcaccgcacggtggcctgtttgtgctgttgattccaggtgctatcacaccaatactgggttatttgatgtcgattattgtcggtactttgttggcaggattgatctatgcactgattaagcgtccagaaacgaccacaactaaaccataa

SEQ ID NO: 6879 - DNA, 1128 bp, Photorhabdus luminescens
atgttccagttggctctgcaaaatatccatacaggcgcaattgcgaccagtaaagaggatgctattcgccaggtggcggccatgttagccgcgaatggtaacgtcggtgatgcctatgttgacggcatgttgcaacgtgaaaagcaaatttccacctaccttggcaacggtatcgccattccccatggcacgttagatactcgtgatctggtcatgaaaaccgatgtacaggtatttcacttctcacagggtgttgaatgggatcaaggcgcgatgtgttatgtggttattggtatcgccgcgcgttccgatgagcatttggcactactgcgccagttaacacacttactgagtgatgatcgtattgcaaaacagctaaaaactattgagtcagcacaggcactgcatagcttgctaatgggagaagttcagcagtctgagttcaaattcgataccagcttgattacgttagatgttaatgcctgcgatctgatgacattacaggcattgaatgccgggcggttacagcgagcgggggccgtggatacgacctttgtcagcaaagtgattaacagtaagccactggatcttgggcagggcatttggctcagtgatagccccgacggtaacttaaccagcgctgtagcagtgagccgattattcacgcgggataacgagccggtggtgatgttgctgacggtggcggttgctgacgaccaaccactaagtgtgttgcaccacctaagtaacttgctattagcacaaaaagcggaatgtttgctgaaagctgatgcgccgacagtgctggcattactgaccagcggcgcactggcgcagagcaccatatccagcggggaatttgtcctgtgcaacgaacatggcttacatactcgcccaggtgctgtgttggtcaatgttatccggcaattttccagtgaaattaccctcatcaatcttgatggtgccggtcaaccggtaaacggccgtagtctgatgaaaatcatgacattgggcgctaaaaaaggccatcggcttcacattactgccaatggtgatgatgcgccgcaggcgatagcggccattggtgaagcggtggcctccggtttgggcgaggggccgcgagagtag

SEQ ID NO: 6880 - DNA, 621 bp, Photorhabdus luminescens
atgggtcagcgaagacatctaacgcaatacgaagtggaaagaatgctggaagtggcgaaaaagggccctaatggggagcgcgactattgtctggtatacatgagttttgttcatggcttacgtgttagtgaagccaggtatctacggatatctgatctggatttggaagatggcagtttgtatatccggcgtttaaaaggcggattttctactattcatcctctgttaggctatgaaatccaggcgatcagggagtggctaaaagtccgtaaaaccttccgaggggcagaaagtgattggttgtttctgtcacgcagcggaaacccactgactcgccagcgcatttatcaacttattagtcaattaggacgattggctaatatttccgtaggctctcatccgcacatgttgcgccatgcctgtggttttgcgcttgcagatagggggatagatactcggttgatacaagattatcttgggcacagtaatattcgccatacagtacgctatactgccagtaatgcagagcgtttccacggtgtttggggtgtaaaaaggaatcggcaccgagaattacactttgattacgtcccaaatgaaaatccttgtccaactgaataa

SEQ ID NO: 6881 - DNA, 195 bp, Photorhabdus luminescens
ttgaatatctatccattacacagcttgagcatagatcaagtacagaaacagaggtttcatacagtcatctgccgctattctggcgcaggtttaattactatgggggatttagggttggttccgggtcttaatcagttacagataacgcagcgtgttaaatgcgttgcaacaaagaatatttgggatagaccataa

SEQ ID NO: 6882 - DNA, 1542 bp, Photorhabdus luminescens
atgaaaagaatcattaacacattgcaaaaccttggcaaatctttgtatggcccggtgttaattctccctattgtcgggctgtttattgcttttggcaatgtattgggaaacggtaaccttgcagaatatcttccatttttaaaccacgggttaattcagcaatctggcaaactgatcgcccaatctgctatttcaatattgagcaatctggcgttgatttttgctgttggaatccctatcggactggcaaaacgcaataaaggttatgccgcattgatcggtctggttactttcgtcatttttatcaacgccatgcacgtcactttagcattacaaggaaaattggtgccagaaacgcaaatgcgcaatgttggtcaaggaatggtgctaggtgtgcaagtattggaaatgggggcttttgccgggatattgatcggtgcactggctggctattgctataaccgttattcgtcaaaacagtttaatggtgtaatggcaatttattccgggcactgttttgttgccattctgatgatccctctggccgttatatcgggttacttaatgagtgatatttggccctatgcgcaacggagcatcagcgcccttgcgcatggtattcatgagtccggggcatttggcgtcgctatatacggctttctggagcgcattctgatccccttaggtttacatcatctggtttacacgccctttttgtataccgaattagggggcattgcagaggtatgcggcactgtacatcaaggagctcgtaatatctatttcgctgaaatggcctgcccggctgtacatcaactcagtcacagcgtggtatgggatgcacgagggatcagcaagatgtttggcctgactgccgctgcactggcaatgtatgtgactgcccgcccagaaaagaaaagtacagcaaaagctgttctcatccctgccgccatgaccacttttttgttaggcgtgaccgaaccactcgaattttctttcctgtttgttgctccgctactatttggtgttcatgccgtgctaaccggtttaggttttatgctgttctatctactcggcgtacatgctatcggcgctaatggcataatcgacttcatactgtacaacttaccgctcggtaccgaaaaatctaactggccaatgtatatcgccgtagggctaatcatgtcggtgatttatttcttcgcattccgtttcctcattttacattacgacctgaaaaccccgggacgcgaaaataacgatcaggaaacacgcctctatagcaagcaacagtatcaagttgccaatgatgacaaaccaggacaacaaatcatctgtgggttaggtggtacagcaaatattgtcgctatcgacaactgctacacccggctacgcataacagtacatgacaccacgctcattgacaaaaacaggcttaaatcaaccggcgcaaaaggtgtcatctgtcagggaaataacgttcaggtaatttacggtctgcacgtccaaaaaatgcgtgaagccgtagaagaagcactttaa

SEQ ID NO: 6883 - DNA, 1359 bp, Photorhabdus luminescens
atggctaacgcccctttcattttaactatcgctggcggcgggagtacctatacgccaggtatcgtaaaaagcctgatggtacggctaaacgacttcccactagcggaaattcgtttgtatgacatcgatactcaccgacaaaacactatcgcgccggtagtagaaaaggtgatacgcgaacatagccagacgattcgctttgtcgtgacaagcgaggcaaaaaccgcctttagtggtacccattttgtctttgctcagatacgcgtcggtcagtataaaatgcgagaacaggacgaaaagatccccttacaccacggcgtaattggtcaggaaacctgtggccttggcggattggcttatggtctacgtactattatgccaatggtgaaactgatcgatttagtggagcgctacgcagacaacgcttggatcgtaaattactccaaccctgcctctatcgttgctgaaggaatacgccgtctacgtccacacgctagcgtactcaatatctgtgatatgccagtggccgctatgcgcaacatggcagcaattttagacgtagatcgccacgatatgactgtcgattactttggtctgaaccatttcggctggtttaccaaggtatgggtgaacggaaaagatcatttgcctgaattgcgtcgccatatcgctcagcatggtttactgactgctaatgccgcacagacagatccgcaacatgccgatccgtcatgggttaaaacctggcgtaatatcaagccgctcatggaccattttcctgattatgtgcctaacccctatttgcaatactatctgatgccaaaccatattgttgagcaccaaaatcctgactatacccgtgccaatgaagtgatggacgggcgcgaaaagaagttgtttaaagcagcggctgagtttaaacatacagggattttacccgacgctttccatgtaggggtacatggcgcttttattgttgatgtagcatgttcactggcttttgatttgcgccaacgccatttggtcattaccgaaaacagaggcgctatcgctaacttaccttatgatgcaatggtggaagtacctgcttacattaccgctcaaggccctgaaccggtatgtatagggaacgtaccactgttccatcaagcgctgctagcgcaacaactggcttcagaacagttgttagtggaagcggcattagaaggtagctatgagaaagtgctgcaagcattcacactgaatcgtaccgtccctaccatgcaacaagccaaagcgattctggatgaaatgatcgaagccaacctgggttattggcctacgctaaatccagcctggcaccaaggtgaagcgatttaa

SEQ ID NO: 6884 - DNA, 780 bp, Photorhabdus luminescens
atgacggataatcgattagcacccttattacagcacagcgaaagaataactcgcgcggaataccgcgtattatcctatttaaccgcgcatccattgttaattgggcaaattacagtacgtgagctggcaaaagctacgttcatttctcccgccactattatgcgtttatgtcagaaactggggttcagtggctatagtgaatttatttggtactgtaaacaattactgtccagtggaacgtctatttccgggaatattcagccccatcatactgagataattcctgatgcatttgaacacttcgtgactaattaccgtaaaactttctctttaattacaccagaaaaaatgtcacgctttagcactctgctacgtgagaaagagaatttttttctctatagtgccggtttctccagactatttgccgattacttgacgcaaaaattgcaaatattagggaaaactgcttttaaatccggcccaggagatagccgtaagattttcctaagtaatgcggtgaaatatgaagtttttattgctatctctcgcagcggccagacagaacaagtattggataaagtacgcattgctcataatgttggtatgacagtcattgcatttacccgctcatctgctaatccattagcttcactggctgatgtgcactttgcactgtatgacgaggcaatttatttcgatgcagaaatcaacgaaataacttcattcgagtctaatctgatcatgctcattgatttactattattacaagcaacgtcttaa

SEQ ID NO: 6885 - DNA, 138 bp, Photorhabdus luminescens
ttggcagcaagcaatgaaccgtggggagtaaaagataaatcttcctgtttcctctatggtaatgatgcattaattaaactccaaaatataaatgccaactatgattatgaaggtaaatatgatagtgatattccctag

SEQ ID NO: 6886 - DNA, 450 bp, Photorhabdus luminescens
ttgcaggtaataaaaaatagagaaagtattttatcattagagacacatgtatttggacaagataaagttttatcatcttatttccaagaaaaatttccactcgatgatgataaaggtgaatgcatcggtattcttttccatgcctggaaagttcaggataattcactgactcggctatttcacagtaaactacctccttctattatgtttcaatcgccgactcatctcttgactgaacaggaatgggaagttgtctttctttttctacaaaaatacaataggacacaaatctgtcaattactcaaaatttcagataaaaccatagaggaatatataagaaagatttataataaattgaaagttaactcagactcacaactggaggaatattgccgactaaatagttttgatctctatgcgccaaaaaggttcttattgtcttacttataa

SEQ ID NO: 6887 - DNA, 696 bp, Photorhabdus luminescens
atgagtcaatcaggatgtaaaaaagccccttttattactcctcaattaactaatatgtgggataaaagctcagaaccatggtttgtaaaagataaggagttccgctttatttatgcgaataaaatgtttattaaagctaataagctacctgaaaatattgatattattgggtataccgataaagaattaccttcgccagttagtcaattctctcatctttttgaggagcatgatcataaggtgttacagggtatgcaacgaatatcatctcttagcacttaccctcaagcaaaaaatgaacaagccacatcctatttctgtgataaatatccgttaatggatgaaaataaacagtgtattggcataattgctcacgcaagagaaatacataactttactgtatctcattatatggagaacaatatccctatatcaattcgatttcaaaaacctaacaatatattaaaagagaaggaatggataatcatttttttattctgccgtggcgttagtaatagatatatcgctgacgaaatgaaaatttcatatcgtactgtggaaaagtatttcgaaagtatctatgagaaactatcagttagctcagcaattgagttaagaacactttgcaaagagaatagttatgatctttatattcccccccaataccttcaatctataggccatattttgctataa

SEQ ID NO: 6888 - DNA, 1257 bp, Photorhabdus luminescens
atggaattttttcattttctgatgagtgatgtcctgtcagaacctgcgattttggtggggtttatcgcgcttgttggtttgatcgtgcaaaggaaaccggtgactgaatgtatcaaaggtaccataaaaaccattatggggtttttgatcttgggggcgggggctgggttagtcgtctcgtcactggggggttttgctgaaattttccaacacgcttttggtattcagggagtcgtaccaaacaacgaagcaattgtttctattgcgcaaaagagttttggtaaagaaatggcaatgatcatgttctttgctatggtgattaatatcctgattgcacgttttaccccgtggaaatttatctttctgaccgggcaccacacattatttatgtccatgatggtcgcggtgattctggcaaccgccgggatcaagggttcgatgctagtggctattggttctgtggttgttggcgttgcgatggtttttttcccggcgattgcccatccatatatgaagaaagtgacaggttctgacgacgttgcgattgggcatttttcctcgctttcctatgtgctctctggctttattggcagcaaactaggcaataaggctcactcaactgaagagatgaatgttccgaaaagtttgctgtttctgcgtgatacaccggttgctatctcttttacgatggcgattattttcatgatcagttgcttattcgctggcggtgattttgtgagagaagtcagtggtgggaaaaatggatttatgttctcgctaatgcaatctattacctttgccgcaggtgtatacattattctgcaaggtgtgagaatggtcattgcagaaatcgttcccgcgtttaaaggaatttctgacaaactggtcccaaatgctaaacctgcattagattgcccggttgtctttccttacgcacctaatgcagtattggtaggattcttgagcagttttgtggcgggcgttatcggtatgtttgtactgtatgcactcggtatgacggtcattattcccggcgttgtgccgcacttttttgttggtgcggcggccggggtttttggtaatgcgacaggggggcgtagaggcgctattctcggggcttttgctcagggctttctgatcaccttcttacccgtatttctgttacccgttttgggggatatcgggattgctaacacgacattcagtgatgctgactttggcgcattgggaattctgttaggtattattgttcgttga

SEQ ID NO: 6889 - DNA, 306 bp, Photorhabdus luminescens
ttgctatggggaaacagtatgaaaattaccgtcgtttgcggacatgggttaggtaccagtttgatgatggaaatgagcatcaaaaatattctgaaagagatgggagtagaggccagtgttgatcacatcgatttgggatcagcaaaagcaactcaaagcgatatttttgtcggtactaaagatattgcagaacaactggttattcaggcagtcgatggcaaaattgttgcgctggacaatatggtggataaatcggcaatgaaagtacgtctgtccgtggcattagttgaacttggtgcactgtaa

SEQ ID NO: 6890 - DNA, 444 bp, Photorhabdus luminescens
atgctaaagacgttactcacccaagatgtgatccaagtgataccggatgttaaaaattggcgcgaagcgatcgcgattgcttgtcagcctttggtggaaaatggtgctatttctgcttgttatattgatgctatttatcattcgcatgaggtaattggtccctattatgttgttgggccgggaatggctatgccacatgccagaccggaacaaggggtcaataaattagctttagcattaactgtgattagcaaaggagtggagtttggttctgaggaaaatgatccgatcaaattgttgattgttttagcagcaactgacagcaatagtcatattgaagtgatcgctcagctcgctgagttgtttgataatcaacaggatgtcgcattgctgatgagtgccaaaagtaaagaagagattcttgccgtgattagccagtattaa

SEQ ID NO: 6891 - DNA, 1044 bp, Photorhabdus luminescens
ttgatgaaaaagacacgaaaacgccgtaatacagggcgagtaacattacaagatgttgctaagtatgccggtgtcggttcaatgacagtttcacgcgcattgagaacaccagaaatggtatcggataaattacgagaaaaaattgagcaggctatacaagaattgggatatatcccaaatggcgctgctggcgtacttgcttcgggccaaagtaatattatcgcggtacttgtgccctcactgacagataaagctagtgctacgtttatacaatcactgcaacaagtgctgaataaacatgcctttcaagttttgcttggatgtcatgaatatgaccataataaagaagctgaaattatcatgacattactgcaaagcaatgccgcagcactggtgattttcagttcacaactggcagataaaacctacagcaatatttctcatatcaatattcccattattaatgttgctggctctcatcaacagcagacggcaattaatatagaaactgatttttccgcggctgcctatatgttgactgagcatatgttgaataatggccgcaagcatatcggttatattggtgcccaaatggatagccgtttacgcaatcagcagattaatggctggcataaagccatgcttcatcactatcagaatgctgaccaaaatatcactacctcggatactgctagcatgcaatttggtcgccaggcaattactgaaatgttattacgtcaacctgaactggaaggtgtgatttgcagtcatgaagtgattgccctaggtgtcatgtttgaatgccagcggcgtctacttaaaatacccgctgatttggctgttgcttgtctggatggttcagataactgtgaccacacacagccaacactgacatcaattcgcattaattatccccaaataggcagggacaccggaaaattactgataaaactgctcactcaacaaggtgaagatgaaacaaaacatcaaaacaaccgatatcacctattttcatataagttcgagcctagacaaagtgcttag

SEQ ID NO: 6892 - DNA, 465 bp, Photorhabdus luminescens
gtgccaacatctacccgttttgctgttgctatccatattctcaccgatattgcgcttcaccacggacaagccgtgcgttctgaagatatcgcaaaaagcgtgaatactaatccgacggttgttcgccggctcttaggtgcccttgcggaggctggtctgacttattcacaaatggggcaaggaggcggagcgttactcgcccggccgtcgaatcaaatctcattattagatatttatcgcgcagttgaagatcctctgtactttacgttgcaccgttctaaacctaatcccaagtgttatattgggcacaatatcaccccagtattagaagatgaattctcgcgtgttacttgtgtgctagaaaccgctttagctgaaacgacggtggctgacatagtcaatagggttgaggattgcgcgggctttcctttcgcgccacatgatctcagtcagcagataaaatag

SEQ ID NO: 6893 - DNA, 402 bp, Photorhabdus luminescens
atgtcagattcattaaatgtatctattgttcgtcgcttttatgactctacgggtgatattgatgttcttcgccagattatggcgagtgatgttatttgggatgttactgaaggatctcggtatggtggggtttatgaaggaattgaagatatattgaataatttctttgtgccacttcttaatgatgttgatgaattcgttgtagatggttctgaatattttgagtcaaatgatcatgtcattgttctgggtaattatttgggacgggtgaagcgtggcaaacgattcattgctcgtttcgttcatatatggacagtgcgggatgggcagctagttaaattacaacaaactgccgatacgcttcaaattgagcgtgctcataccgattattccattcggtaa

SEQ ID NO: 6894 - DNA, 1056 bp, Photorhabdus luminescens
atgcctacactttttgatccaattcgcattggtgatctcgacttgccaaatcgcatcattatggctcctctgacacgtaaccgtgcagaaggagaagggcgtgtccctaatgcgctgatggcggaatattatgctcagcgcgcttctgctggtttgattatcagcgaagcgacttcagtcactccgcagggagttggctacgagaatacgccgggtatttggtcagatgagcaagttgctggttggcggttggtcacggatgctgtgcatgctgctggtgggcgtattttcatacagctttggcatgtggggcggatatcggaccctgttttccttaatggagaacggccggtggcaccaagtgcaattgcggctgatggtcatgttagcttattacgcccaaaacgtcctttcgtggttccgcaggcgcttgagtctgaggagattcccggcattgtcgaagcattcagacgcggagcggaaaatgcgaaaacggcaggatttgatggagtagaaatacatggtgccaatggatatttgctcgatcaattcttgcaagataatgctaatctgcggacagatcagtacggaggttcagtcgaaaatcgggcccggttgctactggaagtgacagacgcttgtatttcagtttggggatcatcacgtgttggtatgcatttggcaccacgtggtggccattactctatggcggattccaatcctgtggcgacattcggatatgtcgcacgtgaactcggtaaacgtggtattgcttttatcttttcacgtgatgctgtcgttgatggtgacttaagtaaggtgataaaagaggcttttgggtcaacctatattgctaacgaggaactgactaaagaaagtgccgagcaagttcttgctgacggtcgggctgatgcagtggcttttggtcaattattcatctctaatccagacttacctcaccggtttttagttaaagcgccatttaatgaacaacaaccggaaacttttatggttcctggtgctataggctatactgattatccagcgcttacctaa

SEQ ID NO: 6895 - DNA, 330 bp, Photorhabdus luminescens
atgtcagaaggacaaaaagatccaaagattgatgtttatgaaacaagacgtttttctaaggcattatccaggttatctgaggatcttcttaggatagtagaagatgagattgatagaataattgataaccctgaaattggtgagcagaagaaaggtgatttaagtttccttcgagttcataactttcagttaaataaccagttaacattgcttggttattgttgggttgaagggaaaatagagttatacctgctgaactttggctctcatgaaaatttttatcaggaacaaaagcgacacagaaaagcggatttaaaactcattggatag

SEQ ID NO: 6896 - DNA, 237 bp, Photorhabdus luminescens
atggctatcagtatacgtttggatgatgatttcgtgaatgatgtaaaaattcatgcagaagcttcaagcagaagtgtacctaagcaaatcgagcattgggctaagattggccgcattgcggaggataaccctgatttgccgtactcttttatccttgattctttactggcaaaaagcgaagtcaatagcggtaaggtgtcgcgttatgtcagaaggacaaaaagatccaaagattga

SEQ ID NO: 6897 - DNA, 1722 bp, Photorhabdus luminescens
atgaatttattggatggtttacaaaaaaaactggacggttactttaataaaacaagtgaaatcaactatgtaaaaatatttgatactccccaaatatgggggcttccttttggaaaagagataatgccacaggcggttaaaagagcagcggaatttgaagatgctattgtaagcattctggaaaacatgcgttatcgctgtgatatttcctctttaaatgccccggatgcagagtggagaaaagttatcctatcagctattgatagcgcatttaccaaaaaaataaacaggaaggagagaactcagataaggttcttattcgctcaaacaccgacatctttgttaaacggtgtaaattcatactttgaaggtacccctgaatatctggcattgaaggaggatattattaaattaattcaagaaaggagagatcattgggagtgtgtacctgaaatatggattggtcggttttaccggatagtagacggacttaaagtatcattagagaagaaagtactgccagaggaaatgtttccagaagatgataccagaatgacatggaatcatacaaaaattatcgcagttgatggaattgagtcatttgtcggcggccataatttaaatatggatctgtttaaaaattaccctccagttcatgatgtctctgttaaagttataggaacggcatcattaagctcacaattatttttaaataacatgtgggtggctgatacagacctcttaacaaaagaattctttgatatagataaaaatagatgggttaatgcaaatggtattgtgggaaagccggaagatccattaaaaaaagagtacgttactgaatatatcgatagaaaaaaagaagagagcctaaaaaatccacctaaagacccagaatataagaaaacaagcaggatattatccgtaggtaaatattggtctggacctgatatgcgaacggattataaaaaaggctctgaaataatgaaagagtttataataaagaatgcaaagaaaaaaatccgcatgtcccaacaggatcttgtcagtgcatggaaaaaacaatggcgagatcatcatgtgtgccgatggttgatcgaagcattacttgccaaccccgaactggaagttcaaattgttgtatcgccacttgatgcagcagccggtgctgctggtgatcaatattcttttggttctggagccaaaagaacgtttgaaatatttaaatactatttgacacatgatgagcataccgataagaagctggaagatccggatggaatcaggcaagccgcactgaaaagaatagaggttgccccttttttctttacagacaaagtacctgaagatcttttgattgaagggacgacatacagatggccaaccccggatgaaaattcttatactgctacgctaaaagaaccgtctctttctgaaagacctccacagataggtgctataggacgcccattccgatccttaattaaagcaagtggtccggtatatcccaaagttccccctgctcctgggaatcatgcaaaagtaacaataattgatgatgaactctacgtggttggttctgataatctctatccggggtatctttcggagttcaattatcttattgagggagaagacgcggtgaaagcttttatagaatcctactgggaaccgttgtggaaatattcaggaacacattcatttaattacaaaaatacttga

SEQ ID NO: 6898 - DNA, 1332 bp, Photorhabdus luminescens
atgaaacgtactgaaattcaacaattactaaatgaatatccgttagtaaaaaatttgatggaattagaggaaatcttctggtttaacccttgtaataccaccttgaaagagggattgccttttgtcggtttgggcgctgatgatgttgaggatgctgaagcacgcttggatcgttttgcgtcttatttatgtaaagcttttccagaaacagccgtcacacatggcattattgaatcagaaatagtggctatacctacgatgcaaaaaacactggagcaacattatggtgtgggtatcacagggagaattttgcttaaaaaagatagccatttgcccatttccggttcgattaaagcccgtggtggaatttatgaagtgttaactcacgcggaaaaactggcattacaagcggggttgcttgctgaaaacgatgattacagcaaactgttttcagaagagcttagacggttctttaatcaatacagcattgctgtaggttctaccggcaatttggggctttccataggtattgccagtgcaaaattaggctttaatgtcagcgtgcatatgtccgccgatgctcgtgaatggaagaagcaaaagctacgttcacatggggtcaatgtcgtggagcatgagctagattatggggtagccgtggcccgagggcgtaaagaagccgaatctgctcctaactgtttctttattgacgatgaaaactcccaaacgttgtttctgggatactctgtcgcaggtggacgggtaaaggcgcagtttgagcagatgaatattgtggttgatgaagatcacccactcttcgtttatttgccgtgtggcgtcggtggcggtccggggggggttgcatttggattgaaactggcttttggtgatcatgtgcactgcatttttgctgaaccgacccattctcccagtatgttgttgggggtatatactggtttgcatgacaatatttgcgtgcaggatatcgggatcgacaatatcactgctgctgatggtcttgcggtaggcagggcttccggctttgttgggcgtgcgatggaacgtttgctggatggattttatactgttcaagatcaggaaatgtataacctgttgggcttactggatcgtgatgaaggtatccggttagagccttcggcgctagttgggatggcgggccctgctcgtgtgagtggaaaccttgattacctgaacaataagaacctttcagcagaaaagatgaaacaggctacgcatttggtctgggcaaccggtggtggtatggtacccgatgatgaaatgacaaaatatttggcgacagccaagatctaa

SEQ ID NO: 6899 - DNA, 1338 bp, Photorhabdus luminescens
gtggattcacaaccttgggtgattggtacgttactcacaagtattgcgttaattgtatttacgataattaaattaaaaattcacccttttcttgctctattgttagccagtttttatgtcggtgccttaatgggaatgaaccctgttgaaatggtgaacgccattcaagggggaatcggagatacgctaggttttttagccgtagtgattggtctggggaccattcttggtaagatgatggagatatccggcgcggcagagcggattggtatcacattgcaaaaatgccgatggctatcacctgatatcattatggtactgattggtttggtttgtggtattacgctgtttgttgaagtcggggtggtattgttaattccattggcattttctattgccaggaaaaccaatacatcattgctgaaattagcgatcccattatgtacagcgttgatggcggttcactgtattattcctccgcacccggctgcattatttgtgacgaataaactgggtgcggatattggctcggtgattgtttatgggttgatagttggcctgtttgccgctttggtgggggggccattatttctgaaatttctcggtagccgtctgccttttaaatcggttccggctgaattttctgaaattgcagttcgtcaagaagaggatttaccctctttaggcatgacattgtttactgtgttattgccaattgggttaatgttgactaaaacggctgctgaattaaatatggaaaaaggtaccacgttttatacggtgctggaatttattggtaatcctattacagccatgttcattgccgcgtttgttgcctattacaccttgggcattaagcaaaatatgggaatgagtacactgttgacgaagacggaagattgtttctcttctatcgccaatattttattaattatcggcgcgggcggggcatttaatagtattttaaaagtcagtggccttagtgatacgttggccgttattttgtcgagtctggatatgcacccaattcttttgtcttggttggttgccattattttgcatgcggcggttggttcagcaacggtcgcaatgatgggggcaacagcgattgtttcgcctatgttgccgttatatccagatattagccctgaaatcattacattggcgattggttctggtgctatcggctgtactattgtgacggattcactgttttggttggttaagcaatattgcggaacaacgctcagtgaaacttttaagtattatacaaccgcaacatttattgcctctgtggttgcgttggttgggacgtttcttctttctaccatcgtgtag

SEQ ID NO: 6900 - DNA, 939 bp, Photorhabdus luminescens
atgtacacagatgataatttcatggttgtaaataagttactcaatggaagccagttatcaaagctgcatacatttgagatagccgctcgccactgctcttttgttctggctgctgacgaattagctatcactgccagtgcggtcagccatcgaatcagttctctggaacaagagttaggattcaaacttttccagcgttttcacagaaaaattgaattaacttgtgaaggaaagcgtttattttggacaattaaatcaacgctggaacacctaaatcaggaaattctggaaataaaaaatcaggagttatcgggtaacctgactatttactcccgcccgacctttacccaatgctggttagtgcctaaattagctgattttaatcagctatacccatccattaacctgaacatcttagtcggtaatgaaaatgtgaatttccgcggttatggtatcgatcttgcgatctattttgatgatattatatccaatgaattatcacatcaatatctgatgagtgagtatattaccccggtctgtagcccgcagtatgctgaaaaacatgatctaatgggaaatattgacaatctacgatactgcacactattgcatgataaacaagcatggagttacgactctgataccaaagagtggaatacttgggcagaacactttgacattacactggagccatcacaaaagtgtattgtcttcgatcgttccgatttagctgccgttgctgcaatacaccatgcaggtgttgcaatgggaagaaaaaatatgatttgggaaaaaattgaaaacaatgaattagtcgccccctttcccaacactgaagtattatgtaaacaatattactatacctgtaccctgcctcaacaacagaatgagaaagtcaatgcctttatccaatggctaaaatcaactatagacgaataa

SEQ ID NO: 6901 - DNA, 549 bp, Photorhabdus luminescens
atgcaaaaattgttattaagctgtggagttatcttttctgtatctgcgataactttacctgctcaagcagaacaacatacagcttcaatcggatacgcctacgtgaaaccacaagatgtaagtgcactaaatggtgcaacattgagttatcgatatgaacttgatgatcaatgggggctattatcatcatttacctttgctaaaggagatgaaaaagagacaaaatattacacaggggaggacttgaagtactattctgtaatgattggcccaacctatagaattaatgactacattagtttatatgggcaactcgggctatccagaataaatgataaatctactgcccactatagtggtggatatatcgagaaggaatcaacaagcaaaaacactttaggttggggagcgggctttattatcaacccaacaaccaatacctcaattactgccggttatgaaggtagccgttttagtattaaagacggaaacgagaaagatcatttatctactaacggttttaatataactgtcggctatcgtttctaa

SEQ ID NO: 6902 - DNA, 846 bp, Photorhabdus luminescens
atgagccagaaaaatgattttaaggcgttttctattgataacaatgctaatgtagtgagccaagaaagatatgaagaaagtctgaatttgaataccggatttcaaccagataatgttcccactcacttgttaaataaagtattacgccagtcttcgacgatatcatctgtggtagctaattttatcgcaacacaatctaacaatgatattctggatgatggaaatataactaaacttactacacaattacataaagcattagaacaaaaagtcacaacagcaataccaaatgcctcattaacccaaaaaggcgttgtccagcttacaaatgttgtgggtaatgatgatacattagctgttacgcaaaaatttgctcagaatatcataaattcattgaatgaaaatattaatggtaaagtacccaatactcgtaaagtcaatgggaaggtgttatccagcgatattaacctaactgccggggatgtaggaagttacgataaatcagaatcagacgagaaataccaaccacgtggtaattatggtagtagaaacacggcttctttaagaactacaaatggttggtggcggtgtggtgatactgggctaatttatcaatggggacaatctcctgaggaaattgatgaaacatctaatatttattatttccctattgtatttccctctacttgtgctatcggagtagcaacacccgatcatcataagatagaagctggtgtcatttccgcatattttaaaattatggataatgcgagatttaaattaactcttgatcaagcttcaaatgatcaatcagctaaagttttttggtttgctattggatggtaa

SEQ ID NO: 6903 - DNA, 1407 bp, Photorhabdus luminescens
atggcagaaaatatacacacttcgctttccactaaaaccggggaaacgcagttgcaacgcaatctaagcaaccggcatatacaacttattgctattggcggtgccattggcacgggtctgtttatgggatcagggaaaacaatctctctcgccggaccatcgatcatattcgtttatatgattatcggtttcatgctgttcttcgtgatgcgcgcaatgggagaactactgctttcgaacctgaattataaatcattcagtgatttctccgccgatttgctcggtccttgggcaggttttttcgtcggctggacttactggttctgttgggtcattaccggtatcgccgatgtagtcgcaatcacttcctatatcagctattggcaaccagactttccacaatggattacttccctactctgtgtttcactactgctctcccttaatttggctacagtgaaattattcggggaaatggaattctggttcgccatgataaagatcgttgccattatcgctttaatcgcaacaggtgctgttctaattggcatgcattttcaatctccagccggtcataccgcttcactggcaaatatatggaatgatggtggattctttcccaaagggttaagcggattttttgccggatttcagatagctatatttgcctttgtgggcattgaattagtcggcacggcagccgcagaaactaaagatccaatgaaatcgcttcccagagctattaatgccatcccgattcgtattatcaccttctacgtgctggcgctgataattattatgtcagtcacaccgtggcgttcaatcattgcagacaaaagcccttttgttgagctgtttgttctaatcggtttacccgccgccgccagtatcgtgaactttgtggtattaacctctgccgcctcttcagccaacagcggagttttctccaccagccgcatgctatttgggttagcaaaagaaggtgatgcaccacagcaattcagccgcctttcacgccgttctgtacctgcatcggggttaatcttcacctgtttatgtttatcctgtggtgtggtgctgatttatttaattcctgatgttatgcatgtatttaccctagtaactaccgtttcagccattctgtttatgtttatttggagcatgatcctatgctcatatttggtttaccgaaaacgtcgcccggcattacataaggcttcaacctataaaatgccattgggtattatcatgtcatgggtctgtctgacattttttgcatttgttctgatcttactcactttacgggatgatacccgccaggcattaatcatcacgcctgtttggtttctgatcttaattatcggttttcaaattgtaaaaaaacgtagaacacgtttgtacagctaa

SEQ ID NO: 6904 - DNA, 600 bp, Photorhabdus luminescens
atgacaaaaattcttgtgctttattattccatgtacggtcatattgaagcgctggcatccgcagtggcagaaggcgctaaaaaagtcgctgacgtagaagtcacgattaaacgcgtaccagaaaccattccaccagaagcatttaccaaagcaggtggtaaagtagatcaatctgctccggttgcatccgtacaagagctggttgattatgatgccataattatcggcaccccaacccgctttggtaatatggccggccaaatgagaaactttctagatcagaccggtggcctgtgggccgaaggtaaactgtacggcaaagtcgctagcgtcttcacttccacaggcgttggtggtggtcaggagatgacgattacttcaacctggacaacgctcgctcaccacggctttattattgtaccaattggttacggtattcctgaaattggcgatatttctcagatgcagggaggaaccccctacggcgccagtactattgctgacggtgatggttcacgcatccccaacgaaaatgaattgaagatcgcccgttatcaaggtgagcatgtagcaaagatcgctaaaaaactgaaagattaa

SEQ ID NO: 6905 - DNA, 282 bp, Photorhabdus luminescens
atgaccttatcgtgcatttggaatggctcatcatttttcggttcagcctttttacgtgaacacggtcaggctattgatgtcgaactgttacaatgcctgtccccgctgggatgggagcacatcaatctgactggtgatgacctctggcgcagtagcgccaaaaatgtttttgttattcatggtgttgataagaatagtgcaccagatttctttaaagggatggaagaaaaagacgaaggtgagcacaaccgatccggaaagtgggtttatgcatcgcattag

SEQ ID NO: 6906 - DNA, 1239 bp, Photorhabdus luminescens
atggataacaatatgttattaaatcaatctttagaagaaaataaattacctaactcagaagttcccgctgccactttaaatatattaaccggccaagtgcaaggagcagcccgttcagcgggaatctttactaaagaagacctcattaatatcaaattatatgttaaaaatggcttggaacttccttttactttgccgacggtaaaggaatatattcattacaatgatactaatattgagggtttgaaacctgaaaatattaagactttatttgaagaaattcataaccatgcgcttagctggagtaaggtagaagataaagtccaacagcagagtatcgatctggaaaatgcaggaaaacaaattacccaaaagggagagtcaataatcaaaatcattgaaaaaatgccgattacagacagtatagaaacattaaaaaacacatacaataatcgcaaaccaaccaatgagcaattattcaaaataacttataccgatgttgataaaaaagtagcagtcggattgaaaagtatcctagaaagcatggagaaagatgtaaaaggatatagggagaatagccagcaagttaaagatgcaataaccgactttaaaatcacactgtttggtggaactttatcagatggcaaaacagctgatggattactgccacaggttgataccaagaaaaaactgatggatgataataatctttctacaactgtcaaagagctgcaagatgagatcaatgagaaaaaaagagatattgagcaactccaaaaagactatgatcaatatgttaaattgtcattgtctggcgcgattagtgttattggcgtggtgattaccggtagtatttttggtcctaaagcagaaaatgcgcgtaaacagaaaaatgaattgattgagaaagtcaaagagttacaagagcaaattaaaggtgcaagcgcattacaaacggcactccaaaatttatccttacacttccttaatattcgttcctgtatgcaagatgcagaagttgccctaaaacacttggatgtcatgtggagtacaatgctagagcaaattaatctctccaaaaagtcgtttgctgaaattgataatgcatcgatgcttttaatgtttgaggaaacatttaaacaagctattagcccctggaaagaagttcaaggttctgctgaaaaattggttaaaatttttgatgaagcattggcggaatataaaaaacgttctaaataa

SEQ ID NO: 6907 - DNA, 1029 bp, Photorhabdus luminescens
gtgtctgaaagcatcatctcacaaaaagaaatccagtatccaaaagttaatatcaaatccttggatgagactgtaaataaaatttggcttttggcaaaacaacaaacatctggtattacagctattgcagagaaagccgagcgagtcagctcctatagccgtgaactcagtgaattggtaagtgaatctttatcaaaattaccaccaatattaagtcaatttttagcaggagatattttccaatcaatccgtaaaattgataaagccctggaagcccatgatttgagtgatgagaagcgcagtgacatactaaaagcacgcgatcaatttattcagaaattatcaaaagatattgacaatgtgattgctaatttcgatgatagaatcaacaaactgactggaaaaattaatgatattaacgatatagtgattgcagggcattttgaagatgtgttggcaaaaacaaaaaaacaaaaggcagaattgcagagtgatattgaacagaaaaccaaagaaagaaaaaagttagatgccgaacgggataaaattatcgaaagtcaggatgttattcgcgcaaaaaatattgcggatatgtttaaagattatctcccaaataccaatgacatcgatggcctgaatttcgctcaacctgaaaaagaaattattaaacaaagtattgagatagtaaaaaaagtattgggcaaaatttctgaaggattgaagtacatcgatttggaaaatgccagaatgaagctcactgaacaaattgatcataccatgcaagaatccaaggcactaaaaacgacattagaggaaacagagctgaggctttccggtttaaaagatgtgatgcaaatcgatacagaacgcaccactatgcttaacgaggtaggtaaactagaaaaagcatggcgtttattctccagtcaattacacgaattatcagataagaatattaatcaggactatctaaccaatctgataaacggacaattaaatttcttggataatttggtaatatcaatataa

SEQ ID NO: 6908 - DNA, 1029 bp, Photorhabdus luminescens
atgaaagcattagtattagaaaaagcaggtcagatttcaattcaagactgggaaacccccgaaatattgggtgaaaatgatgttgaaataaaaattcactcggtggggatttgtggcagcgatgtgcattattatcaatacgggcgtattgggccatttattgtcgaaaagccgatgatcctcgggcacgaagcatcaggtgtcatcaccgcagtaggtaaaaatgtgactcacttaaaaatcggcgatcgtgtctgtatggaacctggcattcctaatctgcaatcaccacaatcacgggcaggtatttataacttagatccagaagtgcgtttctgggcgacgccccctattgatggttgcttacgtgaaagagttattcatccggcagcatttacgttcaaattaccggataatgtcagttttgccgaaggtgcaatggttgaaccattagctatcggtatgcaagccgccacaaaagcagaaattaaaccaggagatatcgcattagttattggtgctggcacgatcggaattgttaccgcacttgccgcattagccggtggttgttctgatgtcattatttgcgatgtgttcgatgaaaagctagaaattgcaaaacagtatccaggtcttcacccggttaatagcaaagtacttactgagaaagtgaatgcattaaccgagggtaatggcgtcaatattctctttgaatgtagtggcgcaaaaccggtcattgccactatttcagagcacattgcaccgggaggaatagctgttctagtcggtatgcctatcgatccggcaccatttgatgttgtctctgctcaagctaaagagatcacattcaaaactattttccgctacgcaaatatgtaccctcgtactattcgtttacttagctcaggtaagctcaaagtaacccctctattatccgcaacctataaatttaaagacagcgttcaggcgtatgaacgagccgcggagggtcgcccgacagatatcaaaattatgttggaaatggagtaa

SEQ ID NO: 6909 - DNA, 1512 bp, Photorhabdus luminescens
atggcgctctatgctggtatcgattgcggtacacaaagtactaaagtcattattgtcgatagccaaaaaacgcctattttgggtgaaggcagctcgcctcacccaataattagcgattcaaacggccgtcgtgaacaacaggttcactggtggacagaggcattggaaagtgccttttctcaagcgattgagcaagcaggaatttctggtacagaaattgccgctcttgccgtatcaggtcaacagcacggttttgttcctctggatgcagaaggtcatgttttagcaccggtaaaactctggtgtgacactgaaactgcggccgaaaatcaggaaattattgatgcacttggtggtacccaagccactttagcacaactcggattaatgccgcagacaggttataccgcatctaaaattctttggttcaaaaaataccgccccgagttatgggaaaaactgaacgctgttttattacctcatgattatctcaattattggctaacaggcaggttagttgccgaatatggtgatgcttcaggaaccggattactgaatattcgtaaacgcgaatgggataaccaaattgcccaatttattgatccagatggtcgtctttggaatgcactgcctgaactggtttctgctgagacctgtattggcacagtaagacctgaaatagcaagaagattagggctttcaccgacaaccaaagttgcatctggtgggggcgataatatgatggctgcaattggaacgggtaatatcattccgggcatcacgaccatgagtttaggcacctccggtactctcttcacttactctgacaaaccgattgtcgctgattctgaaatgatcgcgggtttctgttcctctaataatggatggctaccattgatttgcacgatgaatgtgacttcagcgacaaccaccattcaaaagctgtttaatatggatattcagacttttaatgacacattgaaccagagcaaacccggtgctaatggtttgatgatgctaccgttttttaatggtgaacgtgttccaccactcccccatgccaaagcgagtctccataacctgaatactagcaatatgaatcaacaaaatttcattttggctgcggttgaaagtgccacgtacggactacgttttggcattgaattatttcgcaagcaagggattgaaattaatgagatccgtttgactggtggcggcgctcgcagcaaaaaatggcggcaaattgtggctgatgtcatgaatacgcctgttatttgtgtcactaaccaagaagctgccgcattaggtgcggctattcaagctatgtggtgtgattccttgacagaagagaaagataaacaaatgcagctcgcccacttttgccaacattttgttcatcttgatgaagagacccgcaccattccaactcccgaaacggccgcattatatgatgtgttttatcaagattatttatctctgctgactactgaatatccagaggtgaaaatatga

SEQ ID NO: 6910 - DNA, 1485 bp, Photorhabdus luminescens
atgacagtaaatacaccaatgctaatcacctttattgtctacattactggaatgttgttgataggttttttggcttatcgttcaactaaaaattttgatgactatatcttgggaggaaggcgattaggtagcgtggtaacggctttgtctgccggtgcttcggatatgagtggctggttattaatgggcttacctggggtagtctattttgcggggatttcagaaagctggatagccattggtcttgctttaggtgcttacctgaactggaaattggtcgcaggcaggctacgtatccagaccgaaatcaataataatgcgttaacattgccggattatttcaccagtcgttttgacgatagtagcaagatcctacgtattatttctgcgttggttattttgatcttctttactatctattgtgcttctggcgtggttgccggaggattgttatttgaaagtacgtttggtatcagttatcagaaagctatgtggctcggtgccgcagcgacgattgcttatactttccttggcggcttcttggcggtcagttggactgatacggttcaggcttcattaatgatctttgcacttatcttgaccccagttatcgttattttctctgtgggtggcattgatacctctctggcgctgatagcagcaaaaagcccggcttatatggatatgtttaaagagttgaactttattgccattatctcgttgttaggttggggattaggttattttggtcagccacatattctggcgcgttttatggcggccgattcccattacactatccgcaaggctcgtcgtatcagtatgacctggatggtgttatgtttggcaggcactattgctgtcggtttcttcggtattgcttattttgaaatgcatcctgaactgtctggcccagtcatagccaaccgtgagcgtatctttatggaattggcggttattctgtttaatccgtggatagcgggcattttactctctgctattctggccgcggtgatgagtaccttaagctgtcagttgctggtgtgtgcaagtgctttgacggaagatctttataaaccctttatccgtaaatctgccagccagaaagaattggtatgggtggggcgtttcatggtgctgctggtggcggtcatcgcgatggtgatagcaaccaatcccgacaataaagtactggctctggtaagtaatgcatgggctggatttggtgctgcattcggcccggttgtactgatttctgttatctggaaacgtatgacacgtaatggcgcattagtggggatgttggtaggggccgtcacggtattggtgtggatgaaataccagtggtttgcgttgtatgaaattattcctggctttatcttggcttcgattgcgatcgtgattgtgagtctgttgggcaaagcgccgagcagcgcagcgcaacagcgttttgttgatgctgaggcgcaatacaagactaaataa

SEQ ID NO: 6911 - DNA, 3981 bp, Photorhabdus luminescens
atgggtagtacaacaatgggcgtgaagcttgatgaagcaacgcgtgatcgcattaaagctgcggcacaacggattgaccgcactccacattggctaattaaacaagctatttttaattatcttgaacgtcttgaaaatgatgaacagatcgctgaactctcgtccaatcaagatgttaaagaggagaagataatcgcagaagaaacggtaacagattctgctcatcaacctttcctcgacttcgctgagcatatcctgcctcaatcagtaaaacgttccgcaattactgcggcctatcgcctgccagaaacacaagccattcccatgctgttacaacaggcacaattgccggaagatcaggcacaagcaactcataagctggcttacagcattgcagaaaaattacgtaaccagaaaaacagcatgggtcgttcaggtctggttcaagggttattgcaagaattctcgctttcatctcaggaaggcgttgcactaatgtgtcttgcggaagctttactccgtatccctgataaagccactcgcgacgcgctgatccgcgacaaaatcagtaacggcaattggcattcccatctgggccaaagttcatccatgtttgtcaatgcagcaacctgggggctgctgtttaccggcaaactggtttctacccataacgaagctaaactttccaattcactgaatcgcattatcagtaagagtggcgaaccattagtgcgtaaaggcgtagatatggcaatgcgcctgatgggtgaacagtttgtgaccggagaaaccatcgctcaagcgctggcaagtgcacgtaagctggaagaaaaagggttccgttactcctacgacatgctaggtgaagccgctttaactgaggaagatgctcagaattatatggtttcctaccaacaagcaattcatgctatcgggaaagcatccaacggccgcggcatttatgaagggcccggaatttccattaagctttctgccctgcacccgcgttatagccgtgctcaatatgaacgcgtcatgaatgagctatatccacgcctgctttccctgacattacaagcacgccaatatgatgttggtatcaatattgatgccgaagaagcagatcgtctggaaatttctctcgatctgttggaaaagctctgttttgaaccgcaactggctggctggaatggcattggtttcgttattcaagcttatcagaagcgctgcccctttgttatcgatacagttattgacttagcacagcgcagccgccgccgactgatggtgcgactggtaaaaggcgcttactgggatagcgaaattaaacgtgctcaaatcgacgggctggaaggttatcccgtttacacccgcaaagtttatactgacgtttcttatctggcttgtgcccgcaaactattgtcagtacctaatctgatttatcctcagtttgctacccataacgcccatactttagctgctgtttatcatatggcgggccaaaactattatcctggccaatatgaatttcagtgtttgcatggcatgggagaaccattgtatgaacaagtggtcgggaaaatcgctgatggtaaattaaaccgcccatgccgtatttatgcaccagtaggcactcacgaaacactgttggcttatctggtccgtcgtctgttggagaacggcgctaacacctcttttgtcaaccgtatcgccgataccacattaccactggatgaactggttgccgatccagtgacaaaggtcaagaagctggccgaaaccgacggccaaatcggtcttccacatcctaaaatccctctgcctcacaatttgtatggcaaagatcgcgcaaactcagccggtttggatcttgccaacgaacatcgcctggcttctctttccagtgcactattaagttctgctaccgaagagcagtatagcgagccgcgactgggcggcaattatcaccatcaaggtgagttaccggccgccaaaccagttattaacccggcaaccccttcggatattgtcggctatgttcgtgaagcaactgaacaggaagtcagtcatgcgttggatgtcgcaacagaagctggcgcaatctggtttgcaacaccaccatcagaacgggctgccattctggttcgtgcggcggaattgatggaaaaccagatgcagccgttattaggcattttggttcgggaagccggcaaaacctttaataatgcgattgctgaagtacgtgaagcggtcgatttcctccattattacgcgggacagattcgccatgatttcgctaacgatactcatcgcccactggggccggttgtctgtatcagcccgtggaatttcccattagccatttttaccgggcagatagcggctgcattggctgccggtaacagcgtattagcaaaacctgcggaacagaccccattaattgcggcaacagcggtcaaaatactgcatcaagcaggtattccccttgatgcattgcaattattacccggccaaggtgaaaccatcggtgctcttctggtgggtgatgagagagtgcgaggtgtgatgtttactggctccactcaagtggcgagtctattacaacgtaacattgccggacgacttgatgcacaagggcgaccaacccctctggttgccgaaaccggtggcctaaatgccatgattgtcgactcttccgcgctgacagaacaagttgttatggatgtggtcgcttctgcttttgacagtgcaggtcaacgttgttctgccttgcgtatcctttgcattcaagatgatgtggcagaacgcaccatgactatgttgaaaggtgccatgtctgaatgccggatgggtaatcctgaacgcctgtctaccgatatcggcccggtcattgatgcggaagccaaagccggcattgatcgccatattcaagcaatgcgtaccaaagggcgcacgatttatcaggcagcacaagataatgtggtcgacaatcaagagtgggatcaaggcactttcgttaaaccgacactgattgaactggaaagctttgatgaattgaaacaggagattttcggcccggttctgcatgttgtccgttttaaacgtcatgaactggataaattactggatcagattaataactctaactatggtttgacccttggtgtccatacccgtattgatgaaacaattgcacaagttaccgctaaagcgaaagtcggcaatctgtatgttaaccgcaacatggtaggcgctgttgttggcgtgcaaccattcggtggtgaaggcttgtccggtaccggaccaaaagccggcggcccactctatctgtatcgtctgctctcttgccgtcctcaaaatgcgatcaaccaaacgttggaacgtcaggatgcggaatatccactggatgctaatgttcgttcagcgctaatggctccctttgatgcgctgacagaatgggcagccaatcagcacaacgaagagctaaatcagttagttcaacaatataaattgctggcacaaggtggtaccacccgtctgttgccggggccgaccggcgaacgtaatacttacaccctattacctcgtggtcaggtgctgtgtctggcggataatcaacaagatacattgatccaactggcagcaacactgtctgtaggctgtcagttgctatggcaaaatgatgaattacatcagcaactgtttcgtcaattgccagatagcgtccgtaaatcaatccatttggttcaggactggcagagtgaagatacggcattcgaagcggttatttaccacggcgactctgatcaactgcgtcaagtttgcggacaagtcgctcaacgtaaaggcattatcatttccgtacaaggttttgcccgtggagaaactaatctgctgttagaacgtctgctacatgaacgttcactgagcattaacaccgcggcagcggggggtaatgccagcctgatgactatcggttaa

SEQ ID NO: 6912 - DNA, 513 bp, Photorhabdus luminescens
atgtctgttacaacacaaaagaaacggccgctcagccgttacattaaagactacaaacatagtcaaactcattgcttgcattgtcacaaagctcttgaccgtatctctttggtttttaatggccaagtgatcaacaaagagtccatctccgagatgacggagttgattgatgacaagacttgggatgagctgcaagataaatttgtcgcgttatgtcgtttttgcagtgagatttattgcaatagcgagacagattattttgacatcatgtctttcaaacagtacctgtttgaacagactgaaatgagtcatagtactgttcgtgagtatgtggttcgtttacgacgtttggatgaattgctcacttcaagcaattaccctgtaaaagagttcacaacagagaaaattcaggaaaaactgagtgaaaagctgtcacagtcagcattcagtaactacaacattgctttgcgcaagtatgaacagtatttgagctggcaacagggcggtcactaa

SEQ ID NO: 6913 - DNA, 723 bp, Photorhabdus luminescens
gtgagcgatttgtataccgccgaaggcgtgatggacaaaaacagcctctggaagcgctacgtaccattagttcgccatgaagcgttaaggctacaagttaggttacccgcgtgtgtggagctggatgatctacttcaggccgggggaatcggcttactaaatgcggtggaacgttttgattccttacaaggaaccgcgtttaccacttatgcggtacaacgcatcaggggtgcaatgttggatgagttaaggagccgtgattgggctccgcgtagcgtgcgccgtaatgcgcgcgaagtgacgcacatcatccgtaaacttgagcaagacttaggccgtccagccagtgagcaggaagttgctaaagaattaaagattgatctggtagaatatcggcagatactgttagatacgaataacagtcagttgttttcgtatgatgaatggcatgaaatgcatggtgaaagctgtgaacctgtcattgaagaggggcatgaaactaatcccttacaacaattgctggaaagtgacgttcgtcaacgggtaattgaagctatcgattcgttacctgaacgagaaaaaatggttctgacgctgtattatcaggaagaacttaatctgaaagagattggcgcagtacttgaagtcggggagtcccgtataagtcagctacacagccaggcgattaaacgcttgcgggcacgcttaaatccggaaaagtaa

SEQ ID NO: 6914 - DNA, 1068 bp, Photorhabdus luminescens
atggcacaagtcatcaacaccaacagcctgtccctgctgactcagaataacttgaatagatcccagggtactttgggtagcgctattgagcgtctatcttctggtctgcgtatcaacagcgcgaaggatgacgcggctggtcaagcgatcgctaaccgtttcactgcaaatgttagaggtttgactcaggcagcacgtaacgctaatgacggtatctctattgcacagactaccgaaggtgcactgaacgaaattaacaccaacttacaacgtattcgtgaactgactgttcagtcacaaaacggcagcaactctgaaagtgatatcaaatctatccaggaagaagtgactcagcgtttaaaggaaattgatcgtatttctgaacagactcagttcaacggtgttcgtgttttgcgtgaagatagcaaaatgaccattcaagttggtgctaatgataacgaagttatcgacatcgatctgaaaaaaatcgacaaagaagctctgaatctgggtaaatttactatttctgcggaagttccacacggagaagtagttaaacaggttgacgatggtgcaggtgggaagaaaaatatcgatcacactgccgacgctaaagttaagggcctgaaaagtgtagaagtctatgaagctcttaaggatgatggttcagttaatcctggtaaatatgttgtcaaaggtactgacgatacagatggcaaagtaaaatatttcgaagccactattactaaagagggtaaattaacagcagatgcagacatcactgctaaagcatcagaaaagcctctagaaactttggacagcgctctggcacaagttgacagcctgcgcagttctttgggtgctatccaaaaccgtctggaatctaccgttaacaacctgaacaacaccgttaacaacttgagcgctgctcgtagccgtatcgaagatgctgactacgcgaccgaagtgtctaacatgagccgtggtcaaattctgcaacaagcgggtactgcggttctggctcaggctaaccaagtgcctcagaatgtaatgtctctgctgcgttaa

SEQ ID NO: 6915 - DNA, 1422 bp, Photorhabdus luminescens
atggctagcatttcttcattaggcgccgggtcggggatggatctgggctctatattggataaacttcaggcagcagaacaaaaacgtttagtaccgctggcacagcaacaaaccagttataaaggtaagctaaccgcttttggtacattaaaaggcagtttagaaaaactggaaaccgcatctgaatcactgaaaaagttcgataaacttaacacaaccactgccagcgaaaaacatgatgcattcgttgccagtactgattctaaagccagcccaggtaactacagtattgaagttaaacaattggcacaggcacaatcattacagacagaaaaagtcagtaatatcaaagagtatctgggtgaatctttgggtgaaggtaaaacccggacaattaccattactcagcctggcgaaaaaaagccgatgaaaatcgagctgacagacggacaaacatcgattattgagatccgtgatgcgattaataaacaggaaggtaatgtcaacgccagtattattaaagccaaagatggcgaaaactatttagtgctgacggctaaaaaagcgggcactgaatcggtgatgaccatcaaggttgaaggtgataacaaacttagcgagttgctaaactatccaggtacaacgagtaaactcactcaaacggttgaagcgaaaaatgcgaaattgaccgtcaacaaaatcccaattgagcgtcagacaaaccatattaccgatgcacccgaaggcgttaaactggatctgaaaaaaacgaccgaggataaagataaaccaggggaacataagccagaaatactggttatatcccgtgatattgagccgatgaaagaggcgattaaaaattgggttgatgcttataatgaattacaaacgacatttgattcactgaccaaatttaagccagtaaaacagggtgaagaaccgtcgaaagataatggtgctttattaggtgacagcacattacgcggaatacagaaccagctaagaagccagattttcagctctcaggcggctaatgatattccaaccctgaataagctgggcattaaacaaaagcctgacggtaagctggaaattgataacgaaaaactggaaaaaaatctaaaagaaaagccgactaatgtgaaagcgttctttatgggtgacggtaaaaaaacgggttttgccactcagacacataagctattaaaagatgctctggatagccatgaaggtaccttagctaccgctactgatggtattaacaagcgtctaaaaacccttgatcaacaagtagacaggactaaacagaatattaacgaaacaattgaacgttataaacgccaattttcacaactggataaaatggtctcttccttgggaaacaccggtaacttcctatcacaattacagaaaataagataa

SEQ ID NO: 6916 - DNA, 411 bp, Photorhabdus luminescens
atgtatcaacgttcggcaagtcaattatatgcccagatagatgtggagagcgaaattatgaacgcctccccctatcagttgattcagattttgttcaacggggcgcttagcgccctacgtcgagcaattattctgatggaacaaggtaatatcgcggaaaaaggcgcagctatttccaaagcgatcaatatcatcgataatggcctcaaacaagggttagataatgaaaaaggtggagagctggcacacaatctcgcttccctttacgactatatgacccaacgtttactctacgctaatttacgcaatgatgagccagccattaccgaagtaataaagttactcaccgagatttcagatgcttggcggcaaattggccctcattacaacgccagtcaggatattgtttaa

SEQ ID NO: 6917 - DNA, 378 bp, Photorhabdus luminescens
atggataataaaatggatcttttgtcagcttaccaacggatcctaagtttaagtgagcaaatgcttaatttagctaaaaatgaaaaatgggatgaacttgttgatatggaaatcacctacctcaaagcagtagaagtgatcagccattcttcaatatcatcgacgacttctctttcgttacagcaaaaaatgaccaacattttgcaaataattttagataatgaaaatgagattaaaaaactactacagaaaagacttgatgaattaagtaaactcatcaaacaagcaagccaacagcaattattaaatgatagctacggccaattccctgttgaaccctatcataatacccttatgaactctacggagcaaaagtaa

SEQ ID NO: 6918 - DNA, 813 bp, Photorhabdus luminescens
atgtctgaggttattaagcttgaaaatgaatgccagtttgatcctaagcaatatgaatgtcatagtgttgtcgctccggttggttctttttcttgggccctgattcaattaaagctacgtaagcttgtcgctcgttctgtttggcgcgataaaaagatgtatttggctattacccctcgtgtgaatgatttaacagtggaagaaggcagtgcttacgttgttgatggtgtcgccgttggcactaaatatgattatttgacgcatattgatctgcgtaatgagcatggcaattttgtaccgtggcagccaacgcaagaagatatgatggcttgtgattgggaatttgtgggagaaaaaccagttaaacctaagccgcatattgaacctgcgtatcaactgaaagcaaggttaactgttggtaaagcctctagtatgaaaaccgaatattttggttacgctaataaacttaattattcacttggatatagcatgggaaaatgggaagaaatcagtaataatacattgctcctaaaaaatattatagaattcgatgtagctcatacagctagcactcctccaaattgttttgttattcatgtagaagataattccagtaaaatcaaggaacaatttggttcaaaaagattaattgtaaaatgcttaggtaaagaatatgatttaggggtagctgaaacaaaatatttattgactcttttgtatactaaaactgatgactcatcagaattagaagcgttatttgttgaatcagtcggtaagacactagaaattgaattgaatttctttgatgaataa

SEQ ID NO: 6919 - DNA, 312 bp, Photorhabdus luminescens
atgtcaattcaggcaattgaaagcgtgctgcaactgatgcaagctcaggcattacaggcagccagtatcgcaaaaccactaccgttgcagagtggatttgccagtcaactgatggcggctgtgggtaaaattaatcaaacacgtttgaatgccacaaaacgagctcaggattttacactgggtgtacccggtgttgaattgaatgatgtaatggtggagatgcagaaatccagtattgctttgcaaataggcgttcaggcaaaaaataagctaacggcttcttatcaggagattatgaatatgcaggtgtag

SEQ ID NO: 6920 - DNA, 1704 bp, Photorhabdus luminescens
atgagtgccgcaacaaccgacgttgaaaatcaaactaaaggtttcagtgctatcattaaccagataaaagctgatcctaaagtgccattattagttgccggcagcgcagccgttgcgattgtcattgcccttttcctgtggttacgcagccccgattatcgggtgctttacagtaatctgagcgataaagatggtggcgatattgtcacccaattaacccaattaaatatcccttaccgttttgccgaaaatggcgctgcgatcatgatccctgccgagcaggtgcatgagacacggctaagattggcacaacaagggttgcccaaaggtggggctgcgggattcgaactactcgataaagaaaagtttggcatcagccaatttagtgagcaggttaactaccaaagagcattggaaggtgaactgtcacgcaccattgaatctttagggccagtgcaaaatgctcgtgttcatctggcacttcccaaaccctcgctgtttgtccgtgaacagaaatcgccctcagcttccgttacggttggattactgcaaggtcgtaccttggatgaaggccagataaacgccatcgtccatatggtttccagcagtgtcgctggcttaccaccgggcaatgtcaccatcgttgatcagaccggacgtctattgacacaagccgatgcgaccggacgcgatctcaataccagtcaactgaaatacattcaggaagtggaaaatcgcttccagcatcgtatcgaaacgattctaaccccggttgtcggtcgtggtaacgttcacgcacaggtgacagcgcaggtggatttttcacgccgtgaagagacggcagaagaatataaacctaaccaacccccgaatcaggctgcggttcgctcaaaacagttgagtgaaagtgagcagagtggcggccctcaggttggcggtattcccggtgcgctttccaatcaaccgagctcaccaccgagtgcgccgattgataaaccaaacaccaaagagaacaataaaaacgacaagagcgataagaaagcatcatccgccggtaacagtaatgagcgcacggttaacagtaatcgcaataaccgccgtgatgaaaccacaaactatgaagtggaccggactattcgccatgtgcaacaacaagccggtggtgttgaacgcttatccgtcgccgttgtcgtcaattatgtcacggtagaaggcaaaaatggcccggaaactcaggccctaacccctgagcaattgacaaaaatagaagcgctgaccagagaagcgatgggcttttctaaagagcgtggcgacagcttgaatgtggttaatacaccatttactgaaagcaaagaaaatatcgaggttattcctgtctggcagaacccggttctgttagaaaaagccttcgattttggccgctacctgctattgattctggtggcatggctgctgtggcgcaaaatggtggtgcctcaacttgccaaaaaacgcgccgcagaaaaagccgccctcgacgcacagaaagttcagaaaagacaagtgactgaatcgagtgcggaaatggatgaaaaaacgcgccagaaactgacacgtcaacgagtcagtgctgaaattcaaagccaacgcattcgtgagctggcagaaaaagatcctcgcgtagtggcgctggtgatccgtcaatggatgagtaacgaacaatga

SEQ ID NO: 6921 - DNA, 993 bp, Photorhabdus luminescens
atgagcctgaacggaacagaaaaaagcgccgtcatgttaatgaccctgggagaagatcaagcggccgaggtgtttaaacacctgaactccagggaagtccagcaactcagtatcacaatggcaggtatgcgccaaatttctaaccagcaactggtggatgtcttggcagagtttgaagaagatgccggccagtatgcggcactgagtatcaatgccagtgactatttgcgttcggtgttaattaaagcgctaggagaagaacgcgcttccagtctgcttgaggatattctcgaatcccgtgaaaccaccaccggtattgagaccctcaactttatggaacctcaaatggcagccgatatgatccgtgaagagcatccacagattatcgccaccattctggttcatttaaatcgcggacaagcagccgatatccttgcgctgtttgatgacaaattacgcaacgacatcatgctacgtatcgcgactttcgggggtgtacagccggcggcactggctgaactgacagaagtactcaataacctgttagacggccaaaatctcaaacgtagcaaaatgggtggcgttcgtactgcggctgaaattatcaacctgatgaaaagtcagcaggaagagaatgttatcgaagccatgcgtgcctacgataacgaactggcgcaaaaaatcatcgatgaaatgttcctgttcgaaaaccttatcgatgtggatgaccgcagtatccagcgtctgttgcaggaaatcaccactgactccctgctcattgcactgaaaggctgcaaccagcaactacgcgatcatttcctcaacaatatgtctcaacgtgccgcagagattatgcgcgatgacctggcaaaccgtggtccggtgcggatgtcgcaagtggagaacgaacagaaagcgattctgcttattgttcgccgtctggcagaaagcggtgagattatcctaaatggtggcgacgatagctatgtctga

SEQ ID NO: 6922 - DNA, 705 bp, Photorhabdus luminescens
atgtctgataagttaaaccatgctgactggcaaccctggaaaccaaacgagctcacacagtgggaaaaactacgggccaaacccgagcccgttgatgactcacaggaagagtcagagcgtaatgaaatccttgaacaagcggcaatgctggataatctgaaagaacaggcacggcagacaggccatgaacagggatttaccgagggtcaagcgcaaggttatgaacaaggttaccaagctggcttagaggctggtctggaacaggggcgaaaagaggctattcagcagcagcaacctatcaccgagcagtggcaaaatctgctggccgatttccagcattcactcgaagggcttgacacgatcattgcctcccgcttgatgcaactgtcactgaccgctgcaaaacagatcttaggtcagcctgcgatttgtgatggcactgccctgctcaatcagatccgtgaatttattcaacaggagccgatgttgagtggtaaaccccaattgcgggttcatccacgagatatgccaatggttgaacaacaattaggcaatacgctctcactacacggctggcgcttactggcagataacaaactgcatcctggtggttgcaaaatcagtgcagatgaaggcgatttagatgctagtttggccacccgctggcatgagttgtgccggctggccgcaccgggggaattgtaa

SEQ ID NO: 6923 - DNA, 1365 bp, Photorhabdus luminescens
atgaccgcaagactcgggcgctggctggcgacactggatacttttgagcagaaactagcgaaaacctcaccagtgcgtcgttatggacgtctgaccagagcgaccgggctggtgatggaggcaacgggtttacatctgcctctgggggcaacctgcctgattgaacgacaaaatggcagcaatattgaagaagttgaaagtgaagttgtcggttttaatggcgaaaaacttctccttatgccacttgaagatctggaagggattgtacccggtgcccgggtatacgcccgcccgtacagtgaagattgtggcggtgggcgccagttaccgcttggcccggaactgttaggacgagttttggatggtgccggtcgtccactggatggttttccttcgccagataccagctatcgtgccccactcaccacgccgccaatcaatcctctgcaacgtacaccaatcagcgacgtactggatgtcggtgtgcgagcgattaatgccctactgaccgtaggccgtgggcagcgtatggggttgtttgccggttccggggtcggtaagagtgttctgcttggcatgatggcacgttacacacaggctgatgtgattgtcgttggcttgatcggtgaacgtggccgcgaagttaaagatttcattgaaaatatccttggtgccgctggtttagcccgctcagtggttgtcgccgcacccgccgatatctcaccgctgttgcgcatgcaaggtgcctcctacgccacccgtatcgctgaagattttcgtgaccgaggtaaacatgtattgctgattatggattcattgacccgttacagcatggcgcaacgtgaaattgccctggcaattggcgaacctccggcaaccaaaggctacccgccttcggttttcgccaaacttccggcgctcgtagagcgtgcaggcaatggggtgaatggcggtggctcgattaccgcgttctacaccgtactcaccgaaggtgatgatcagcaagacccgatagccgatgccgcgcgggcaattctggatggtcatatcgtcctctcccgttcgctggcagaatcagggcattacccggcgattgatattgaagcgtctatcagccgcgcaatgaccgcactcattgataaacagcactaccggcgggtacaacagttcaaacaacgactcgcaagctatcagcgtaaccgtgatctgattaatgtcggtgcttatgctgcgggcagtgatccgctactagacaaagccattgagctttatccctacatggcacaatttctacagcaagatattgaagaacgtagtgaatatgacgctgcctgcattcaattacaacagttgttacctacataa

SEQ ID NO: 6924 - DNA, 444 bp, Photorhabdus luminescens
atgcagcaacaatcacctctcataaccttgcgtgaccttgcacaaaatgcagtggaaaaagccgctactcacctggcacaagtttgtcagaactatcagcaaatggagcaacaactcgcaacgttgatgggctatcaagatgaataccgggagcgcctgaatgacacactgagtcatggtatgccatgtaccacttggcaaaattatcagcaattcatgaaaacgctggaaaaagcgattgaacagcacaaattgcagctcaatcaatggcaacagcggcttgatacggctttatcacagtggcgggaaaaacaacagcgcctcaatgccttcgatactttgcaacaacgggcagataacaaccgaagattacatcagaacagaacggaacagaaacagatggatgaatatgcccaacgtagcgtacaacggagaaataaataa

SEQ ID NO: 6925 - DNA, 1329 bp, Photorhabdus luminescens
atgaatctcactcttttgcctgccgacctgaaaccgacagaaaatcaaccaacgcgcagcaattcactcactgatgccgatcaaccttcggcttttgctcagtttcttaatctggaaaccgaactggcacagaaaggcggggtcaaaccaggaaaagtatcatccaaagaagaagaggttacagatgatacagaccacgatttgtcgccactattatccgtcccaaacgaattatccgccccaaacgaactgtctatcgcaaatgaattatctacctcaaataaaataccaacagagcctattacctcctcgctgattcctcttgatgtcaaagcagatacaaataaacaaccggttgctgttgatgagaaacttatgtcagcagaagagctggcggcaagtttacccatacaattatccggtttagccatcaaaccagaaaaccagaaaaccagcctccaacctgacggactcgttaagcataatgataaaaaccgtcaaattagcgttaaagaattagtcgttatagaattatcgactgaagagaatcctctgacagcgattgcaaaacaaccaaaacaggaagaagaaaaagcagacgccttttttaaaaccaaacctgaaaacggacttgggcaaaattcttcggtaaaacccaagattgctgccgcagctatccaacatgaaactgcaactccgactcatccacgtgaatcagcactcactcaaactaccgctcaagctgagatccagcccgcgccagcagccactgaaaatcaacaaaccgggcaaatctcctctgtggcaacctctcccctgctttccgccggacacaatcagacagcccagtttcagttatccagtgcctctacccccttactgaatgcccaattgggtagtgaagagtggcaacaacaattaaatcaacaaatcattttatttaaccgcaatggcctgcaacaggcagagctacgcctgcatccacaagagctaggcgcattgcaaatccgcatgtctgttgaagataatcaagcgcaattgcatctggcatcggctcacagccatgtccgggcggcactggaagcggcattacctggacttcgccatgcactggcagaaagtggtattcaactgacccaaagcagtgtcagcagtgacaacgcgagtccgtggcaacaagaacaacgtgctggttcacaacattcagacggaaccgcaagtcgcaatgctgatgccacctcagaaaatcactcagccactgaatccacagtacatttaacacctcatcaactcgcgtccgcccggggaggtgtggatattttcgcctga

SEQ ID NO: 6926 - DNA, 477 bp, Photorhabdus luminescens
atgtctgactatagctacgagcataaacgcaaaaatccatttgggatgatactgttagtactgattgccgttatcggtaccgccatcgggggatacagttggtgggcacttaaacaggcaaaagagagtgactctgcggcatctaaagccatagcagtccctgtctttatgactctggagccttttaccgtcaacctgatcgacaatgaagatcactttgaccgagtgctttacattggtgtgactttacgtttagccgatgaaaaaactcgccagcgcttccacgaatatctgccggaagttcgtagtcgtatgttgttgctattatcacgccaaaaatcggccgatctggctcatgacagcggtaaattgcgtctgatggacgacatcaagcaaacacttcgcccaaccttggtacccggtgaaccggatcaggtcatcaccgatgtgctgtttaccacgtttattctgcgataa

SEQ ID NO: 6927 - DNA, 1005 bp, Photorhabdus luminescens
atgagtgacaatattctttcacaggcagagattgatgctctgctcaatggcgacagtgccagtgacgacgtagaaaatacctcgtccggggaaaatgagattcgcccttatgatcccaatacccaacgccgggttattcgggaacgtctgcaagcactggaaattattaacgaacgctttgcccgtcatttcaggatggggttgtttaacatgctccgccgtagtcctgacattaccgtcggcgcaataaaaatccagccttatcatgaattcgcccgcaatctggcagtaccgaccaaccttaatctggttcatctgaaaccgttgagagggacagcactgtttgcattcgcacccagtctggtttacatcgcggtagataacctgtttggtggagatggacgtttcccgaccaaagtagagggccgagaattcacccataccgagcaacgagtgattaaccggatgttacgtatggcactggattcctatcgtgatgcctggagcgccattttcaaaattgaagtggaatacattcgctctgaaatgcaggtgaaattcaccaacattacaacatcaccgaacgatattgtggtgacaacgccatttcaagtggaaattggtgcgttgagtggtgaatttaatatctgtattccgtttgccatgatcgaaccactacgggaacgtctgaccaatccaccattggaaaatgcccggcaagaagacagcctgtggcgagagagtctggtaaaacaagttcagcattcagagctggaattggtcgctaactttgctgatatcccgctgaggctgtcaaaaatcctgcaacttcagccgggcgatatcttacctattgataaacccgaacgcctgatcgttcacgtcgatggtgtgcccgtgctcaccagccagtacggaacattaaatgggcaatatgccctgcgagtcgaacatcttattaacccagttttaaatgctctggatgaggaacagcccaatgagtga

SEQ ID NO: 6928 - DNA, 420 bp, Photorhabdus luminescens
atgagtgatgctaagcaacccacagataccgctgcaaccggatctgccgaagatatgtgggcagaagctctggaacaacaggccgcgcaacaacaaacctctgacagtagcgcggcaatttttgaatctctggagcctcaggatgcactggctcacttatcggatatcgacctgattttggatattccggtcaaattatccgtagaattgggccggacaaaaatgaccatcaaacagctactgagattatctcaaggttcagttgtttcccttgatggccttgccggggagccgttggatattttaatcaatggatatctgattgctcagggtgaagttgtggttgtatccgataaatacggtatccgtatcaccgatatcatcaccccttctgaacgtatgcgtcgcctgagtcgttaa

SEQ ID NO: 6929 - DNA, 348 bp, Photorhabdus luminescens
ctgatgcaggtcagcagtgcactggcgggggtgttgctattaattttcaccctcacttggttaatacgccgtatggggctgttttccagcaaagggaagactcagcaacaattaagtatcaaagccagttgctctctgggacaacgtgaacgtgtcgtcattgtagaagttgaagataactggctggtactgggtgtcactgctcagcaaatcaatttattacatcagatgccaatacctgaatccaaccgtgataacaccgaaggacaagctataaaaccggcgctgtttggtcagattttaaaaaatacgctgatgcgacaaggcaaggatgatgaaaaaaagtag

SEQ ID NO: 6930 - DNA, 735 bp, Photorhabdus luminescens
ttgtcatgccgcctggggatgatactcgctgcgcttattttaccgatggatgccgcggcacagttgccgggcatcatcagtcaaccgctggcaaacggtggacaaagctggtcactaccggttcaaacgttagttttcattaccgcgctgacctttattcccgccgccttactcatgatgaccagttttacccgcatcattatcgtgttgggtttactgcgtaatgctttaggcaccccatcggcaccacctaatcaggttctacttggactggcgctatttatgacatttttcattatgtcaccggttttcgataaagtttatcaagatgcttatctgccttttagtgaagataaaatcagtctggaaaccgctttagaaaatggtgccaagccattacggcaatttatgttgcgtcagacaagggaaaacgatttagcgctgtttgctcgtcttgctgatcagccgccgtttgaaaccgccgattccgttcctatgcgagtactgatgccagcatttattaccagcgaactaaaaaccgcttttcagattggttttaccctgtttattccatttttgattattgacctggtggtcgccagcgtattgatggcgttggggatgatgatggtcccccctgctaccatctcactgcccttcaaactcatgctatttgttctggttgacggctggcaattactactgggttctctggcacaaagtttttacggttga

SEQ ID NO: 6931 - DNA, 270 bp, Photorhabdus luminescens
atgactcctgaatcagtcatggcattgggaacagaagccatgaaagtcgcgctggcgctggctgcgccgttgctgttagcggctttattatgtggtttaatcgtgagcttgttgcaagcggcaacacaggttaacgaaatgacactatcatttattcccaaaattctggcggtatttgtcactaccgttatcgccggaccttggatgctaaacctatttctggactacatgcgtgaactctacagcagcatccctgtgataattggctaa

SEQ ID NO: 6932 - DNA, 783 bp, Photorhabdus luminescens
atgatctcttttaacagtgaaatgctgatccagttcgtcagtgaatttttctggccgctggttcgggtgcttgcgctgttcagtactgcgccattattcagtgaaaaacaggcacctaagaaagtcaaaattggactggccgtgatggtaacactgctcttgatgccaaacctgcaacctgcgcaagtgcctattttctctgttaccgcattctgggtgatgctccagcaaatcctgattggggcatcacttggcctgacaatgcaaattgcctttgcagcagtacgttatgccggtgaagtgattggtttacaaatggggctctcattcgctaccttttttgatccctccggcggcccgaatatgcctattttggcgcgaatctttaacctcttgaccttactgttatttttggcctttgacggtcacctatggctattatcggttctggcagacacattccagattctaccgatacaaccactgcaactcagtgctcaaggatttttactgctagcacaaagcgccagtatgatatttatcaacggcatgatgctggctctgccattaataacactattattaacactgaatttatcattagggattttaaaccggatgacaccacaactttccatctttgtggtcggttttccgttaacactgactaccggtatattggtactcacgcttttaatcccgatgttagcgccatttaccgagcgtatgtttagtgaattgtttaatcgactggcggtcattatcagtggaatggttatttaa

SEQ ID NO: 6933 - DNA, 2088 bp, Photorhabdus luminescens
atgaagtatataattgaaaatgattttcctttcgagcagattgatccaattgcggaaatcgaaagttacagaaaggaaattaaccgtcctatctaccatattcataaatggtgggcgaagcgtttaggaagcgtattccgttctattgtttccggtgctcttactgaaggccaatggaaggatttttacgaataccaaaaatataccggaaaggttgtgcttgatccttttatgggttcgggaaccacattgggggaagcggcgaagcttggagcaagtattataggatgtgatgttaacccagttagtacattcttagtcacacaagcaatggctagcgtgaatataaatgaactgaaaaaagaatttaaatccattgaacgggatgtaaaagaggaaatcctttcctactatacaacaatggttcccgatgcgtcgaaatccacgccggcactttactatttttgggtgaaggttgtcgccacgccagagggtgaagaaattccgttgttttcaagttatgtattcagtaaaaatgtctacgctagcaagaaaccggattcgcaaatatggtgtccgtcatgcgaatctattattgtggggaaatacaatagtactgacattaaatgcccttgctgctcacataactttaacccccaaaatggacctgccaggggaacaaaaattattgacagtagaggtaatgaatacaaaatcaaggaattggtatctagcaaagagtgtccacccaagcataaattatatgccattatggcgcttaacgaagcaggtgaaaaggtctatatcaaaccgacccaatatgactacgacctttttaatgaaacgcgtgaacgcttttccctgatcaaaggcgatcttccattacctactatgaaagttagagctggatataacacgaaccaagcacgtggatataattacaataattggtgtgacttctttaatgaacgtcaattgttatgtcttggattattgcttcaacggatattgaaaattaaagacaaggtgattcgggatcattttgtttgcctgttcagtggaacacttgaatttaataacctgttttgcagttttaagggagaaggtactggtgctgttcgtcatatgttttcgaaccatattttgaaaccagagagaacaccattagaaaatagtatatggggaacaccggggaaaagcagcggtacattttcgacattatttgaaagtcgtttgattaaggcgaagacctatcttgacgaaccatttgaagtattcattgaaaacaatggggcaaaatgtttttcaaaaaaagtcgtttgcagtgatccgataagggtaaatcctactcaatcatgggaaacgttcaaaaacgcttctcaaggtgctttgattttgaatgcggacagttcttcacttcccatccctaattcatcggttgatgcggtaattactgatccaccgtattttgattttgttcactatagtgaattgagtgactttttctatgcctggctttctaatgctcttagtggcgaatatgaatacttaaatagaaaagattcatcacatgaaaatgaagttcaagatagggataacgaaagtttcacaaggaaaatttgcagtatttttaaggaatgcaaccgagtgcttaaagaagatggtctcttgtgtttcagttatcatcattcgacaatagacggctggatggcaatatacgattctgtcactaaagctggttttgacattgtagctgctcacccggtaaaagctgaaatgtctgttgccagccctaaaagtgcagcaaaagatcctatcaatcttgatgcaatcttggtttgtaaaaaggaagttaatccgccaaaaattgagaacccacaggacgaaatcttttctcggttcagtgattatattgaacgattcaacgctgttgaaagaaatctaagttcaggggaccgctttgtaattgcttgctctcaggcaattacggttgcttcatgccttcgaatggatagaggatcgacgattgacttggttaaatggtctgttgaaacatgtgttcagcgtaaaaagatatcacttaaatga

SEQ ID NO: 6934 - DNA, 744 bp, Photorhabdus luminescens
atgtaccataatgaacatcaaataatgaaagccgtttacgataacttttatggtcagattaatgataatggtgttatacctgttgacctgcgtgtgccttctttggttggtacagttcaagacgatccctttgattgcttgattgaacaaaaactccaacaagcatttcctgaattggaagttgttcgttcaggtaagctgactacccctgatattattattcgtgacaagcgaacgggtatcattgttgggcttgaagttaaaaagttaattcagaagccgaatggcgctgattcacgtggtcttactatggattacaatagttgcttgccgtgcggaactgctttgataaagatgggcaatgcaatggtcgagattccttgttattacatgtacgcattattgagcaatgacaatagcagtattgtaactttcattttgatgcacggtgatttcatcaactatgattttaatctttataagaaagccaaagttgcgaaccaaaccaagtataaccacggtccgtacggtgaaggttctgttcgtcatcgggcaatgtatacgtaccctaatccactaaactacaaattgaagtgttttcatacaagaaaagtttttgtagcgaaaaaatttgattgtgaaaaccttcagatatcgcatttggctacagaagaagtatcaaggtacgacatttacgaaaacaattttttgtacaatatcattgataatggaaagcctgattaa

SEQ ID NO: 6935 - DNA, 285 bp, Photorhabdus luminescens
atgagcgaaactacttttacctttagggttgatgatgccctgaaaaatgactttaccgcagcagcgaaatcactcgatcgcaaaggcgcacagctactacgtgacttcatgcgcgatttcgtgcgtcagcaacaagaagcgagcgtccatgatgcttggctccgcaggcaaatagaaataggccaagcttctgccgatgccggcaatctagtgccagccgaccaagttgaagctaaatttttagcccgccgcaaagccacacttcgccgttttgaggccaagtaa

SEQ ID NO: 6936 - DNA, 261 bp, Photorhabdus luminescens
atggttaaagtcatttggtctaaagctgcaatcaaacagctaacgaggatcgatactcgatatcagaagacgataaaacaaaaggtgagttcgctaacagattttcctcttgttgctctggatatcagaaaattatcaggattcgataacagatataggctcagagttggcgattatcgggttttgtttgaattactggatggagaacctaatatcctggaaattcaggaaattaggcgacgccagacaaaaacctattaa

SEQ ID NO: 6937 - DNA, 375 bp, Photorhabdus luminescens
atggctagtattcaatttattacagacgagcatggcaaaaaacaagccgttattttgccaatggacgagtacgaaagactgttggcagctgcggatcatgatgaaaattatcaaattattccctatacaacgggaccaaatgacgatgaaactattcctcatgaagtcgtttctatcatggtagacgatgaagtttcactacaagccgcttggcgcatttatcgtggactatcacaagctgaggtagcggaaaaactgggtataaaacaagctgccgtttctcagtttgagaaatcagatcgcccacgcaaagcaacgattgaaaaattagcggatttatatgattgccgaataagtcaactagtgctcgactga

SEQ ID NO: 6938 - DNA, 270 bp, Photorhabdus luminescens
atgggtaatgcggtaaagattggtgatattggtacagcgcatgatgattgtggcgcgacaccggttatttcgggatcgaccagcgtgaaagttgacggtattcctttagctcgtcagggcgatagtttagcgccacattcatctcattcacgaataattgccggtggttccagtaccgtttttgttgatggtaaacctgcggcgagaaccggtgacgcggtgagttgtggcggaattgtgattggtggtggtagtgttaatattggttaa

SEQ ID NO: 6939 - DNA, 1020 bp, Photorhabdus luminescens
atgagattgaaactgttattgctgttatcaggagtgatttttatgttaagtgctcaggcaaatgaaccgaggttgtatattcgcagtttattcgatatccaatatgccttttgtgatattaaaaccaatggcgtaacgggaatggataaccgtgattcggctcaagaaggacggggatttggtactgccagtacggcctctatgttattcttggcaaatggtgaaaatgaagttagcctggagtttggtgcgttgggttggttttcctcagatgcgttatcagataaagaccgcaatcactttaaccctgaggctaaatgcacgctggaactgacggctatgcgtggtaaaaaaagtgaagtattgacggcaattgaagtggcaattgataaaaacggtcagcctgtggcaacaacacccgcgaatgaagctaaatatgctgctattagcacaccggtggtacgccatgtggtacaggctcaaaatgtagaagatgggcatgtagagaaaaagtattttaatccgaaagaatttcctcctaatatgaccttgtaccgatttagccgcagtgtaaaaatcagtggtttacctgattgggaatgggtgaaggcaaccctttataccgataccccagagcaacgtcggcaattgcaacaggcttatatggcggtctggcaggcttataatgccaaagatataaatactcttagggaacaacaaaaaattgcgcttagagcctgggcttgggccactgatgaaagtgaagaaagtgtttttgccgatcaacctattaacagtgatatcaaagaaaaaagtttcaaaatgataccgattaattgggatgactatatcgttaaaataatgaataagggtagaatggtcaaattagtgaataaatcaattttagaatattctccaatatcctattacactgttaataatgaagatggcgatacttatttcagtactactgcgccgattttctcattaattaatggccgttttgttcaggtaatttaa

SEQ ID NO: 6940 - DNA, 1602 bp, Photorhabdus luminescens
atggctgaacaaactatttcatcccgtgccggtgttgcttgcatgacatgcgacaacccggacccctgtatttataaaatcagcgtcacttttggtcagaatactcaggtatggcctgaaaagccggcaattaagatgagcctgattgatcatggaaaaggtcaaaaagggacgatacagattgaaggtaaatgtaataacacggttaaacatcatgcggtgctaacggggggacagaaagagaaaacgctagaatttaatgcgccacaggaggtgacattattttataaagatcaactgaaagacgctgagattgaaagtgacctggatagtgtctggttttatttatctaatcttgccaacccgacagatatgtacagtgagccgcgttattataagttaataacccagggttgcctggatagtcgacagtacgcgacgatagcggtttacccgtcggtcagttttatggtttcggttggattgagctttgatttttcccacggagaacgttctgtaaaggagcggcgtgatgaacagaaaaaagcgcgtcaggcgatggaaaatgtcaagcctaaaaatggcaataaactgcgcagtggatggacaacccatacggacccattttatctgacccgacagacggccattaacgtcgaatacgctttaacggttcaggatatggattactcggcgaagtttgcggaagttaatcaggtgaggaaaaccctgcccaatttagaggctatcaatcgggtggaaaagctactgggttataccaaggaatacctggcgcccgatccggattcaaaaggcacccgcagctaccaactgcttgagctcaaggtagatcccatcaatattggactggcttatgcttatggccgaaccacttcgatggatgaccgtacccattttttgggtttcagtgccgcaccttttatggggatgacggcaaaactggatcttatccaaatgggggcggcgtattgcaagataaagaaggtggtagccaaattcagggaggcgctggcccgcaggaattcaaatgataaaaactatttagatctggaatgttgccttattttgacatgcaatctgtcctttcagttgggtgccgcttataaacaaaagcagtggacttttgacgccggtaataagaatgatttgaaattgagtctggaaggaaaagtgaatgtcgcctttaagactcatattatgataatggaagtcgcaatgggagcgggtgtggctgtaaaaacagcggcgggttttgaacttgatcaacatgataaagggatcgatctggctggctaccataatgggattgttgctgagattcaggtagctgttgatgcaaggagaaatagtagtagaaattctataatcgaagttaaaaagaagtggaaatgggttattgccgatccgttaaaagccagtgaatccccgttaagaattaatctgataggagaagagcggcctattaatcgaccggagatagtcccaggtgctgaaacagcatcgtgggaaatgggttatgaccctaactttaagcctaagatggataacatcccgtttatcaccggattacccggaatgtga

SEQ ID NO: 6941 - DNA, 930 bp, Photorhabdus luminescens
ctgatggccgctgaaaaatattatgccgtcattgacggtgcgattgaataccgattgttttttatcttggaaaattttaatccccccgcggtttgtctttatgatgaatctttaccacctgaacggcttaaggtagcgccttacttggtggaggtgacagaaaaagtcggactttatttggaggaatggcaaacatgttggggaatttgtcttcactcaaaagcggatatgaaaacattgcgtcagcatttacgtaaatatcttcaagtattattacccgatcaagataaaccggtatttttccggttttacgatccgcgcaatatctgggagtttctcagtgtcctcagtgactgggaaattcactgttttctggggccgataaataaaattagcacttctctgatgggcgttaagcatgaagataattttcacgcggtcagaaaacaatttcccgtagaggctggctccagacaaaagatgttgcggatcacaacaaagcaatatgctcagttaaatgagctattcgaacaacgatatattaataaactgacgcgatttattaatgaagtcaattactataatagcgctggtaccatagatctgccatacgactccctgtcggcacattcagaccggatattgaaaaacccgttccctgatacacattattctcccgcctatatggatgaggccacatttattcaacataaaaccctagcagaggattgtttttatttttgtcgggataatgaaatcacggatgaacgcgccattggcgggtttctctatttgctgatggcgagacatatcaatcagtttgagcaaatcccgctggcatggttaaccgcacttagagacccccagtggccgggttattatcggatggaaacattattaaaaagcgaattgggttttatccccgattag

SEQ ID NO: 6942 - DNA, 1968 bp, Photorhabdus luminescens
atggcggattcaggactggtttttacactgactgcgggtcatctcccggagaaaacgtttgctgtagtggagtttactctagatgaagcactatcaacgttattttgtctggaggcgacattaaccagtgctgatccagatattaatttcgctgatgttcttgataattttgcgacactgaccgtttatcgtgatggaaaacccgagcgcagtataactgggattgtgactcaatttgaacaaagtacgacaggtcgtcatcgcagttattatgccttgaccattcaacctgctttatggcgtgcgggattacgggttaattcccgtatttttcagcatcaatctgtggctgagattattgacatattattgaaagaaaatggcgttagaaacttctattgccaattgcgttatgaacatcctgaacgggaattttgtgtgcaatatgatgagagtgatctggcgtttctccatcgtttattggctgatgaagggatgttttattatttcgatttcactgaggagcggggtgaaccgataattattttcattgattctcatcggataaataacaaattttcattgccctatcacccagaattggatgctacaggaagccaatgcagcatcaatcgattctgctggcgtgaacaggtcgggattgccaacattgtgttgaaggatcgtacttttaaaaatccgctgtggggggctgactgttactatcacgaacgccaaattaatcaccagcgttcagatttacccagttacacttactatgattttcccgggcgctttaaagatgagcgtggcgagcgcctgagtcaatatcgtctggaagcactccgcactgacgctatgtttggccgtgcacaaagtgactgttttgctctggcgccggcatcagggtttacgcttactgatcatccgaaagagcaatttaataccctgtggctggtcattaaaatcagtcatcacggtagacagccgcaggcggatgaatcccgtttcggtgaaatggggacgaccttaacgaacagcttcacctttggcgatcgcaaccgggtgtggcgtccctcgccttatcccaaaccgcgcattgacggcttgcaaattgcgacagtggttggcccggagggggaagagatcttctgtgatgaatacgggcgtgtgcgggtgcagtttgcctgggatcaatatggcaaattcaatgaccagagttcctgttggatcagagtcagtcaggcttgggctggcaagcgctggggcatgattgcaatcccgcgtgtggggcaggaagtgctggtggattttctgcatggcgatccagatcagccaattattattgggcgtacctatcatgccagtaatgttgtgcctaaccctttgccgatagcaaaaacccagatgtcaattcgttcaaaaacccataaaggggacggttttaatgaactaagatttgaagatgaaaaagatcgggaagagatatttattcatgctcagaagaatttggcgattaaggtactgaattcctgggatgagcgaattaattataaccgtacaaccagcattggtcatgatgacgaactggtcattgccaataaccgtaaaataacggttgatgggcaacaggaacacaaaactaccgggaactacgttgttcagattgagggtgacaaaactttgcaggtcgatggcaatgtagcacagaaagttcaaggtatgctcagtattgataccaatggtgatattacggtgcaaagcggcaataaaatcagtctgaaagtaggtaatagttttatcgttattcatgctgatggtgtcgatatcaaaggtccatctatcaatctgaactcaggggggagtcccggagatttattgcgaccggcggatccggtcattttgcaagctgccgccagtgccggctccttgtttgttgcacattgtccgaaggaggataacgactga

SEQ ID NO: 6943 - DNA, 966 bp, Photorhabdus luminescens
gtgcgcgtaagtaccaatatattgtacgaccagaaaatgacgagtatcactactgctcagtcgaaatggatgcagcagggagcacagctatccagtggtcagcgggtgataaatccatccgatgatccgatggcggcatctcagggtgtcatggtcgctcaagctgaagctcagaaccagcaatatataacggcccgctcgtttgctaaaaacgcgatttccatgcaattgagtgtagtatccaaagctgtcggtgtggttcaagatattcatgaaagtttggtagccacagtaaacggtgtattgagtgacgaagatcgtaactcgctggctattcaactgacagggtttaaagaacaactggtgaatttgggtaataccactgatggtaatggccgctatatttttgccggttataaaacggatatgaaaccttttgatgagagtacaaccggcacagtcagctatctaggaggctctgaggaaataactcagaaagtggatagcaaccgctctatgattattggacataccgggaagcaagtctttctctcgtctaccagtaatccgataaaagagccggatggcaaccagagtgaatctgatatatttaaaaccatagatatggcgattcagtcattgaaaacaccattcgtcgaagcagatcaaaagagtcgtgatgatgcgctggaattgttgaataaggctaaccgcggcgctcgcaacgcattgaataatatctcttcggtggaatcggtattgggtttacaactgagagaaatggaagacttagataatttgggggcggaacgcagcctggcgaataaaagccggttaagtcaactggttgacgtagaatggaactcagcgatttcgaattattatcaacaacaagccgtacttcaagcatcatataagacatttgctgatatgaaaggcatgtcgttgtttgagatatttcgttaa

SEQ ID NO: 6944 - DNA, 1650 bp, Photorhabdus luminescens
atgtccagcagtcttattaatatcgcgatgagtggcctgcaagctgctcaaattgctctgggaaccgtgagtaataacctcgcaaattccaaagttcctggttataaccggcaatcgacagttgtcaatcaaaacggcggcacgatgacatccgttggctttatcggcaatggtgttactgtcaccagtattaaccgtcaatataatgaattcattaatcaacaactgtctgaggctcgggcgaaacaaggtgaattcaccacttattctcagcaaatttcccagattgataatttgctggcagataaagcgaataacctgtcaaacaccattgatgacttctttaccagtttacaaaatgttgtcagtaatgcggaagatgatgcagccagaacaacagcgattggtaaatcaaaggggctggtaaaccagttgcaaagtgcggatgctttcctgcgtaaaatggaaaataacattaatcggggaatcgctaattcggctgagtctattaataactatgcgcagcaacttgctaaactcaatggtgaaattacccgtatgagaggcggtggcagtgctgagccgaatgcattactggatcagcgtgatcaattagtcaatgaactgaataagctggttggcgtgagtgtgattcagcaggatggcgattcttacaatgtctcttttgcggggggattgacactggttcagggaacaaccgcttaccgagtagaagcgatttcatccaatgcggatagcagtcgcattacattaggttatgatcgtggttttggtgatgttgttgaaattgatgaaaaattcattgataaagggcaattaggcggtacattacgggcgcgtagtgaagtactggataattcccgtaatcagttaaaccgattagcgttggtattgggcgatcaatttaatcaggttcatcgtgctggttttgatttaaaaggcaaaccgggtgaagatttcttcacatttaataacccggatgtgattgccaatagtaaaaataaaggttctgctaattttaaagtggaatatacagatacctcggtggtaaaagatagtgattatcatattagctacgatggcgctaattggaaaattcagcatgcttctggtaaggttaaggtggatattgccgccaaagtgacaggtaatacactggaatttgatggactaaaagttgaaattgatccaaccaatgtaaaagaaaacgatcgatatacactgaaaaccgtcagcggtgttattggcaatatggcggttaatattaaagatgcgtcgaaattggcggctgccggtaataaagatggtggggcgagtgataacgtcaatgccaaaaaactcattgaattgcagaacaaaaaattggtagagggtaacgcatcattttctggtgcttatgcttcgatggtcagtaccattggtaaccagaccagcgaggcgaatgttgatttagaaactcagaataatattactaaacaactttacgctgaccagcagtcggtttccggcgtcaacgtagatgaagaatatggcgcattacaaaacttacagcaatattatctggcgaatgcgcaagttatccagactgtcacaacgttatttaatgccattttggaactccgtcgctaa

SEQ ID NO: 6945 - DNA, 945 bp, Photorhabdus luminescens
ttgatgaatgattttttaaccctgcccggtgcggcttatgatgtacagtcggttaacgcgttaaaatccaatctggcaaaagatccacaacaggggctacggcaagtagcccaacaaatggaagggctctttgttcagatgatgttgaaaagcatgcgttcagctctgcctaaagagggcatgttgagcagtgaacagacacgactctatacttcgatatacgatcagcaaatcgcgcagaatattgctcagaaggggctaggttttgccgatatgatgctcaagcagcttgctaacaacaaaattgcccctggcgaaatggcgggtaaggtccccatgacgctggataacgacgttttgcaaactttgccaaggcaggcgcttgagcaatttatccgtcgaacggtaccgaaacccgaggtggcacctaaaccgctccccctgaacagtacgaattttgtctctacgctctcgacccctgcccggatagctagccaacgcagtggtattcctcatttgctgattattgctcaggccgcattagagtctggttgggggcaaagagagattctgaccgctgatggtaagccaagccataatctgtttggtattaaagcgggtaaaggttggaaagggccggtaaccaatatcttgaccacagaatatatcaacggtgagccacagaaaatgaaggataacttccgtgtttatggctcttacgtggaagcgattgaggattacgtcaaattactgacagagagtccccgttacgccaacgttgcccgctctgctaccgcggagcaaggggcttattccttacaacaggcaggttatgcgaccgatcccggatatgcgaaaaaactggtctcagtgattcaacagctaaaaggtgccggagagcaggcggtaaaagcctatacctacgatttgagtaaactattctga

SEQ ID NO: 6946 - DNA, 1110 bp, Photorhabdus luminescens
atgataaaacaatttgctgtcagccttcttcttgtattgctgactctggtgacaacgacggcatcagcagaacgtatccgtgatctcaccacggttcaaggagtacgggaaaatgcgttgattggttatggattagtagttgggctggatggaacgggtgaccagacgactcagacgccatttaccacccaaagtttaagcaacatgttatcccaattggggattactgttcctccgggaaccaatatgcagttgaaaaacgtggctgccgtgatggtcaccgcgaagttaccgccgtttggccgtgccgggcagaatattgatgtggtggtttcctcattggggaacgcgaaaagcttacgtggtggtactttgttgatgacaccactaaaaggtgttgataatcaggtctatgctctggcgcagggtaatatattggttggtggtgccggtgccagcgcggggggaagcagtgtaaaagtcaatcaacttgcaggtggtcggattagtaacggtgcagtgattgaacgcgaattgcctacccagtttggtgaaaatggcgtactgaatcttcaattaaataacgaagacttctcactggcgcagcaaattagcgatacgatcaatcgtacggatggaacgggaacagcaacgccgttggatgcccgcacagtacaattgcgtatgccgagagataaaagtgcgcaggttaaattcctctcccatgtgcagaatctcactgtccgtgttgatgtcggtgatgccaaagtgatcgtcaactctcgcaccggctctgtcgtgatgaatcgcaatgtcatgctagatagctgcgctgttgctcaagggaatctttctgtcattgtcgataatcaagtggttgttagtcagccaaatacaccgttagcaggtggtagtaccgttgttactcgtaatcccgctgttgctgtccgtgaacaaaatggtgcgttgcaacaggttaacgccagtgcaagtttgagccaggttattcaagcattgaatgctctgggtgcgacaccgaatgatttaatgtcaatcttacaggcaatggaaagtgcgggttgtttgcgggcgaaattggagatcatttga

SEQ ID NO: 6947 - DNA, 753 bp, Photorhabdus luminescens
atggatacaatggctgttgccgagaccagcgccgtttgtcagttccgccatttacggaaaaatatggcgaataaatggcgttgtagtatagcactggcggtattgtcactaacgggctgtgcgtatataccgcaaaaacccctggttgagggagcaaccaccgccgcaccttctgtggcaactgcaccagtccctaatggtgctatttttcaagtagtacagccggtttattatggttatcagccgctatttgaagatcgccgaccacgaaatattggcgataccctgacgattacattgcaggaaaatgtcagcgccagtaagaactcttcggctaatgccagccgtaatgggaaaaacacgttttccgcagcactgactccccgtttcctgaaagggctaattggtggagataaaaccgatctggacatggaagccgagaacacgtttggtgggaaaggcggcgctaatgcgaataacaccttcaaagggacgattaccgtgacagtcgatcggttactggcaaacggtaacttgcatgtggttggtgaaaagcagatagctatcaatcagggaaccgagtttattcgtttttccggtgtcgttaacccacggacaattaatgctaataacacggtcagttccaatcaggtcgctgatgctcgcattgaatatgtggggaatggctatatcaatgaagcgcagaacatggggtggttacagcgtttcttcctgaatgttgcaccattttaa

SEQ ID NO: 6948 - DNA, 783 bp, Photorhabdus luminescens
atgatccgatcattatggattgctaaaactgggctggatgcccagcaaaccaatatggatgtgattgccaacaacttggcaaacgtcagcaccaatggttttaaacgccagcgtgccatttttgaagatctgctttaccagaacattcgtcaaccaggggcgatgtcatcggagcaaactcgcttaccttctggtttacagataggtactggggtacgcccggtagcaacagaacgtatacatagtcagggaaacttatctgaaactaataacagccataatgttgccattagaggaaagggtttctttcaggttcagttacctgatggtaccagtgcttatacccgtgacggttcatttcaggaagatcaaaacggacagttgacaaccgctaacggttttttgatcttccctactattaccattcctgataatgcgacggacctcaccattagcagtgatggtattgtcagtgtgaaagtacaggggcaatcggtacctcagcaagttggtcaatttactctgacaacttttatcaatgacagtgggttagaaagtatcggtgaaaacctttatgtagagactagcagctctggcgtaccgattgaaaatacaccgggaatcaatggcgcaggattgctccagcataaatatgtcgaaacatctaacgtcaatatcgcggaagaattggtcaatatgattcagactcagcgtgcttatgaagttaatagtaaagcggtgtcgacgtctgatcagatgctacaaaaactgactcagttataa

SEQ ID NO: 6949 - DNA, 756 bp, Photorhabdus luminescens
atggatcatgtcatttataccgcaatgggcggtgctcgtcagacactagaacatcaggcagtgacggcaaataacctggctaatgcctcgacgccgggttttaaggcgcaactggctgctttgcgagcggtgcctgttgaaggggctgcctttaatacccgtactttggttgtggcttcaacgccgggttctgacaatcgtcaggggccgatgaactatacctctcgtccgttggatgtggcgattgggcaggggggatatctggcggttcagcttgaagatgggtctgaggcttacacgcgtaacggcagcattcagatttcagcggaaggccagttaactgttcaaggtaacttgttgatgggggacaacggcccgatcaatattccgccacaggctgagttaaccctggcgacggatggttctatatctgcactgattcctggtgatccgccaacacagttggggcaacttggcagattgaaaatggtgaaaccggagagcgatcagctagtccgcggcgatgatggcctttttcacatgacggaacaggcgcaagggttacagggtgatgtcttgccagccagtgatgaggtgaaattaatgcccggtgtgcttgaaggaagtaacgtcaacccaatggaaagcatggtgagcatgattgccaatgcccgccgttttgaaatgcagatgaaagtcatccatagctcagatgaaaatgcacaacgtgctaatcagctattagcaatgagttga

SEQ ID NO: 6950 - DNA, 1215 bp, Photorhabdus luminescens
atggctttttcacaagcagtaagtggtttgaatgccgcggcaggtaatttggatgttattggtaataatatcgctaacgcggcgacatatggttttaaatccagcacggttgctttttctgacatttttgccggttctcaggtgggactgggggtaaaagtatcgggtgttaatcagaattttaaagatggtacgccaacgacgactaaccgaacacttgatctggcgatcacgcagggcggttttttccgtatgcaaggcggtgatggcgggatttattattcccgtaacggccaattcaagatggatgagaaccgcaatattatcaacatgcaaggcatgaaattgaccggctatcccgctgccagcgtcaatggtggcgcgccggagattcagaaaggggctaacccagagccaattacaatacctcaaggtatattgatggctaaagcaacaactaaggttacgatgacagccaaccttaattcgatgcataaaaaaccgacagaggctttctcgccggaaaataacgattcttataactatcctaccagtgttaccacctttgatagcttgggtaacccacatgctatccaggttttctttgtgaaaacgaatgataacgaatggcaggttcatgctcaggatagtgcggttgagggcgctaaagccgcttcgttggggacgttgaaatttgatggcaacggtaaactaattggtgacaataatcagtttacatttaatgttccttctctgaatggttctaatgccgctgatatcactattgattttaatggcagtaaacagcaaaagattgatactgacagcatatcagcacccaagcaagacggttatgccgcaggtgaattcaagggctaccgtattgagcaagatggccgtgtcatcggcacctataccaatgagcaatcccaattattaggtcagatcgttctgactaactttgctaacccagaaggactggcagcgaagggtgataacgtttgggtagagacgagcgcttcaggtaacccagtggttggcattgcggattctggcggttttggcaaattgctcagtggttcgctggaagcatccaacgtcgatatgagccaggagctggttaatatgatcgtggcgcagcgcaactaccaatccagtgcgcaaaccattaaaacccaagatcagatcctacaaacgctggtcagcatgcgctga

SEQ ID NO: 6951 - DNA, 696 bp, Photorhabdus luminescens
atggcgattaccggttcagtgaatgaatcactgaataacacgattgttggagagccagtattggctggcaagaaaaagggtagtgaagagctcaatagcaacttcatgaaattgctggtcgcgcaaatgaaaaatcaagaccccactaacccgatgaagaacaatgagctgacttcccatttggcgcagattaacacactagcggggatcgaaaagctgaataccacactggggtctattgtcggtcagataaataataatcagcctgtacaggcatcagctctgattgggcgaggcgttatgatccctgggaatactattttggcaggtttagacaaagaagctgggaacgtcagtacgacaccatatggtattgagttggaaaggcccgcggatagtgtgcaagtcaccattattgataaacaaggcggggttgtacgccaaattgatctcggtggattggaagcgggtgtccatagcttccgcccttgggatggcaaaaaagaagatggcacgaatgttgaggatggcgcttataacttcactattactgccagctataaaggcgaacagagagtatttcagccgctgaggtttgcgaaggtaaatggtgttactcgtgacgcggacggcgctaagctagatttagggcggatcggtgccgtcactatggatcagatacgtcaaattctttaa

SEQ ID NO: 6952 - DNA, 405 bp, Photorhabdus luminescens
atgtctttactcagtatttttgatattgccggctcggcattatcagctcaatcccaacgattaaatgtcagcgccagcaatatggcaaatgccgatagtgttgcgggacctgatggtcagccgtatcgggctaaacaggtggttttccgtgttgccgcaccggcagggcaggaaaccggtggcgtcagagtcagtgaaattgttgatgatcccacccctttccgccttgagtatcagccgggacatccattggctgatgaaaagggttatgtgcggatgccaaacgttgatgtggtcggagaaatgattaacaccatttccgcttcccgtagttatcaagccaacgttgaagtgcttaatacaactaagtcgatgatgttgaaaacattgacgttaggtcagtaa

SEQ ID NO: 6953 - DNA, 414 bp, Photorhabdus luminescens
atgctcgataaattagatgcagcctttcattttcagcaggaagctctgtcattgcgatcacggcgacaagaaatattgtccgctaatatcgccaatgcggatacgcccggttatcaagcgcgggatattgatttcgccacacaactgaaaaaaaccattgcacacggtcgggtcaccggaaacgggatcgggctgacgctgacatccgatcggcatattcctattcagcctcagaagagaatggagatggacttactgtatcgggtgccttatcagccagcaatggatggcaacacggtggatatggatatggaacgcagcaattttatggataacagcttgaaatatcaggctgaactgacggcgaccagctctcaagttaaaagcatgatggcagtcttacagcaaggataa

SEQ ID NO: 6954 - DNA, 660 bp, Photorhabdus luminescens
atgcaagctataaatattatcgggctgttcgcatttttctttatcacttcgatggcatggggcaataatttaccccaagctatggagcactatttccagcagatacatagggataatcattacaaagtttctgttaacatcagaacccctgaacaacaatggcctcagtgtgaacggccagaaattcaacccgctatcggtggtcaaaattggggaaatctctctttacctgttatctgccatcaacaacgcaaattcattcaagtcgctgtcagtgtgacagggaattatctggttacccgccgagctatctcgcgtaatgatgttttatcagataaagattttcaggtcagaagaggattactggaaagactaccgcatgatctggtcattaacaaaaatgagataaaaaatagtattgcgatacgtaacatcccggcggggcaggcgattacgcataatatgttacgccgcccgtgggttgtacggtcaggccagagtgtggcggtgattatacagggaaatggctttcagatacgaaacgaagggaaagctattaataacgccgctatttctgataaagtcagagttcgaataaattcagggcatgttataaccggccaggcattagaaaacggcaatgtaaaaatcatgttataa

SEQ ID NO: 6955 - DNA, 303 bp, Photorhabdus luminescens
atgagtatcgaacgcactcaccccttattagctatcgctgctgttcaacagcgaccaactaatgaaagcgcccagggcacccgaaaaaccgccggcgttaccttacaaagcagcgatgcacaagtaaaactgagcgaagcacaaacaaaactggttcaaccaagcagccaggatatcaatatccaaaaggtgcaaaagttgaaagaagctattgctcagggaagcttaaaaatgaacagcggtaaaatagcagacgctctgctcaaagaagccgccgaaaactttcaatacgataagaaataa

SEQ ID NO: 6956 - DNA, 441 bp, Photorhabdus luminescens
atggaagaacttcaacaattactcgaacagcaagtgacctatttgacctcgctgacccaaactgtggcggaagaacagcgtattttgtgcgagggttttattgaagcacgagatttgcaccagataacagaacgaaaaattttcctgttgtccgcgcttagccattcagaacagcaacgtcttaatttgagcaaagcattaaacattactgcgccttatgataaacaacctttgctggccacattatggcaacagatcggcaaagcagttatccgggttcgtgatttaaacactcataacggttcgttgttaacccagcatcttgatttgaatagtaaagccattgctttcctaaaaagccatcatagcccctcgctttacggttcagacggccaggctgcccgtcacagcatgctttccggccacaaagttcaggtttga

SEQ ID NO: 6957 - DNA, 1029 bp, Photorhabdus luminescens
ttgaagatcgccaagctacaacagcaacaagacgaattgttcatgcgctttcaacaggagatcttaccggtagaacatcaatatatgcagtccagatatgataaagcggcacggttgctttcatttgccgataaaaaatcgctggggaaaaaccaacggagagaattattttcctggatagaagaagagcttgctgagttatatacttacccctttaacgaaaaccttgatctcaataagttgaccgatcacttttccaatcttaatgcgttgaaagaagaggaaattccgacaccagaacagatggatgatatccgacagacttttagtgaatattttgattttagtgaagaaatatctgatgaagaattacttgatatgataaaaaatcccgaaaaaatgcgttccaccatagaacagcgttttcaacgggaatcagagcatttccacgatgaatatgatgcagaagagacctctgacttcgatcctgcggcagaagaccagaaaaaactggattctttgtttaaatcgcaggaagtgagccaaatgtatagaaaaatagccaaggtactgcatccggatcgtgaacaagatttggatgagaagaagaagaaaaaccagttgatggtacagttatcaaaagccaagaaagataatgatgtctggacgataatagacatgtaccacaagtacattgatccaactttcagttttaatagccgggatatatccaacatcaataaattgctcaaagcacgtatagacatattagccaatgagcttaatcagctaaaaaaatctgattcgttaccgggcatgatttggcgcacactgggaggtaatacatcgaagacaatagagaataacctccgcgaacattgcaaaaaattgcggcaaaatatagaaaacgaaatccaactgcgcgaaaacctacgctcactcaccgtactaaaaagctaccttgcagaacgacgtgatacctttgaatttgaacaagaaatgattgactattttttcaaacaatattga

SEQ ID NO: 6958 - DNA, 1476 bp, Photorhabdus luminescens
atgatgactgataaagaaattagttctgttgactcattgaaagcgagttttaagtctggtgtacggctcatgcctgaagccttttcccatttgattgatgaggcatataaggcatatgaaattattgatggcgctcagggtgataacctaaccacaggactgaaacgagatggcaaaggaaaactgaccctcaacacccagcattctggcgggttgaattctaatcaaggcgctttggccttatcactgaagccagaaggtgggctctcttttgatgggggagggtatttgaaattggatgccgatcggcaggttcagtttgcggattttttcagtttgtcgcggcgggagcggatggagattacgcaggtgttgggtttgaaacgtaccatgataacgcgaattgtttctcccttccccaaagagaatgagtattttggtagctctgttagtctgaacgcagcgggagactgcttagcggttgggatgaataatcaagtctgtgtgtatacgcgccggaagagtggtgagtggaatatacgtaagccaattgtgtttgaggcttttgaagatgaatatcatagatcttcatgggatgtctgtctggatgcggcgggagataccttggcgttgggaaacatgttgccgtatcccacttataaccaagggcgggtttgtgtgtatacgtgcacgaagggcgtctgggatacaaaacaccccgtagtgtttccgattggagttgaatactttggtgtaaatgtcagcttgaacgccgcaggagactgtctggtggctgggggcaaagactactctccgttccgtatgtttacacgcatgaatgggatctgggatacaaaaaaacccattctgtttccggccccttcggattcttatgagtttggttggattgcccacttaagtgctacgggaaattgtttggcggtgcgtgataacggttacacgatttatgtgtatacacgcatgaatgggatctgggatggagaaaaccccattaagtttagtgcctctgaaaataacctattaatgggcagggcttttagcctgaatgcagagggagatcgcctagcggtgggtatggaattttataaatccacagatgggtgggtttatttgtataagcgcacgaatgggatctgggataaagaaaatcccattaagttttcggctcctgcaagtgacgtaacgtattttggccgcgttctcgaactgaatgatgcaggagattgcttggtagtgggggcgtattccagggtatatgtgtatacctgcttaaataataagtggaatatggaaacacctatggagattttgaacccttcagacaatttaagtggttttggtgggtctgtcggcctgaataaggcggggacgagtttggttgttggcgcaggtccaatcaagcttggttctgagtccgaagccggtgcagtttatgtttttgaaaatgtcaaatga

SEQ ID NO: 6959 - DNA, 165 bp, Photorhabdus luminescens
gtgtttttagaagatagcaacatacctgaggtagtcagtgaagttaagtatcgccaaaccgcaggatatcgagctaaaaggtgtgaaggcattaattgtggtgtatttcgtagtcagtgccgtcacttaattccatcgactttaacgaagtggataaaacattaa

SEQ ID NO: 6960 - DNA, 1473 bp, Photorhabdus luminescens
gtgatgactgataaagaaattaataccgttgactcattgaaagcgagttttaagtctggtgtgcggctcatgccggaagccttttcccatttgattgatgaagcctataaagcatatgaaatcattgatggcgttcagggtgatggcccaaccgcaggactgaaacgagatgacaaaggaaaactgaccctcaacacccagcattctggcgggttaaattttaatcaatgtgctttggcgttatcactgaaaccagaagggggactctcgtttgatgggggaggatatctgaaattggatgccgatcggcaggttcagcttgcggattttttcagcttatcgcggtgtgagcggatggagatcacgcaggtgttgggtttgaaacgcaccatgataacgcgcattgtttctaccttccctaaagaagatgagcgttttggcgcttctgttagcctgaacgcagcgggagactgtttagcagttgggataaataatcaagtctgtgtgtatacgcgccggaagagtggtgagtggaatataagcaaacctattgtgtttgaggcttatgaagatgaatattataaatcttcatgggatgtcagtctggatgcggctggcgataccctggcgttgggaaacatgtcgccgtatcccacttataaccaagggcgggtttgtgtgtatacgcgtacgaagggcttttgggatacaaaacatcccgttgtgtttccgataggacctgaatactttggtgtgaatgtcagcttgagcgctgcgggagactgtctggtgggtgggggcaaaccctaccctccgttccgtatatttatgcgccggaatgggatctgggatacaaaaaaacccattccgattccgatcccttcggattcttatgagtttggctggattgcccatctaagtgctgcgggaaactgtctggcggtgcgtgattatgctcccgtgatttatgtgtatacacgcacaaatgggatctgggatggagaaaaccccattaagttcaaggtccctgaaaataacctattcgtgggtagggcttttagcctgaatgcagaaggagatcgcttagcggtggggatagagttttataactccacagatggggaggtttatttgtataagcgccggaatggggtctgggatacagaaaatcccattaagttttcggccccggcaaatagcgtatattttggtagctctctcgaactgaatgatgcgggagatcgcttggtagtgggggcgtattccagggtatatgtgtatacctgtctgaatgataagtggaatatggaaacaccgatggagattttgaatccttcaggcaatttaaatggttttggtgggtctgttggcctgaataaggcagggacgagtttggttgttggtgcaacgtcagagagtgttgattctaaatccaaagccggtgtagtttatgtttttgagaatgtcaaatga

SEQ ID NO: 6961 - DNA, 1464 bp, Photorhabdus luminescens
atgatgactgataaagaaatcaatatcgttgactcaatgaaagcgaattttaaatctggtgtgcggcttatgccggaagccttttcccatttgattgatgaagcctataaagcatatgaaatcattgatggcgctcagggtgatggcccaaccgcagggctgaaacgagatggaaaaggaaaactggccctcaacactcatcattctggcgggttaaacctcgaacaaggcgctttggcgctatccttgaagccagaaggtggactctcttttgatgggggaggatatctgaaattggatgccgctcggcagattcagtttgcggattttttcagtttatcgcggggagcgcggatggagatcacgcagttgttgggtttgaaacgtactatgataacgcgcattgtttctcccttccctagaacggatgagtattttggtagctctgttagcctgaacgcggcaggagactgtttagcggttgggatgaatagtcacgtctatgtgtatacgcgccggaagagtggtgagtggaatataagcaagccgattatgtttgaggatgttgaatatgatttatcttcatggcgtgtcggtctggatgcggcgggagattgtctggcgttgggagacatatggcccgaagtggttcgtgtatatacacgcacgaagggcgtttgggatacaaaacatcccgttgtgtttccgagggatgctgtaagatttggtgcgaatgtcagcttgaacgccgcaggagactgtctggtggctgggggcaaatactcctctccattccgtatgtttatacgcaggaatgggatctgggatacaaaaaaccccattctgtttccggccccttcggatgcttatgagtttggcgcgattgcccacctgagtgctgcgggaaaccgtctggcggtgtgtgatgattacatttccgcgatttatgtgtatacacgcacaaatgggatttgggatatagaaaaccccattaagttccgtcgccctgaaggtggatcatctagttttagcggggtttttagcctgaatgcagagggagatcgcttggcggtgggtacggatttttataaaccctataatggggaggtttatctgtatacgtgcacgaatgggatctgggatagagaaaatcccgttaagttttcggcccctgtaagtcgcatatcttttggcggttctctcgaactgaatgacgcgggagatcgtctggcagtgggtgcagcttcccgggtgtatgtgtatacctgtctgaatggtaagtggaatatggaaacaccgatggagattttgaacccttcaggcaattcagacaatttaaatggttttggtgggcctgtcggcctgaataaggcggggacgagtttggctgttggcgcagcatcagaaggtgttgattctaaatccaaagctggtgcagtttatatctttgagaatatcaattga

SEQ ID NO: 6962 - DNA, 1503 bp, Photorhabdus luminescens
atgatgactgataaagaaattagttctgttgactcattgaaagcgagttttaagtctggtgttcggctcatgccggaagcattttctcacttgattgatgaggcatatagggcatatgaaaccattgatggcgctcagggtgatggcccgaccgcagggctgaaacgagatggtaaaggaaaactggccctcaacattcatcattctggcgggttgaaccctcatcaaggcgctttggccctatcactgaaaccagaaggtggactctcttttgctggaggagggtatctgaaattggatgctgatcggcaggttcagtttgcggattttttcagtttatcgcggcgggaacggatagagatcacgcgggtattgggtttgaaacgcaccatgatgacgcgtattgtttctaccactctctctcccgaggcgcgtgaattttttggctattctgttagcttgaatgcggtgggagaccgtttagcggttgggatgaatactaaaatctgtatatatacgcgccggaagagtggtgagtggaatacaagcacgcctattgtgcttgagtcttatcaaagtgattcttcatgggatgtcagtctgaatgcggcgggagattgcctagcgttggcaaataggttcagacagagggttggtgtacatatgcgtgcaaatggcgtctggaatgtaagaaagcccgtttggtttccggctccgagccgcattgaattctttggcctgggtgtcagcttgagcgcagcgggagattgtctggtgactgggtgcgaattcaaatctgcgttacattctacgttccatatgtttacacgcacgaacgggatctgggatagcgaaaatcccattaagtttccggtcccttcgagttcttatgaatttggcaaggctgtccgcctgagtgccgcaggaaactgtctggcggtgcatggttacgatgatttcacaataagcacgatttatgtgtatacacgcacgaatgggatctgggatagcgaaaaccccattaagttcagtcaccttgaaggtcaatcatctgttttcagcaaggtttttagcctgaatgcagagggagatcgtctggctgtgggggtgggtttttataagtccacgaatattgttagggaggtttatctgtatacacgcacaaatgggatttgggatagagaaaatcctattaagttttcggccccttcaagtgacgtaacgtattttggccgcgctatcgaactgaatgatgcgggagatcgtctggcagtgggtgccgcttcccgggtgtatgtgtatacctgtctgaataataagtggaatatagaaacacctatcgagattttggacccttcaggcaattcagacaatttagatagttttggcggggctgtcggcctgaataaggcggggacgagtttggcggttggtgtaatttcaatgaagattggctctgcgtctgaagccagtgcagtttatatctttgagaatgtcaaatga

SEQ ID NO: 6963 - DNA, 1464 bp, Photorhabdus luminescens
atgatgactgataaagaaattagttttgttgactcattgaaagcgagttttaagtctggtgttcggctcatgccggaagccttttcctatttgattgatgaggcatataaggcatatgaaatcattgatggcgctcagggtgatggcccaaccgcagggctgaaacgagatggaaaaggaaaactggccctcaacactcatcattctggcgggttaaacctcgaacaaggcgctttggcgctatccttgaagccagaaggtggactctcttttgatgggggaggatatctgaaattggatgccgctcggcagattcagtttgcggattttttcagtttatcgcggggagcgcggatggagatcacgcagttgttgggtttgaaacgtactatgataacgcgcattgtttctcccttccctagaacggatgagtattttggtagctctgttagcctgaacgcggcaggagactgtttagcggttgggatgaatagtcacgtctatgtgtatacgcgccggaagagtggtgagtggaatataagcaagccgattatgtttgaggatgttgaatatgatttatcttcatggcgtgtcggtctggatgcggcgggagattgtctggcgttgggagacatatggcccgaagtggttcgtgtatatacacgcacgaagggcgtttgggatacaaaacatcccgttgtgtttccgagggatgctgtaagatttggtgcgaatgtcagcttgaacgccgcaggagactgtctggtggctgggggcaaatactcctctccattccgtatgtttatacgcaggaatgggatctgggatacaaaaaaccccattctgtttccggccccttcggatgcttatgagtttggtgcgattgcccacctgagtgctgtgggaaaccgtctggcggtgtgtgatgattacatttccgcgatttatgtgtatacacgcacaaatgggatttgggatatagaaaaccccattaagttccgtcgccctgaaggtggatcatctagttttagcggggtttttagcctgaatgcagagggagatcgcttggcggtgggtacggatttttataaaccctataatggggaggtttatctgtatacgtgcacgaatgggatctgggatagagaaaatcccgttaagttttcggcccctgtaagtcgcatagattttggacgctctctcgaactgaatgctgcgggggatcgtctggcagtgggtgcggctgccagggtgtatgtgtatgcctgtctaaataataagtggaatatagaaacacctacggagattttggacccttcaggcaattcagacaatttaaatggttttggtaaggctgtctgcctaaataaggcggggacgagtttggccgttggtgcagattcagaaagtgtcgattctcaaccccgagccggtgcagtttatgtttttgaggatgtcaattga

SEQ ID NO: 6964 - DNA, 1503 bp, Photorhabdus luminescens; identical to SEQ ID NO: 6962

SEQ ID NO: 6965 - DNA, 1515 bp, Photorhabdus luminescens
atgatgactgataaagaaatgagtactgttgactcattgaaagcgagttttaagtctggtattcggcttatgtctgacgccttttctcatttgattgatgaagcatataaggcatatgaaaccattgatggcgctccgtgtgatagtccaaccgcaggactgaaacgagatggcaaaggaaaactggccctcaacactcaccattctggtgggttaaaccttgaacaaggggctttggcgctatccttgaagctagaaggtggactctcttttgatgggggagggtatctgaaattggatgccgatcggcaggttcagtttgcggattttttcagtttatcgcggcgggagcggatggagatcacgcaggtgttgggtttgaaacgtactatgataacgcgcattgtttctcccttccctaagagaaatggatccttgggcgattatgttagcatgaatgcggcgggggactgcttagcggttgggatgattaataaagtctatgtatatacgcgccggaagagtggtgagtggaatacaagcacgcctactgtgcttgagccttttcaaaatgattatttgggatcttcatgggatgttagtttggatgcggcgggaaattgcctggcgttgggaaatagaggacccgctgatgctagcatgatggttggtgtatatacacgcacgaatggcgtctgggatgcaagaaatcccgtttggttcccggctctgggtgccagagaatactttggtattaatgtcagcttgagcgcagcaggagactgtctggtggctgggggcatatactcctctacgttccatatgtttacacgcacgaacgggatctgggatagagaaaatcccattaaatttccgatcccttcgggttcttatgaatttggctgggctgcccaccttagtgctgcgggaaactgtctggcagtgtttggagaggatccttcttctggttacataagaggcacgatttatgtgtatacacgcacgaatgggatctgggatagcgaaaaccctattaagctcaagctccctgaaggcagctcatccctttttggcaaggtttttagcctgaatgcagagggagatcgtctggcggtgggggaggtgcgtgattatttccccattattaatggaaaagtttatctgtatacacgcacgaatgggatttgggatagcgaaaatcctattaagttttcggttcctgcaagtgacgtaatagattttggacgctctctcgaactgaatgctgcgggggatcgtctggcagtgggtgcggctgccagggtgtatgtgtatacctgtctaaataataagtggaatatagaaacacctacggagattttggacccttcaggcaattcagacaatttaaatggttttggtaaggctgtctgcctaaataaggcggggacgagtttggccgttggtgcagattcagaaagtgtcgattctcaaccccgagccggtgcagtttatgtttttgaggatgtcaattga

SEQ ID NO: 6966 - DNA, 1494 bp, Photorhabdus luminescens
atgactgataaagaaatgagttctgttgactcattgaaagcgagttttaagtctggtgttccgcctatgcctgaagcattttctcatttgattgatgaggcatatagggcatatgaaatcattgatggtgataagcgggatggcccgaccgcagggctgggacgagatgacaaaggaaaactagccctcaacactcaccattctggcgggttaaaccttgatcagagagctttggccctgtcactgaagctagaaggtgggctctcttttgatgggggaaggcgtctgaaattagatgccgatcggcaggttcagtttgccgattttttcagtttatcgcggtgggagcggatggagatcgcacagttgttgggtttgaaacgcagtaccacgatgatgcgtattgtttctccttcccctaaagagaatgaacgctttggcacttctgttagcctgaatgcagcgggagattgcttagtggttgggatggggaaagagctctatttgtatatgagccggaaaggtgagtggaatacaagcgctcccattgtgtttgaggctgatggagataaatatcgtagtgcttcatggagtgtcagtctggatgcggagggagataacctggctgtgggatactcaactccaactgatactcaaacaatggaagtttgtttgtatatgcgcacgcatggtgtttgggatacaaaaaatcccattgtgtttccaatcaagcgttcttatggagactatgatgtgaatgtcagcttgagcgcagcaggagactgtctggtggtggcgggggacacctatccattctatgtgtatacccgcacgaatgggatctgggacagagaaaaccccattcagcttcgtttttcgaatgttggggccacgatttgtctgagtgcctcgggaaattgtctggcggtgcatggttcctattattctgatcgtactacaataaacatggtttatgtgtgtacacgtacgaatgggacctgggatgaaagctacattaggttcaatccccctgaagatagctcacccggttttggcaaggtttttagcctgaatgcagagggagatcgtctggcggtgggggcggatgatgattcacctattattaatgggaaggtttatctgtatacgcgcacgaatgggatctgggatacacaaaatcccattaagttttcggtgcctgcaagtggcgtaacgtattttggctgcgctatcaaactgaatgatgcgggagaccgtctggcagtgggggcggcttctagggtgtatgtgtatacctatctgaatggtaagtggaatatggaaacacctaccgagattttggacccttcaggcaatttagacaatttaaatggttttggtaaggctgtcagtttgaataagttaggaacgagtttggcggttggtgcggttttagccaaggtcggttctgctcctgaagccggtgcagtctatacctttgagaaggtcaaatag

SEQ ID NO: 6967 - DNA, 402 bp, Photorhabdus luminescens
atggtgaaagagataacagatgaaacggtcagtcagcttggtacccacttcgcccctggcaagatcccgactgaggcggcgttttattcactgattgattgggccacgttgtggcgacagctttttggttggcaggatggtgctcaagcttatcatccggggggcggtttgcaggttatcgacaaccgtttggcggttaagactggcaatggcatcgcggtgaaaccggaggggcttgcgttaaggctacagcccaatgggggattgatgttggataaatctggggcgttgtcagtggatggtactgtagccgtttcggcacaagcttttaaattgcttcctgaggagacgcggaaacaaattgccaagttgttattgaatgctgagacagaaaacagatga

SEQ ID NO: 6968 - DNA, 1572 bp, Photorhabdus luminescens
atggctcacaacaagacatctactacatccagcgagaatagtttgttggataaagaggaagttaaatcctggtttaaattatattccctgccgaaaagtgaaaattatgctcaattggtgcaaatagcggcggaaggtcgacgtttggccgggctggaccctgctcagctcgataataatccaggggcaggattgaaccgggatctggatgaagtgaatttactcttagtgaatcccggtgatggggtgcatatcggcgaagaccgtgaaattgctgtcaatattgataaaagcagcggcttacagttcattaatggcgaattgggattacgccccgactttaaattgtcgctggaattgtttgagagttttacagaggaacaaaaaagggagctttaccgttggctgattcatgctgaggagatggcagcaagtaaggcgcagttgcccgcgtttgacttgccggccaatggtaacaataaaaaccttggcgctgttgtcagtgtcagcggcgatgggaaaactattgcgcttagtggggcagaaggaaaggatcctgtatatctattttcttataccgataacggttggcggcagcaattcgctgattacgttagtggttatagcggcagagcgttaagtttgaatcgcaatggtaatgtcctcgcggtggggattgataaccgaaacagtgatggtgggcatggttcggtgttcgtttatcgcagattggcaaatggcgcgtgggagaaatcggccaaactttggcttagtgaggcgaacgttcagcagcatttcggttgcgctgtgggcctaagtgctgatggcacactattagcagtaggttcttatggctggagatcgggtttattggctaactgcggcgcagtgtatctttatcagtatgacgggaagaaatggtcacagcttggtgagcgtctgaccttatcttctccggcacagggcgatatgtttggcggcaaacttagcttgagtgccgatggttcaaccttggcagtggcggcaacggggcgtaatggtaatggtgaagtgacgatatttcatcgtcacggggaatactggcaaccgcaactgccactcaattcgctgacttcgcctttaaccatcagtaaagacgactttggtgccagtctcagcctgagcgatagcggcaatattctggcggtggggtgcccgggagagaagaacaatattggtgcggtctatctgtaccagcgtcaccgtaatgtatggcaagttatagggatattgagagaagcggtgactgccggggaaaggtttggcagcgaactctctttgagtagtgacggccagatgctggtggtgtcaacacctgttggtaaaaatgacacaggtgtgcaaaccggtgcggtatggtggtttagctatcagaatgaacaatggattatgcagagcaaattactggagctggatggggaatcaaaccataaatttggtgccggtgtttgttttagcggtgacgccaatacattggcgattggtgccagtggctggaaaagtggcgaagggaaagtttacctttacgactag

SEQ ID NO: 6969 - DNA, 444 bp, Photorhabdus luminescens
atgcccactgaaccgccgctacatcaagaagatattgtcgtgatacatgttgccacacccgacgatttggcgaagtttgctgatcaatcacttttctggaatgaagaaacctatgaacagatgaaaactgcggaagtgttgtttacgccagcgggagagattccacctggcttgggaattaaatatgtcgccacgcccggtgatttggtgaggtttgtcgatgaagaaggctactggagtgaggaaacctataaacagatagaggttgtaagggtgttgtttataccagcagaaagaatccgcggtgtggggattaaacatgttgccacgcccgacgatttggcgaagtttgccgataaagagcttttctggagtaagaaagattacgaacagctaaaagccgcagaggtgctgtttgtacccagagaaggaatgcccggttag

SEQ ID NO: 6970 - DNA, 1014 bp, Photorhabdus luminescens; identical to SEQ ID NO: 6455

SEQ ID NO: 6971 - DNA, 420 bp, Photorhabdus luminescens
atgtataaaaatatgttaaatcccgtaacattaagaaaaacagcaaacggacctcaactaaaaggaaatgagggtacatatgacacatcaatattaaaaggcagccctgtaggacgaagagatattgggaattccgcaccactacccgctcaagcagaagtttttcaaaaagttgttgacgaaaaaatagcaaacttcaaaacaaagggaaatccaatatcaatcgttgtctggcataatagtcggacagggcttacccatatcatggatggtcagcatcgatttattgctgcatgtatacttggagtgccggttaatttgacatggaaaaagttcggcataccgcctaatcagatagactggagtggtacaaaattctcagatggaataccagccaaaaccaagatatttggaaaatga

SEQ ID NO: 6972 - DNA, 2082 bp, Photorhabdus luminescens
atggctaatctggcctctatacttcgtttaccgggcaatatgaaaggctcgcaatggcaaatgcttgccgggccggtattgatcctcttgattttgtcgatgatggtattgccattgccgccattcatgcttgatttactgtttacgtttaacatagcgctatcaatcatggtgttgctggtggcgatgtttacccggcgtacgctagattttgctgcatttccgaccattttgctgttctccacattattgcgcttatctcttaacgtagcttcaacccgtatcattttattggaagggcatacgggttctgcggcagcggggcatgttgtagaggcatttggccattttctggttggtggcaacttcgctatcggtattgtggtatttatcatcttggtattgattaactttatggtcattactaaaggtgcagggcggattgccgaagtgggtgcccgttttgtgttggatggcatgccgggtaaacagatggcaattgatgccgatttaaatgcgggattgattggtgaagaagaagcgaagaaacgccgtgctgaagtgacacaggaatcggatttttatggttcgatggatggtgccagtaagtttgtgcgcggcgatgcgattgcgggattgatgatcttagttatcaacgtcgttggcggcttaattgttggtgtggctcaacatggtatgagtctgggggatgcgggggaagcgtataccctgttaaccattggtgatggtttggttgcacagttacctgctctcattatttctactgcggcgggtgttattgtgactcgcgtagcaacggatcaggacgttggtcagcagatggtgactcaactgttcaacaatcccagagtgatgatgttgagtgcgggtgttcttggattgttgggcatggtaccgggaatgcccaattttgttttcctgttatttaccgcggcattagctggtcttggctggtatctatatcgccgcaccgatgcgccggcgataaatacagaaaaaccaaaaatagaagagcagcaacagacatcagaagcttcatggtccgatgttcagcttgaagatcctttgggtatggaagtaggttatcgtctgattccgatggttgattttcgccagaatggtgaattactggggaggatcagcggcattcgtaagaaatttgctcaggagatgggatatttaccgccggttgttcatatccgggataaccttgaactggccccagcgggctaccgtattctgatgaaaggggtagaaattggtcgtggtgaagcgcatccggggcgctggctggcgattaaccccggtggtgccgtgggggaattgccgggtgatatcaccaaagatcctgcttttggcctgtctgcggtttggattgatgatagcctcagagagcaagctcaggttcaagggtacacggtggttgccgccagtacggtggttgcgacccatatgaatcacctgttgacgcaatatgcgaatgagttatttggtcgtcaggaagctcaacaactgtttgagcgggtcagtcaagagatgcctaaactgaccgaggactttattcctgatgttgttaatctgacaaccttgcataaagtgctgcaaaatctgttgtccgaacaagtgccgattcgagacatgcggacaattattgaaaccttggctgaacatgcacctggacaaactgatccttatgaattgacatctttggttagaattgcgcttggccgggcaattgctcaacagtggttccccggcgcacaggaaattcaggtcatcggattggatgcgggccttgagcgcttgttaattcaggcgttacaaaatggcggtggtctggaacccggattggcggataacttacaacggcaagcgacggaagcactgcaacgccaagaaatgttgggcgcgcctccggtgctgttggtcaatcatgcattacgcccgctgttatcgcgtttcttacgtagaactttgcctcaattagtggttttatctaatcttgaaatcagtgataaccgtcaaattcgtatgaccgcgaccattggtggtaatggatag

SEQ ID NO: 6973 - DNA, 1152 bp, Photorhabdus luminescens
gtggctgaagatagcgatcttgagaaaacagaagaacccacgccccataagcgggaaaaagcgcgaaaagagggacaaatagtccgttccagagagctgagttctatcttgatgttgaccagtggtttaagtttgctctggatgagtggtcagtcaatgacgcatgaattgtcgttgatggtgtttgaagggtttagctttgatcacagcatggtcagcaatgataagcagatggttcaacagattggcaggttgctgcaacaggctgttttggccctgctgccggtttttgctggattagtattagttgcattaagtgccccggcgctattgggtggattagtgttcagtaccaaatccatcaaatttgatccgaaaaaattgaatcccatttctggcctgaaacgtattttttcaatgaatgcgttggcggaattattcaaagcattacttaaagcgggatttgtcggtattggtgctgctttgttcctttggatgaactggcctgccatgttacggcttatagctcaaccgccactgttggcactggatgatgctatgcaaatgctgatattcgccggttatgtggtggttttcatgttgataccgatggtggctttcgatgttgtttaccagatatacagccatttgaaaaaactgagaatgacccggcaggaaataaaggatgaatttaaagaacaagagggggacccacatgtcaaagcgcgtatccgtcagcaacaacgggcggctgctcgtcagcgtatgatggcggatgtaccgaaagcggatgtgattgtcaccaacccaactcactatgccgttgcgttgaaatatgatgaaaaagcgatgagtgcgccaaaaatattggcgaaaggggcggggatcattgcattacggattaaagaaataggtacagaaaatcgtattccattacttgaggtgccgccacttgccagggcgctttatcgccatggtgaaattggcgggcagatccccgcgacactgtatgcggcagtcgcggaagtgcttgcttgggtctaccaattgaaacgttggaaacgggaaggcggcttgaagccgaagaaacctgaaaatctgccagtgccgccagcactggattttgctggagaaaataatcgtcatggctaa

SEQ ID NO: 6974 - DNA, 1689 bp, Photorhabdus luminescens
atggcaatagggtattacctgctggttggtgacaaaactacctgtggtggacagattattacgggtgatcacaccatgacatttaatgggcgagccaccgcgcgtgaaggggataaagttacctgcggcaagcatcccggtacttatatgattgtcggcggcatatcagatatgtttgatatggggcaacgattagccggcacattggatagtgtcagcacctgcccttgccgggcccggtttatcaattcggttatggacagctacgagaagcaggaacagcctcgtcaacaagcggtaacacctgcttatacggcgacgcaaaacttctcatcaccaatgaaggaagcaacaacagttcagtccaatcctccaccggtgacacaagtgccgcctccaccgatcccggtatttgccaaatctcgtcaacggggcaaaggctgtaccgacgccggtacggagactgaaccggcaaataatttcggtaggatggggatatatcaggttctatcatcgcccgcccctgtcacggaatcaaagcctgaacagcctccgcaaggcaaaaaacatccaccagaaccggataagccacaggataaaaaattaccgtggtataaacggtggtttagcaatagcaaagataaagccgaagccgctgcgactgctgtagctgcaacgactcgcagcgcggtagcggatggcgaagcgctggtgatgcgtttcattggcggtggcgttactagtgccggacgttggctggcagcgccgaatccgttgacagtcggattaatggggttgttttattcatcggggttaaatgaaagcgaggaagattacttaaaccaatatcatcttagtgaaattgccagtcagtatggtaaagcaccgacccgtgtccgttttcgctggatcagagatgaaaaaagcggcaggatgacggttcaggggtatcacgtcagcccagaaagtggtctggataaagtgccggttcgtatgatgaaacggaatccagtcaccggtaattatgagttctgggaaccaggagaatatcggccaacgattttatggacaccaaacgatcaggaattcaaagttccaccccataccgggaatgaggaacagccgtttattccgtcgcagataaccgtattgccgatcccggataaagtcggcagcgatattgaatcgttgccaatgccggaagagaaggattttcgggattatattctggtctttcccgccggttcaggaatgaaaccagtttatgtgatgtttaatactcctcggaaccaaccgggagtggtaactggccaaggacaaagagttgaaggtaattggttaagtctcgcaggacaagatatgggggcacccatccctagccagatagcggataagttacgagggaggagatttaataactttgatgatttcagaagggcattttggaaagaggttggtaatgatcctgagttgtctcagcaatttaattcacataataaagagtttttaaaaaagagttactctccatattcaccacgacaggaacacattggaaatcgagaaaaatatgagatccatcatgttaaatttattaaagacggtggtgaagtctataatctcgataaccttcgtgtaacaacaccaaaaaggcatatcgaaattcattcaagcaaaggtggaataaaatga

SEQ ID NO: 6975 - DNA, 258 bp, Photorhabdus luminescens
atgaagctaaataaaaagttagaagattatacagaagctgagtttttagaatttgccagaaaagtatgcaatgcagactatgcgacggaagatgaagctaatgttgcagttcaagattttatccgtttatcagagcatccagatggtactgatatccttttttacccatcgtctggtcaggatgattctcctgaaggaatagtgaagcaaatcaaagaatggcgagccaaaagcggtaaacctggctttaaaaaatag

SEQ ID NO: 6976 - DNA, 489 bp, Photorhabdus luminescens
ttgccaatgccggaagagaaggattttcgggattatattctgatactccccatcccgaatatgccgccggtgtatgtgtatttgagtaaaccgccggtgaaattgtttgaggtggatttgtataaaaactttgcggggagactgaggaatggaacacatgcagatcatatgccttcggatgctgcggttcaggcttactggaaaaacctttatccagaactgaaacccaagcaactggaaagattatcgaaaaatgtagcagctataattattcctgctgatgtccatagaaaactcagtgcgacctatgggggacgtaatacccctgagcaaatacgacaggatgcctgtgacttacggggagctgtcgatcgagattttaatacgataatgccagcattacaggaatatggtgcaacagagcgtcagctcgaagaagctagagtaaaaatgcataaactaaatcaggaacagaggttatacaaatga

SEQ ID NO: 6977 - DNA, 471 bp, Photorhabdus luminescens
atgacagtaaatatagaatcattaataaacagtttggggaaaacgtatcaggaaatctttgatgcgggactcattccctataaaaccaagccaacaggaaattttggcactgaatatatatctctagatatggttaaagaaggtgtttatcttgcttttaaacggaaggataaaattttatttgatgtgacacttactctactagatagtgataaaccatcatacacatttccaaatgagttaccatcaccgctgatctcacatatgtcacgtcagtggatccatgaacaattcggattgcctgaaaagtcaaaagaaccaaaagtgataatgaaagaagagtttgggtgggttgatttgtacacgatactagattttcgtataccaactaacatgcaagttgattatgatctatcagatcgcgttaaagaagtgacatttctacccacctcagaagtacgttggtggtag

SEQ ID NO: 6978 - DNA, 468 bp, Photorhabdus luminescens
atggcgattaacattgaagtactaattaatagtttaggtagaacttatcaggaaatttatagtgaaggattaattccttataaaacaaagcctaaaggacacctaggctgtgattatatatcattggatatgattaaagaaggtgtgtatttggcatttaaaagaaaaaataagattttatttgttgtgacaattaccctaattgatcgagataagccatcatatcaatttcccaacgagttgccatctcccctaatttcgatgatgtctcgtcaatggattcatgaacagtttggagagcctgaaaagtcgcatccgcctgagatgattatgaagcaccagtttggtcgtaaggacttatatacattacttaatttccgtgttccgacaagtatgcagatctcctatgatttacttgaccgtgttgaatacataacactcctactcacctcagaagtgtgttggtag

SEQ ID NO: 6979 - DNA, 186 bp, Photorhabdus luminescens
atgggatataatacttgtccttgttgtggtaaacagacaattgaacgtttaggcgaatatgaaatatgttcgatatgtcattgggaagatgatcctgttcaatcagcagacccacatttttcaggaggagctaattctatgagtttggaagatgcgaagaaactctatctttcaaagaaagattga

SEQ ID NO: 6980 - DNA, 252 bp, Photorhabdus luminescens
atgcgcagagtaacgaaagtggaaataaagccagaatacaccttggcggtgacgttcgatgatggcacctatggagaggtgtgcatcgcggatcggttgttcggacccatgttcgagccactgaaagagcaggaattctttgcccaagcgcgtgttgatgagtgtggcgcagtgtgttggccgaatgatgttgatctggcacccgacgcactctacaaaaagctcaaatcccacttaaggggtaatatatga

SEQ ID NO: 6981 - DNA, 423 bp, Photorhabdus luminescens
atggaatttattaaaaatagattttgtcactggaacggtgaacaccttgttgtcgatacaatggccagaaatcataaaatggttaacagtatgggaacgggcgagggattagtttcgtttgatggctttggtgctgatctaattcgtttcagcaaagatgaggggatgcagaatcatactcacttagggcatcatatcttatttgtcctcgcaggaacgggttatgttatttatgcgggtgaaaagcataaaatagagcctggagtttgttattttgtgaatggagaaatagatcacgcgattaaagcaaccagcgatttggttatgcttgttgtcggtaataatcattgtgcggttgatgcgcaagataggacgacgctggtgccatatagagagggaacgccagaggaattaaaggtttaa

SEQ ID NO: 6982 - DNA, 1851 bp, Photorhabdus luminescens
atggataatctgcaccacatatatcattcgcttagtccggatgaacaacggatagctaaatctgccttgttggaacatttaagttccattactccctcagtaagtagtgcgggtgataccaaacagatgcctattgctattgtgggcatggctttccgactgcctggagcggaagattccccagagcaaatgtgggagatcttaagatctggacacagtgtaataaaagagattcccgagcagcggtttgcatccgggaaaccttacgtcattccattgccgaaaaaagccttaaaagccgggttgctcgatagtattgatggttttgatgcgccattctttggtatttctccgcgagttgcggccatgatggatccgcaacagagaatgctattagagctgacttggcaagcgatcgaagatagtggtgcgaatccgcttggctattcaggatcaaagacgggtgtttttattggctcgtgcagtaatgattatcgtgaactggttgcggccgatatggcgatggcaaatgcttatgcgccgacagggacactgaattgcctcttggctaacagattgtcattttattacaactttattggcccaagtttgcaaattgataccgcgtgttcaagtggattgacggcactgactcaagcggtgaattcattgcgttctggggaatgccaacaggcgatagttggcagcgttaacttattgagcaacacattcaacatggctgcttattaccgggcggggatgttatctaaagatggctgttgtagggtttttgacgcggatgctaatggttttgtccgtggtgaaggggctatctgtctattcttgaaaacgcaaaaacaggcattagaggatcgggatccgatttatggatacgttcgggcatcggcggttaatcatggtggacgtgctaattcactgacttcacctaaccctgagcagcaaattgcgttggttaaagattgcttgctacaggctggaatttctgcggaacaaatcagttaccttgaagcacatggaacgggaacctcgttgggtgatcctatagaatttaatgcgcttaatgaggtctttaatcgcgatgaatcaggaggaacgctacaaccttgctatattggttcagtaaaagccaacattgggcatttagaaggcgctgcggggttagctggcatcgttaaagttttattaatgttgcagcataaatctattgtacctagcgctgcgtttcagcgtttgaatcctgaaattgatagtgtggattcacgtttacaactggctacagaggaaaattcttggcgagtgggggcagggcaaaagcgtttcgctggactcagctcttttggattggggggcagcaattcccatgtcattttagaggaggcaccaacccaagcgcagcaacagattaaagccaacctggaggggtattattatcccatctcggctaatagccaggcatcgttacaaaaaatagtggctatgctaggggattttatcgagaatgatgaaagcgttgaactaccagcggttagctggacattacagtttggcagggcagcgttatcctatcgggcactgttcgttgcaacatcacgacaggatcttttgaagcagttacgggattttgcttcgtctacggcaacgaaagaagatcaatggcttcatatggcggaagatgactctcgatttttatggttacgaggtcaagatatagattggcgtacttgctggccttccgggcagaaaccgttgcgtattcgattacccaaatatgcttttgaacatcggcgttactggttacctcacaatgaatccgtggttgcaaaacagtaa

SEQ ID NO: 6983 - DNA, 1566 bp, Photorhabdus luminescens
atggcacagttgcttattcccccgatgggagaaggaaccactgaagtcgtcatcatccaattacttaagcaggtaggggatcatgtcaaacgtgatgaacctgtttatgaaatggagacggataaggctgcctttaccattgaatctgatgttgaggggatcttggaaaaatggttggcggcggaaaatgatattatccctgttggatctcctattgccgttatcagagctgttggcgagatggcagagccttcccctgtcagtgaagcgttaacgcctccgccggagaaaatggagagagtggcggaggatgtcgaaaaaatagagaaagtggaggcggctcctgaagtctccgctcctcctgcgcgtattccgccaaaaacccgtcagtacgcacaagagcaccaaattgagccactcattcttagtcaactggcggaaaaacatggcacattattgcctggtcatatagatgattacctccagcagcaccgcgaaactaagatatcagaagaaaccaggccatcagaaaagagcaatacagaaaatgacaatgtgggttttctgtccagagatcagcagcgtcttaatcgtgcaatacggttaaatagtgctgcggtacaaccttgttgggcagctaaaccactaccgattgagcttgttgataacgccattcatcatttaacggaaacctccgggcagcaggagtggataacgccatttcaggtcatcacttatgcgatttctcaggcgttgaaaaaattcccgatgttgcgttcgagaccgcttgatcaggagcgttatcacacttatacggatatcaacttgggtattgcttttctggatgagaaaggcgatttgagttcattaaaagtaccgaacacgcagaccatgagcttttttgagttcaggcaacacttgaatggtgtacttgatcccgatgcggaaaaactgcctgttgatattgatgttcctatgatgatctcctataccggcaacgatggtgctacctttgccgtacctgttattgtgccgccatctcagtcaacattgttcattggtgcgcctcacaacaaagagatgagcctcgttctggcctttaatcactatctgctcaatggggtagaggcatctgagtttatttccgagattattgttcaggttcgtgctctgtctgggccacgatctgccgcacatcagatagaaggtaaagtaggtaaatcggtttccgggcaattacgcacgttgctggcggatttcctgcattgggacgaagattttactgaatcaatgatgccgcgcacttgggctgatttgggcattgattcgctcaaggcagtaaagcttgcagagttaatgtcagtgcattttcgtcggaaattatcgccgacgctgttctggcgttatagttcaccgcatcgattgattgaatatcttgacactgccaaaactgaactgactgagaacaaacattccttagatgactttattaatgcgatgcgtggtcttgatggcgaagcagcattaaggttacagcgcctcatagaaggaggaaagcatggataa

SEQ ID NO: 6984 - DNA, 1998 bp, Photorhabdus luminescens
gtgatagacgtacagatcaatgaagtacctcttaaggaacacagcccttcaattaatgattgtttggatgagcaaaagttactttatgacatgctgctgtcacgggaatttgataatcgtagtgcgatagtcacacgacaaggccgagcttggtttcatgtgtcggctgctggacatgaagggttggctgtgttgcctcagcttatggaaaaaaatgatgtactggttccttactatcgtgatcgggcgttagtattagcgcgtggtatgtctattgttgaaatgacaagggaacttatgggtaaggccacttctcactcggccggccgaaccatgtcgaatcatttctgctccaaagagcataatatcttctcggtagtcagcttgaccggaacccaatgtattcccgcggctggcgctgcttgggcaagcgtgttggacaataaaaatgggcttgttgtgtgtggtgtcggcgatgcggcaactcggcagggagaattttatgaagcggtcagctttgcggttgaaaagcgtttgccagtcgtctttgtggtttccgataataaattgggtattagtacctcaacggagaagatggctccgtatcgattgggaatatttaacgagtgtttgatccgtcgtgttgatgcccgtaagccggaaactttgtttactgttgcacaggaggtattcaataaggcgcgatttgagcggactccctgcatattggtttgtcgtatggatcggttagattctcactccaattcagattctcacaaactgtaccgtaccccggatgagctggaggtactacaggaccctattgaaaattacgtcgcttatttaaaggaaaaaggagcgattaccgagcaagctctggctgaacaaaaagagcgcattaaagcggatgtcgcggaaatatttgagcgtgtttaccacgaagaagagcctgatcctgcaagtgtcagtacctatttatgcaatcgtgaagggacgcctaccgtacatgttgagatggaagccgaagagacacaggtcaaagcggtaaatcaagttttggacgaggcattgagtcagcatccgaatgtgctgatatttggtgaggatattgaagatcctaaaggtggtgtttttggtttcacccgtggcttatccactcgctatcctgatcgcgttattaatgctcccctttccgaagccacgattattggctcgtctgttgggttatctgccagtggttggcgtccgattgttgaactgcaatttattgactttgttgggctaggtctcaatcagttacagtcacaacttggcactttaagttggagaacggtgggaaaatggcgctgtccggtggtgatatatgctccttatggcgcttatctccctggcggtggtatatggcacagccaaagctcggacggtatcctggcgcatattcccggtattaacgttctggttccaacgacaccggctgataccgtcgcgttgttccgtaccgcgttaagtctggacatgccgagtctgattctgatccctaaacaccttatgagagagcgccatgaacgccggctggtgagtccagtgtcgcttgggcaggcaaatatcgtcagggcaggaaaggacattacactggttgcttggggaaatacgactcagcttgcgacgatggcggctcttcaggcggaaaaagacaatattgacattgaagtgattgaattacgtagtctggtaccttgggataaacaacggattgcggaatctttacgcaaaaccgggcggcttatcgttgtgcaggaggatacccggacggccagtgttggtgcatccattattgctgatattttggatgagaatgacaatttcttctctttattggcacctccgcgtttggtgacgcgtgaagatattcatattccttttaatccttgtttagagaaagctgttttacccggcacggatgacattttagcctccgtctatgcggtaatgagctaa

SEQ ID NO: 6985 - DNA, 1407 bp, Photorhabdus luminescens
atgaagaaccttcgctatctgattgtcacaccaggattaatgctttcggcctcagtccttgcttcacctgctaatagcatcgaagcacgccttgatgcactggagcagcgactacaacaagcagaacaacgagccgcccaagcggaagcgcgcgccactgccgccgagcaacacgcacagcaactagaacaacgcgctatcgaaaccaaacaacagaccacacaagtagcacaacaccccacttcgcaggaaaatagtgctccatcaaccagcaacttgaaattgaatgattttggcgatctaaaattgtatggcgatgtagaattcaatctcgatagcgccagccgaaccggtcagcttacttcacttaaaaccagcgataataaagactggaaacctggcgacaaagagcgttggaatgttaatggccgcattttgatcgggctggacggttaccaccgtgatcaaaacaacaactttgccggctttagagtgcaaccattagcagacatgactggcaaaatgaatctcgacgacgccgctttcttcttcggcaatgagaaaaactggcaggtaaaaatcgggcgttttgaagcttacgatatgttcccactcaaccaagatacttttattcagtattctggtaatactgccaacgatttgtatgccgacggtttcggctatatctacatgatgaaagaaggacgtggccgcagtaatagcggtggtaacttgatgctgagcaaatacgcaggtaactggtatttcgaactcaatactctacttgaagatggcacttcactattccgagataacacttaccacggcaacacactggaaaataaaaaaaatgtcgcctatttgcgcccggtagcagcctggaaaaaagatcagtttagtgcagccatagcgatggagagtaatgtcgtcaataacgcctatggctaccagaataatcaagggcaatgggtcgatcaatccagacgcaatggttacggtatgacattaagctggaacggcctggaggccgatcctgatgatggcattgtcgctaacctgaataccgcttatctggatgcctcagatgaacacaatttcactaccggaattaatgtgatgtggcatcgtttcgaactgggttatgtctatgcccataacaatatcaaagcgttcaatactgacgatacaaccgcatatattaatcacccattcaatgagccgggtaaatacgatataaataccatccatatgtcatatcagattcctagtatcatgaatatgaagaattttaatctctatcttggggcctacgtctctatgttggaggcaaatgatagcaacaaaattgccaacagtaataatgaccgacgctacggtgcacgtgccagatttaaatatctcttctaa

SEQ ID NO: 6986 - DNA, 819 bp, Photorhabdus luminescens
atgggctggaatatatttattaacgcaccagatagttaccatcttacttccacacatatccgcaacagcttgcaccaacaaggttttgccactttcaatgccaccgatcttgacctttctgacagtgaaaaaatcgatcttatctctctgtgtgaattatctaagtcactgccgttagatcgatttggtgaaggtggtcgtcaccgcagttattgtgagggagtgtggcaccgtgaaacagaaactattgattggaaaacaggtcatcagcaatctgatggtagtatagagattgattatcatcagggaagtgaatatcaacctgaatttggtggtgtggtacgaaaattcctgcgtatgcctgatgagatacttaataaagggctacttaataaactcatttggcacgatctgagtctaaccggcatggcagaacattattcccgtttgctatgtggtgtacatctgatccgaatgcaggcactaccgggtaaaccggcaaaaattacgcctaactgttttcatcgtgacggtcagccgttcaccgctgtacatttaattgaacgttacaatatcgaaggtggtacaacgcatatcgcgccaccttcttatgcgaattgccagcttgaagaagtccctgctcatgagataactcgttttctccttaatgatccccttgatagctacatcatcgatgatgcagcgatttgtcattacatcaatcccgtaacttgcgatgaaaacgctagcgttggcgtccgcactatcattctgattgatttcaccccactagaacagattgacaggtgttcccagtag

SEQ ID NO: 6987 - DNA, 12483 bp, Photorhabdus luminescens
ttgccaacgccggctcaacgcaggctatggcttattagccaaggaaatatggactcagcattatataacgtgccattttcgctacgtttgcgtggtacgttagatagagaagcacttgaaaaaacgattatttttatgattgagcgtcatccggtattgcgttcacaatttcatgttgtcaatggagaattacagatagtactgaatccgcagtggcctgaattacgtatcagtgatctcagcgattattccccggaggaacgcgaaaccaaaatacagtcaatctgtgataatgaagtcagatattgttttaatctcagtaacgatttgccttttcgttatttactgcttcgtcggcaagagaacgatcatcagttaatatttacgctgcaccacattgtatttgatgattggtctactcacgtttttcttaatgattttagccatgcctataaccagtataaagtaggtcaacagcctaagttggcgacgattacctacccgcatgtcaatgattctataacagatattcatataaatagcgctcatcggcaacgcttacgcaactattggggaaaacagttagtggaattgcctgaactgcataaattacctaccgatcggccacgactcttggaacaacggggacgtggcgcggtatatcataagtcacttcctttatctctcgttggacgtatttctaaaatctgccaacgttatggattgacaccttatatggtggcgatttccgcttttacggtattactgaatcgttattcacacgatgacgacatcgttattggcagtccatttgcgaatcgtcacaatattgatgaacatgtccgccttggcttttttatcaatttgttaccgttgcgttttcgcgttaatgaagggataagtttcagtgatctattggtccaagcacgcgatatattacttgatgcatatgaaaatgctgatttgccgtttgatgagattgtcgatgtggtacaacccctgcgttctctgagccattcccctgtttttcagattatgtttgattatttgaagagtccgggacaagcattgcaactggatgggttagcagcagaagtacaatttatccattctggtactgctaaatatgatttaacgttatcgatagaagaatccccaagttcactactctgtctggttgaatttgataccgatttgtttgataacctcaccattactcgcatggtgaatcactatgagacattgttggatgcattgctaagtgaacctgagcgttctgtcgccaaatgtagcatgttaccgccagaagagctggaaacactagctcgcttctcccggccggcagaacctctgccggtattggaatttatttcggtagctgaacgcatcaagtcacaagtgcgtaatcatccagatgcacgggctatggtgtggcgtgatcaacgtttcacctatgcgcaactggacgagtacgcgcaatacctgctcgcgaagatgcgccagtgtggcgttgggccgggtagccgggttgcagtattgatgagctaccggccagaaattgtcatctctttttacgctattctctctgccggtgcggtttatgtgccgttgtccccttctgatcctcgcttcgccgataagataaatgatgcacaaccagtactgatcctcaccagtgaacaggatgctgttggtttgcttgattttcgtgccattatgctggacgttgatgagctgtttcgtcaacccgcgccgccggatgtgcaacccatttggccagttcaggagagtgattcagcctatgttatttacacttctggttcaaccggcaatccaaaaggggtggaggtaagccacggtagtctgcatgcatcgtaccatgcttggtgccatgactatcgtttcacccaacccggtgagccggtatcactacaacttgcggcaccgattttcgatctcagtataggggatttcagtcgtactctgggctgtggtggatgcttggttatgtgtccgcgtgagtggttgctggatgcccctgaaatgcaccgcttaatgatgagcgaaggcgtgaccttcggtgattttcctcccgtggtactacgtcaattaattcagttctgtcaggataatgggaaacgtctggatggattatcaacactggtgtgtggggctgatgtctggttcggtcatgagctgcatgcagcacaagcgctgtgccgcccggatgcgcgtattctgggttcttacggtgtaactgaagcaaccattgatagcactgtttttgatccggaaacacatccattggaaaccgggcgagtcattccattgggtaggccgctggctagctgtgagttgttcattgttgataaacacctgcaacaagtgccgattggcgttagtggtgaattgttgattgcgggtgttaccgtagcaaaaggatatctcaataatccccaactcacggcagaaaaatttattaccggcaaattcgatagccatggccgttttgtggcagacggccttgtagcagagaatagcagtacgcgattctatcgcacctcagacatttgctgtttcctggctgacggcactattgatttcatgggacgcagtgatcatcagattaaaattcgcggttttcgcgttgaattaggcgaggtggagagtgcattactggagcacgccgatgtgcgccagtgtgcagttgtcgcctgtaatgacagtacaaataataaagtgttggtcgcctatgttgtgtcatcggctgatactgacaagttacgtggttatttgtccctgcggctacccgggcatatgatgccgcgtgctttcgtgtttctcgataaattaccaaccacccccaacgggaaggttgatcgcaagcgcttacaagttccggatttctcactaccagaaaatcaggagtctatgacagaaccggctaacgcccgtgaagaacaattgctggcattatggagaacagcgttaggagttcaggtcatcagtactgaagataatttcttctattgtggtggtaattcattaattgctgccaatctgattacgcagatcaataagacatttagtgttcagcttaaactttccgctattttcaaccatccaactatcgtcgggttagcctcgttactgggcagtgttgaaaaagatagtattgaaaagaacagtattgaaaaggacggcgttgaaaagagcaatgcgaaacagagtgttactgtgcagcacgtttcgcaggtcagtgatttactctcattcggtcaacgcagtttgtggttgattgcgatgcaacgaccggatgattgcagttacaacgtgcctttcacattgcgtctgcatggtaatctgcattttactgcgttaatgcaggcgctgaatgacatagtgcaacgtcatgacgtattacgtaccacattctctagccaagtcagcaaagtaagcgagccagatggaacatccagttttgaacctagtcatcaggttgcgtctgaattaacgctaaccctgcgccagcaaaatatctccggcggtgagtctgcactggcatcgaaattgcgggaagagatgatggcaagtttcgatctcgtcaatgggccactcatccgtgcggtactgtttacgctgtccccgcaagagcatgtgctttgtattactctgcaccacattatttccgatggtcgctcactggcaatactttttgatgagttacggcacggctatcaggcacgtctggccggtaaggcacccatgctacccatgttggaagcaaactatgggcatttcattagctggcagcgctcccgactgactgatccagcggtgcagcaacagattcatttctggcgtcaacaattggcggatgcgccagcgactctgatactgaatgagatggcggcaccaactgacgaagcggctgcaataagttgtgctattcctcatgtgtatgttgaaggtgtagagaaactggctcgtgagcaaaactgtacaccgtttatggtctggttgagtttgtttgccctcctgttgcgccagcagagtggggagcaggatcttatcgtcggcacaccagtgtcgctgcgcactatacctgcatgggatacgctaattggctactttgctaacactttgccggtacgtatcaatagccgtgagttgcaaacttttcagcaactcctgatgcacacgcgacaggttagtctcgacattcttgaaaatcgtgatttgccgttcgattatttggtacaaacacttaatttgccgcgtgtggcaggtaaaaatcccgttttccaaactattttttcctgtgaactggatcaaccaaacgatgcaacattcggggacatgaaggtttcagacgttgagttgggggactatcgcgccaaaattgatttagagctggcaattaatcgtgtaaatggtcaggtttacgctcattttatggccatgccgggggggttatctgccgtcactctgggacggatgagtgagtatttgctggcgatgttgccacaactcattgaaaaaccagatactgcattggctgatttgttgacggttaattctgaccgtagtgctcaaccagaactcgttgttgataagccacaaggactgtttcagttgtttcaacagaacctgtcccggtatggcggacatgtggcgctggaaagtgatgaattaagtctaagttatcagcagcttgatacattgaccgcatatgtggcgcaacaattacaacaagtaggtgtaggccgaggtgatcgagttggcattctgatgggacaccatccacataatgtcacggcaatgctggcaattaaccgaattggtgcggtgtttgtgccactggctcctgataacgccgaaccagcaaatcgatatgtgattgataatgcggaaataaaagcgatattgtgccgaaatgaaacagcgcctctgtgtcagcgtcttagtctggcggcaatgaatatcgatgagttagatatagccaatgcaccttatatgactatggcggcgatctgtcagccggatgattgcgcttacgttatttacacttctggatcaacgggtaaaccaaaaggtgttgctgtcacccaccgcagtgtctgccataacattctggcaatccgcgatgagctgaggcttgaaccttcttctcgcatagtgcagtactcctcgcccgtatttgatgtgatgttgggagaaatttttccagcacttgtagcgggtgcttgcgtggtcttcgctaataaacagcaactgttgcctggcagtaatctgacagagtggctggcacataaacagattacgcatatgtggattgtcccttctgcgttggcgatagtgccgttagtaccgctgccaagtctccaggtgattatcgtaaccggtgagccttgtatgcccgaagtcgcccagcgctggtctgtagggcgcaggctgatgaatggatacggccctactgaatgcgcaattgtggtatcccttaccgattatcatgccgcagggcaaaatctggtgctgcgtccaatgggcgatgttcgcttccatctgcttgatgaacagagaaagcccgtagcaccgggggaaatgggtgaactttatttagcgggaacctgtgttgcacagggctatctgggtatggatgaaaaaaccgctggggtgtttttacccgatagctttgcaccacaattaaaggctcgcatgtaccgtaccggcgacattgtgcgtcaacgcatggatggcgcactggagtttattggtcgggttgaccgtcaggtaaaaatccgtggttaccgaattgagctgaatgctgtgcgtgctgccctaagtgcgctaccgggtgtacgtcaggccgaagcactggcgatcaccgatagccaagggaataaagagttggcgggatacattgtcggcgaaaccagccgtagtgagatcctgagcgcattacgccaacaggttagtgaggtgatggtgccaacagcgttgttctttcttgatgcactgcctaccggcattacgggaaaagtcgatctgaaagcattagctgaaatgaaactgacacgtgccggtcagcatcaatcttctcctttgccagccaaagttgtgtcatcactcagtcgcgttgaggctatctggcgtgaactgctagagagggatgaaatcggttatgacgaaaactttttcgatgctggcggccactcactacgggttatggcgctattccagcaattgaatgaagcgtttggtgtcaacttgtctgtgaccgatattttcgcccatcccaccattcgacaacaggcgcaactactggacacgctgtcgcaacaaaaaacacccgttacagtcgcagtcacaccgctgatagtcactgaaaagagagcaataccaacagcaataccaatgttggatgtttcgactcaggatagcaatgctattgcgattattggtatgactggccgcttcccacaagcgccagatctcgacactttttggcagcggttgttggcgggttacgatgccagtgtggagttgtctgacgaggaattgttacaacggggcgtcaatccagcgctgttaagtcacccacagtttgtcagacgcgcacgtttgctggagggttgtgcggagtttgatgcacgcttctttggttattcatcacgtgaagcgcaggtgatggacccacaacagcggttatttcttgaaatggcatgggaaacgttggaactctctggctatggcaatgatagtacaccgcgttcagtcggtgtctttggtagcagtggcttcaattattacctgctggaaaacgtcatgccaaataaagaccggatgcacctcgaccccggtcagtggcaaataggtaatgacaaggattttatcgctacacgtgccgcttacaaactgaaccttagcggaccgtctgtcagtattggcaccgcctgttcgtcatcactcaccgctattcactttgcctgcgaaagcctacgacgtggtgaatgtgacatggcattggcaggcgctgtagcactcgatccgcaacaggttggctttgtccatgtcagtggtggaattatgtctccagatggcctttgtcggccatttgacgctgcggccaacggtacagccagcggcagcggcggtgggatgatattactgaaacgtctgtccgctgctttgcaagatggcgataccatccatgcggtaattaaaggttctgctatcaataatgatggtgcacaaaaggtgagttacacagcaccaagtattgacggccaatcttcagtgatcaaagacgcgctgcgtaatgccggggtatcgcctgccagcatcagttatatcgaagcacacggtacggcgacttctttaggcgatccagtagaaatacgtgcgctgactcaggctttcctggaacaatctgatggtgaagtgctacctgtagggagctgcgcaataggttctgtgaaaggaaatataggacatattgatgctgctgccggtatagcgggggtaatcaaaaccgtgttggcgctgcgtcaccagactttgccaccaagtattcactatcatcaacccaatcctgcaatccccttcgaacagaccccgttttctgtgatcaatacagcatgcccgtggccgcagacaagtcagccacgtcgtgccggtgtaagttctttcggcattggcggcagtaatgcgcaccttattctggaagaagctccgcgccagcaagatgcccgtatattagatgacgagcgctggcatctgctgccaatttcagcgaaaacgccgcaaacgttgcttcagcaaggggaacgcttggcagtagcattgactaccggtaatgagctattagcggatattgccggaactttgcaacaaggacgcagcgctttcagtgagcgtgcttttgttgtgggaaaagatcgggagcaattaatcaatcaactacgccaactatcaccgcagacgattaatcgcaaacaacagcctcgtgcggtgatttttatgtttccgggacaaggcagtcagtctattgaaatggggcaatcgctctatctgcgtgatggtgtattccgccagcaatttgatcgctgtgccgaactgctacagccacacatcaaactggatatcaggcagttgatttatccgcaatcggagcgcgacaatgctatcagccggttaaatgctacacgttatacccaacctgcgctgttcactgttgagtatgcgctggcctgccagctacaagcttggggtattacaccgcaagcaatgattggtcatagcctcggtgaactggttgcggcctgtgtagggggtatgcttgaactggaagatacactggcattggtagcaaatcgagcggcaatcatgcagcgccagcccacaggagcaatgctggcggtacaggcatcatctgaacgtatggttgcgctggcaccggagtgtgaatttgcagcactcaacgggcccgcacagtgcgtgataactggcagccatgacaatattgcggtactggaagaacaatgcaacaaggcaggtatttcttgccagcgactaacgacatcacatgcatttcatagttcattgatggatgctgccgcacaacagatgcgggaattcagcgcaggcttcacgctacaatccagtaccattccgatgatatccaatatcagtggccgttggttcagtgaacaagatcgcgataattctggttattggggagatcatctgcgtcggccagtacgcttctatgacggtattcttacgttactgaaccattatgacaatccgatcctgcttgaagtcggtccagggcgtgcactgaccagtatgctgaaagatctacagcaaacaggccaagcccagatactaaccacgatgcgccatactcgccagcaaaaaccggatgaagaggtgctgctcaataccgttgggcagttatggcagcaaggagttgctatcgattgggctgcatttggtcattcacacaaattacatcgggttatgctgccagtgtaccctctccaacgacaacatctctggctggaacagcctgtcactacatcagccaccgtcatcagtacacagcggagaaaactaccgactttcacacggtcatcagataaagagggaatcacccggtttacttgtaagctagatgataatgtctggtttatcgatgaacatcgcatcttcgaagggcaaggtgtattgccgggtacaggttgcctggaattagtgcgtcgtgttttcaacgaattgcaacccggtggcacagctactttcagtgaagtttacttcccctcaccgttggtactatcgtcaggtgttgaacgtcagatacgcatcagtttgactgccattgataacagcctggcctttacgctggagtctcacgacgatggtaatgacatgtggcaactccatgcaaacggcaatgttactgccgtatgctctccaccagcagaaattgtttcaccttatgagttgcgtcggaatttgcagcttgaagaggttgcagaggcaccggagcgtttcaatcaagcatttgctgactatggaccacgctggcaatgcattgcaggtgtatggatgggggatcgctgtgcgctggcacagttgcgactcaatcaggcatttatcgatgatttgccggatattgcattacatccggctttgctcgacttgggcacggtgttcttacatgcctgtctgttgccgggtgatgcttcaataccgttccattacggttcgctgacgctgcaccaaccattatgcgccgaattttacagtctggcggttgaaacggcacctcggacttatgacataacgctatttagttgggatgagcgtcaaaattgcaaacaggtgctggctgaaatccacggttacaatttacgacagttcaattccttaccattccagccagccagcgagtcgaatgtagcacggtggtgtcgttaccctcgatggttaccgaagcctctaggcgaagcaaaacagaatcgtgcgccgtggttgatttttggtgcccaagccgctgagctaagtgatttatcgcaagcggcggcacccggtagtatcgttgttgaagatgctgatgaatttctgcaacagagtacctaccgctttagtttgcgtaaggaccagcccgaagattatcaacgactgatagattgcctgatacagcaacaagtgctaccagaacgtatcatctggtgctggactgcggcggggatttctcaaccagaggctgcatttgaacaactggcggctgcaattaaagcacttaccggtcatcacagagtttttaatattaccctgatttcccgcgggctacaggcagccaaagtgctagaagcctgtaatgccgcacccgcgcttggtttgctcggaatattggcggccgagtatccgggatgttctgcacgtcatatcgatctaaatgatgacacttttgctacatatcaatcgctgattgcggaactgtatacggatatgcaaccggaagagacgacagaaggaataccggttaccagcatttcgcttaaacagggtgaacgtgaattacagacatttactgagcttgatgagatacctcgtcggcaaattctgcgggatggcggtgtttacctgattacgggtggattggggggtatcggtcagttactggcacgtcacatcagcaatcaatgcagtaaggttaaactcggtattttgagccgccgaggaactaatgcggtaagtgaagctttactcgatgtgttacagaaatctggtgctgaagtcatgatgttacgcgctgatgttgctgatgatgcggcattgactaaagcactggcacagatgcgggcaagatttggtgctatcaacggtgtgattcattcagcgggtattgaagccagtggattgctggagcatggcacgtcgcaggactggcggcatgtgatggcagcaaaagtaagtggtacacagcaattgatgacggcgataagtcaggaccctctcgactttgttctgttgtgctcttcacttgcctcattggtaggtggaatgggtcaggcagactacgcggcggcgaaccgttatcttgatgccgtggcgcactattggcgacagcaggctataccggtaacgtcagttaactgggatacctgggcagaagtggggatggccgtggattatgctgcacgccgtcaagaaagcgtgatcggtctcagtaatcaagagggctgcgctattttcgatctggcgatcgctggaatggaagcacagatcgttgtcaataaatttccccctgttcagcgcacacaattacaggatttatcagtgatatctgattccgccagcccagaggaagcggttcgtcaattgtggtatgagctactgggcgaagagacgattcacttggaagatgatttcttcgaactgggcggtcattcactgttggcaacgcagatgatctcccgtttgcgtgatcatttccagcactgcctgacgctggcggagtttctcgaacaaccgacaatggcacgtgttgtccgttcactatctgacgagaaaaagagctcggttcctgagaatgcccatatccgctattgcctggtgccaattaatcacggcggtaacggtaattattcacccttcttttgtgtgccgggtatgggcggcaatgttacccaatttatgcccctagccggggcattaccaccagaactgccatttatcggtatgcagtatttggggcttgatggaaaaactgcgccgcaccaatcggtggaagagatagcaacacattatattgcctgtttgcgctcggctcaaaaacaggggccatatcatatcggcggtcattcattggggggcaaagtagcttatgaaatggcacggcagcttcatgctgagggagaaagcatcggttctctggtgctactcgactctgccgcaccaccctatgcaccggttccatatcaggaagatgctgatattgccaaagttattcttggtatttttgcctactacactaaccgactggagatgatcgacagcttggatgacaacgaaatgcgtgcattaccacgtgaggcgttactgagctatatcaaagagcagctaaaacgtttctcgttgattcaggcacagaatgatatgggctcaattaacggattgttcaatgtctatcgggctgcgtcggatatgtcaccgaaatatcgaccaatacccgtacagttgccaattcctatgctgttagtaaaagcggtagaccccctaccgaaaggggttgttgtaccggagatccgggagaccaatggctggggttgggaaaagttctccactcttcccattcgtatcgcagaagtgccggggaatcattatagctgcctgatggaagagcacgtagcacatgtatcgcgggcgataatccatcactttccatcaataataacaggaggacagatatga

SEQ ID NO: 6988 - DNA, 1266 bp, Photorhabdus luminescens
atgagtgattcttccccaacggttcaccttcctgaaaaccgccaacataaacgccgattggccgtgatcctaatgacattggctgtggatgctttgggtatcgggattgtactcccggttttacccgatctgttgcgggaggttgccccgcaaccaccggaagcgggtatgccgttaatcgggttatttgtctcactatatgcttttgcacagttccttttcgccccgttgttaggggcgcttagcgacgcttggggcaggcggccggtattgcttgcaaccctgtttggcacagcgctgagctatgcgctggtggcgacagcaccgtcactaggatggctggtagccggtatatttctttcaggctccaccgccgccagtacttccgcggcatcggcttacgtagcagatgtgacaccagaagcacagcgggccgcacgtttcggtctggtcagcggtgttcttggcttcggcatggttgccgggccagccttcggagggttattgggcatgattgcaccgcgccttccgtttgtgattgctggctcactggccgccgtgaacgctattgccgctatgttcgttctgaacgaaagtctgaccaaggagaaccggcgttcgttcgactggcaccgtgccaaccctttgggcagcctgaaactactggcgacggatggggtattaagacgactggtttatgcttcagctcttggcatggtggcttatggcatttttctggcctgttttgtcttactcaatgaaatgcgtttgggctggggaccacgtgaaaacgggctggctctcaccggactcggcgtcgggatcatcataacgcaaacttggttgctaaaaatgttcgtggcgcgttgtaacgaataccgcacagcgatcatcggttacggactctatacgttagcatttatcgcttatagcctggcggtatcaccactgattgttgctggtgcaattgctctgcatgcactggcgttgatcagcgattcaacgcttcgtgctttgatttcattgcgtgccggcaatgagcgacaaggggaatatctgggagcgcagaactgtatgttaggtctggctatcactgcttcacccctgttaggtgcattattactgcatttttcatctcgtcaggagcaatctctctattttcaaggaattccctttgttattgctgtcgttgtttgcctctgcgccatattgattttgctgcgtggttctcaggcagacatcacattacgcaatttatataaataa

SEQ ID NO: 6989 - DNA, 3198 bp, Photorhabdus luminescens
atgaaacaacatcaaggaagctattaccccctgaccgcagcacagcaggaaatttggctggctgaacaattaaatgtaagcacaggaatttataacactggttgttatattgatatttcaggtgctatcgatattgagacacttaacacggcgttgtcccaattgatagatgaagctgaatgtttacgagtagtcgttgtgcaacacccacaaggaccacaacaacagattgttaccaacctgcaatggaaatgcccacttattgatttatctcaccatgaagatgcgttaatagaagctgaaacctggatgaatgctgaattggtgcggccgatggcgttaaccctagggccgttgtttggtcttgcgctgctaaaaatcagtgatgaacactattttctgtttattcgtgtccatcatctggctagtgatgcttttggcactacgttgctgattcagcggcttgctgaactgtatacccagaaattgactggcgctgctgagctggaaaatcctttcggacctcttagcgatctgttggcttttgatgaagagtaccgtcgctcggaaaattttcaacatgaccgtcagtggtggtcacaatatatggtaggccgaagtgagccacagagccttgccgtgggagcgaagcccggtcagtttgccgacttgggttcgttcagttgcaccccgtgtgaaatcccggccaaggtcaaggatatcctgcgtactctgagtgaagagagtggaagtagtatggcacaaattattattgctatcgttgcttcctggatttctcgtatgaccgataagcaggatattactttaggtatgccagtcactgcgcgttcagggcgtgcgttacgtagtattccaggtatgatatcgaatgtattacctctacgcctgacaatagatcctgctcattccatcggtgacattagtaagctggtcagccaagaaatccgccagttactcaaacatcaacagtatcgttctgaagatatctatcgtgatttacagcgaaatggttctgctccccgcttgtttgcgcagaatatcaatgtgatgctgtttaacagcaatgtgagctttgcgggtaattttgggcgtaccaaaaatttgtccagtgggccggtagaagacctcactgtgaccatttatgatcatggcgaaggcgacagcttgcagtttacgctcgataccaatgataacctctacactccccacgatattaacctgcaaaaatctctttttcagcatttcatcactgaattgctggcggatatatcacgccccattggtgagctgacattgccagattggcacataggagacagcctattgcctgcacggcgcaccgtattaaatgaggaaacactgacctcgcgctttgaacaacgagcaattgccatgccggatagtgtggcgctgacttatcaacaggagaatattagttatacggtattgaaccaacgtgctaaccaactggcacactatctggtatcacggcaaataggcccagaacagcgtgttatggtctgtttaccacgttctattgagatgatggtgacactgctggctatcatcaaggctggtgctgcttacgtgccggtggaggcggattatccgcaaagtcgtcttgattttatgatcgacgatgctgaacctgcttgtgtgatcaccaccagtgaaattgcgcaacgcctgacagccaatatccccatgatattgctagatgatcccgaattgctcacctatctggaaatgcaaagtgttgctgatctgtctgacaaagagcgcttgcaaccgctgatttcagcacatcctgcttatatcatttacacctctggctccaccggtgtgcccaagggcgtggtagtgactcatcataatgtgatgcgtttgctacaaagtactcagcgctggtttaacttctctgaaactgattgttggacaatgtttcactcttatgcttttgattttgcggtctgggagtgttggggagcattattgaatggcggaagattggtgattgttccctgggaagtcagccgttcacctacagattttttgcagcttttagttagcgaaaaagtgacggtgttaaatcagacaccttcagcgtttcaggcgctgatccatgctgatcgcgaagcccctgaacttgggcagagtttggtactacgcacggtgatttttggcggagaagcactgaatgcgcatattctggaagagtggtatcaaagacacgatgataacgctcctcagttggtcaacatgtatggcattactgaaactactgtacatgtaacctatttccctctttcacgtgaagtcgttgctcagcctgcttcaagtcttattggtgaacctattgatgatctcggtatttatattcttgatgaggctcaacacccggttccggtaggtttcgtgggagagatatatgtaggcggcgcaggggtagcgcgtggttatctgaatcgtccagaacttactgctgaacgcttcatggctgatccctttatcggcacagatgcacacatgtatcgcacgggtgatctggcaagattgcgtcgggatggggtactggacttccttggccgtactgacgatcaagttaaaatccgcggtttccgtattgaattgggcgaggtggcggcagcgctaaatgcacaccctgatatcgtgcaatctgaggtcattgtgcgtgaagatgaaggtcaacagaagcggttggtaggttatgtcattgcccataaaggtattacgcttgaatcacagttaatacggtccagtctgaccacatgcttgcccgaagcgatgattccagcagcaatagtgcagcttgatcacttcccgttgaccattaacggaaagttagatcgtaaagcgttaccgaaacccatgtggaacagtgtagtaatcaatgaaagtagctcctccagcccacaagaactctcgctttgtcgtctgtttgccgagttgctgggattagaaaatatctctccagaggataatttctttgagctcggcggcgaatctttggttgcaatgcgggtaatagcaagagtgcgtagtgacttcggcgttgaaataacgttgcgcgatctatttaacgcaccgagggtcagccaactggtgcaacgattgaacgctttgcagcaggaaaatgaagtcgttagccagacctaa

SEQ ID NO: 6990 - DNA, 360 bp, Photorhabdus luminescens
atgaaccgaatagatgaattaaccgcagaacttcttagctcaatgaatcagtatgaccttaaacggctggataatattttctctgaagatatttcactttattatccgggccttactccaatggtaggtaaaaagatgtcgattatttttctcaagaaacttttttcgaattttgaatatttacattttaggcaaacggggttcattgctagtaataaccaggcttgcgttatttgggaaaatgaaggacgccgtaaaaatagtgatacttatagcaatatgggcgtgacattaatagaaattatggacgacaaaatagttctcctcagcgattactttaaatttgaagtacctcattaa

SEQ ID NO: 6991 - DNA, 864 bp, Photorhabdus luminescens
ttgaaacgttttctctgtgcaaaaaaaatatttgtcactttaccccatgccagtcctaatatcttttttccacgggctggtgtcagtaaattcgttactgacaaacagaaggaagaccatgaaatttttcatctccgggttgtgctgactcacacaaattttagtgatcttggctggcgtccttattcttggtggtatctcaatgaggaaggagtattaataaaacaatctatattcagtcgtaataaaaagaaaaaacattatattatttccagtcaacctcctttattattagataaacagtattatccctctgttcttgggcatggcatacaattagcgcaatatgccgataatctggctctctcatatattattttgcaggcatttcaggaacagttatcggggttttctcttgccgccagaaccctttatctcccactggatatattgatcttattgatgcagacacttgccagacagcaacctggtgtacacccttggttattgaatttattaactcatgcacaaagccgaaaacttaatgaatatcaacttgaagatacacatcagtgggaaaatgcatatgtttatgataattatacaaatatatcactattatttccgttggctccgactgcaatcgtcgggggaataaagatgcagcggtattggccggatattattgatagtgtcagcataattaatgaaaaaaccacaactccttgcccgataccgcaatgtcttgcttttccacagtgtcaggaatatctgttaccttaccggcctaaacaggaaacattacgccaaattcagatggcagatattgaatacagtcttgcaatggcaataaccgaatattag

SEQ ID NO: 6992 - DNA, 1239 bp, Photorhabdus luminescens
atgaagaatcaacagttattgcggaaaaaatttatagggttccaaacttatacggctttttctgccttagctgaggggatgcaaagtgtgattattctctggttggttttccaaatcacacatagtccattagctgtcagtctcacgataatagcagggtatcttccgtccgcaattatggggttttttcttctttcatttgctgatactaaaaaccctgtccggcaactcactgtcagtaatggcatcctcactctgtcagcactctgcctgccactgttttttttattttcatcaacacaacctacactactcatgttggcagttgtaactgtacaaagcattttatctctagtgaagatgttcaataaaacgtcggttaaccgtattgtccgggataattttacgccggaggatggcagtaaaatgttgcaaatttcggcagcaaatattcagatttcgcaaacatcgggtgctgcattgggaggagtatttctcacattggatgctggtaattcaggcttatttattgctggttttttttatgccgccagtacaatagcaaccggcttttttacttcttttactttatcagtgataccaacaacagttcataccgataaaaaacagaaacaactactggataaggcgtatctcgttcatgtatttaaccgacaggaattaagaaaagtattattattttcgattcctgccagtggtgcattgcaatttattaatacctctttaccaccactggcggatattcttactgaatcgggggcgaatttttacgcgtcactcaatattagctgtatgatagcggggtttatctctgggttacttctgtcgcgaaaaatagtcggagaaaaatttattcttaatcatgcgctattaatcagtgcaatcataattgtattaatggctggagcagagaataaatatctggtagctgcattgttattttgtgtaatactgtttaccacctgtcacattatatgtattcaggtgaaatgtaaccaggtgcctgaaaaacaggatgtcggcaaatttattatgctaagaacatccattgcttcattgtctaagataacgttttcattaggtgctggggcattattatcactcttttccctgaaaactacttattacttggtggttggtatcttattattattttctttgcaatggtatttatctcagcgagatttaccttataaaggaataaaaaaacatgaataa

SEQ ID NO: 6993 - DNA, 1140 bp, Photorhabdus luminescens
atgataatgtctgaacgagcccttattctggatactcacaaaataatgttagaacaatcgattaatcaacatcagaatattgattatattcgtgtttctgaaccgcaggtgtactttgcttcacaggagaaaacgctggcaaaaatagataacataatgaatcagacgccttttcattatgtggttgcaagttcagagagtaacatggcatttgctggatttctccgtagtcgctatggattgccaggcttaaattatgaacaggcgttatgtgtaaccaataaatggcgtatgcgtaaatgtcttgaagatgaattacctgccccaaggtgttggctttccggtcatttctacaacaattttgcacaatgtacccaaggagcagccacccattttattattaagccgctgtctagttcttcatgccagaatgttgaacgtctaaccgtcgatcagctgtatcaaaaacttactcatctggatacattaatgttgattgaggaagaaatagatatagaagaagaattccatcttgacggtatcgtcaatttgtctgagatcgctgtagcctgcctttcttgttacagccttcctatcctcagtgccagaggtcaaacaagggcaagtattcacctaccttcatcccatccaatgttttcaatagcctattctatggctcaacgagccattaccaaattagcgttaaaacaaggtgtttttcatatggaagtttacagacggggtgaacgattaatttttggtgaaattggcctacggccaccaggagttggcgttgctgagtcactactgcgttttactggagtaaatttatggcaggcttttgttaacagccagttactgcgcccaattaataatataccatcacaggattatcacggttattctggggttattggtgtttatcccgagaggctcagagcatcagatttattacgtttaccaaatgttgttgctgtatcggaattagaaaaaacacgccataaaatgacacgtactggtgctcacgactttcgctatttggcattcgcctcatgtcaaagtctggctgaatttcataatttgattaatcaattgtcagactcttccccatcaacgcatgttaagagagaagtacaatga

SEQ ID NO: 6994 - DNA, 1164 bp, Photorhabdus luminescens
atgaacaacacggttattgtattaggatatcgtgaaggtattgcgacagctctagcccatcagggatatcagattattcatatagtgaaaagagttaagcctgcccttaatggcacgaggtactatatagttaaaaatctagaagatgcacaagaagttcttcggtgtgtattaaacttttccttacatacagttataggtattgttacaggcaacgaagacggtgtatttacggcggcggtattacgcgatatgttgcaattacctggccctaaagattatcgtaatactttatattttcgggataaatttttacaaaaacagaagctggcacaccttgtccctcatgcttattgccggtatgtaacccgtgatgacgattattcacaattggttgttgagttaggtacccctttcatcataaaaccagctaatggcatgggttcttttgctactactgctatcaactcagaatcagagtatgaaacttatttccaacagtatgaaaaaaatctaagtaatgtggcctacgttgcggaaaataagatcactgctgatgaattttgtgttgatgggatttggtctgaaggtaaattacattggttctctatcagccaatatgccaccccggtgatgcaatgtaatgaaggaaaaacactggctttacaaatactatcacgtcgagattttccagatatttaccaacaaattgatcagttttgtccacgtattttggaacgtttagatgccgttaatggggtattccatcttgaattttttaaaaatggggaaggggtattttttagtgaatgtgctttaagacctgctggtgcctgggtacctgaaatgataaaactgagctatggtgtcgatctatatagtgctcatgccacactttctttggggctaccttatgaacaccacctgcttgaatatccttctcagctttttgctgttgtgctattacgtgcttttgacggtgtttcactgacaaaacagtctttttaccagaattttgatttggttgaactggattggacagaagatacacagatgcaatctcaaggtatttatggtcgtgctggctacgcgattatcacgcataaggatcactacacattagtagaaaatgtcaataaacttattgcgtttacgggggaatga

SEQ ID NO: 6995 - DNA, 405 bp, Photorhabdus luminescens
ttggtactcttgcaagacgtttatctgccatttgtggctgattttatgccgacagcactgaatgaaacgcctgtcagtattatggagaagttaatttattggagaattgctaaatatgataatcaggttgttgcggctgtattaattgagcaagaggacgataatttaacattcagttatttatctgtattaccggcattcaggtgccggggaattgccagcaaattactcaatatcatttgccaagaagcagtccagcaggcgcaattacctattattattgcattacgtcgttcactggcgatgaatattcatttctttactcaacgaggatttgaatatttaggcccttttaataccaacgaacacgatctctatatctggcgatcaggagaaaatgaatga

SEQ ID NO: 6996 - DNA, 786 bp, Photorhabdus luminescens
atgacacagcataaagagaaatttgatggtttggctaaaggttatgatcgctaccgccctcgttacccgcaagcacttttccgtgaaatttgccactggctgcctaaagacaaggcactgtctgttgtcgatattggtgccggaactggtattgctctcgaaggactagcaaatctgcttggtcagcaacaccactacactgccattgatatctcgcaggatatgatcgacatcggtaaacagaaactgccatgggtcagttggttacatggcagtgctgaacagcatctcgccaatgtgggtaatcctgacctgatcatagcagcacaatcttttcaatggatggatcgggcaacggtattaaatctggtcagaaacagtctggcagataatggcatcatagcgatcctgcaaaataaccgagattaccggcatagtgaatttctgaatgagtatgaaaatctgctggaagaattaagccctaactatagccgtcactatcgggattttgattatgcgctggaattgaatacggcattcctgcatgaaaatgcccttcatattacacttaatacccgctggagtatgcttattcccggcgaagcatttatcgggatgagtcgttcatcgactcaagtgcaacgtgctttagctgcctacggtgagttatttatcgaaagattaaaaatgctggtggataaatatcaatttgaggggaatttggcaattttatatgaaagccaactgtttatggttgttaagcaggttaattctggaaatgaataa

SEQ ID NO: 6997 - DNA, 558 bp, Photorhabdus luminescens
atgattgatcaaaaaaacgattttgcaaaaaggaatcccatcaaaaatcaacgcgtcaggatgattacgggagatatttctaccgacgatattattcctgcacgttataaacacatgtacaccgagccaactcaactggctcctcatctgtttgaaaaccggtttcctgagtttgtctccacacttcaactcggagatatcattgtctgtaatggtatttttggtattggtagttcaagggaacaggcggtgagcactttattagcagtaggtatacctatggttgttgctcccgctttcgggcggatttttttccgcaactcatggaatcttggcttgttagcgattgaagccgacattaaaggttttcgtgaaggattagctgttgaatgcttaattaacgaaggccgttttatcgctgaaacgtcattagcggatttttatccaccatccgaacaaatgttggcggttgtccacgcaggtggacgactcaattacatttttaatcaattgcccaaaaacccatcacccaaagagaaggagcagaggataatatga

SEQ ID NO: 6998 - DNA, 1242 bp, Photorhabdus luminescens
atgatgattcatgaacagcctatcgttaatcagattattgctgaacacagccagaaaccccgggttatggctaaggagctgatcactgttgatgtcgatagaatttatgttcaggatgggaattcaccgactatcgctaaactctttcgccagcataatctgaaacgggttctgcgcccggaaaaaattggttttttcttcgaccattcagtgattgtgcctgataggttaatggctgaacgtgttaatgaagcaatggaatttgccaaatcgattggtgtcaatattttcgctagaggtgaaggtatcagccatttaattgccttggaagagcagtggtttcaacctggtaacattgtaattggagctgattctcatacttgtacagggggtgccgtacagtcactggccttaggcatgggagcttcagatgtattggcagcaatgctgactgggcagacttggctgaaagtaccagaaacagtcagtttaagtatttccggtcaaccccatccggctacacggactaaagatgtgatgctcgctttattgcgacatttcgggcaatccccctttttatatcgttcagtggagctatgtggagaatggagccagacactttccttagattctgctgccagtttcgccagtatgggtgtcgaacttggtgccaaatgcgtctttatgccggatgggcccggtaggccagccaatatgcggcctatcaatccagaggtcgttgatcatcatctgacatttttgctgtcagaactgacgcctcatatctccctgccacattcccctgctcagtcggtaccgctggaaacgctgtcagggcagaagatagattatgtctttatcggcagttgtaccaacagccgattagaagacattgcggaagtagcggcaatccttgataagcaccgcgtacatcaggatgttcattgtatcgttacgcctggttcaaaacgtgtatatctggaagctatgcgacgtggctatattgaaaaaattgtttctgcgggtgctctggtgactcctcctgggtgtggggcttgtgttggcacacaaggtaccattcccgccaaaggggaaagggttctttcaacgatgaaccggaattttcaagggcgtatgggcaatgctgaagcggaaatttatctctcatcgcctttagttgcagcaaatgtggcattacatggcagggtgccgctgattacggagcttgaatggcatgattga

SEQ ID NO: 6999 - DNA, 444 bp, Photorhabdus luminescens
atgccagatttagcccagatggtaatggctctgcaacatttccatcagatagataccggtgttgatactcgacaacttacccgcctctctcagaaagtcgctcaggccagtaaatatacaatttctccttggcaacctattgttggtgacaatgtttttgcccatgaatccggtattcatgtcaatggaatgctgaaagatagcaaaacatttgaaccttttgagcctgagcaggttggcggtcagcgtcgtctggttgtcggcaagcattccggtcgggctatcttacaaaatatgttagaagaagatagcataaagacagatccacaggcattggaatattgtctggcgctggtacgaaaagctgccggagaatatcccggcgggatcccaacacatgtattacatgaactctatcagcaggcagaaggaacatcagaatga

SEQ ID NO: 7000 - DNA, 687 bp, Photorhabdus luminescens
atgactattcaacaaaatattattctggaagatacaacgttacgcgatggtgagcaggctcctggtgttgcattttcaaaagaaacaaaagtgagtatttttaattcgttggtagacgccggtgttaagtggatagaagccgggatacccgccatgaaaggggatgaagttctggcattagaagagatgctggaacgcaagaatgaagtgaatattatcggctggaatcggggggtactggaagatattaaatatactttctctctgggatttaaggcgatacatatcggccttccgacttccaatattcaccttaaacacagtgtgagcaaagacagatattggttattaatgaccgccagcgatatgatcaaatttgctaaagataaaggtgcttttgtctcaatcagtgccgaagatgttggccggacagaaatcagtttcttgcaagaatatgcggctaccgtcgagcaggccggtgccgaccgtctacgtctttcagacacgataggcattctgaatagccagcaatatgcacagcgggtttctgctgttcgtcaggcatcagccattgatttgcagtgtcactgccataatgacttcgggctggctgtagccaatacgctggcgggtcttgaagcaggggctcgttatttccatgtctgcgttaatgcgatgggggaatga

SEQ ID NO: 7001 - DNA, 1332 bp, Photorhabdus luminescens
atggaaagtgatcagaaacaactcgtgcttggtgcttatcttacttatggtactgggcatcacccggctgcatggcgtcaccctgatgttaatccgcaagctgcacaagatatcgggcattatctgaatatggctcgtatagcggaaaaaggtttattcgatttaatttttctttctgatacaccttcggtttttcaggatgatcagcggggttatggtagccgggtagtcatattcgaacccatgactcttttatcagcattggcaatggtgactgaacatatcggtttggttgctaccgcatccaccacctataaacatccatttaatattgcccgtgaatttgcttcgttggatcatattagccgtgggcgcgctggctggaatctggtgacctcgtctaaatctcatgcagcgaaaaacttcggctttgctcaacatcctgagcatgatgaacgataccatcaggcggctgaatcctgggacattgtgactggattatgggatagctgggatgatgatgctctgccacgtgataagcagagtggtattttttatgatccatcaaaatgccatgaattaaattttcagggacaatatttctccgtaaaagggccattgaatatttcccatcctcctcaggggcaccccattattgtacaggctggttcttcagaaccaggaaaagaattggcagctagaacggctgaattagttttcactgcacaacctgatatgaatttagcaaaagcattttacagcgatttaaaatcccgactcagtcaatatgaaaggcactataacaatattttaattatgccggggctgtgcttttttattggctctgatgaagagagtgccaaaaagaaatttaacgacttgcaggcgcttattcaccctgaatttggtctcagcatgttatctgatttgctcggtggtattgatttatcaggctacgatattaatcaacctctgccagatcttcctgtttctaatgggaatcaaagccgtcgggcgattattgaaaaaatggccagatcagagtctttaacgattaaacagttatacgaaaaaatcattattgccagaggccatttaatttgtattggctcttaccaacaagttgctgaacaaatggtgcagtggctacaggaaaaagcctgtgacggatttaatcttatgcctccttatatgcccggatgtctggaggagtttgtgactcatgttgtacctgaattacaaaaacgaggagtgttcaaaatgggttataaatcagggacattaagggagaagctgaatattcccaaaccgcccagtaaatttcacgtttaa

SEQ ID NO: 7002 - DNA, 741 bp, Photorhabdus luminescens
atgcggtgcggaatgtcggctttaactgactcagctgttaaaggtattcctgataacgaaacattggatattaatagtcgtttacaaaatattcatgagataaaattactcactaaaatgccggttattatggatgctgacacaggtggacgggttgagcattttgtccattatgtcagaaaaatggagcaggtaggtattgatgcagtcattattgaagataaaacgggcaataaaaggaattccctgtttggcaccagtgttaaacaagaattggctgatattaaagaattcagtaacaaaatagctaaaggtaaagctgcacaacaaaagagccgattaatgatttttgcacgactggaaagtttaattgctggttacggaatggaagatgcattggagagagccaatgcctatgttaaagcaggtgctaatggcattatgatccatagctgccagaatacgtctgatgaagttattgattttagtcagtcattcagaaagaaatatccaaaattaccactgatatgtgtaccaacgacttattcagcaacttatcatcatgatctgagcgaagcaggttttaatattattatttatgccaaccatatgctcagagcggcttataaagcaatggaacatgtatctcacgaaatattaaagtatggacgttccgcagaagtagagaaagattgcataagtataaaaaaagtcatcaatcttattccttatgcatcttga

SEQ ID NO: 7003 - DNA, 216 bp, Photorhabdus luminescens
atgaacacaaccaaagtggtgggcattgatctcgctaaaaatgttttccaggtctgtgtctggttaacggataactccgtcgcctggaacaaaaaagtctcacggcaaaaattgctggatacactctgggcgtttcctcccgatacacttattgcgatggagggcctgtcagagtgctcattactggggaagaacgctacaagccatgggctatga

SEQ ID NO: 7004 - DNA, 540 bp, Photorhabdus luminescens
atgggctatgaaatcaggcttatcccgacgcagcatgtcaaggcactctgtaaaaatcagaaaaatgatgccaatgatgcgctggctatctgtgaaaccgcctgtcgtcccggtatccactttgtgctggtcaaaacccttgaacaacaggatatcaaagcactatgcagtgcccgacaacttaaggtggaacaacgtaccgcactggttaatcaaatccgggcgttgcccgccgagcaagggatcgttatccctgcgagcatccagcaactccggcaggctttacctgatattttggaagagggaaaccattcattatcctttgtcctccgccgtctgctccattcgctacaggaagatatgcggcgatttgatgcccgtattcacgaaatagataaagaaattcagacggtatcaaaccagcaatcaagttactcccacttactaaccattcccggtgtggtgccattgattgccgcggcttttatcagtgaagttaatgcagaacaattctcgcatggccgacagctctcggcctag

SEQ ID NO: 7005 - DNA, 129 bp, Photorhabdus luminescens
atgaccaaacagggtaaccgtcacctgcgaacgttaatcattcatggtgcccgtgcggtgatgcgctgttgtcaaaaacgcgatgatggcttaggtgagggtgaccatctcattaactaccggctttag

SEQ ID NO: 7006 - DNA, 429 bp, Photorhabdus luminescens
atggattacagatatggcagccacacggtatttcagattgaataccattttgtgtgggtaacgaaatacagatacaaagtgctgacaggagaagtggcaagtcgagtgcgagaattaatccgtcagacattcagctcctttgaaatcagaatattaaagggagttgtgagtcaagatcacgtgcatatactcgtcagcagtcccccaacattagcgccaaatgaaatcatgagaaggctgaagggaagaacggccagtaagctgtttgaagaattttcgcatttgaaaaagcggtactggggccaacatttttgggggcgaggctatttttgtgcaacggtggggcagttaacggaggaaatgatcaaaagctatttagaacatcattttgaacccaatccgaatgataatttcaggatggataattga

SEQ ID NO: 7007 - DNA, 651 bp, Photorhabdus luminescens
atgagtgtaaatccagtcatgccaagggatgagaccattagcgccagtgaaattatcagccgtatcggccagcttacgcgcatgttgcgtgatagtttacgtgagttgggattggataaaactattgctcaggcggctgaggcaatacctgatgcaagggaacgtttggactatgttgtgcagatgacagcgcaggcggcggaaagggcgcttaattgcgttgaagcggcgcaacctcgtcagaatgagttagagtcatcggcaatatcactgaaaaagcgttgggatgagtggtttgaaaacccagttgagatgcctgtggctcgctcgttggttatagatacccggaattacctcaatacggtacctgaacatactgctttcactaacgctcaattgctggagatcatgatggcgcaagactttcaggatcttaccggtcaggttatcaagcggatgatggatgttattcaggaaatagaaaaacagttggtgatggtattaatggaaaacatgccggctgatcaggtgataaaaaccaagaaagaagctgacagtttgctaaatggtccgcaggtgaatcaaaatggcgtgggtgttattgctaatcaggctcaggttgatgatctactggatagcttaggtttctga

SEQ ID NO: 7008 - DNA, 390 bp, Photorhabdus luminescens
atggcgaataaggatctgagatttttggtggttgatgatttttcaaccatgcgtcgcattgttcgtaaccttttaaaagaattaggctttaataatgtagaagaagctcaggatggggcagaagctttggctaagattcgtgcatctcaatttgattttattatctctgattggaatatgcccaatatggatggtttagagttactaaaaatcattcgtgaagatgcccaattggccaagataccggttttgatggtgaccgcagaagcgaagaaagaaaatatcattgctgctgcgcaagccggggccagtggttatgtcgttaaaccttttaccgcagctactctggaagaaaagctcaacaaaatatttgaaaaactgggcctctaa

SEQ ID NO: 7009 - DNA, 1053 bp, Photorhabdus luminescens
atgaataaaataactgttctttgtgtcgatgattcagcgcttatgcgtcaaatcatgcgagagatcatcaatagtcactcggatatggaggtagtggcttgtgcgccagatccactggtagcacgtgatctcattaaaaagcataatccacaagtgctcacactggatgttgaaatgccacgcatggatggtattgattttctggaaaaattaatgcgcttacggccaatgccggtggttatgatctcttctctgacagccaaaggctctgaaatcacattaagggcattggaacttggtgctgttgattttataaccaaacctcaattgggtattcgtgaaggcatgctggcttacagtgaacttattgcggagaaaatacggacagcagcacaggctaaattatctgtgccaataatcacaccggtaagttctgctcctttaagttttaagcctttgttatccagtgaaaaactgatagcagtaggcgcttctactggaggaacggaagcaataaagaatttattgcaaccgttacctgtcactagcccggcactccttattactcaacatatgccacctggttttacccgttcttttgctgaacgactgaataaacttagccaaattaccgtgaaagaggctgaaaatggtgaacggattttgccggggcatgcttacattgctccgggtgatcgccatatggaactatgtcgcaatggtgctgattatcaggttctgatcaccgatgcaccggctgttaatcgtcatcgtccatctgtagatgtgttgtttcgatcagtggctaaatttgccgggaagaatgctgttggagtgttactaaccggcatgggcagtgatggcgcagcgggtttactggagatgaagcaagcgggagcgtacacgttggctcaggatgaagcaagttgtgtggtatttggtatgccaagagcggcaatacaaatgggggcggtggacgaggtcatggatatactcaaaatgagcaagagaatgctggcaaaaataagctcggggcaagctgtccgtatttaa

SEQ ID NO: 7010 - DNA, 888 bp, Photorhabdus luminescens
atgaaatcaaatttaattgcttcagtgacaagtttgccatcttcgccactgcatcacatgattcagcgttataccatgtcagatgcgcattttgagcgcatctgccagctcatatatcaacgtgcgggtattgtgctagctgcacataaacgggagatggtttacaaccgtttaattcggcgtttgcgtaccctcgaaatacgtgattttgggcaatacctgttcattcttgaaaatgatctgaatagtgaggagtggcaggaatttatcaatgcattgacaactaacctgacggcgtttttcagggaagcgcatcattttcctctgttagctaaacatgcaagtaagaagaatggatcgtaccgggtatggagtgcagcagcatcgacaggagaagagtcctattcgattgcaatgacactaagtgatgtcttaggggagcgttttcaccgggcaaaaattattgccagtgatattgatacccatgtattggaaaaagcacgcaaaggggtttatcgactggatgaattgcgtcacctgaccgatcaacagagaaaacgttacttttttaaagggattggatcttatgagggttatgctcgtgtccggccgcaacttgctgacatggtgacattccagcatctaaacctgttagatcccaattggccgtttgaagagaagtttgatgccatcttttgccgtaatgttatgatttattttgataaaaagacgcaggaacggatactgcgccattttgttgctttgttaaaacctgatggattgctctttgcagggcattctgaaaatgtcactcaaataagccgggaattctacttgctaggacagaccgtttacggtgtaggccgggcaaggagaggtcatgaataa

SEQ ID NO: 7011 - DNA, 1635 bp, Photorhabdus luminescens
atgttaggcaggcttcgtatatcaaccagtttatatctgttactgatgatgttttgtgtaatgcagataatctcaagtggtttatcacttggaatcattcacgcagatcaatcttatattgagcagattgatctgggaacacagaagagggataccttagggttgagctgggcagctctgctgcaatcgcgtaatacacttaatcgaatcgctgtagggaaaacgttacaacaatctgaggatcatattggcagtatggttgctaatgttaaggaaaccttagatagggctgagatgcattttgctgagtttattgcgctgcctaaattgaatgacgaggatggtagtagtgtattgctggcctcggtagaaaccagttataaggaatatatcaacgcgcttagagaactctcggcttttttagaaagtggtaattatgatgcattcttagatcagccgacagaaaagtatcagcagcaacttgaatctgatttcaatcattatatgcaatatatcggtgaggtgattacaaccgccgttcaagatggtcgtctttattaccaaatttcagttgccatgtttgtaggtgcgatcttaatggtactggttgttgcttgggcggctcattggtggttgaaaaagaatcttctcagaccttttgccaatatgcgtagtcacttccagaatgttgcggaaggaaaactcaataaagaagtttctgttttcactcaagatgaaattggtgaagtgttcctcaaattacgtgaaatgcaacgttcactggttaattccattacgttggtaaaagagaatactaacttgatgtataacggtattcaggaaattactcagggtaataccgatctctcttcccgcactgaagagcaagctgcatcactggaagaaacggcagccagtatggaacaactgactgcaactgtgcgtcagaatgcggaaaatgctcgccaggccagtgaattggcggtatctgcatcgaaaacagcctctaaaggaggcgaactgaccgttgatgttgtggaaacaatggatgcaattgccaatagctcacagaaaatcagtgccattatcagcgtcattgatggtattgcatttcagaccaacattttggcactgaatgcggcagtagaagctgcacgggcaggtgaacaaggccgaggtttctccgttgttgctggtgaagtgagggatcttgctcagcgaagtgccgaagcagcgaaagagattaagacattaattagtgaatctgttcagcgggtaagccaaggttccgagttggttagtcatgcagggaagaccatgaatgaattggtcgtttctgtaaaccaagtcacggatctgatggctgaaattgctgcggcatctgatgaacaaagtcggggaattcatcaagtagcacaagcggttacacagatggatcaggttactcagcagaatgcggcattggttgaacagtcagcggcggcggcggcggcacttgaagatcaggccgatattttggtgcaaatagtggcacaatttgagttacccaataattcagaaaataagcttgaaaatgaactttcactgacgctgaggtctgcggatagcgaaggggcagtcaatcagactcactga

SEQ ID NO: 7012 - DNA, 1695 bp, Photorhabdus luminescens
atgtttaaccgaatgaaaatagtgaccggactgatggcggtcatcatattatttggtgctctgcaatttatatccggaggacttttcttccatgagttgaaaagtaacaaggaaaatctagaaatactggataaaatgcgggaacagcagacatttttgaatgacacttgggttaatttgttacaggcccgtaacaacttgaaccgtgcgggcattcgttacatgatgaaaaaagatgagggagtcgataattactacacactggagcagttactgacagatgccagaagtaacctctctatcgcagagcagcgttttgaacaatacgaacagaccgctaaattgcctattcatgaatcagaaagtcttaatcgccttaaaaaagcctatgatgtttatatttcagcgcttcatgaacttattgttctgcttgaacatgatcgggcggtagagtttttcaaccaaccaacgggcaaatatcagagcgcttttgaggaagaatataacttctatttgacccaaaacgatcatctctattctgatgtggtatttgatgccagtatctcttacagaaatgcggtgattatgttgggtattatcatgctgattctggtttcagccatgatttttagttgggttagcattaagcatagtttgctgaatccgttaaacaaattattggagaatattaaggcactttctaccggtgatttgacacaaaatgtaactgtttcaggcagaaatgagatgagtacgttggctgttggcctgaagcatatgcaaaaagaatttatcactactgtcagtagtgttcgtcaaagcagtgaaagtatttataacggaaccagtgaaattgctgctggaaataatgatctttcttctcgcactgaggaacaggttgcttctttggaagaaaccgccgccagtatggagcaattgacagcaactgtacgccaaaatgcggaaaatgctcgtcaggcaagtaacttagctgatagtgcttctgaagttgcacgccagggtgggaaagtcgtggcgaatgttgtacagacaatgcgtgaaattgccggtagttctcagaagatttccgatattactagtgttattgatgctattgcgttccagactaacattttggcactgaatgccgcagtggaagcagcacgtgctggtgaacatgggcgaggttttgctgttgtggcaggagaagtacgtaaccttgcacagcgtagtgctgaggcagcaaaagagatcaaagcattaatagaagattcagtaagccgcgcagataccggttctgtcttggttgagagcgccggtgaaacaatgaataacattgttagttcagtcacccgtgtcactgacattatgggtgaaattgcatctgcatctgatgaacaaagtagagggataactcaggttggcctggctatctccgaaatggatcgtgtaacacaacaaaatgctgctttagttgagcaatccgcggctgcggcggctgcactggaagatcaagctgctggattgaagaaactagtttctttgttccaattaccgaatcttgacgataaatctcaatccgaaatgaaaattgagcatttgcctgtggctaagactcctcctgcaaaatcgaatccactggtgttgaagaaagccaacaatgtggaagaacaagctaattgggaaacattttaa

SEQ ID NO: 7013 - DNA, 498 bp, Photorhabdus luminescens
atgtcggccatagaagcgtttaataaattgtcaggagaaactgccggggaaggatatttagtttttaccctaggtgatgaagagtatggtatcgaaatactgaaagtacaggagattcggggctatgatcaggttacccgtattgcaaatacgccagcattcattaaagggataaccaatctgcgtggcgttattgtgcctattattgacctgagaattaaatttgctcaggaaacggttacctataatgataataccgttgttattgttttgaatctgttaaaccgggtggtgggtattgtcgttgatggtgtttcggatgttttatcgctcaaagctgagcaaatctgtccggcacctgaatttgcagtaacattatctaccgaatatctaacaggattgggttcacttgatgatcgcatgctgattttggtggatattgagaagctgcttaacagtgaagagatggctctggtagattcagtagccaaaagttaa

SEQ ID NO: 7014 - DNA, 2052 bp, Photorhabdus luminescens
atggatattaccgcgttttatcagaccttttttgatgaagcagacgaattgctggaggatatggagcagcatctattgcagctcgatcctgatgcgccagatcaggagcaattgaatgctatttttcgtagtgctcactcaataaaaggtggcgctgcgacttttggttttatcaaactacagcaaaccacacatgttctagaaaatttgctggacagtgccagacgagatgaaatgagtctgacgactgatattatcaacctgtttttagaagcgaaagatattatgcagcaacagttggatgcctataaaagttctcaggagccggatgaaagtgcgtttacctacatctgtgagactttgcgccagcttgcattggaagtacagagagagaatgaaggcggggttgagtctgccacagatgcggtgatgccagaggtgcctgaatctgagccagaattaaaatcggagcctgttgcgactgaaaatcagcaaggtagagttcgggttcatctttctggtctgaaagagcgtgaagtttctctgatgcttgatgagctgagtaatctgggggaggtttatgatgctgaacagactcgggatagtgttgaagcatcattggtaacatcagccacagaggatgatatcacggcagttctctgttttgttattgaaccggaacagatcactttcttgccggtagctgaacccaaagacaaagttaaaaataaagatacagatacagctaaagccgttaaaacaactgcaccggaaaaaggttccacaccgcctgccgggcgtcctgcgccgataccaccggcgggatcgccacgtcaacgggcagaatcttccagtattcgggttgcggttgagaaggttgatcaactgataaacctggttggtgaattggttattacccaatctatgttggctcagcactgtaacgctcttgagccgactttgcatggcgatttgctaaattgcatggttcagttacagagaaattccagagatttgcaagaatctgtgatgtctatccgtatgatgccaatggaatatgtgttcagccgttacccgcgtttagtcagggatcttgctagcaagctgaataaaaaagtggatctaactttggttggcagttccactgaattggataagagtttaatcgagcgcattattgatccgctaactcatctagtccgtaacagtctggatcatggtattgaagagccagaagctcggcttgctgtgggcaaacctgaaatgggcaacttgacactttctgctgaacatcagggcgggaatatctgtattgaagttgtggatgatggtgccgggttgaaccgtgaaaagattctggccaaagcgatatcacaagggttatcagtcagtgaaaacatgagtaacgaagaggttgcgatgttgattttcgcaccgggtttttccacggctgaagttgtaacagatgtatctggccgcggtgtaggaatggacgtggttaagcgaaatattcaggaaatgggagggcaaatccagattaacttccaggcaggtaaagggacagtgacgcggattttgttacctctgacactggcaatccttgatgggatgtcagtgaaagtgaatgacgaagtgtttattttgccgttgagtgcagtagtaagttctcttcaaccgcaggaagaagatatttatcccttggcgggagatgaaaaattattgcatgtcagaggagaatacttgccactcattaagttatatcgagtttttgatattcctgatgcaaaaacagatccgacgaaagggattattgtgattgtacaaagtgcgggtcgtcgttatgccttgctggttgatcaattagttgggcagcatcaggtggttgtgaaaaatatcgaaagtaactatcgcaaggtacccgggatctccgctgccacaattatgggagatggcagtgtggcgttgattattgatatttctgccttgcagcaactcaatcatgaccaattggcactcaacaaagctgagttattagcaaaaaataagcactga

SEQ ID NO: 7015 - DNA, 1002 bp, Photorhabdus luminescens
atgaaaacgcgtaacgtctcagtcattagggtaaaaagacgtaaaaggaatggcatcaaacatcatggtggttcatggaaaattgcttatgctgattttatgactgccatgatggcattttttctggttatgtggctgttggcaatttccagcccacaagaattgacccgaattgcagaatatttccgtaccccgttacaagttgcaattaataaaggggagcgtagcagtgatagctcgaatcctattccaggaggaggggaagatgtgcttcatcaggaaggcgatattctgcgtcaggttgaagtcgttgaagctaatgatgaggctcgcaagttaaataggctgcgtgagcaacttgatcaattgatcattacggatcctcgccttaaagcattacgtccacatctgttgattgacatgatggatgaagggttacgtatccagattattgaccgggaaaaccggccaatgtttatggttggcagtgcaaaagttgaaagttacatgagtgacattttgcgggctattgcacccatcttgaacgatattcccaataaaattagcctatccggtcatactgatgacttgaaatatgctaatggtgagcgtggttacagtaactgggaactctccgcagatcgggcgaatgcatcaaggagagagctgttgataggtgggctggatgaagtaaagatattgcgggtagttggcatggcttcaacggttcgtttgaaacaggaagatgccagtgcaccggttaaccgtcgtatcagtatcttagtgctcaataaacaagcggaagagcggattgaacagcaaaacaccggcagcgactccttgattattaatgatagtaaggaaattcacgaggtgattggaaaggattcggctgaaagtaggccaacacagcagtccaatgaaatcacagtattggcccagccagcaccagcgtcgcagagtgctgagcctaatcgtgtaccgaccaaggtgacaaagtaa

SEQ ID NO: 7016 - DNA, 888 bp, Photorhabdus luminescens
gtgttagtacttttaggatatatcgtagtttttggtgcggtaatcggtggttacctgattgtaggtggtcatttaggcgcactttatcaacccgctgaatttttaattatcactggtgctggtatcggtgctttcattgttggtaacaacggaaaagcgattaaggcaacattacgtgttttgccaaaggtcatgcgtagatctaaatataacaaggtgatgtatatggatctgatggcgttgctttttcggttgttagcaaaatcccgcatgcatggtgtcttagcattagagcgagatatcgaacatcctcagcagagtgatattttcacccagtatccgcgtttgcttaaggataagcatttgatggattttatcactgactacatgcgattgattgtgagtggcaatatgaatccccatgaaattgaagctttgatggatgaagaaatcgaaacttatgagcaggagagcgagattccggcaaccagcttgatgatggttggagattctcttcctgcttttggtattgtcgctgctgttatgggggttgttaatgctttggggtcggcagatcgcccggcaggagaacttggcgtgctgattgctcatgcaatggttgggacattcctcggtattttgctggcatatggttttatctcgccattggcaacattgctacgtcagcgcagcggtgaacatcttaaaatgatgcaatgcattaaagtgacattattgtccagcctgaatggttatgctccacaaattgcggttgaattcggtcgtaaaacactctacctcacagatcgcccttctttcactgaattggaagaacatgttcgccgggtaaaagcacctgttcagcaagaaactgaagaacaggtatga

SEQ ID NO: 7017 - DNA, 582 bp, Photorhabdus luminescens
atggccgagaaaagtatagttcaagaagctaaggatatacaattggcgatggaactcatcactttgggggcacggttacaaatgcttgaaagtgaaacacaattgagcagagggcgactaattaagctttataaagaattgagagggagtcctccgcccaaggggatgctgcctttttcaacagattggtttatgacgtgggaacagaatattcattcatcgatgttctataatgcctatcgttttttactcaagagtggttattgtgaaggtgtagaggctgttgttaaagcgtatcgactctatcttgaacaatgtcctcctgctgaaggggatgcaccggttttggcgttgactcgtgcctggacgttggtacgttttgtggacagtggcatgttgcaaccttcacaatgtcggacttgtggtggaacttttattactcatgctcatcaacctgtgaatagctttgtttgtagcctttgccaaccgccatcacgtgcagtaaaaaaacgtaaactttcctcagagtctgccgatactaattcacaactgctggatggacttgctcagcacgcagtgtga

SEQ ID NO: 7018 - DNA, 354 bp, Photorhabdus luminescens
atgagtacggttgaattgctcaaacatatttatgacataaatttatcgtatttgcttttagctcagcgattaattaaccatgaaaaagcgtcagcgatgttccgtttaggtattagcgattctatggctgatacgttgtctgaattgacattacctcagttggtcaagctcgctgagactaatcaattagtctgtaatttccggttcgaagagagtgaaactattcagcagcttactagggaatctcgagtggatgatttacaacaaatacatacaggcattttgttatcgactcatttgtttcagaagttattttcgaaaaaagacgatacgtcagtgaaaaaaagagcataa

SEQ ID NO: 7019 - DNA, 159 bp, Photorhabdus luminescens
gtggtattgagatacgctagtgtaggcgtttttgctagtaaaggtacagatagtgcaaaaaaagcgatagatattactaggcttgataagaatttaggggtgtcaaatgaagggccgttaagagaagagaggcgagtggaagtattatcaagtgcttga

SEQ ID NO: 7020 - DNA, 183 bp, Photorhabdus luminescens
gtgatgatattacaggagttgctaactttccttgatcccgtggaggggagtgtggtccctgttatttctgtattaagaaagagtaacacagcagcaggagttcttaccgaggataattctgctattactgtcaggatttgccatgatgtagggttagaattcaaagttattttagcattctaa

SEQ ID NO: 7021 - DNA, 171 bp, Photorhabdus luminescens
ctgtacccgcgtatgataccgatatcaggtttaccacgactaaattctgatatgagaatagcaatgttcaacagtcaatccagtgacaaaaccaaggctaaaaataccgcattgaacgacttttacctagagaagctattaatcaacaataccatccgaaactattgctag
